United States Patent Application Publication US 2014/0057251 A1 - sequence listing, part 190

SEQ ID NO: 387873 - DNA, 1503 bp, Cannabis indica
ttttgctttgtttgctctcctcaattttttttgaataatcacattattgtaaaccttttgaagtgatgtgatgactatactaaaatgttcttctaatagttcttagtaactagaaaatcttattatgccatatagcttgttaaaattatagatcagattgaagaacgattcgatatacaattatatttaacatgcatcatgtatcctctgtaaaatgctgttgtgatatgttgttgttacaaaatggaatgaatcgaatatatcatttgtggtaggaaaaattggttatggtactatgagcgaggctcttgcatagaagctaccttttgtttttgttcgctgagattatttcaatgaagagcctttcttgagaaatatgcttgaggtataattgctttattaattgttcttggtccttatatcactattgccaagaatttgatgagtttgggtgcaataattgtttgaacagtattattaaagtggtgttgagatgattagaatggatttgcttacttgccattgggcacctcttgaacatgcaattactttgagaccatgctatgaagcatgcatcaatggtggtgagatattatcctctttcaattttaaagttctctgccatagctgcttctcatggtaactttattattttgcattttcaatttcgtagttttgttgtatttaatggacatattagttgttagctgtatgggatgtactctcagtttagcatattacctacttattatcaaaatagactattttacatagacaaattatttaaaccgactctattaatccaagagatttagctttgctttgccaaaaggcatgacttagtgttcttttcaatacttgttgccagatttttattgagattgtctcgaattccagtcttttttatactttcaaattggtgattaggtggagaatcatattgttggagctccttgtggtgttatggaccaaatgacttcaacttgtggtaaagtcaataaatttcttgcaatggtgtgccaggtactcattgatcagaacaaccttggctttgcttctattactaaaataataatgatgaggcagaagtaacgaggttgtttttcttatatacttattattattattattattattagctattgtaagctttcatcatctttgtgtctagatatattttgtttcatttgaaattgtgacaataagttgcataatttatcatcttaaactgaaactttagtttgtaggtgtcttcaatctattgtctaaataaacacttatttttgttttaaatttctttaatttgggtatctcacccgatgagtattgcttatatttactgatttccatgtaggtgccgataggaagttacttttgccccctgattgtctatgctactagaccagaagttgttggtcgaagccagccattgtactcaaagatagaagaatagtcggtcattattatcgctttggattatcatactatgtacattgcttgata

SEQ ID NO: 387874 - DNA, 1620 bp, Cannabis indica
tgccttttaaattcgactattataattttagaggtgaaataaataagttattatagaccactttttaggattctttttattttgaggggacaaattgattgaaatttgtattaaaattgaattttgatggactatgtttattagataacaaatttgtccatattcgaattgagttgagagaaatcaaagcttgtcacttcttattaaataaatatataaatatttgagaatttttttgggtttgattcttcactataattaatacttttactaataattaaataataaaattaggatagatttgaactatacaaaatggacccaccttaaaaaaaatgatgaaatgtgtttccacgtaaataaaggtgaaatataagaagaaattaaaaaataaaatgaaatgaaaagattcttaacaaaaatggttggtggaaaataaaaaagaaaaaggaacctatatttgcaaagaaaatggacttttttattcatgaaaaaaagtggattttagattgctaacaaattatgtgttttactttataattattgcaacttattacatatagatagcttattagcataacatcataattaacattataattttgttttatttttctcaataaaaaaaattacatgaatatagattttagctctcatttcttccacttttaacaatttcaaatacttatatgttatccacattaattaagtcattgacaaacacgacttaaaagttcccatccctaaagacatatgaacaatgctacgtgttccaactgaaatagagctctgaatccacatgtcgtccgacaattggttatcaggcttacaacgttgctgctcgtaggcctaacaagcgccactgtatcaaaagccccatttcaatcaagattctgagcttttttgtaaatacatatctccacaacaaataatattagagttaaacatattgctcgcaataaagaggataatgagattcaaactctttatccaaataaaaaaaatatttattgttaaagcatagttatatagtgttgaggtagaacctccttaaatttataagtggactctctcttttaatgatgggcgccatccaaatccatatttaacacttataaatatagtgcacgattctatcacttattataccattagctaattacagtaagacgagatcatcacaatcttcttcctaactttaaaataaaatattaaaaaaaattaaaactttaaaataaaatatgtattctttattattgtaataaggtaataattttcttccaaaaggacaatggtaactatacaataaagttacaacttacactactcaagtcaagcatagaattgagtatagttggtttggtacaatgtattaaaatcttctagagatattaagttgcaacttgcataataaaacttcattgtgaagtaataaataatgggtggggacaaattttgaaagtgattgatgaaaatggatcttatggtttttgtgttgtgttgtgattttaaataaaggaaagaaagtagaggcttgggggtacttgaattgaacacttttttagacaaatgattgactccctttattttattgtgagaaaaatatataaattaaaaaaa

SEQ ID NO: 387875 - DNA, 1740 bp, Cannabis indica
cattctaaggccttattgtaaaaagacgtgtgatcgtaacacgttggtctttgtcaaataaacaatagatgtagatgcatcaatacttaagtggttttgattaatattcatattgtcgtttatactatcttgctgggccttggctcacgggtgctctaatgtgcaagaaaaggtaagtcagttgctggttagccatgaggtcaagggctttggtagtgcattgtacatgttcagcctaagctagaccacgagggttgggtctaccaagggaaaaaagttataatcttcacttttgccgcttaggtcagcgtgtaataatgacttgcaatactttgaaaagtttttgcgggatcctaaaataaaatgtgaacttttgaacgtttattaaagtttattgattagatgttgttatttttaatccgtattttttaaagttgaatttctgcacttggctctaatatattctgatttagcgagattagtgtatgattattcgttgttcgtggtgttgttattggtagggcgttacaatttggtatcaaagcaccaaggtttttaaacttcctgtagaccagctgaacatgtatgatcatcgtcaaagacaagctccactcgtggtgcactaagtattgagagtaaatgcttaactgcttttatgattaaatgtttaccacttttcattataggcaacatgtgatcatctagaagatataatgttataagagaatcataattagtaattatattgataaatgattattttataagaaaagtagtatctgtgagttagggttaaggcaataagtgtgtaagtgtggatttggtgtctgactcaccggggttattgattttaaggttatttgagagaaaatggaccctaatcaatcaactagaccacagggcaagcctgtagagcctggtaatgaccaaaccaatccattggcacccctgtgcctttgcgaaatttgggggataatgcgtgggttaacaatgctaatccacctgccgattggcagcatatgttcctcgaaacgcaaagcattatacttcgttaggaagatgagttgcatcgatttaggcaaccgtcccaggcagctcctattgaaccagtgttaccaccagctcctgttccagtggtgggtaaccctggatttgtattgccacaccaagaatttatttttgagcattttgtcaagctacaacctctgacgttcttgggaggtactaatatcattaaggcaggatattggatgagcactattagccatattctagatgacatgggagtaacgggaactgaacgagttaattgtgttgcatttatgttccaagaacatgccagtgtctggtgggatattgtgggacaaactaaaaatgttagtgctatgtctgtttgagaaaaaaatttataatattgccatcagattttcacacatggaagattttgttaaattaactccagggcagaggacagtggccgagtgtacactagaatttgatcatttatctaagttttctagcgatctagtaccaatggacttcactcagaaacagatgtatgtaaggggactgaatgccactataagtgaggatttaaaaattaccaccgatcatgatacattatacgagaaagtggtcaagttagcattgattgctgaagtgacagaataacatgtgatcaaagaacaggctgctaaggatatgccgtcatagacatcgaaccctagtgttggtggtagt

SEQ ID NO: 387876 - DNA, 617 bp, Cannabis indica
ttttttatgtacaggattgggtttacaaatttaattcttgagattattacaaattagtgtgttactacatgcacttattctctcattaataacattaagaacactatttatgataatttgttgaagatattcaaagatacacaattcaatcattttttggacatttcgtagtacaaattctatccttaaattgtccatattttattgagggaggttaataagcccaatgcaaaagaattttaggcaaaagttgttgactattatattcgatttagtgcagaggagttctatttgatatctggtttggaatgctttggtaattgtaataaaatgttatttagccaagaatcaaaccagttgatcgatatatgctttcctagaattaaacccattgaccataagtctattaaagatgcatttttgggcattaggtggggcaatgacaattctcttggtttgaagttgattgttcagtatttcataccttattttattttaagtaacacaattgagaaggaagtccataggtaagaattagatattattgatagaggtcggtgggatgagtattgttggggtagggagtcgtttgagttgataataaattcattcaaggg

SEQ ID NO: 387877 - DNA, 557 bp, Cannabis indica
aagagttacagatcagattttctattttgttagataataactcgggtcataatcatttggtcataacacccaaggctggccctgaacataggtaatagaaaaaattttgtccttatttaaaaagaaatatggtattttcaagatcattaaaaaaatatatatttttaaaaagaaatttgttttgagcctagataggccctaagcacaaatctagtctgcctatactcagaactgggcctgacaacactttttactcaggctattattatgtttaattttaaaaattacaagttcgaatttttaattaactaacagaggatgcatttgataacttttacaaaagtcctattagccattttttttagtcttaataatgattttttttttgttgcaatgtctatgaatgaatacacagataggattgatatatggttgtcctgttgaagacattgttactggcttagcaatccaatgcagaggttggaaatctatttactacaatccgaagaggtacgcttttgtcggtgttgccccgacgacattagagtttgctcttg

SEQ ID NO: 387878 - DNA, 1571 bp, Cannabis indica
agtaagaacaagtaagatgcaaagagatctttcagagacacaaaaatgagggttttaaaagttggaatatgggaaaagttgacccgaaaccctaaaaggggttaaaaaacaaagtttttccaaacaagagatgtcgagacctcgctgtaccataacatttccctaccaatctgtacccaaaccaagggacgtgcaccaccatcacgcacatcaggaatgcagcattccaccaactcataacgcgtattatgttataccttacaagttatgaagctttcctcttatagaaaaaataaaataagttatcaagttagctattattttgcatattgttacacgagttagctattagtttttcacttttgttattgaacaattttaaattattaagttatttgagctatgaaattattgatgttattggagttataatagttatttagatgattgaatgaatactcgtggatttactatagacattaattacatttgacaagataagtccttttacattttttttaaaaaaaaaattcggttgaaaatatttttgttatagtaactattgttaatctttttttataatttctatctattgatgcttatttagtttatttgtagagaaaataaagtataaatttacaataatatttatttatcatttttatttttcatcccactaatgatagtttgtttatgcatgtgccgttaaaatacaatcgtcccttcaaacttctagagaaaggatagcaagttttcattataaattgtgtgacactaatgacattagattgcgatctgttactaagattttacaattgtaatttctttttctatcgtatttctctactcttataattttaagatcattgttagaaatttttacaagtttgtcatctaaatttctatgagtgttcctaatctgtgttgttcatgaattagttgtacatactcttctgattgatgaacaacttatttggctagatatgaagatccatatattttttgttggatgtatagtactacaacatttttactcagtaccggcggaagtaataccggcggagccaaactgccggtattaatggggttattaccggcggaaaaggcattccgccggtattacttttgaataattaaaaattaattaaatatttatttaaatttagtattcccggcggaactttagtattaccggcggattttaccgcccaaatttttgaaaagactaataccagcggattattgccggcgggttccgccggtattagtcaggggattctgaccgttttattaataccggcggaacccctattaataccggcgggtcccgccggtaataaatgtctatataatcccccccctcccataactcagaaaacattttccatttccccactccatttcacaccaccccactccgacccttctcctcctcctcctcctccctaagctcgaccctcctctgccatagtccccttctccgagtcgtcctcctccgccatagtccgcccgtttgccaccgtgaagcgccattgcaccatcattttttttgacaggtaatgtgtttttca

SEQ ID NO: 387879 - DNA, 1344 bp, Cannabis indica
aaaaaaaaaaaattcaaactttcgaatatagcttaatacaattttttaaatatatatatatgtttaataaaattatatttattttttactttttaaaagaagaactaaaattttgaaaacaaacataaattatttgaaaatctgttcatatataattatttaatcatagtttattttgtacttttttttagtaatatttactttatttttttattattattttctcccattacattttctgactttactatctctattcccacttaaaatataaataaaataaatttacatactttttcatttttctgttttaaaatcaaaaaacaaaaaatagttatttaagtttatttttcaaaaataaaaaaaaataaaaagaaaactattttgaagtgtaaaaattaaaaagtcctttttatttttgtggttttaaaaatttaaaatacaattttaccgaatatattatttaataattttaaaaaaaatacatgaagcacttttttttttttttgagtatagtgtaatggtattttacaatcatttaatagcttaatagcttcaaggtcctaggttcgaacccatgacctctcatgaaacacttgattatataaacacaagtaaacacaacttagttaaacaaaatccaaccaaagtcacgtctcaaaataaaatatagaaaatttagccaaatgtgttacctttgtctagtaacaaaccaacaaaactcaagacaaacactttcctcaaagaataaaatacaactcaaggcatcaaactttaaaatctaatacaatagcaatcaagacctgaatcgccaatagctaacttaactttctaataaattagcacccatcaacacttcaaaaaatcaaaatctaatactgatcaaacttaatgttatcaaaacaaaacaaaaaaaaattaaatacttgtcctaaaatcaaattaagattgccttaaaagtaacccaatgtcttactttcgagaagcttacataatgttgacttaatcttattatcttctaataggataatagttcataagccaactaaacttgtagtactcaacactgctgcatcaaccataagtattatatggtaatattcttcttgaacacttcttggaaaaactactgaacaattctcattccacttaagagtttggatactattattggaactttcatatgctgatacgatagattcataatagggaaattatagtaaatggctccaaatcataggagtatgttagtttatgtcctcatttcaaaaaaatatagcaaatggccctaaatcataagactatgttagtaaatgacctcatttcaaaatcattattattttt

SEQ ID NO: 387880 - DNA, 1385 bp, Cannabis indica
tgaactgaaagatctcctcctccggcgattcctcctgcacacgaggggacggcgtatgaccgtttcctggctctgcaacaaacttcgacggtgcaggatatcggcagcagttcgaggcattaacggcggtgctgggtacggtggcagagccgttgctggagtcggcgttcatgaagggcttgaactcggagatacaaggaacactccgactccttgaaccagtcgggttggagaagacaatggagcttgctgaaatcgtggaagctaatccaaaggtgatgcgggcttttggaagtgggccgagtaaattgataagcccaactagaaattcatcttttaattcaaatgggctcactcaaagaaatgtaatggggcagagtgggacaagtaataaaagcccatctgcacaaaatagcacttatcgtgcatcaactccattaaaccagagaagagaaatggagttgggaagaggattcaagagacttactgaaactgaggtgcaagagaaaaaagctaaaggagtttgtttcaagtgtgatggaccatggacaaggggacatcaatgtaaatctcctgaattacaaatcattttggtgcaagatgaattggaagaaatggaagagttgactgccatggaggaattgggtgttaatgagcaacatgggttgactgaagctcaagtggtggaagtgtcacttaattctgtggtgggattgacttctccaaagactatgaaattggtgggtagtgttcatggccaggaggtgactgtacttattgatagtggagctacccacaacttcatagccacatccttggttactcaactcaaactccccatttcagatacggaatcatatggagttcaaatgggtaccgagtaagcggtcaaaggtgcgggagtttgtgtaggagtgcccgtctctttgcaaacggtagaaatcattgatgattttctaccattagctttgggaagcaccgatgtaatattgggggtccaatggttggagactttgggggacactcatcataattggaaggaaggtatcatgaagtttaagagaggtggccaaaccgtggagctatgtagcaacccagccctccacaaaactcgggtctcgctaaagactatgatcaagacgattaaggaggaacatgaagggttatgggtggagcttggtcatacaactattgtgggagatgtggaggatattccagcagctgtatcggagttgttacaacgatttacgagtgtttttgacatgccaaacaagctgccacctacccggcaccgagaccatgctatttgccttcgccccggagtcgctctgattagtattcggccataccgttacccccatgtgcagaaagatgagattgagaaa

SEQ ID NO: 387881 - DNA, 1340 bp, Cannabis indica
aatcattgggcgggttgaactttctctaatttttgattgggcgggttacgattaaatatttacaacccgatatttatattgggttgataaaaatatgctataacccgactaaaccgaccgacgtacacccctaggatgtaggaatgcacatttctcctacggggatagttccttagggacccgccctaaatagggcagggattctccatttaaataagaagcgaggattattttttgtccccgaatgttaaacgagatggggatggatcacactccccaccccgacggagacccgtttaatattttattttatatttctagtaatattttatattttataatttatgtttatattttttagtatattagtattctttttatgaattttaagttgtgttttgaataataattagtttattgaataataattaatgtgtaatattttaattttttatatagtgtaatatttatatatattaaaattttaattataaactttatttttttatttaggaaaattctctgtcccgttcccgccccataggggattccctgccccatcctcgataggaagataccctagtttggtgagacatggtatcccttaccagggacgtcaccaaaataacttgggaagaatttcaagagctattttatgcaaagtattatagtgaggcagtcagtagtgccaagagaaaataattcacgcacttgacttagaagaaaaatatgacagtcacggaatataccatagagttcgatagattggctaagttagcttcgagaattgtgctaactgactttagtaagaaaaaaaaaagtatctggatgggttgaattctaagattaaacaggacctgatgattacaacggatgatgccactacttatgatgatatggtaggaaaagcactcctagctgagggcacagttgagtgtattcaagagtcccaagggactcagattattggtggagacactgctcctcctacctctagttatggtaggggtggtaatgactcaaccactaaacaaaagagaaaagtttcatctgcgtctagtggcttgagccagaacaataggttctgagggaactaaggccgtgttaaccgtcagggagggtctgaaagccgatacactaaccaaaatgccccaactataagaagcatcatttgggcaagtgtagaggtcgaggatgtttctagtgtggtgtaattagacattataaaagagcatgcccacaactaaagaaggaagagcagaagacagaggcgaagcccgctccagtaaaggtgcttactcttacttaggctgatgttgaagctgttgggttttgtgccc

SEQ ID NO: 387882 - DNA, 968 bp, Cannabis indica
aaaatataatataactaaaaaaaataaacaaccatagtaaaaaaaactagactaaaaaattcatccttatatattgaaaccgatagagtttgcagtacttttatatttatttttgttttgacactcttattagaaagatatatcaactaattagtgggctttaattacaaaatttaaacaatcaagattctagacaatttagaatataattaaactcaataatattttttccaatataagatttattaagtgacaacatgtgataaacttttttcaattttttttttaaaaatttaacaaactacatattgttttttttttctgacagaaaaatgtacacaaatattgtctatatatttgctgataataattaagaattttaacgtttgctaacaacttaataataccatatataaaaaggatttccctacagaaataataataataataataataataataataataaaagaagtatgagtctctgaaagaaagaaaagttgtataagatatatatttatagggcaaaattatagtaggacttagcataagttctctaccggtagggaagcttttttggccattaattttagatcatgtggtcattatgatataaggtgtatactcttacgataggactgcttctatacaattaaaactttatacatttaataataatatataattatatatttattttaaaaaaataaaataatattaataattaaaaaattattaattattaatttttaatttaaattattattattatttcaaagttaatttaaattgtatttatataggtatttatttttaaaaaataattttatttacgaattttgctatcaatttttttataaccttattttcggcgtattatatttttataaatttcttaaaattttacaagatgtcttaaataattgtaatgtacacgtgcacgaccatgaaaaaaaaataaactaaaa

SEQ ID NO: 387883 - DNA, 1221 bp, Cannabis indica
agaaccttgtgtaaggaggattgcagagactgcacttctagaaaactcaaagtgcctcacattaagttagatgaaggaagaactagttcgtgagcgcatttggaaaattacaacaaaatgatgcaagttgcccgagtcagtgacaatgccaagtgcttatgtttttccttaacctcgactaagtctgcagaagattggtggaagcgactagccaaaaaattaattgatagctagagggacttacagtcgtctttctgcaaacagtttattgttgcatgtgacaaggacatggaacttggttctctcactaatgtcaaacaacaacctaattaaatcttaaaggctttaattcaaaggatgatggatgtagttcctcagactaaagttagcgatgacatgaaattgatggctctccaatccggattagctattggctctctactattgggagaggtgcacagaaagagagccaaaactttgagtgagtttatggtgaaggcccaaggaattatcaacctagaggattccgacatacaggatcttagagttcctctaactccacctccttccattgatactccaaacttcacacccaaagttctggctccggccttaactcttctacaatcttagttttccccaaccgtttacggacctgctacttccaatctatttggtacgtagaccaatttttctaggtacggggcagcatagacgggatgtagtgtagctcttggataagcaaaaactgaggcccaagagtctaatgtgagccaaccctgaaaaaagatagggggtaaaagccacaattagaatgattctttaaaaaagccacgaaaggagtatgaccaaaagtacactgagtatacaagtctaatagacactcaagaaaacatgtacaaagagacctataacatggtccattacaggaaacctctatgaatgtcacatggaggaaggaatagatgtgatcaaaatgagtatgattatttaaaagttgagattgaaatgttggtccaagcgggatctctagacactgggtccaaatcctgatcatctatccaagatagagggtcatacacggacacatgattgttctcgaatagtagaacgttgtaaatcctctatagggggttggatgttctcaagctcaaagagcatcattgcctgtactccctgctctaccagcctcggttggggtggcattacttgcaccaggac

SEQ ID NO: 387884 - DNA, 1328 bp, Cannabis indica
acttttcactcgagtgtctatttcgaacgttcatatggtgtatgttttagagcaaaaatataagttttattttagagtatttgtaccataggttttgatggaaaaccctggattgtcatatgcaagtgttaagcagtgttttgggataaacacttactggtttatcgttgttgtgacatagggccaacatcagcgaggaggtttctccacttaggttggctaacatacatgaatctagattaaaggtaagaaaagtatattgtacttcatagcatgttatattgcaacacaattaatattgttgagaattgattgatattgggattaagatacggttattattattatgtaatgaaatgattgcttgattaggaaatgacaatgtgatgatcccataaatgtgatatacgggctcacctgaatagatgatgtgatatacttgtcaacaataccttattaggtacgggcgacagtaatatgagaatgctaggctatggcatagattgaaactgttgatgggtttcttcgtatcggcgtaccttattaggtatagacagcagtgacatgagagtgccaagctacggtaccggctcgtctgattaggcgatgcgatatatgggtaccaagttatggcacgggcacacctgattaggtgatgtggttatgcaatatatgggtgctaggttatgggacgagctcacctgatgaggtgattcagttatgcaatatatgggtgccaggctatggcatgggcttgcctgattaggcaatgccatggaagattattagattaaagcatcgactttcctgattaggcaatgtgatgtaataaagatggttactttatgaggtaacatgtatataatttatattatgaaataaagataatttctattattggtataatagttttgtattactaaatttctttatactgatatttattcatgataaatgcaagtagtgatttgggttttatcttatcaataatgcgtgatcgtttaattctgattgtttgagtataaataataatatttgaataataaaatatatgattgtagttattacttttcttattgagtctttgtgactcacaggtgctatgtggtgtaggtaaaggcaaaggaaagctagatcaaccatgagatgacagtcttttttagcaatgtacatattggccctactagcttgcgtgtcgagttgccaagagttgttttgagttgtatctactgtatattttgatttcatatttagacttatagttgtatttagcctttttgtaaaacttttacaatagggatccccggaacacagttttagtgtcgtta

SEQ ID NO: 387885 - DNA, 2244 bp, Cannabis indica
gcactatctcaaaagaaaaaatagaggaaattttagtcaaatggcattgaagcttgacatgagcaaggcttacgaccgtgttgaatggtccttcttggaagctcttttacttaaaatgggttttgatactagatgggtgaaactggttatggccttagtggagtccattcggtactagattactttgggtgagcacttattgggccctataactccatctcgtggaattcgtcaaggcgatcctttgtccccttacctatttatcctgtgtgcagtaggtctttcaaccctcattcgaagatatggaaataaaggttggattaaatggtgtcaagttgcttgtggtgctcctctagtatctcatatgttctttgcggatgatagctatctgtattgtcgggccctggaggtggaagctgagagaattttggcccttttttgagtttcgagcgggcctctggtcaaaaagttaatcttcaaaagtcttccatattttttagcaaaatacttctatagatgtttggggtagaatttgctctattttgggtatggtggaggctggagacgatggcttttatttaggtcttcccaatatcatgaagcacaataaaaatgtggtgttgggttttcttaaagagaagatgaggaaaagagtcgagagttgggatggaaaatttttatctcgagcggggaaagaagttcttcttaaatcagttgcccagtctcttccaaattatgctatgagcatcttcttaatcccaaagggtatttgtgatgagcttgagaagatgatgtgcaaattttggtggaagtcttcttcaaaaggtggtactggcatacattggatgaattgggatcgtatgtgtgctccaaaagagtaaggtggtatgggctttcgacatttgcatgattttgatatctctcttcttggtaaacaagcatggagacttcacactctcaaagattctctggttggtaaattgttccaagctaggtactatcctcaaggctcttttattgaatctgagttgggaagcaatccaagttatatttggaggagcattttctaagctaaagatggccggttgttagtgggatctggtgaaaatatttctattactagagacccttggctccctgacatctgacaatccttatattacatcctctcacccaagtttatctgagcaaaaggtgaactatcttatggttgtggatgacaaaaattgggatcttgaggtaatatctgatttgtttaacaatcgtgacagagacttgatcttaaacattcctatctcctcttcaaatttgtgtgataactggtattggggcaaggaatctttaggcaggtactcagttaaatcttcctataatctaattcaagatttggagacctctaatgttttgcctagcaattctagtttttggagagagttacgaaatttgaagatcccaccaaaggtaaaggaaatgctatggagagccttatctaactgtctaccaactcgtgttcaacttatacagagacatgttaaggtacttccttttgccccagatgtaatcgagaggctggatcaattgtacattgcaggtctgtattgggggggtgggaaattggaggttcttcctttggtaactggtttcgaaggaaatttcatagatggaacaaggaggataaacaattgggttctatgctttgttgggcaatttggcaagataggaacaataaaatatggaatggggttaataaatttgtcaaaaatgttgtctcatttgctaaaggtgatcttgaacaatggttgtttgctcaagaaaaatactttttcaccatccccattctcagtttagttatgagcaatggtgtgctccaatagtagatttttataagatcaatgtggatgtggcaacgtttgcagataaaaatagacttgggtatggttgggtgcttcgtgatgcaagaggtcaagtccttcaagctcgaaccagttcatggaccgactgtgttgatccagggcttgccgaggcactaggagtgaaggaggttctcagttggataaagagttcgaatatcttgaatgttgttgttgaaacggacatcatcatcattgttcaagctattcgaagctcggtggttatgaactctctgtttggcagttgcatacaagaatgcaggaggctttttttttgtttgaacaatattagtttatgttttgttaaacgatctgctaattgtgtagctcatgg

SEQ ID NO: 387886 - DNA, 877 bp, Cannabis indica
acacgtagacattccaacatgcacttacacccaaaataggacggaaaggcgaactgctaacagaagctgggtttaggaggttttaccaccaaatttagattaggggtagttgcaaaacctagcatacttagaggttttaccgcaataaccataaaattctcttctcttcttcctcacttgacaaccaccctctctctctctctatctctcttattatgattgtgtttttccaatttttttccttcttatttcattcattttctcaatcatcttcatactgtacctaaacaaccaaagccaccaccacttccacctcaatctatctttcacatctaaatcatacccaaaaaaaaaacctaaatatgaaaccaccacacaccacaacttaacatgtcaagaaaacaaagaaggagaagtccaaaccccagatttgggctcctccatcagatcgagctcctctagtagaatagatcaagttcctccgttagatctgtgctccaaaccctagatcaaaaaaactaccaccatcgcaacttttgcttcacagtgatagagagaaagaaagagagtgcgagagatagagagaaaggaagcacgggaaagaggaggagttcgacgacggttttgtttcacagtcgtgtggccggagagttcatgagggagagagatagagcgagctagagagcttgatggggcactcgacggtctagtctggtgtggggcgaccctagtccgtcgtcgaagtatacagagggggaggagagaagatagagaatctgtaagaaaacaagacaaaaaagggaaaaaaaggaaaaaaaagaaaaaaaaatgaaaaatgaaaaaaatgatttttgttataaatagtattaattatgtg

SEQ ID NO: 387887 - DNA, 980 bp, Cannabis indica
ctttttctttttaacatttcacaattcacagtgacagaatcaaaagaaaattggattttaaaatttgaattttatattaaattggatttaatatatatttatttatatggcatttaaatttcggaattttggtaccaaccaaatttaaaccaacatcttttaacggtttctatgtacttatttgattgacaatattaccctctatccaaataacactaaaaccgatcttataaaataaatattttactggtctaaattaatttaaaacaaatttaaaaaaaaaaataacggtaaacgttaggaatttgtttttgtttattttgtgttaaacaataagtagtgttttttcaaccaaaaaaacaattaagtagtgttattcataggtgccattttaataatttgattaattggaatattaaagtggaaaatataattctaaaaatttataattatatttagatgtacatgataatatttatttaaattaatgttggttaaattatattgtttggttgattacataaatctcataaattattgtaataagttagattaaaattattatgcaagttcattgtgttaagattgaacagaatgtttagagtttacctttttaaaatattttaaaattactatgttatgagttaatcttataactaaattaataattttcctagcttaaaactgttttaacttcataccaaagattagcatttcccaaaaaaatattacaccataccaaacataggttttagataattttgagaatcatgtgatagttatagaagtttcatacattattttctcttattagctaaaatattactaccaacgttaacaaattataaattttgtaacaaatcatgttaacaaatataaattttgttcaaaagagatatatataagaaaagctaattaggattttttcacctctaactttgacatgtaccaaatcatgctctctgaacttttaaggtcgt

SEQ ID NO: 387888 - DNA, 1605 bp, Cannabis indica
atccttaaagaatgggtgcttcttaaccccggcaactctacatttggccccgagacgcttaaataggtctttgttaagaaatccagtattcaactccttcccgtgaaactcaagctcgcatgatagcgtcagggtggggaaggctagtggcatattgataatgtttgagataattgtcttgtgggacttagcctcgaacagtgtacgatcgtaaattatttcgtagatgaagacaccatatgtccaccagttcatcttgttgtcgtgggacttatccttagccgtctcatgtgaaatgtactcgtttgtatcaacagtggacgaagacctgatcgttaccgactcaaccacaaagagccaattagcagccttatgtgtcttgacttgacatgaatagaagagctagttggagaatcaaataaactagaatgagttaggtgatgattcaagtgattcaataatgcctgagattgtgtccgagtaaagtgaaaggtcgaaatcagtgagcataatgtgattgtccaacttgatgagtgtgattttcggttttaaatttatgtagatgattccaacatgtgaagatacttcaaggctactaaaaatttagcagcgtaaactctgtaaataaaaaatatgcatgaaataaaatatacaacaaaaattgtcagagtttcctaattaacaaattatcttgtaaagttaagcgaaaaccgtttctgaggttatttatggcaaaaaaagttaagatcaccatcggagcagtactccatcactatatacaaaaatatgagtcttcgaactcagcgaagagagtctaaagaaacaggtgatcaagtattttcaagattttctcttcgcttccgccttgttaacattttccttcaatgctaaaattttcttgttcacaactttcatggcgtagtaataagaagtattcgaattaagtagtttgcatgtgtaaaccttgctaatattgtccgcgccaattttttaaggaacttggagtggtcgaacgccaggccaaatatccaagtgtcggattgaatgggagagtaggtaaaatttgagacgcacgtggctttaatgaaagcttcataaagtttcctaactacttttctagggagactaaaaagatagagtgaagaatatatagttagtgaatatggtataagaggagatagtgaatgaatatattacatatgttaaatttattttgccatcttaagaatctatttagcaacacttttttttacattttaaaaaatgagaattgtcaagaaagaaaatagctaatgcatatttttttgaacataatatataatctatgaaaaataaatatgacccaagagatcataaattcaatatcaatttagttttatgaaaaaatagaattagtttcataaaatatcgccacatttatttcatcaatccaaaaaaaatcacatgtgttcaattttgtatctatatatataaatggaacacttcctaatgggtaatacccattgatgggcactaaaaaaaagaggtaaacaatctaataatctattatggtaagtttccaacaattattttttaacggaaattggaaataataattacaaccaa

SEQ ID NO: 387889 - DNA, 761 bp, Cannabis indica
aacataaaataggttaataaaattgacaaaaaatccaagtgaagagcatatcgattcgccaaaagtatatagtacattactgttacaaagcacaaaacacagtttaattagttccaatacaaaagcttaaattaaaagaagagtttaatccgtcatactaaactaccccacaaaaaaatccatattataaaaataaataatagagagttgggaagaacatgttacataaaatatgagtattgcatctcctactaagtgttctgaagccatcttattatacacaaaagtagtttttcttttttcctttatcaagatttgtatagccttagtaacagtctagccttattaatatgaaaaatataagtaaatggtcctatttctaactttatagatagttaatgtctctttttcaaaataataaagcaaagggaaattttatttacaccccaaaattttttaaatacaccctattttaataatttttatattatataaaatttatatctttaattttactaagtatttttaacttttttctttcaatttatattcttaaaaaatatacctatcaaacaaaattaaattacattttaaaaattatgacaaaaaaattaaaaataaaaaattatatgaaattttcttagaaaaaaataaaaaaatatatacatgagttagaaaaaattataaaaataaaatcaaaataagtattgaaattaacataaaataatgtgaggaaagttttaaaaaaatattaaaattaa

SEQ ID NO: 387890 - DNA, 888 bp, Cannabis indica
ctggtctgttttagaaccgttttacagtaaatgacagtattaaatcagaacaaatgttaaagaataaatgaagaacaatttaactcattcttatattaagtgtggcaatgtatgcgacttgatgagcatgagttgcatgttcatattctcgcacaaggttgcaggctcttagtgctttttgtattcgcttaaatggctcatgggcatatcattcagatgtctgcattcaccttagattgcataaacaaacatcttacatgttgacgtcatgggacatgcgagtctctgacgagtcatcgaacatgatcagtcattcagaccaatttttatgtaaagaagcaatcctcactagtcgtgaggaaggtctacttagtcgtcgcacatatttcgatatatacgcgactaatattaaatctttttggtcctgcttgtctttgactaagcaaggtatagtgtgcgactagaccctgttaaggttgcatcatcttgtaagttcaaataaagcgaggctaaagcttcgagagccattaattaacaggtcatctttttctcagagattggatccacgtgttaattttataagagactgctctcgagtttctaggcaaaaaatttacactataacacatgtccctagttttgtaattaataactgtgtcatatagggacactattaaagagaggcaggtaagttattgtcacaagatgatgacctttgattgttttgtcgagggttttgaaaagatggttgtaataattattttattttcccaaaatgccacgtcatcaaaaccattcagggtatgtgtaggcgtgctcgttaaggatcattggattgaaagacctttggtatttttttagggaaatttacatggtgtactaactttt

SEQ ID NO: 387891 - DNA, 538 bp, Cannabis indica
atgtaaagaatattttaaagtatagattacaaactgtaaacagtagaaatatgaccaaacaggaaaaagactacctagtaagattatgtaataggtagttttagttttattttttggctggtcagtctaggttggctggtctgattgaatttgtttgtacttgactctgttgattaatcaagtttttctttcttaattaaaaaaaaaaaagaaagacaaggttttattttattttttaattgtattggtttttgttttctaataattattattgttttttttccttgatagtaatgtgtattggtcatatgataagaaaaacaataatagctaaaaaaactaaagaaagtgattgacacacaaaaaacgggaagaaagagatgatagtagtttgactttgattaaagtatcaatcatgtatatacaatgtgtaatttttatttaaagtatcaatcatgtatatacaatgtgatttttatttaagagcatgtgcaatgaagatgtaaataagtggtgtaaagttaaaatatagtttatt

SEQ ID NO: 387892 - DNA, 922 bp, Cannabis indica
tataataaaaataattataatagtattatattaattaaattggaataaaatgttagctataataatagctatgctttgtttgtgtaatatttttgtacacttgaatatttatcttcaaagttataataagttggctgcctaaactaaacagctacttttcttatgcctcacggctttttattttgttttttgtttttttttctttatgttaattaacaaaaaacattgactttatatttataaataaatatatataataatatattaatatatatatttatatatatatatatatgttaatggataaggagctaattagctttaagtaatttgctgttttgatttttgtacattttgtttttgagttcattaattaaaaatttaatgttaccctttttcaacttcttgacattgagactattttaataatttgaacaaattgtatttattatttattttgaattgttttttcattaattttttaacaatagatttaatttattaacccataaaataagaaaaatacatatatcccttaggatgagtttctagctccatatagatatgggtgatatatgtgtatgtgtaaatgaattaggttaattgagatttttgtttgtttgaattttgacatattaaattatatttttaaattttttcggttgttgaaaatttcatttgaattattaaaattattagatataaggacttttatctaatttcattcatttttattaattcagtaattgtccatgtactaaatcatgcttctcggacttggatatctatcaaatcatgccccttgaacttagacatgtgttaaattatgtccctgaactttcatgcatgttacacttactaaaattagacaaaaagtcctcaaatccaacaataatcaatagtttaagggaaatttttaaac

SEQ ID NO: 387893 - DNA, 1463 bp, Cannabis indica
ttttttggggtaacaatggcacaagaagtaagttccatcttacttcatgggctaatgtttacttaccaaaagagtaaggagggcttggttttggtgaaggtgctaagtggaaaaaggctatgattgctaaatatgtttgggcaattaatcaccaaccggaagctctttgggtcaaatagattaaccatgtgtatttaaaaggacaaaacttttggttgtatcagctaaagagtgacactagttggtattggaaaaatttttgcaacattagaatggtgttttctcagcaggaggtggaggatgcaactagaaaaggaaagttctgtgtcaacaaattgtacaagggactttgtcatggagagttgttcaaacaccaaaggtttgtttggaatcggtttgctgttccaaaacactggtttatttgttggtaagcattgcaggacaagctgctcacctgagatcatctccatcaggtgtttcacattgacagcaggttgtgcccgatctgctgcaactttgatgagaatttagctcatctcttgttctcctgcaggttgtctcagcaggtattgaaggaaattaacaattggattggggctaattggtctgatcaggtagagaagtggcaagcttggactgagcagtttggaaaggagaggaagaatatggttcctgctcaattttctcagcaactatatataatatttggcataatagaaacacttgtgttttcaatggatattcttatagtgtgaaaaaaaattgtagagatgattaaaaaggactctaagtatagagttaacaattttacttttaagaagttgaaagatgaagagaggagattgttgtcaaaaattgactctatgtagagtgtgtgctagttgtgttgggttgtagggctagttttgtgcttgttgattaataaagattattcatttttatatatataaaaaaatatattatcttcaacttaatatatttattattttgatctaaatataaaatagtagtaatacatatattcgaaaatatactaattgctaaaataataaaatgttattaatatatataaaaaaaatagggttaaaattaaaagaaatacaaacataactaatttcaaaatattatatttgtaagaattataggtattaaattatttcttgaacttactggtattttttttttttttgaaaaaaaaattactggattttagaatactgaaaaatagatttttatttgttgatattaaataaaaacatttatgacaattttctaaactaaatgttcactaataattaaaaaaaaaagagaaataataaagtaatgtaacccacccttgatttttctttttcttttttctttcttttgtaatattgggtaaaaaaaaccccgcctcttatgtcttaagaatattagttctggaaaaaataaagcattagtaaaccaattagtttttttttttt

SEQ ID NO: 387894 - DNA, 1093 bp, Cannabis indica
cgaattgtataatgtgttatagtttctgaattgcacaatgtcaaaatatgattttgaagtagtcgtatatatggaatacaattcatgattatttttatattttacctttttaagtaattttgagatccaatttttgatgtcgaagttgaaattattgttctctttcctcgaagcaacgtcctctattttttttatgatcagctgatacgtttattgatcgattgaattatttatcgatttagagagatgatgatttgtttgttgtatacagcaacaaatctgtgttgtatcctcttctccattttttatatctatcgagttctccgtcaatggagttttctcgttcaatctatttttgtttttgttttttgaattcatttattatatttctatgatatatatatagctttctattttaatcttgaaaaccacgcgtagggaaggctgaaaaaagtggagttgtgggcgcgtctctttcattgcttctggttctaaattaatgggtggtcatagtatggaagctgacgtggcacggtatattacgtcattgttttaatataacgtttttttttatattattaatgtatataaaatgtatatttataaaaatttccctaaaaatatctatgcatatatatttttatttttttagattaatttatataagatgtttatatatttcactaaattattcaaatagaatttaaatatatattaatttaaaaatattatattcaaatttaaaattaaacattagtttaaagatgtggtacttgttgatctcagatttggccaactgacaatggagtcatattttatgttgatgcttgtcacatgttacataacaagaaaataaagtagctgaataccaaattttatagagatttagcccccttagttagcaggtaatgacctactctcttttagttgtatagataccgagagttaatactactcagatgattatagatgggatctgaagtagctctctaaaggttacgatgtaggaatcagagttagcaaatctcaaatatgagtaagagcagtagtgggtgagagagagagagagagagagagagtagagagagagaga

SEQ ID NO: 387895 - DNA, 1188 bp, Cannabis indica
cctcatttggtagggagagaaattacattacatgttcctagacattttcctagttggggaaatttcttggatcagttcgaacacctcattttaactaagcttcgggtaaatttttttgaaatttatatctaaattaacaaatgatattattagtatgctattacactattttttttgtcaaatggattattattaccaaattgatagtgatccaaaatttctagctattttgttagctaaaatggctgaaaaatataagacgagaaagaacattaaactcatacatttcaaattaaaattttacaaaaatctagaagattttgaaattgcagtcaagaaccccataatgaactcaatgaagaacaatggcggctactatgtaagttcttcacatctcctgagtttattgctcgttctaaacaaaatgctctcaatcaacagaatatgagatttccttcaacacatgggtcgataatgagaccattcataaaaatgtaagttaatatatatactatttattttatgaagtttaatttaattatgattttcttacgatttatatttatcagcaaaacataggtcgcattgagaattagaaggtttgtcatacaaagaagggcacatacgagtttgtcaatgagtatgccaaaaattaatatgtaagattatgtaaactaattacttttaaatatatctaaataattgtacagaaagatgttgagattgagatacttcgtgagactcttggagagaggtgtggccacgagcggggagtgggttgcaaattgaaagggcaatcataaaaatggagctcacaacttgctgcagctactaaacaacctgacttaaggtaaaccgtaactcagatgcaaagacaacttcaggtgatgacacaaataatgacacttgaacaacgtgcacaaatggaagcaatgttgactgaggctgctccaacgcaaccaacgcaactaacgtgtccacaaccttctcacttttacatgcctggagatggatctggtccatcttctcagccaatgagtttttggcatcaacagtcacaataggccccactatcatttctgcaattgttatattagcctcagcaactttctaaacaaatggttcatcaattttaacaattttagatgtttcagacattcatgcagatgatgttgttgggttttatgc

SEQ ID NO: 387896 - DNA, 1624 bp, Cannabis indica
attcaactgtatttgtggttgtacgtattttttccttccccaaggcatatgtcgcaacatgtcgataaatgtgtcaccacatgttgttaaccacaaaaaggtaaagagaaaacaatcaaaagacatcaatatcgcaaaatatatcgacaacaaattgctacatttcgctaactacaacaaggaaaaaagaaaaacaatcaaaagatatcaaaaatgcaaatgatgttgataacatagagctacatttcgccaagggtttcaacttccaagaacttaaataatgtcgcgagatgtcgtaaactatgtcgactaatgtcactaattgttagagcttcctagtctaacaaaactatgtcgataaaattcgctatgtcgagaaacgttgctaaaagacaaataactaccacatttcattctaatttgtatatgcttgaattctgacttcagatgtggctgaaaggaaaatgcattggccaggagtttgcttgatgtagtgcaagactctatgtgctgcattgagatggctagcctttggtacaactaaaattgactcagtttattaactgagtatgaaatatcaggtctagttattgttaggtactgcaacttcccaacaattcttctatacagtgttagatcaaccaattttcctttttcatcttggccaagtttaagattagcctccataggtgtactcattggtttgcacccaagttggccaaggtcttctagtaactgcaaagcatatggcctttgagagacaaaaattcctttgtctgattgagcaatctctaatcccaggacgtactctagctggcccaagtcttttagttgaaacttggcattcaatcttatttttaaagcattaagctcttgtatgttgttgctggccaagatgacatcatccacatataccagcacaaaaataaaacctccatgaaagtgtttgatgaacaaatagtgatctgttgcagagtgagaaaatccttcatcatacaaagcactagaaaatttggcaaaccattgtctggatgtccattttaacccatacaagaattttcttaatttacaaacagggtttggtggcaactcccccttatgtctatacctaggagatagagacatatagacatcttcatggagatcaccatgcaaaaaggcattgttgacatctaattggtgaagataccaaccttggattgtagcaagtgcaagaattagtttgactgtgacaagcatagttacaggtgcaaaagtgtttatatagtctattccttcttgctggttgtaacccttgccaaccaatcttgctttgaacctttccacacttccatcaacattgaatttgattttatatacccatttacaaccaattacatgttggtctgcaggcaaggaaaccactatccaggtctcattcttttccagggcatttatttcagtgtccatggcattgtcccactctggaatgccttgagcttgattgaaaaaatctggctcgaaatggctagatatggccagcacagcaactctgaaagtaacagatagccagtgatatgaaatgacttgtgagagaggatgtggagtgacaaaaacaccccgagacatgtgagtagaagcatta

SEQ ID NO: 387897 - DNA, 1148 bp, Cannabis indica
ttgtttttctattttttatttggtggaattataattccatttcactacttattaattcatagcctaattaactcctctttctcatttgacagattaactaattttttttttacttttactctagtccatgggccaagcccaacaaaccctaaccttagaaaactgaagattaacctcgcgtcgatcattaccattttgacggtcttcttctcaaactcacaccgcaagtgccgggttaaatttctcaatttgctattcgtagactaactgatttgagttatctatatctttttttttcgtagactaactagatttgagttatctattatcttttttttattggaatttaaaatgtgaaatgttattacttttgtttgatttagattatcgttattgagataagggaaatatgatttaaaagttaaactcaaagtgaacttttgtctgaactgtttggtgcttagtttggattgagaatgccacctttgttatgttaacttgttgtggtttgaatcgtttgatagtaaggtttggagactccaaagattgggaatgattttcactctattcctataaatacagcatactttaataagtactcgaaccttttagtgcttacttctcttctttcctccactctcgagctcaccacaccactgaccacttgggtctttttccaaaatgtgaaaatcaaaatacttgacagacgagaaaggatatagccgttgctgtgagaataataacgttactaatactatactacactcttgctacaaagaagaactagagtagagtgtgtgtgaagacagttcaggcttggctttgtgctctcactgttgcttcttatacttactattgggtttgtgccatttttctttgatctgtttctggagattggacaaatagctttatggtgcaaaatacaataaataagtgtgacacaacacagtgctattgaaaacctcgtgagctacaactttcaagattagacacctatttcataataggtccatgtcacaatattctcataattattaataaaaaatgaaataaaaatagctaaagtggaaggaggaaaagataacaaaatagcaataaaattaatgctctccaaagcatatgcttggaagatactcactccacaaact

SEQ ID NO: 387898 - DNA, 1178 bp, Cannabis indica
attataaataatataacaattaaggtactagacaccattaactagtgccttaacatttctcattaatagatcatatgcaagtccattcactcattaaattactaaagactcttttgttaggctatataagaatcatattgtattaaataataatgaacactatgtgtgaataagattttatattgtattaactaatattaccataaattataatataatttgaatcatattatttaatacataacaaatgacctgtattaacttgtattataatatttattaaaaagcgtttgggggccgagatctggagttgggtctgggtctggggttagctctaagcctgggctgggttagaggtatgaggccatggtccggagccagggtccgattttaggtctggggtcgggttggatccgaggtctggggtaggggtcagggccgtgtccggatttgggttggtgtttgttgcccgtggccgaaactgggctctaggtctggagttggggttggagtttggtatatatatgataaatataatataattttacacaacttattaatacacgtcaataccaaatatagtattgtaataaataaatacaacctaattcaatactatataatataatacaataaagtatactaactgaatttttgtgtaaaattgtaatactaaaaccatttaattatatatgtgtacaatctcactaaaagtaataacatttactcattttattggctatttagaattttccccttaattatggcttatgtattattgtacttcctgaatttttcagcccgttaaacatagttctcaaactattcacaatattgtaaattagcgtgactgtttagactattgtcacatcaacagtactgtaatgtaatttaaaataaaaaacataaaaagtcattaaactaaaatcaattaatgaataaacaaaaaaaattaaagtaaaactcaattaaggacatttaaatttattttttttcttcaaattaattacacaattggcgatgacgtggtaatagtctaaacaattacatcatcataatttcgtttgccacgtgtcataaaacttcacacaaggatcactttatagtactgtgaatgtttggagactatttttaatagattgaaaaattcaaagaggcacaataatacataaatcata

SEQ ID NO: 387899 - DNA, 799 bp, Cannabis indica
taacaaatatttcaaatacaatagtaaattcataatcaatatcaaaagacaaatgtttctcttccatatcatgaaagtgtgaatctagattaaatttttcagcaattttttttttttcaatatatactaattacttaaaaatttatctactcgaagcaaaataaaatttctcttccttccctctctcggtgattctcgccaatgcatggcgaaaggagcaaagattacaggaaaaaataagactaagactaactctaagaaaactggtcattcctctttggatcaaatcatcaaaacacgttcaatggatgctattcaggataaggacagagatgaaccttaaaatttgggaaaaatctgttctccagaggaaactgaggcaatttttaaacaagatttctcggattggctaagcactgggaatcgagctaggcaagaagtaaatctaggtaaaaaaccttctcttattctgagatttgataatatttcgaggaattcaaaaaatagttttgtgagtatgtaaaaaagagattaacatagattagtttgaagtagggaatgcgctttggtatgaaaatcaaactagaggatatattgttgaagaagttaattactgacaatcctcaatagtgtgttatgtggttggagcgaatccccctattaatggatgtgtttgtgttaaattagacctctctgtaatacttattattacagttttagaagaagagaagaaaatacaaataaatacaacaaaagaccagaatagatcctacgtggcttcgcctctagtggatcaaga

SEQ ID NO: 387900 - DNA, 501 bp, Cannabis indica
atatatatatgcatataaaattaaaaatagacaaaaatctaaaaagattaaagtaacatttgcatatgcatatgttattgttgaatagaattttgaaattggtttggtaaattattcaccttttgaatattccgacatgttttttttatttattggttaagtcttctctgtcttctctatggacgactttgatttgtaggttcacacatgttacttcaaatgttataacacaatatatatgtatataaatatatttaatgtgtgtatcatgtgtttgtgatataatataaattagctataggccagtgaatcacttttgttattactaattactaagtctaacggtaattaaggatatttttattacaacagattatatattatatatatacatataataaattagtataagaacttaattaatattatatataatgaaatcataataatatatatataataattaatatatatatatatatatgaagtgtatatattata

SEQ ID NO: 387901 - DNA, 2835 bp, Cannabis indica
ctttattttttatttttgaaaaatatatacaatatatgtagctatattgacttggcctaattacttcatcctgcataatttaaatggcacataaatatttacagagaagagaggatcagagaatagtgtttcaaagttttttttttaaaaaataaatggcagtattatttatggttagaagagacattatgacaaaatattgtcttctttcttatttattgcaatgtctaaaaataattttggtgctctgttcaagctttatttttcactcatgccttcatatatttgttttaatatttcatcttggtcacaaattttgttgcaaacagaactttaaacaattacatacggttggttggtaagaagtcccatcactacaataatataaattatttttattaaaaaaaaacagaacagaagagaacatcattccatatttttttttcagttatagcatgcactctcagtacattagctataaacatttacacatgatataattgttgggaataatagaaagtatttcaattttccttcaataataatatttgcgggaaaatataatgagaatttggaaattcgagtcacaactacaatcatagaatatatttagaagttttgaatatcttccaatataaatagtactttacaaataataattaaatcactaagtgcacactaaaaaattatctcgtagaaaataaagaacacagtaaacttgccactataacaataataataggtacataatattacactttcatattttgataaatacttgaggaatgctctcaaaattttcacactcactagtgtgataatctcaccatctctctacaaaatatttcaacaatttcataagaactctcagcttttttcttttcccttaaatttccctcactaagaggtattattctcactatttttgtgatggttgtgatgggataaacaaatgaaagggatgaagctctatttataggcctccttggatgtatgaacaagacacaaattatcaatcttgcattaaatgcatagttgaatatatgaatatccctcaagtcaaaaattaccattgttattccacatagttgaaaaatacaaccccattttcacatggttgaaaatcaaccgctacccatcaattcaacccctatttcaatccatgaggaagaattcgtcttatatcttcatcatcgagaactcatcccaggaagcttggaacacaactcaagcttatgctgagaaatcacctttgttagcatatctgctgcattcttatctatatgaattttttgtacttagtatagcttcttttcaaatgagtcacgtgtccaatgatatctaatatcaattaatttgatttgttctatagtggtaagtagcattcttacttaggtcaatcgcactttgactgtcgcaatgaatcacgtacctttcttacttcaaatctaattattggagaaaattctttagccataacatttctttcctagcttctgcaagagcgatatactctgcttctatggtagataaagcaacacatttttgtaatttagaatgccatgacacaactccccctgcaaaagtaaatatatatccagatgtagactttctactgtcaagatcaccggccatatctacatctgcatatccttccaacactggttctcatttcccaaaacttaagcacatttgttatgtccctgtccaatatctgaagatccattttatagcctcccaatgctgcttgcccgaatttgtaaggaaacaggttacgactccccttgcatgagcaatatccaatctcgtacaatctattgcatacatcaaacttccaaccgctgaagagtaagaaataaccaacatgtttcacttttcttcttccgaagaaggacatgacttcttagtgagtttgaactggccaccaagtggcaaagaaactgttggagcttattttacgaagatttagatttactaacatgtatgttaattatgatctatagtctaacatccaaaatatgaatttcttaaaataataaaataaacacatataaagttgtaaaaaaaccttacattggtggcagcgaaatataatgactcatttcgttcagatttctaacccttgttcctttctgtcgcggagtacaactaagatctgaacatgtacgtatctccttaaataatagaattcttcacaatcttccacactatatttgagtattgccttgaattatgtgggtaaacactcactcactatagggatctcgaaaatttgaagaggaaaaagataggactttgaattctagagaggagaaagagaaggaattttgaattcaatataggagcctctcttattttgtctgacaacgtgattttgagttatcagcttatgaaaataagagcctatcattatctatttataggatttcttctaggattaggatttaaattatatggaataaaaaaaaagataaaataatggcttatttttaaaccttatggccaaacccttttatgggccctataggtttcaattttatcatttatttaactatttatcttttcttttacaaatgtcatattttaattcttatcttattaatatcaaatttatttatttaataatataaataattatcaaataaaattattatataatcttatttattaattagaccttaaagtttgttaattaacatataaatcctaaagtctttctctttcttctcagttaagctcttgcctagtgaaaattcataaacaagacatagcctagtttagaattctaattggttaattaaaaccaattaactgagtttacaagccaatattatc

SEQ ID NO: 387902 - DNA, 2831 bp, Cannabis indica
tatatataagaatagttaatatatatatatatatagagagagagagagagagagcgagataccttgtgttagcaaaggaatgaagagatactttcacacaaaatgagagtttttttagagtgagctttccttggcaaataaaactcaacattttggagaggtggatattagctctgtgtaaagtcaacttgaccccatagtaaaatgaacacctcagctaaaaaatttaaaaagcaataccaaacattggtttgacttcatattctcattcctaagtaaggaaaattgcataccaaacagcccctgagagtttatatcaacaaattcattattgcagctacaaaagtgaaagggttaaccaaggaagggaggctagctgcaatcctaagatggattgagcctttagaagaattgtaaaaagacataaaagactaactatagggtcaatggtagaattcttggaccaaacagatggatttacaaagctcgaagaagcagttcagcatgtggacagagttgggtagaaaaagaaccaacaacataccattgctacaaatacatccgttcagtaagaccagaattcacagaatcacaaaagctctatccaaggtggtaaaaggtaaaatgatggcaaccaagtcccctacatcagaccatagtattgcgtgtatgtgcctctaaaaccccctttttgtccaacaaattatctaggcaacatattttcaaggtgaaacttttgggtgatgtgtgtccttgttcacgtggagtcctttattgcagctgtatagcacacgatgaggagcttcttaccaccaacgatcagatcgtcatgttgtaaggcctgcccttgcagcatgtttagtacgaaaccctaggtaggtaaaggaaatgcctttacccacatgtaagcctataaatacctttatttttatgtacaaaagggtgaacaattatatactagccaaacctctgtaaaaattcctataagctttcttcttcattaagagaaattaaaggactgtagagctagggtttttactgtaaacatttgtattattcaactacttgcccaaagagccaatacaactaactcgtggactagggattattaactcctgaaccatgtaaaaatcatttgtctattatttgctattttatttatttcttaagcattgatttattagtttctaaaaatctcagtaaatagccacactacttatcgatagcaaaacttctagttttgagtttagatccccaaaaaaggttttagcaagtcctttacccgtttatgtggttgtaacatagggcctccattcaacgcgtgattttcgattcaggtcgaccgacacacttgagtttgaaaatgagttaagactagcatagaatatatatatatatatgtatgaatatgtgtatgtatattatatgcatgttggtaatgtgattcatatattgccaacactagtacggtagttgtactgagtgcattggtacagtatatgatgttcaaaaggtatgatccgatattactaacactagtacggttaagtacgtagtgcatgtggtacaacactcagtagtactcggggtacggttcagccctaccaacactagcatagtagcggtacttagtgcatgtggtacataggtcgtacttctgttaagaacgtgcttgattatctgtatagccttatagataagtgtgtgggtgcctaaatacaagtcggtaataaattatatgttatatgcttttccttacagagtctgatgactcttagatattatttttatgtgtaggtaaaggaaaggctaaggttgaactgcaattccaaagctcaggaatgattgtacatctcaagatggtgcaacatggagagttctgtctcataacaacttggatttcattttgtactggttgtgtgacatgtttgtaaagtttcttttggaaatgaatataagtttttaaagtaggatcctgaccttttttgaatggatatatgtaaatatgtttataaaattttaatttgtcacgatttttgagaaaaccttttgtttagtaaaggtgtgcactgtaattaaaaagacattgtagcatgcataatcattagggcgttacaagtatgctgccactcatgacaaattggcctatgtgagaaatgccatcctaacaggatggacatcgcagagttacgaagccgggtaggaaggtaaatatgatttacttttttttcttgattataaataatagtggattgaattgttcttaattactaacattgtttttctcttgcatgtagattcgtgaatagacggcgaagatgatatgaggaagtgagacttctacaaagtctgagatggataaggattttagaagagcaacgaagaagtcaattttttagtttaaatttcaaagacaatttccttacttttattgttttaaatctagttgcacatgtaaagtttgttttatttaaataattttattttggccatcttattttttatcaataatgttcatttaatttcaaatttatgtgtgtaaagttaactaaataagacttcaatgctcatagtataaatctaaaatcaagtttaaatgtcttaattattattttgactacataatacataagtaactgtttgaaatagtaatttatgaatatttcaacaataaagtttaaaataaattaaaatgtgattttaattctatattattaaacttagacattaaatgagatttaattaaaagtttgaatgactattcaaacttatacatggatattaaattccattccaatcttgtacgttaatgattcattaaggaatcatta

SEQ ID NO: 387903 - DNA, 1461 bp, Cannabis indica
aataataaagttaaaaatatggttaaaaatatttataatattataatatttaccatatttagtatagaaataaaaaaatatcatcaaactaaaaattccattactagcacatttcattagaatatatataaatataaaaaaaattattaaatttattatattttgatttaataattattaaaaaaaaaactactaactattttcagattgtgttctaacatctaacgtttttattattatttatttaatttgttttgtttttttttttttggtgaaaaaggtagatgatacgatgatggaaggaatgaatgttatgttggagagacaaagaagaggacatgtgtaaggtgcagacacatttgttttcagagcaaaacaaaatcttggtctatatctgtatacacactacaatgtcggtattattaagatttgcaagactcacccatgtgacttttattttattttatttatttatttatttatttttgtaaaagtaaagcatcttatcatctcaccaaatactcatttatttatataagatagatatagcatatcatatcttattttattttatgttataaaatgggaatagtatctccttattcaactaatttaacggtggaaacagagttatttttagttttatcatttatatatagttttcggaggttctttgtggagaagcggctgcctgttgcctagctgtctctgtcgctctagatatcggttccaagtttgtgattgtggagaatgactcgaaggtagtaatcaatgctctcaatgggattgattcccgttggagtcttgaaaactatgtttcattttgtactaagtcttctccctcttttattagttgtaatttttcttatgtttgtagaacttgtaactttgccgcccacaacgtggctagatgggcgtttgctcatcaggtgtttgggactatcccgatgtcctctttacctgacaatatattttgtaatgaccatgaggtctaaccttttttagaatttatgatattaaacgctttttctaaaaaaaaaaaaacttatccattacataaatgtttataaaactatattctccatctccaacctttgatgttttctttagactttttccattcctgttttttggaaaggaaactaagtgtggagccgaaaaaaaaaaactcagaacgtgtagtgatttgtgcacgtggacattttgttgaagcagggaatttgggtacattatctccatgaaagaattaaaaagtgtagaaaaataaaacattttttattattatatttaattatattctgctttctttttcttaaagaatgcttcataatctttttatgttttccttttatacattcatttttttaagtaaaaataattgataatttttttaattattataatcattttagttcttaaattaaaatttatcacaaaaataataattaatttaaaacacta

SEQ ID NO: 387904 - DNA, 975 bp, Cannabis indica
ctctctctctctctcccctctttgaaataaggaaaaactagaggttaggctaccgaattcaagccattttcagcaaggattgaggagaaaccttaagccaagattaaaaggcctccataaagcgcgtgaatttctattgaggttgaccgacacacttgaatcaagaaacgaggtaaaactagcataagatatatacatgtatatgtgtatgtatgtaaattgtgtcctatgttatgtgatttgtataccaccaacaatagtacaatagaagtacgaagtgcactggtagtatgtgacgagtacatcgtgcatgtggtacaacattcagtggtacttgagatgcgttttagccttatcaacactagtacgggacgagtacttagtggatatggtacaatgatcgtacttccattaagaatgttcttgatgatctgttatgccttgtataggtgtatgggcacttgaatacaagtcggtaatatgatatattttatatctttttcttactgagtttgtcgactcacagatattatttacatgtgtaggtaaaggaaaggtaaaagtcgtgcaccagtgagtccatggcttgaggatgattgtacatattaggatggtaagacctagagagttcagtcttgggaccacttggaccttcattttgtattcatggagtgacaattttataaaattattttgagtaatgtagctaactttacagacgggatcccaatttttatgaacagttatatatttataaaaatttaaagcttagttaaagtttaacttgacacgatttttgaaaacccctttgatagcaaaatgtatgcatagtaagttaaaaagcattgtagcgtgcctaagcaagtagtgcgttacacaaggtatagcagtgtcgggcagattattgatctccccttaggcatcccaccccatgccttattttaaactttaggcataggtggtaaattgacgtta

SEQ ID NO: 387905 - DNA, 1907 bp, Cannabis indica
atagtattaagctttcattgttttgttcgtttcctttcaggtcttaatcaacggactccaacatatcgtcccggtaaatgtgaagcccaagtttcatatagtcgaaacctttattaaggtaacttcacaaaaaccaaatctcatgtgattatttacaagcacacataatattttgatgtttgcttctcttaccaattttgaaataggcttactaccttcctgaaaccgaatatgtgcattggtcacgcgctcacccggtaagaaagaaattatattcttgtaaatgtttacattttaagttaattaagatttttgctcttgaattttgacatataccaaattatgcctctcaatttttttaggccttcaaaatttttgccccaaattatagagagtgttagattcaaggacttttattcgattcccttcaattttactaacacgacgattgttcatttaccaaatcgtgcctcgtgaatttttattcacgttaggctttcgttagtaaaaagttgaacaagtgtccttgaatccaacaatcttaatagttcggaaaaaaattttaatgacctgaaaagttcagcgggtataatttggtatacattaaagttcaggggtaaaaattctaattaattagcttacattttatacttgtgaactcttttcaccaagctcttatgaatgaattgtaaacctttttcttaataatatatattgtaggaatacacaaaataccaaatcataggactggtaaacctggttgccacaatgaaaggttggaagagaaaaacgaggtgggaaacaatcgaaaggatcgagtgaccgataactaactatatgcgaaggcttgggttctcttcaaccatagaaagtaaaagtagtcttacattgtgattctgccttcatattgttttaacctcatatctttgttttgatttgttttactttcatttttatcattttttcgaggtttgtatattttgatgggttgttttgatttgtatgatttcatcaaggttgtgtatatgagttcccagaatgtaatatatatggctctcctcgagtgaagaagcattaaatgtaattttgaattgaacaaaataacaataataactctaccaaaataatggtgagaaaaatagagtaatagttttaatatggtaaaagaaataataactttaagaagtatttattgttttttcgtggtcatcaagttactagttaaaaaatagcttttttatgataataaaggaaagaaattaattcacaaataataaacttgtattatatatatatatgaattaaataaaggtaaaaacactgaataataaaaggtaagtcataaccctcgagtaagcatcatgatttttttagtgcaaaaacgagtcttgggttttggaatagttcgccattgttgcgttgttggtttacaaacaatgtattttggcaagtcataaccctcgatgcagaggagaagacctcatttggtggctgctgcgattctaatattacaaggaagaaaatttctcaacgatagttttgtggaagagtgtggtgtggagatatagttagtgcaaaaaacactaaatcatcaatcatagacttagaatacgaacaccggaagctatattggctcgtttgtagaaaagttgtgtgaacttagtttcgtaagtggcttcatttattttctttgaaaccattcgacaacatgctactgtttctagggaagttctagataatatttcgtatacaaagatttcaattgggattttcatagtgatgatgatttttgtgaactaaagaatggaaggttgatatatttttgtaaactcattaaggttgatttttgcttctgttaatttactattaaaaaagtgagttgaacaatgagataaatcacaaaagca

SEQ ID NO: 387906 - DNA, 738 bp, Cannabis indica
ggccacactataaatgtcgcgccttgcataccccaccaactctatatataatatcatttataaatataatcgagatagtatttttttttttttggaaaatcgagatagtatttaatcataacaattataaagatattttacatatatttttatagttctttattaaaaaaatacaaaaataattataaaattacataaaagtaacagaaaatattattaaaaaaatatacaaataacaaaaaaaaattaataatgtaaaattcttttttgacaatttagatgacaaaatattttttatttatggtgcgattttttagcttttataaaactgattttctcaccttaattaaatgtttttattactcttttttattataggaaagattccatatgcagttgtcattttctttgtttagaaacttcttgtaagagaagaaattttctaatggaaagtttgctttttatggaaactttgactattcttatttttccttaatgagttcgattgtgtcttgataaaatcagatcaaacacacagtttttggcaagtatgaagtccaaatacaagatcagactcgtttttggcaagtttcctttttctggtctagtttgctgcaacagaacttgtctctgatgctgctaaataggattttcttttaagaaagtatgtacagttgtagaattgactttgtggctgtctctagggttcctatgttctataaatagaatctagagagc

SEQ ID NO: 387907 - DNA, 898 bp, Cannabis indica
gaaggttagtaggaaattaagattttattttttttatgttatatgtggacaatattcttgcatctaatgataagggattgctacattaagtgaaataatttctttcaaagaaatttgaatgaaagacatgggtgatgcatcctatgtcattagtattaagattcattgagatagataccgaagtatcttaggtttatcttatgaagcctatatcaataaagttttagaaagattatggatgaaaaattgttcaccaagtgttgctccatttgttaaaggtgataaatcaaatttgaaccagtgtccaaagattgatttgaaaaggaagaaatgaagaacattccctatgcttttactgttggaaccctaatgtatgttcaagcgtaaacaagaccagacgttgcttattctatcagagtgttaagaagattttagggtaacccaaggatagaccactagaaaggtgcaaagaaagttatgaggtaccttttactaaggattacaaatatatgtccaaatgaatcgaaagtctagaagtagttggctacttagattctaattatgctggttgtaccaattcacgtaaatcaacatctggttatgtgtatacatctgttggtggagttgtgtcataaaggagtaataagcaaaccttgattgctacttctactatggagggtgatttgtttcttgtttagaggctatatcaaatggtgtatggctaaaaaatttcattatgggccatagagttgttgattccatatatagcccattaagaatggtctgtgacaattcagttgatgttttcatagctaagaacaataatagtggaatttgaagcaagcacaacgacattaaatacttagctgtgagagacgtgttaaagaaaataaagtgg

SEQ ID NO: 387908 - DNA, 1388 bp, Cannabis indica
ataacccctcaatgacggtattccacgggagacgggatcggggcaatagacatacctcccgctataaacgtgtcctgtttatatttatatttaaatataattaaaaatatgtatataattttttattaaaaatattacaatattttattattctaaatataaaaattaatatcttttttattccatggataccaatagaagctcaaccccgattcaaatagcaacgggacgagtatgggggtaagaatttcgtagcgaagtggggctcgtgagcaatcccaatctatttctgccccgtttacatccctaaactaacatattatttatggtgtaatttatatttttgtagatcctacttttaatttgttttaggagtaacatcaaaatacaattgagttgcaaaattcttgtaatctcaactcctcaaaactaaaactaatcattgggaaataaaacttgaaagtagtattttgattaattttgggccactcatgcacacaacaaacaaaccacaataactttaataagtatgcattcaattccatccactaaacacaaaattccaccttgaaatattgtaccattttatgcttatttttgtaacatcattcctaaagtacccctaatattttaatattttaaaatccctaactctctcattctctctgtaactcccgaagaaatccactggcattctaacccaaaaccaaacctatactggtgtctacacccaacgacccagaccgacatctaccccaaacctgcatctacaccgaaccccatcgtcctcaccatctaaacccataaaatctatttttgctcgatcgcagcagctcgacgagcaaaaatctgtcagagcccaagtaggaatcccctgcttgcatcatctcctaaacaagaagacgatccagagaagatccagcctatcgagaacttatcaaaatatattacaacacaatgttcagtgaactatcgtgaacctattgaaaaaccatcaaaaaactaccaaaaaatatcgagaacctatcaaaaatctattacaatacaacttttagtggactatcgagaacctattgaaaatctgtcataaaataattttcagtgaactatcaagaaatcgtcgaaaaggcatcaaaacatgtcgaaaaaagtaaccaaaaatcacaatcaaaaatcaaaaaaaaaaaagtaaaaaaaaggcaggccatcgaaaacctatttaaaaataattgagaaagtgtcaaaaatggacaccttgactttggtacgctatacatcgagaagtcatcgataacatattgaaaatttatcgaaatttaataaatacccagattatacgagaaaatcaaatctcaccatttaaaagaaaaaaaacagcataacaaaac

SEQ ID NO: 387909 - DNA, 883 bp, Cannabis indica
ttgaagacactggcaccctccagattttttctctttaaacagaggaagcctgttgaaaatggagagctttgaatgttttgattatgtttcaagttcttattgtagatgttttgtgggacaccgttgagattcttgcaatggtttgagttttaactcataaaccttagttagattttcaattgggtagggtaactctctaatcccagttcagtgtaacccaaaatttgttaaatgttgttgcataggcttcaaaatttctggcactatttactagcttaggccttatgcacatatttgccgagcatagaacaatagagatacatcattataatttagtgccatctgacttgcttcctttatggtccttgagatgctaaactgtgcattaattttcgtgttcatcagttttcaattttccaataacggtttatttaattaactgtctgctactttttccttagagaccaaacaataacgccaagatctcatagaatattggtggattgaacttcagttccagctaactgggatagatgggtgagcagaaggaaaggttcagaattctaatggtctctgattttttttaccccaattttgggggtgtggagaatcacatttactacctcgcacaatgtctaataaagcttggccacaaggttagaaaatgttgtcacatatagtagccatatgaaagtactatatttatatttattttgttcctataactgtaatacaaatgtatcgttggaccatttttttttaaaacttgcacacgtattttcttccccttttccatcacatgacagtgcatgtgctaaattgatgttggattgtctcataataaaaggaaattatgctgtattgataattatattatgtttgt

SEQ ID NO: 387910 - DNA, 1851 bp, Cannabis indica
catgttgtgtatttattattcaatactgattattttgttttggtatatgctttaaaatcaggttggtactcttgttatttgatgagagaatttttttttgtttttttataaaaaattatccacaaaatatcgacagcttgtcgatatactatcgacaatattctctttttgttctggtatctgcttaagtcaccaatgtcgacaatataaaatcaatatatcggcataccatcgataagtgaaattatataaaaaaaaataaactatttccataaatggttacactaattgttttatacttgaaaagatgtcgagatcgacattatttgtccaaaaaacttcctgattgtgagaaaacatttagtaaaaaaagttaatcgaatatcgacaacatattgttataccaccgataaagtcgtaagttaatagaaaaaaaggaattaagtaaaattatacaaaatatataaattatgatgataaatagttacactaattgtttaaaataacgaaaaatacaaaaaatataaaatatacaatgtattttcaattatacacagagatatatatcaactgaggttctggtaatacagatcaacgcaccaccgttcacgaaacatcctcatccgttcttgcgtgacatcaactattagacgttgcatcatcagatgctccacgtactcaatagcataaatgccacaatcaccactaaacgcaacatataatatgaaattagtagaatgtaaaacaaatattattattatagtacttttttatcgctatgtaccttaatttttccttcaaaactaagtcgtgggtggctcgagatgaatgcatcctcgaaagctccttgatgtcgcccatagttaacgctgtgatctgattattgtttgagaattttctgattgcatagatcaatggtggcaacatatcttcccaggtcttcaggatgacttccatgttcttccaattacaaatgctggaatcacagtcgtacacatttaattttccatagctcaatgtcaacttcaacagccacccagtgcctctgtgtgggaagatgcaaaatgaagtaaatgaagtcattacccacccatctcggatagaattggaactgtaattatggaaaacagataaacaattaacaaactataataaacttgtaattgtagttgaaactttaaaaactttctaaaaaaatacttgatgaacacatctgcagtactccatgatgtaatcttcccaaacaaagttttttctgggacccatgtggtttgtccatgcattgctgataatagaggtgacatatgttaagggaatgatacccttctgaggaaatgtcaacggaaagaagtggcgtcgcctcctcagtatatggacggctgcatctatatactgcatataaaggttagagaaagcagttagacaaccaaatatattaattgtagattacttgacttataaaatgtagtaaaattatagattagtttacttacgcaatctgtaagccattcctgcagtgttaatagcttccaaaagaacgatggaccgtaatcaccaatttttaaatcttgaagtcgatggttaggaatgagtcctgaacaccacttctagaaagtatccaacaatcgctcatccggtggagccaagggatcaaacgtcgaagaaggcctatgtttcttcttcatctccgtgtagtctgcaaaccaaataggcctctgtctcttcctccttccaaactcaacctcaggtggtgcctctaaagctaaaatttcaccctgtaacttcgtgtcacctatggagataatacctgcatcgataggggtagctagagcatcgtcatagggatcatac

SEQ ID NO: 387911 - DNA, 592 bp, Cannabis indica
cctgtgtctgataaatctaggaaactttattcacatagtcatgtttactttccaaagtgttgacaacacaataaacaggatcaagtatgtgaaaagggtttcagatgaatttataaatcaaatagacaagcaattgataaggtgaaccaaaacatacacaaatgaatgaaaaatacttctgtttctttattgatgttgaataaaatagattacattgaaatggagttttatttagggcataaaacccaacagatgtttcattacaatattatatatatattacattaaggtgatttagtaaaatcaacttataggttttatttatttatttatttattcgttttaagtaattgatggcttgccgtataaaatggttatttggcacaatttttatttagatttgaatttctgggattcatattagtcaagtttaattgaatggtgaatatgctttatatatttatcaatgtgaggttctgtctgtgtttatggccttcatctttatattttcatgtatggcatatacaggggcggagccagcatggaaaaattagggggggccaaacgtatattgtaaatttaagtgtcaaaa

SEQ ID NO: 387912 - DNA, 975 bp, Cannabis indica
ttaaaatattgttttaattttttttagtaattaagtcatgtttatattatattttgatgacctgaatactgttcagacttgtttcttcatttgtagtttttaaaaagcctttattgttacataaagctcaaattgttattattattattatttcgtggccgacactgtaaaagagcccttgtacgtattgatgtccaatatccaaggttttgggggtttgacgtgcttcttttcgttacgccaatgcccatatatactgtctaaattctgtgagaatgaatttaagggttggctttgatgacaagacaagcggaagcgcatgagtgtgatgatgatcacaatggtggcttggcttaatcttgaaagtgacgacaatcatggtccatatatgcatgacgtggtggcttggttcatgaacatggtaactcaaagctcattatatataataggcctttggattaagagttccttacgatcttggttacagttggttacagttcgtcatgttttcgttggaaaaatacccaaataaaactatttctaattggtactttgaggcatgatttttatcgagacacacttgtaattaataaaacagatgcttaggagcaactacactacaagagaggtagtaaagtgttattggttgattttaatattagatcccacgtattttaatttaataaatgataatatgaaaaattattaaccaattgtgagacaccacattgatgtagttttgaacaactcttatagtgatctctggtaatttactcttagatcaaggtttctctattgagtgtcgttctttctctgtataaatttcgtgtccttgaatagtaaaatgagtctattatttatatgaatcaattacatgaaattaatttccctaaatcaataattaattaaaatgggaaactaaattattttgtaattatagtgaggaaatgataaacttagtctttattctttgag

SEQ ID NO: 387913 - DNA, 1334 bp, Cannabis indica
gagcaaaaggctcaggttcctcaacagatttgtatgcctcaactatcccttgggcgtttaacaactgctaaatttgttgttcctgtgctataaatcgtggttcatttatcacaggagcaggaacattaggaccggctggtggaggagcgtttgcattatatcggggcacatatactccttgttgtagaggaatatcatatggtgctcgataaggaacctcgctttgtgcgtgacccatgttcaagtggtctctcaaattaggttgtcgcctttggttcagatggtcccagagatccagttttcttgcgtcatgtgggggtgtcaaggatgttcctcataatatagaggaggagcattgtcatgaacactcacaaactgactccttgagtcagagcgtaactatcatccatgaaattaaccgccctctattgttgaggcctcccggtacaggcccttgttgggcatacaattgtgttgtgctagttcgagatccttacaagtaactattgtcttgtggtggatgaggttgtgcatgttgtggtccagtctccttgggtgtcagtccaagatgggcatcacgggagatagtgcaccatttttcccatccatgtctgctagcttgaggtccctatcgagcatgattgtctcgagagtcctctcgcctgtctcaagggggcgaagtcaagtcttaacttggaagacgagtgggcggtgcgtccctctgtcgtgacctccctctcttagctggttgatgtggtggcgatgcgttagttcgaggaggctaaggatgtcttattagtgatgggcggaacctgattggaaaaggtgggttttggacatgatctctttcatcctcatcaaaaccaatatccctaggagtcgaagacagttgagatggagggactccattattgtgtgttgtgcccctctcctcacaggagcctcttcgttggggaatgtggaacgttgttttgaggggcaccaagctcttgcacatccctcctagtttgttgatgtgtaggaggggatgtattgttctttttgttcccaccactcggagtcgttacccattgtcattattgtgatggaggacgctcacttctccttcaatggatgctgttctcatgagaaggttgttgtggtatggcattacgattagtatcatggctttgggttattcgtgacctagatatctcttggccttcgtagggtaacgtgtcgaacggctcccacggggtcgtccctttcttgccataccgtgacgctcgtgggtttctcgtcatttgttgggttttatgccctaaataaaactctttacaatctgattagttatc

SEQ ID NO: 387914 - DNA, 1369 bp, Cannabis indica
ttttttcttttttaaataattgatttttgtaattgatgtatcatttcattactttaggcgtcatatgtttgtttagattttagtttgtaatatgagattggtttatggattaaattattgtttgttgttatacttaactggctctaagatttagtttttaatttagttaatttacataaattgttattaggttttattcttttaactagctaataaatattagtgatttctctttgtcaaattataagatctaacttcggcgacaactccaacatccaacattgatcattgacaatttcaatctctaactacggtaatttttcggtaacgacaacttttctgacgatgatagaaattctgtcgaatattctcattctattttttctacttttatttcggttaatattttgttttagtagatagtaactgtattgtgtagtgggttgatggttgaatattaaagcttctgataaatttgtaattggttttaattatggtcttgtgttagtttagttttgatagtgggttggtggtaaaacatataaaatttatatataagttttggtatttctaacttatttttttttttggttaaaaaaatcaatttttaattatatagaattaattagtttattaaattatcgtcttactaaaattattttagtactactgctttagtttctgtaaaaaaaaaaaatcagttgagattccttttattattaattttagtattttttttttaagaaaaaagaaaaaaaggaaaaaaaaaataacaattttaaagtttttttattgcatttatctttatactattaagagttagtcccacattgctaatgtgtggaaataaattgtgatatattagatgaatgagctactcctcccatggccaattggttttgagatggaacaccatccatcttatcctcaaattctaacatggtatcagagccacttgtgatccgttgtgagcccaaattgccaccggtccaaaaagccggttgttatccgttgtgagccaaaagtgccaccagttcaaacagatacttccgctgtctccccgttaacctccatttgggacctttcgacgaatgtgccagtttccagtgttgggtctttgacctgtttcaaaaatccacaaatttggcattgtgagattctttcaaatgtcacgttcggtcctatggtctcttaaatgtcgtgaggagggtgtattaagagttagtcccatattgttaatgtgtgaaaataaattgtgatatataagatgaatgagctactccttccatagccaattagttttgagatgaaacctcattcatcttatatacataataatttattggctaggttgctgtctctggagcgg

SEQ ID NO: 387915 - DNA, 1579 bp, Cannabis indica
atgttctatgttaatactttgtaattttttttaaaggagtagatttatatatatgaataaaaaataaaagatagagttgagagaatcagattcaaaaccaagtctaccaagtaatgaacaaacacttacatcaattatgttgtctaataattatgtattatttttttcataaaaaaacaattatgtattatttctatctttaattttatataatttgttatgaaatttgagggtgggcttaagccttctctaggctctatgtatgtccgcctatgactatatatatttatttttaaaaatgttaaaagataaagtgatgtttcgtattttccatattgttatattgttattggtgcaattaattatcgagtcacatataatttaatgtaataacttttctgaagtatcgctaactaattataagatgtcacctctagaagacaccaatagtacaatgctcatttattttgatataaattttggtatattgtattttaggtgacatttagtataattttcagtatgtattaaatttggtccacagtaagttgtagagcatgtcggtaaaaatatattacaattcatattattttgttttgaaacaaactgttaatcctgaaaattagcaagactaactcccaagattagtcgacgcttagccaaaagatcaatagaagtgtacccgaaagatcgctctgaatgcatggttatgcatgtcaggcatggtgttatcgctagaatttgcacaagaagaattccattatacctattgggaatcgaggaaagacaagcagaacatgaggcgacgggaaggccccctgcactaggtccccagcgctagggctccctgtcccaggccccctgcgtcagggctctctgcgccaggctccctgcattagtgtcttttggaccaagacccctgagaaccaacgtatgttgcaccaaggtcccatgcaccatggtccccctgcgtgggttccctacatcaggagtttattttggcaccactaacggtttttaaggttgttctttagtgaggaatggagtttgaatatttgaccctctacaagataatcagatgataaaagacatacacagaaagaaggtacacatcattgacccaccacgctggtaccacaaacccgcatcgctaagtggggaccatcatgcgtgcttaaccatgacgcttggcaaggtgtggagacaaggtctgagcaagtagttgacgtacacacctagagcacatagtacactcaaccaatgatacgctgcaggcactacactgcaaccattattttaaccactgtcacctgacctacgtataatagactaagttgtccctttatggatcacatgtaatttgagccatgagagctccactataaataggtcttcacctctcattcataggggttggaaaattattataagatttcactcttagaaatacaagcacttcgcttcctccattgttgcttggaacatttctttaagttcttatattttaatcatcattctaagtcgtgtgtttgagttttgattttttggccataatttggttgacgagttttcactgtca

SEQ ID NO: 387916 - DNA, 1613 bp, Cannabis indica
gggtcccatgccgtgatggcctaagattatactctttatttcattcaatctcttatacccacaaacacacacacaaccgccgggccttcttttatcttccaatattagatttctcaatcatcttgagtttcccaacgcctttttcttcacttaattgtcttctctctctctctctcctctttaattatgtctacttaaatctttatttttatttatttttttttttaaaaaataacttgtgcttcaatagaatagaaaaagaacaacacaagagcaacaagttacaagaaaaatagagaaccattccaaatcaactcattatctaatcctagacttatctttcccactttatgagctaacacattacaatccctactaatatgacaaacagctaagcccgcactaaaagatagcaagttcttaatgctacggattacatcatccaaaatactattattccaattacaagatttaagcttatctactattgatttacaatcagtcatcagcacatccaccggtaaatgaagcaattgagcccactggatggcctgatgaacaaccttggcttcagcaacagcagggggaacaagcccagaaaatggagtagaaaaacatgctttaacccgattacaacattccatgagaaccactccaatactatgcttcctaccatgagaatcagtggctgcatctgtgaaaattctgaatttacttgatacagatggttgtgcttatgttggtgctttagaaatagcaggataattcattgccacctgaccttgcttcacatccaaatatttaaaaaaaaataggcaagactccaatgataaacttcctttgggggaagagtgaactgtttatgaaagatgttattcctttgattccaaagcccacaaaaaacaatataagataccaatattttctttatccaaaccttgaaacagagatatagagtgaagcagggttatcatgatctgtttcctgagcatcctaaactaccatggtgtaatctggtttgggataggcttattattcccaagcatagatttatattatggttagtgttttgggaaaggttaaacacaaaggagagagtaagtaagtttaatcaaagcatagacacaacttgcgttctgtgtggcaaggagaatgaaaccattgatcacttgttctttcagtgtgaatacagtgcaaagtacttacaagaagttaaagtgtttctgcaatggaacacaccagcagatgacacagttaaattgctgcaatcctgccaccaaacgaagagatttactgcagcaaggaaaagcattgtgaacacagtcattgcaagccttgtgtatcacatatggaaggctagaaatgaagctttatggaatcaacaattatggcctacaaacacggcagtgcagaaaaccaagcatcttagtcagctaagaatcaaagcttggccgcctaaaaagcaaaggatgaagatatagattggattatgagaacataattctgtatatgatcataattaatgacagaatagtgattgtaatttgtaaaaatgttgtgatgtaaagtttggtttgagcaataaaattattattcaatcaaaaaaaaaaaaa

SEQ ID NO: 387917 - DNA, 1441 bp, Cannabis indica
gctactaaactagataataaattaattggaataaacttcaaacaatgatgatcaatgtataaagtaaaggctctagcaaaattatgagttactatattagcatcaatgacggagttagcgcgaaaattaaacgactaaatacatataaaaaaataaaaaaaattgtttatttttaattttaattatttttcacgtgtaatttttttaataaaaatgtaaggggaaggggcacggacaccctccggcccctccctatctctgtcattaattagcatatcgtttaatgaaaaaaaaaaaaaaccttctcaattcagtaagcaaaattttacaatcttaaattacaaggctaaacaatgaaatcataacaatagagccccttaaagcttgtacggcacttaagcaatctatcttgatgatcacttgctgccattgatgttctttgatccaactagaagcctctcgaagtcatattgcttttgcaagttctggatctactatacctttcaaaaagcaagtccaacctttaattaagaagttgttagcatcacgagccaccatcccaaagctatagttgtggccaccatcaaacaacgatgtatctatgttgatcttgatactattagtttttgtcaaagtccactggttggccccatcacctacctaaaaaatcagaccatgatgaatctatctcagatttttaagtagacctccattgatcaagatacacttttgcatatgcaacaatgttttttagcctgaaatgccttccctttccacactagttcattacatgcaccccacatggcctaatatatagcagccaccacacatttctgttggaagttattttaccagaatctaaatttactaacatgtatgtttgtttaatgaaataaacacgtaaaagtttatagaaaaccttacattggttgtagcagaataacatgactccttccgttcagatctctaatccttgatcctttctgtcgcaaagtatgatcaagatctgaatttgaattctctttcagttgacagtatgaactacacaatcttcctcactatgctaggtattgctatgacatgtgtggacatattctcaatcattatatgcttcaaaattattgagaagaaaaaaggaattcaaaaatagaagaggctctctttatttttttaatcgtcttacaagaggagtctgataatgttatgaaaataagagccatattattctatttatagggtggctattaaggttaggtttagaattaaaaaaaaagataaataaatagttgtattaatcctccttggtcgaaatcttattgggcttagtggatttcaattttgccattttattacaacttatctttcttttcacaaatgctatcttctagttctaactctataaatgtcaattctatatattaataattaattaattatcaaa

SEQ ID NO: 387918 - DNA, 1319 bp, Cannabis indica
aaatttgagagctgagggagcagctagctcagcctgctccaaatcctaatcctgatctttcggcatctctggtagtgccacaagaagtgggaaatcgactggaaccattgtatgagcggttcaggaaggagaatctaccagtgttcgagggtggtaatgatccactcaaggcagaacaatggatgagtatgataacatccatatttgacttaatgatcgggtgaggtgtgccatttacatgttgcgtgaggatgcccgcatttggtaggaaattttatcacaggttcatgatttgaataacatgacctgggatgtttttcggaccctgctctacgagaaatactacaatgaatccatttgagctgcaaaggcagaagaatttatatggttgacccagggcaatatgacggcgatagagtatgccaccaagtttgaccgactggcaaagttggcctcagatgaagtagccactaaggctgccagaaaagctaaattcattcgggtgttggaggaacacatcgctcgagacgtgattgttgctgccaaacaacctaggtttgttcgaacctatactcaaatagttgagttggcctttgttgcagatggtgtagaagaccagattcgaaaaagaaacagtgcaagaaaagatttgtggaagcaaacacctagtgctggtttcggtaagggtactgaccttaatgaccgtaagaaaaggcccaatgaaccattagctataggaccgaacaagagattctaaagtaatcaaggttttcgacgtgttggaaacaagaattggcaaacttatccagagtgtccgaggtgcaagagacgccatcagggcgaatgtcaagctagagcctgcttccagtgtggggtagtgggccacctaaaaagaaaccgcccacaactactacgacaagaacagaagaaagatgacactcttgttcctgcctaggtatttgcccttacccaagtagaggccgatgttggcccttccaccgtgacaggtcagatttttgttgatggtaccttattgactgttttaattgattccggtgcaatgcactcctatatttcaaatagagtgattggaaattgcttagacctagtgatattttaccgcgtggctttagtatattatattattaacaaataaagtatgcaccttttttttaaaaaaaaaaaatactaaaataaaatacattcctctaaacttaaatcttaggtccacacatatatgtacactacaacaaaatttcatttttagtcacaataaaatttgtgactaaaagtgaaaaaaattgtagctaattataaat

SEQ ID NO: 387919 - DNA, 1030 bp, Cannabis indica
tcgtttcatcacatttttttactttgtatttacaatatttaattttttttttttccgacaattttcaactcaaattggttcggtttgaaccaaggcaaactaaactcgtgcttagaatccacttagtctaggggccaaccgaaaaaatatattttcttttaaaaatatggctaattagaatttttaccctcccaaactttaacatgtaccaaattatgcctttgaattttttctgaacaaattattgagattgttagatttaaggacttttatttaatttcattcaatttactattttagtaattatttatgtactaaatcatgctctttagactttgatatctaccaaatcatgtccctcaaactttgacatatactaaatcatgccccctgaactttcatccataatgttagacttttattttattaaaattaaacaaaaattcttaaatataacaatctcaatagttcaagggacatttttaacaaccttaaaagttcagggacataatttacacatcaaaattcgggaggtaaaaatcctaataaacctaaaaatgtatattttttaataggtgtataattttattttgctatggtccactcaatttcagaactgatttttttttttttaatcaggaaaaagaaaacttcattaatttactcaccaattacaaccaataacacttcttcaagagaagcaaccaccacaaagtcaactaattacataccaatctatgaagcaaattcttctccttcctagaacaattcctatttttaatcaataagaatctatacttcacttcacatctaattttatttacaatacaattcacactagtcaataccgattttgaactcaatcaatgttaataacaaaattatatattgatgtaataagcgactttctctagcttcctatatatataataactttataatctccaatggttaatattttggagaatgcttgataaggtggaaagtttatgtggacaaaatatagagatgttataccattggagataaa

SEQ ID NO: 387920 - DNA, 1238 bp, Cannabis indica
gtccaatcttagatatcactttcgcctatgaccatcagatgactaaataattatcatcattacattttacattcaaaattaagtctaatgaaatataatatgactatatttaatgtttggagttctaaaacctcacctaagcggtacacattaactatcggtggcggtaaaaattggtgtaccaaaaacgttgccaaaaatggaatccccaatcaactatattgtaggccttatggaggtctattttgatagaacatcgaggtgacacattctttcttccattcagcacgtaaatttttatttgggttgaccgacacacttgattttggaaatgaagtaagaatagtataaaatgtgtgtatatgtatatgtatataaattacatgctatgttatgtgattcgtatactactatcactattacggtagcggtatggagtgcatttgtacagtatatgatgttcaaagggtacaatacagtgttaccaacactagtacgggacgactctgtagtgcttgcgttatgacactcattggtactcaaggtacagttcaaccctaccaacactagtacatgacaagtacttagtgcatgtggtacaaaggtcgtacttctattaagaacgttcatgatcatttgttaagccttgtaaatagatgtatatggacgcttaaatacaagtcagaaatatgttatatgcttttctttctacgttggttgactcacaaatattatttacatatgtaggtaaaggaatgacaaaggctgagcactagtgagtccatggcttaagaatgattgtacatatcaggatgattagacttggagagttcattctcgggatgacttaacccttattttgtagttgttgtgcaacatgtttataaaatgtatattgaatatgactgtaaattttaaagacggaattctagcttttacatatgaatatatagatttataaaagtttaaatttgatacaatttttgagaaacccttttattagaaaaggcgtgcatagtatgtaaaaaatcactatagcaggcctaagtaagagggcattgcaccttcaaagatcaactatggaccaactatcatcataatactgttccctagtcccagggtcctggtttacagaatcactaaggtgatttttccttcccttggcctaagtacttttgttgtaatgccctaatgctaaggcaagctacagtgctttttcaattattgtgcaatctttg

SEQ ID NO: 387921 - DNA, 2560 bp, Cannabis indica
ggtaggttttctctcttatttagagagactaggtgaagctaacacgtacaatgcacgtgcctagttctccatattatatttattatcgtttaatgtaagaaaattcatgtaatttaatttcacataattaaaatttttaacactacttctatattgtaaactattttgaattttcaaaattttgtaggatgtttaaataagtataacatactcatagaaaaaaagtaaattaaattttgtttttttgaaagtcaaaacagtttcgggtgcattggtgcacccttttttcatgggtgcactgtaaaagcttcttatgagatatactactattaaatttttaatccctttatctatttcagtatctagaaaagttttttagttttttttatgatcgtttacattttagctatttaggactgcctgtaaaattaagattcaaccaattagttaccacgttaataagaaaaaataatagtgcaacaaaatatttgaatcttattttcggtataataaactattagaaattttgtaaaaatttagaagtgttcctaaataacttcaatgtacaggatgatgtaaaaaaaattaatctaaaattttttttggtatgctgaaattaataaactacatttttccttctacaactatattcttaagcttaatattagtgcatgaaatacaaattaaatatttttgttctaatattatctatggactttgatcactaaaaccttaaggtcaaatcctactcttaagcattgttaaaaaaataatatttttctaattaaatttttacaaagtaattttatactaaaatgttactttgaaaatattatcataagagtattagtttacaaaataatattgtaaaagagaaatcaaaatgtcactcacacttttataatagtaagattattcaatatggtacgtgtgaaaatatcaaatttgataaatgataaaaattgtgttaaaatttgtacaataataaatatcatattttttaattgaatttttaccatgaacaattaataatatactttaatatgcatgattattacaatattatctattgacctcacttttattcaacgataatgagtcaattaataagcgattaagaatgtaattaaaatagagaaaaaacaatttattagtaaagaacaccaaattttaaagaggctcagccccgtgagtgtgatattagcctactccccttggattgtattaacttgagataaagaacaaagtattttcctctcttaaagctcttacaatgaatctctgagtaattctcttagatctctctcactctctctaaagcaattctttcgatcccttcttccatgtcaaagtgaaaaagtttagataacatttttcccctaagtctgcctgggaccttcttggtcacacgtggacttcacttgatctagagtcttgtctgaactagtgatgcgtgtctgtggtttcgattgatgatccgatgtgactctgaccaagagtctcttcagtttcaacttattaatgctggttgatagttttacctcgaaccacgcctcaaaattcgcacgtcatgatagttattctgcaagtaatcaagttcataatgtacacttttggggagaattttagacatttaaaatttgaaatgattactcctcttctttgatccgcttataaatagggttgcaaatcctaattaatgacttttagccatttttacttttgaagaatctgagcaaagatcttttttctctcaattcctttaaagaattctaagaaaacaccggccagcgttgtttgagcagaacaaaagcttcgaaccagtgagtaagttcttcatttcctcctttttatacatttgcatgtttaattttttgggtttctgcttgtgaatcttgattgttcttgaacctattctaggatatctatagaaattctaggtttaagacttagagaccttgattatgcttaatcatagtgcttgatcgtaactgcgttttaattttaaccccacgatactcattttcacttacccactcagggtttagtgagaatcaggccttaattcaaaattttaaacttctggattgtaaactccattattatgcgaaatttccatttttgatcctccaatctgacctggtcgatataatcatcttgttttcatttgttaccccgaccaaactctcatcttgtttcctcccttttgtagatgaagtctggtgagtttttaggaggcaaacatcatatcttagaatctttgcatggctctttgacatatgcctgcatgcttaagttagcttgtcttccctaggtcctagagggatggtaaggcttttgggtcatagatggttatttattttgtggcaaatctctgtgcctctcccatataagacccttctcaggccagcataatctttccatgaccttccgtgatgaaggaggcttaattggtaataatctagattgttgccttcttttctttttgccagatgtccttaatttagaaacacgaataacatttacccccaagtttgtgggactcttgagtggtggaagc

SEQ ID NO: 387922 - DNA, 824 bp, Cannabis indica
aatgatttaattttattagtggagttccagcacttgctttggcatagaaaaatttggtgttacggtcacccgactgtagccaatcaatacgagacctttgctgccagtattgttcttcttttgctagaagatcatcaagaatcgattcggcagtgtgtagattgtgagaatgagacaaagctgtggtagttgatgagttgagacgattcacacatgattgagcttgtgaaatatcattttttaacttcccaaactttcgggagtgccaactctgcaagtgatctgcaacattctgcagattggagtgaaggttggttgtaatgtcaccattatgatgtagcagtcagttattagagataatatcaacacactcagaatatgataaccacattttttcaaatcggaaacgagatcttcgaggttgaataaagtcggctaaggcaaagaaaagaatattgaccaatagtgcacggtgatcagaaccaaaatagtcaagatgagtaagcttagggagaaatagactatcagaccatttcttgtttataaggcaccaatccaacctttcctttcaagctgaaggatttttcctattctttgcccaagtaaattcatcaccatcaaaaggaaaatcattcaaaaaacatctatccaaagtagttctaaaagcagccatttggttatcatgtcttaaaagggcctccattcttatgagtgtgggaaaaaaatttcatttaaatggccaattagtaaccacgggtccaagggagagacatcagcaagtctattgataagttcccaagtaaacttttgttggaaattatttt

SEQ ID NO: 387923 - DNA, 1291 bp, Cannabis indica
cgacgaagggcttcccttccctttgttgaccaaggacggcgcttataacgtaattgctagcatcacacatgatctcgaacggcaagttccaatccggtggcagaatgacaggggcagaagtgagtttggtgacaagtgttttgaaagatcttcacactaaggtgtacagttgaacaccacatattttgctaagaggttcgacaaatgacgagttgtcatcgagaaaatctggatgaacctcctatagaatctagattccatcatgcccaagaaaagatcgaacattttttacagcattggagaaaggcgactttgatatgagttcaatcttgaattgatcaacttcaattcctctttgtgaaacaacatgccccaagactaccagatggcaccatgaaatgacacttttcctagttgagtattaagcctttctctttacatcgtttgagcacagattctaaattgagaaggcttgattcaaatgaattattgaaaactaccaaaccatccatatatacctctatacaattatcgatcatatcactaaagatacttatcatgcatcgctgaatagtagttcaagcattacacataccaaatggcatacactggaagggataaataccaaaagaacaagtgattgttgtctttttctaattttttaaagtaaactcgatttggcagtaccctgattaacaattgagaaagctatagaaaggatgacccgccacacgttctaagatttgttcgatgaatggaagtaggaaatggtctttacgggtggcggcatttaattttctataatcaatgcacatgctcaaacttgttatgaccttagtaaggatgatttctcccttatcatttgttaccactgttactctcgatttctttaggataaccttaatacccacttgctgtcggcaataggacagttttggtattttgggatactttatcctattgccaacaacaagtggattagcccaactaaggttgtcttaaagaaatcatgagtaacaatggtaccaaatgataagggagaaatgatccctactaagatcataacaggttggtgcatgtgcattgattattaaaaattaaatgccaccaccggtaaagaccatttcccacttccattcatcaaacaaatcttgaaacgtgtggcgagtcatcatttctatagttttctcaattgttaatcagggtactgacaaattaagattgctttagaagattagaaaaagaccacattcacttgtccttttggtacttatgccctgttgggttttat

SEQ ID NO: 387924 - DNA, 1399 bp, Cannabis indica
ccgaagagttcctatcggtgggacagacagggacggtcaaggactatcgggtccgctgggaagtcttggcatctcgggtcccggacgtgcccgatcatatccttgaaggcagcttcgtgaaaggattgaaggaagagattagggctgcccttcatgtactacagcccaatgggttagcccaaataatggacacagcccaaagaattgaggagggacatcacttgatgaatacgagcccacaccaaaagcccaatacatccagacccaattcaagcccactatcacctacacggtccaattacaattcttttggggtacgattcaatcaatcgccatttcaacatagaccaccaagttcttcgccaggaacgatttcatcttcggcatccttctccaaacccagccatggtcgatcaaacaccaccccttcattcaagaagatatccgaagccgagtaccacgatcgcaggtcacgaggcttgtgtttcagatgtgaaaaaaaatatcaccctggtcatgagtgtgatcagaagctcctccagatagtcctcaccaccgacgatgatgagtccgacacaccagaggagaattcacctccttcccctgattccggcgagacagtgactacagaagagacgcttgcaactctttcattgaactccttaattggaatttcggctgcccatactatgaaacttgctggacacatcggagcgcagcctgttacggttcttatcgacagcggagccactcacaatttcgtttcaatggaggtggtaagggcagtgggcttaccaatcaccgccaccacttgctatggtatcttgttgggcacgggtggaaaagttagaacagagggaatttgtgctcaagtggaattagacttgggagctattcgagtgattactgactttcttcctctcgagctaggaggcgcagatgtaatcttgggcattaagtggctagaaacactcggcaatatgcaagttaactggaaaacaatggtgatgaagtttgaagcggcggggagttgggtgacactacagggggacccgcgtctatgtaaatcgccaatttcgctcaaggctatggtgctggcagtggagaagggggcagaagggtactgggtacaattgaatgctattgaagccgagaaaggggatgtccaaccgcctattccccagcccattaatgaactcttacagcaatatgaagctgtctttgtgatgccaccggggttaccaccggctcgttcacgtgaacatacaattactttgaaaccaggcacggcaccaatctctgtacgaccttatcgatatgcccagatacaaaagagtgagatagaaaaaatggttagagacatgcttcaagttggaatcatacagtcaagtacaagccc

SEQ ID NO: 387925 - DNA, 545 bp, Cannabis indica
ttttttttttacttttacaaaaaattcacatagcaaccaataaaacatcttaaattgcaattaaaatctatatatcactttatataaaaatcacatatctacatgaagtaattcctcgttatattgatttttatattttatttttatttttatgacacataataatataaaaatgtttttagctatacaaaataatcgggaaaatggtaattacgtgaagaaagagatgggtttttacgtaagaaggaggtgatattaatgatacggttgaggaattatggcccaattaaagggttaccggtgggggctaaacaatgtcacccaatgagagcctgccacgtgtagcgtagttggggatttatttatttatttatttctgtatttattgtgtgaagataagaaaaaaaggggcaatgcttttcttctgtatgcatgtttggctatgtaagtatgtaacatatttaattccaataaaaaaatgttaaatatttaatttctctaacaaaaaccagtacaccaatatgaaaaaatgagtaaatatataa

SEQ ID NO: 387926 - DNA, 563 bp, Cannabis indica
ttgtcgttttacacttgcttgcttaattttcatgttacacactgttgcaatgaaattgttgcaatatatgtaaagttgtataatatttaacacacaactatctctgtatagatcgcttgaaataaatgggactcactattcatttcctcgtaaggtttgctattattaaaaatagaactttatggagaataatatatatcattacaagcattatatctaatcttaagatcatcaatcattatataattgtgctctaatacattggatgtaaattaatttaaaaaattcaactttattatttatttattattaatgcttcataaagaattagtaaatataagatatgaaagtaaaataatatatttttcttaaaaaaaaagtaaaatgatatttacacaaatgtgacctcactataatccaaacccacccaaagtaacaagcaagatcaccacgtccaccactgtggctgtacgaatgttttgaaaagaaaaaagtttttcttatttatttatttttttaaatccctcaaaaaaaaaaaaaagaaaaaggcaaaaaaaaaaaaa

SEQ ID NO: 387927 - DNA, 1801 bp, Cannabis indica
acctacacttgaattgcaacttcttccttccttccttccgcactctctcttttctaatcctctttttcttcttccacactcgcctataaccttttcatacgctaacacaggtatgtttattattcttctttctcatttatttacttttcctccttccgattcatcctacccaattcgatttcatcttttccgtgcttgatttctctttctccttctttttattttattaattttcaagatgtaatttcttcgaaatcgtttctctttccatacttcttgaaattaaaactgaaaaataatatgtatttgctgagataattcatgtttccctcaatatttaagcagcctcgtctgaatctacttgattatttattgtttcattatttgcttgaactatttcattgttttcttttcgagagattcttgatttgtttttttttccaattttaattatatttttggggaaagtagaataatcacccaagatgccgaagaacaagggaaaaggaggaaagaacaggaagagaggaaagaacgaagctgatgacgaaaagcgtgagcttgtgttcaaggaagatgggcaagaatatgcccaagtacttagaatgctgggtaatggtcggtgcgaggctatgtgcatcgatgggacaaagaggctgtgtcatatccgaggaaaaatgcacaagaaagtttggattgctgcaggagacattatactcgttggtctcagagattatcaggatgacaaagctgatgtgatcctcaagtacatgcccgatgaggccaggcttctcaaggcttatggtgagctgcctgagaatacccgtcttaatgagggcattgctggaggccttgaggatgaagacgagggtgctggtgatgattacatcgagttcgaggatgaagatatcgacaagatataaagaaatttcaactttgtttgatttgaagttttatgttataaaaaaaggcattatttctatgttggctttctgcatatgaagaaggtttgaattttacaggttctgcacaggccttgatcgatgttaacaacatctttccttaactaatacatggatatctatagtctttgtacttcattcattcattctttttcttttttctttaatgcttttctgggttggttctttcacttccattttgtttttttgtgtggttttatgctttctatcctcagaattttatccaaccaaattttaaagtggctattgtttgtgtttatgttatccaataaagctgtgttttgctgcagctctccccattttgatgattttctaaattattgcaagtgtttctttcaatgaagacccaatattttgtttctgtctataatgacagcaaatcattttagtgggatttttgattcatttacaaaatgtttatttgacaaatttagaacgctactagtagaataaaattaccttacacacttcatacattttccaccttatcaaacccaggtcaatttaatagttaatagagaagcatgagagatccttagatcttcctaccccatataatgttctatacgatttactcacatacaataattgtcacagttcataaagttttactaggtaatacagttatattagaaagttcacgctaaagtattccaagtagagagaaaacttattcacaaatttttataagatcaggaattactaagttgagggtattaacatggtgcttggtgcctttgtcttttaaaacctccattaagcgatccttcttttttcacctgtaaatatgtgaaaacagcattcatttcgtctagtag

SEQ ID NO: 387928 - DNA, 1154 bp, Cannabis indica
aaatctcctattccactatctcgaagatgatcaagccataccgagactttcacaacaagtacacccaatgttccttttagcttcttcaaatccttcaggatgtttcattagaattcttttatccaaatgttcatacaggaaggcagttttgacaactaatcgttctagttccagctcttgacaggcaacaagtaccaacagaattcttatcgatctatgcttgacaaccagagaaaaaacctcattataatcgactccttcagtctgagagaatcccttcgcaactaaccttgctttatacgtgcctcttgtacacctagaatgccttcccatttgtacactcatttgcatctgatgactttaccatctttcggcatcggtattacatctcaagtttgattcttctttagggagtgcatctcttctgacatagctctattctatttctttcgatcttttcccttcattgcctatgcatagctagtaagctcttcatgcacaatttgattagcaacatgaaatgcgaatgtaatttaatcagcatgtccatatctatctggagcctttacttctctccatgttctgtctcttgctagtttatagctttttagattatcacttccggaattatcttctgaataatcactttcatgatctataggtttttcagtctccactctttctggaggctccacctcaagctcagttcctaaagcttcaatttcttctcagtcagtattggcttgacttccaacaggtttgtcaatgaatcccataatattcattaaaggtcacatccctactaattatacattttctcattttgggctccaaacaccacagtatataacctttgactccttctagatatcccgagaaaatacactttaaggtccttgcctcaagtttgtcttgcctgatgtgtgcataacagacacatctgaataccttcaagtgttcataacttgttggcttccttgaccacacctcatccgacgtcttgaaatccagtgatgttgacaaacatttgtttatcaaataagctgcagtggacacaacttctgcccagaacactttgggtaatccagcactcaatagcatgcatctgaccctttccaagatagtcctgttgaatctctctgtgagtccatttt

SEQ ID NO: 387929 - DNA, 1700 bp, Cannabis indica
agaagagagtcaatttgagattgtaaatctttagcttgattaatgtcaaaatcagaaagaggttgacaggagaggatattctcaagacgatcctgcaataacttaattctatgactttaaaaatttttcttagtggaactccaaacctgaacagacctaagacaagaatcctgcttaagcaggaaggaagatagaggatcaacattacagaagctagaggaatcattcctccacccatctttaaccacagaaagaaagtccagttcaagaaaactagaaattctcacacataaacctcctactagaagtaggcttatgaagattatcatcaagaataacctttaaagccctatgatcagaaaccaaaaaaacctaaatgataaagagagaccttaggaaaagatctaaccaagagttattaacaatgcaccaattaagcctttcaaaagagttaccatgtttccaagtaaatttattccctatatacggcagaggaagtaaattaaatttattaagaaaatgttgaaagttagtcatagcatacatacgaggattagaagtattagatctatcatttaaagtaaggtaatcattaaaatccccaaaaataaaccatggcatactaggagcaatatcatacattcgatgcaaaagggtccaagtatccattttatttgaaatataaggagaaccgtagaaacaagaaagatgctatttagtattaacattatcattcacagaaacaaaacagtccacatgattagaagagtagttattaatatgtacatcaacagaagcagtccaagaaagaagtaaacctccccctaaacctcttctaggaatctccaaaacattatcaaaagataacctagacttaaaactataactagaaccaacccctagcttagtttcaataacaaaaagtaaacaaggtttatgctgcttcacaagaagggaaaggtttcggaatgctcgggggctccccaaatctcgagcattccaacatataagactcatttttccaggcggggttgctcagaaacactcgccggtacaacatgatcagaatcatcagaaagaaccataacatcagcaccattagcccgcgccctcttcaacatacctcgaatagaagacccaacaaccacatcctgcctagtaaaagagcgcttggtacccgaacctccacttatagataaagttctaggagaaataaaaggaacaaaggattcagaggcttgaatcccttttcccttgtcagtatgaataatggtgggtggcccattcattgtagcttgagagacagcacagagaagactctgaagatcaccaaacagagaggcagaagtcacagcttcctgagaggaagcaggagacgaaaagttagtctggctaacattaggagccaaagtgaggggattatcttgcgaaaggggtaaacttgcttgaggaagaaactgattgacagcatcttgaagatcatgattttgtgtaaaggatcgaggttgcatttcctcgaacagaatagaattggccaaatcaaaagggtctcgtttaaaatgtgactttaaaggagctctgatattctccttgaaaggcaggacaggagggatgcaaccctcatcacaacgttgcagaaaggaaccacaattagagaaaacatgatcaaatttcccacaaaaatagcaataattctgaag

SEQ ID NO: 387930 - DNA, 943 bp, Cannabis indica
aaagatgaaaatgaatgaatatgaacgtactaggctactagctaccttggtgtctttatatagccaaatcataataatcctaatcctaatataattataatatcttaaccctaattattattgtgaaaaaatatagatatttttacttagtcaaaggagtctcctccaatatttgattttttttttatttaaaaaaggaaattatataacattaaggaataaattatcatatatatatatataaaaaagatattattctctttttttttcctagaaatctgtcactaatagaagcttccgtactttcactgccatggccactatcttatattatcttccatctgaatttgtgcgatcacatctccactaggaatttcggtcgtgtctagaaagttctcttcgcaaacacgttctccttcttgaattgacgagaactttcttgttgttgtttcacaaaggtaatagttctcaaattattttcctttgcgaattgatcatgagattcttgggagtacgttaggccttttttttggaagctttatgtctacttttaagaactctgttaagtaaattccacttataaccagtcccttatacacaaatatccacatcagcaaagtaaaaatagaaacaagtaaacagacacagtcctagggtggcttcgcctctagtggatcaagacttagtagttagttacaactgaaattgtaactaactcctaagaccttgatcaaccgactctacaacaatataaatacatgaatcaaagagaagaaacctagatctaacacacagaaaccagatcagaaaattacagagagagagagagaaaaagagaaaaccctagtttgaagacttcagctccaagatccaacctcgagaatgcagatctcatggtgaggagacagaagggatgagtacatgcacaacaacaacaaacaga

SEQ ID NO: 387931 - DNA, 756 bp, Cannabis indica
tttattagtttgttacataataattaactaacagtacaagctactaacattctaaattcaagttttatgtgtgaattaatcactactctagctaatctatacaaaaataacattctaaattcaatgtacatatctatatataaatatcattgatattacagtgttaagtttgcctttcaaatatgtgactaattcattctttgatttgatacagagtggtctattctgttctgtatcaaattattgattaagtgtgtttttaaatgagatataggataggaatactattgagctgagtcgatgaagacaccgaaccagggctggatcacagtgcattaatattgatcatgtgttttaggtgtgaattttggtactttgtggtattgttaatccctcaactcaatgaaaccaactgttttggagttgaatcgggtaaagttgaatacttctcattcatttagttttccatctctagaaagtttgtctttgaaaggtgttcgacatttgaaaactgcaaaggatgatggggtagttaagttcttgtcggtagtccatctcttgagaaattgcatttacatgtgtggtataatttctctaaatgaaaagatttccagaagaaggctcgtggaaagttagatgttgtccggaaaggaaatctggaaatctagcttggccactctgggagtttcttttagatggcatccaaaagagcgttcctgaaagtctaacttgtccatccggaaggagtctctaggg

SEQ ID NO: 387932 - DNA, 1369 bp, Cannabis indica
atgccatgaaacttttttgatctaactttacagtgagggaagtagagtagagaattgaaaaagggttcggggttcctagttcagtggagagtgtgtttgagtagtagcaccggtatccattgagttgtgaaaactactacaaaaataccctatagagacggtttattcaaaactataaattaaaaagggaagctaattaaagcctcttaatatttcctgctaattaaaaattgacatttaaaagcggttattaaataaaaaaaaatagtaagtatatagtataactatacctacaatgtcagttttggggtttggaaatcgcaatcgggttttattaaccctatcccgtcgattattaagaaataactgacggtagacacacgattatactaacatgtgtgcccaaattaaggcggagtcaggatgagatagtagggggccaattaattaaacaatgcatacaaaaattaaagaaaatatgaagatttttaatttttatagatatcttaaataagaaactagaaaatttgaaaatgatgttctaaggtgttagggagtcaggttaatagtactatatttactctactaatattaataaaaaattatactaattgtatactacgttacatttatatatataatgtatagtatttagttaaatttaagagagaacatcatattttatcttaaaaaatattataaattttttatatatatacatgatctctgaatatctgaataagctaaccccaccacaacatcaccccttttctactatgattagtgtgtaatttgaccataaattatgtggctcatcttatattattaatatatatttatgaaattagttagctcatcattattataaactaatatataaatatatatatatatatatatatatataacaaataattattttgagaattaatgagggggccagagccctaaaacttagcatgtagctctacccctgcatgtgccctatgttgtcggtttttctaatgaccgacgagataaggttatatataaccctaaattccttcatcttcctcctcactttgtcttctttatttcacgatccaaaccaccacaaagacgaacctaaaatacaaaactctcgccaaccaccgcccaaaacacccatatttcaccattttcaaccatttttattctttaaaaaaaaactttcatttttcacactcaaaaatatatcctcggtgtttgatcgtgtttttcttagatttttagtataaaccgagaggacttagttgttgtggtagttgtagctctggtcaccgattttgggcataaaattattgaatctcaacgtccattaaggtataaattaaatttctaataatttttt

SEQ ID NO: 387933 - DNA, 648 bp, Cannabis indica
tatatatatatatataaatgcaatgtttcaatgtatatgtccttaattatttatttggccttaatgcatgtcaatgtcttcctcttttttcttttcatcaaattattaagattcaaaacaatgcatttatgtatttatgtatgtatctttcatttgagtatgaccttattgaattcaacatttcgagttttgtgatcggacgaggttggttaggactgtctttgttataagcctccaacataatttcgtgcaatcacataactcgaaatacatgttagggttctatcagaaccataactttttattttattaatttgtatttttctattcaaaaattgactcgatcaaatgttcgataatgatatattgcatagagaatgcatttgctaaaaatgctacatataagctagctaaagataaccgaaataatgtaaacggctcaaaattttctaaaaattcacaagtagctaattttaaaaaaatacaatatacgtaatcataaaaaagaaattaaattaaaataatttcttaaatattgaaataaataaaaaatttatcaaattgattttttaaaaggtttactacaaaaatttattaatttatatatatctttatatattaaaagtgcatatctaacggcatttcttg

SEQ ID NO: 387934 - DNA, 705 bp, Cannabis indica
aacttttaactttgtaagatttaatttgcaactaaattaagtttttacatgaatcagtagttgttgtagttttccaatacacagtaaatttttgtacatgcacactttccatattttttattattaataacaacaaaattatgagagattaaaatacaaacaaaacaaaaatctaaaaaatactggagtttcatttcagttttcattgtagctttctgtcattaaacttctcctacgatcaaaattatttttgatccaaaaaaatatgatttcgttcatcttccttaactgccttcctcaatcatcagactacgtttttctaatattttcttcttttctctgttctataaatggccattactcggccttcatctttcccatcaccattgttgaaaaaactttcaaaaatgggtgttaaatatctagctaacaaatctaaaggcaaacagtccgttgttgaagatgatgattcagactttgctctgcctaccaaaaaaaaagtgattgtcggtctgttaagaagaaattaaaggttaatgttgttgaacaaatttctctccctaaatttaagaaaggaaagaaccaagttgatgagagtctgaaggtttctttctagtttctttatcgttttgtcctaacattgccctaacttttcttattactagtttttttaggaggaaataatcctatttattctatttttaa

SEQ ID NO: 387935 - DNA, 1986 bp, Cannabis indica
tttttttaataatagagtgtacatcatctcccctcttcagcaatacttgtaaatttgatttagagtgatttttttcccggacaacttaagtgtaaaagtaaaaaagagaacattatctttacacgtacgatgatagattggctatataataatcatacattccaacctttggtttttcataagtaatggcctcactcaaaatacttgaggtctcccatgtcgctccatttccggcctcacccgaatccaccgcccacttcaccatcccattaactagtttcgataccttttggttcaaatttccaccagtccaacgtctatttttctattctcttcctgaaactaaacacactttcctcaactctgttctcccaaaactcaaacactccctctctctcacacttcaacattttcttcctcttgccggaaaactaacttggccggaagattctcccaaaccaatcgttctttacactccaggcgacgtcgtttcaatctccgttgccgaagccgattctgactttgacatcctttccgcaaaccaacccttccaagcctcggcggttcgtcctctggtttctccattacatgtttcagaaacaggggcttcggtaatagctcttcaaattacaatttttccaaataagggattttgtattggagtcactacccatcatgctgttctagatgggaaatccacgaccatgtttatgaaatcgtgggcttacttatctaaagagaattccccattgttaccggagcttacacccttttacgaccggagttccctaatagacccatctgggtttgaaatgaagcttttgaattattggatggggaatcctggttcgacatcgtcagattgtagaaacaacccaaaactgtttgaattctttcaaagccctgaggaaccttcctccgacttatacagagccactttcgaactaacccgatccgatatagataaactacgtagaagggtatcgtccaattggcatagttcaaagccaaagcttcatttatcttcttttgtacttacgtacgcttacatgttcgattgctttctcaaagcaacagatgatgatgaaagtaaaagtaaagtctttttaggattcgccgctgattaccggagccgtttgagacctccggtgccagaaaattacttcggcaattgcgttgcaatcaaggccaattacgaggacatgagggagcacgtgattggtaaggaggaagattcattgactgctcttgcggtgaaggtaagtgatttagtgaaggatttgagcaaggaaatggatttacagagcgaaatagaggacatgtctcgagaatgagttcgtttaaatctgacaatagttgctacgttggagtagctgggtcgccgaggttcggcgtttacagcatagattttggagtggggtcggccgaagaaggtggctgtgatatctatagagaatggatccatttcaatggcggagtctggagatggaagtggtggcgttgaggctggtttcgttttgaagaagcatcaaatggatcgttttgcttccttgttcttaaatggtctcactcataatattatttgattttgtttattttcattttattttaaacaattttccacttttcagtacaatctaaacattattatttctctccttacaaaaagaaaaaagaaaaaagattattgtttctctggagatcataaccgatcagtggtgagaacacagaatttaaaaaaaaattattgttagtaggatttgaactcataaccgattactgtctgtcatctccgttaaagagcaatcctcaagtgtttgcttgttaaagagcaatcctcaattgttttatttattataaaaactaagtcgaattcgaggcattgcgtagccatctcgccacggccacaaatattcctgctttgacctcaccattttttttaaaaaaaattacatgtttacgtttaagatttttttttttactatt

SEQ ID NO: 387936 - DNA, 2842 bp, Cannabis indica
ctcactattttagattaatgtgtctgttttattaattcttagaactaatacatattaaccactttaataattatgattaatttatttataataaaagcctcaaattataaatatatttcctgtcataatcattaaatttgaattaactttttaattcataatttaaaattattttaaataaataagttaattttaaaatactaagttaattctaaattaatcttggccaatttacatgttttcgatttaaaaaaatagtaaacatataaattaatacatatgacaatcctaatatatcatgtttctactatgagatgtgtgataatataattgtgtagaatttctatgtatgacatgttattcactaatgcatgagtatgttattaatcaactattaatgaatatttatttaaaataacaataaaaaaataatgatgataaaccgagtaataattggatatttctaattttacaatctttagaaaaattagaaaataaattacaaaactaatctctaccactgcaaggacattttttataattttgtaggatcatcgtaaacctgcaaattaatttaaaaattgattaattattcttaaatgaaccttttatgtaagacatcttttaaactcttttaattaaaacaattttaattaatttattcgtaaataaactctttatttaaaacaacattattatcatttaagttttattttaacaaaataacatttattatttattttaggttaagacaatttttgtcttaatttggtgttatattttaatttgaatttcaaacctaaaatcaattatatttatttaattcaaaattaaattttttggaaaaaaaaaaataatccctcaaaactctattattttgtcttaattatataaaataataaaattattttattatttattattatatatttaaaatagttattattttgaatttaaaattcaaataaataactatgatatttatttagaattcaaatttaaataaatatctcaaaataatagttaattatttataataaataattaattgataatttatagtatgtatactatatatacactatattatatactattgttttctgtattctcggatgcccggtacgtggtggtcacgaaagtataccacgtcagattatacatggttagtatatattgttgggattttataccctaaataaaactcatttcaatataatcagatttactaattaataaaatatcagaaattattttatgttgcatggttcacatgattactttcatgattatatgtttaatgtataaattctatcaaatcctgaacaaatacttattcatgattataatattgtctatacagtgaaaaataatcatgattacatatttcaaagttttattctcatgatttttcaatacactggatttacactaacatgacaatcaacgataaagtttacttacatattgatatgtagtatgttctttccagggtattggtaacgtatgctagtatcagatgtatggagtatacatcggactggaccgctattgacattagataagatatcataaacttaccgttatatttttctaagtcaatatcacttaggtgatcttaggtcaatatatagatcttaatcctgagatggttatattctggcttaaatgtattattcatgttctttgacttgttcattaaagttggccaagtggatcttcccaatacttacatttggaaatatggtagtgcaatttagtgggtgtactaatcatagatatgaaattcatagcttctataactattagaagtgaaaagatgattaccttcgagcttagcttaacttgataaataattgagcgctcaattcagtaattatattagtttattgaaatattatttacaagtagctaagtattttaaagataaaatacattgaaggtgatatcacccaatttgttacactgcagtcgcgttggtaaatgggctatgttgtatccacaaagaggcataccactaaagattagtatatgatatggtagaaaatgaaaataataaaatgatagatgagagattgtgatcagataaagagcttggtaaggtagaaatgtagttatgcaaatccgattctaataccgatatcaattcaaaatacagttgtaattctacactattaattacaactagaagatgtatatgttaaaagcacaaatttattaatcttgaataaattgaatctcacttctaatttgataacaaatcatattatatgtcataaattgacaaaatactattgaaaaaatacagtaaacgacatacaatgtaataaatttaccaaaacaattaacaacctaacttacataagaaaaatataattgaacttatataaaaaatactattaaatttaaatttaataaatgagatatggaaatgaaacgcaaaagaatcaatatcaatattgagaatgaaaagtacaatagctacactctaacctcaccaatatgactattttaattcactcattttttcactaaaataagtaaaaataaaataataataataagagagaaacaataaaatgacaaagtgtcttttttctactctaaaatttgatgcttttttcattgtatttggttcctatttatagaaagaatttaattgctcccaatgtagctatgtaatggaaagagtggctccaatccttgatgaaagtggctgtgtggtacatgaaagatcgttcaacgataatgatagtaacgaagaaattatactacatgcatcttttaacttgatggctttaatttttactctcttttaaaatttattatgtttatttctttt

SEQ ID NO: 387937 - DNA, 779 bp, Cannabis indica
tatatttaagagaagatttttgcagaaaaaactgttaataatggggtttggttgcttagaaagctgtatctgaatttcttaattcttgacatttaatgcatatggctccatttgtatagtttagagcagatgtggagggtttatcttatatatttatattaaaaaagtaagctatcaattcattaaaatcatcacaacttagctggtcacctacaaactacaataaatataaattggattaattggattcattccatgtcaaaagaatatgatgggtggaccctttgtcgataagttaggtgtacatctattgttccttaaggagtttcaattgtcatgaaatcacgggatcaatttcattatttccttcatattcttaccttaaatacggactaggattataacttattgagctatacaattagttaaggattttctacaattaatagtcatgaatccgattacactaataataattgtatgacacctcacgtgtatgtatcattgttacctttttgccaaaagaaaaatacatggtggatttgtctctagtattgctgtttcattgtcttattacaagtatctaagtttatttcttgttttaagcgcaaaataaaaccttatgaaaatagacaatctttttgtgtgcttaagagatctttcacactttctcctctgtttttaattcctctctcttgagcttttaagttcttaggtacttttccctttgaattctatcttccatgttttatgaaaacttcttttattattattattat

SEQ ID NO: 387938 - DNA, 542 bp, Cannabis indica
taagaggaatgagctactcctcccattgccaattagttttgaaatgaaacatcattcatcttatcctaaaattctaacatacgaccccacaataaatttttttatagcttttaaaattattaggattatttgaataaaaaataaaaatatatatattttttaatttaatttttttagaagaagctatactttgtaatttttcccaaaagaatttttgagaaactatttttaaaattaaaataattattaatttactcacaatttttttttcttaatgatgtctaagcactttaaaaagtacttttcgttaaaaaaaaattcacataatagttatccagtaaaaacaagtcaaagcttagagaatctcaaacggagtgctataaatgtggtgtatatatattttttagtttgtgtttataaaattgaactccaatattagagtataatatgatttttattggcacatgctaaaaattgtacaaaattctacacaaaatataacatgagctaaattttaaactacaataaatatcatttttttt

SEQ ID NO: 387939 - DNA, 1072 bp, Cannabis indica
aaataccaaataccaaaaaagaagaagcaaaaaactcaaatacttacatttttttattattattttatagttctcacatacattttattttaataaataatataaaaaattacaaaaactaattataaaatataatatcgaatgatattaggcattttaaaatatcaaataataatgattatatctttaaattttttatttgataagttaatagagactagagagagagattctgattatgtcattattgtaataattctttctaaaatctttgtcgtaattaattcctgatttgaatcattaatattttttttttacttagttcaactgagaagtaataattaactaaaattaatttatatgagttgctcaaaaatttcataaaactttaagaaattcgtactgtttgtgttttgttctttggcttttaatttttattctgttcttgtttctttcatgtgtttttcattattaatggccaaatcaaattatttgttgttggaataagatttcaatttccaacaataacttccatatataaataaaatatatataatcaattaattaataaagccatatccctctgtcacacgtacgagaattaatttgcgccctaatttaatattaattatcctaattaataaaactatgttttttttatatgaaaaataattatttctttaatagttatacaaaatttacatctcttttatatcaaatatatgattatacaatgaaaattgttattttaatattttttttaaaaaaatttcgttatattaattacagttaaaactaatacggtaaaattttaattttttttgtaaaaataattttaaatatctaaatttaatttatttaataaattataacttaaataattatagtttgggagtgctatggtgttgctctgctagtttttaagtggattgctatatatgtagattttagttgcaaagggtactctattagttgctatgtgagttgctattagatttccgtaaaaaatataaataaactattttgaagtataaaaataaaaaacacaaaaaaataaataattattttttaa

SEQ ID NO: 387940 - DNA, 595 bp, Cannabis indica
ttgatccttcacaaagaaggtatttagttgcaattccaacctcacctcaattttcgtcatttttccctaagttcatctaaattaattaatatcatcataattggaattaaaaggtgtttccttcaaacaaaaggattgtaatttagagattattcttataatcttagatgtgtcgaacttaaattaattaaaattttatgttatagaattgatataggtaaaattatattttgcatttatttttaatattttaaatgggaaatttttgcttaacgccatgtttctcccagtaccattgctctgataccatttgatgcacactcgtgcactatttagttcttgaaagaactatgaaaaggtagtttattgctaagagccataacaaatacaaattccaagttattcgagaaacttgataaaatccatgagtaatattttaatctaaatattttacacaaaattcacaccctcccacaagactaactctcagtatttataggctgactaacagataatcctaactagccaccctcccacaagactaactctcagtatttataggcccccttttcttttttaaaaaaaaactaaaaaa

SEQ ID NO: 387941 - DNA, 1713 bp, Cannabis indica
gatcagcttggagaaatttaacagaattctcgagttctttaaatttttgttggtcagcttggtgttgcttttctgcttcatccttagtccgagaaacctcaggttcagcatcactccacttcttggctacggcatccctatgtgggcgaagcttagtctctagcatctcgatcctttgagacaaccggtgatatgtagcgtaagcgagaaaagaagcctgaggaaaaaggcaaactgaagttcgtaagaaagacagaatagggaagagtaagatcaaagcagtacaaagattgacttgatgcagaagttaatgaattcttttggtcagatcctcagtattgccgcgaatagcaagatcccaatcatgagacccaagtgtcaagaggttgcgccaactgttggtggcatgttgcgagctcaattgagacccctcagttccaacttcaaggggtaaggggcaggaaggctcgagaagcaccatcactagacgagaaccagagaacttgacctggtgtgcagacccggtaagttgctcctcgacaaaccctgcagtagagaccttagtcactgcagcagtgacctcaatccccatagcagagacctcactgcctgccttgggagatttatcagcatcaatgataaggttgttcgaggatctcctcataaaggccttagtcctggtccttttaggtttttggtagaatccgagacctcatcagcttgggctaccttcttcctggatctcttgtcggcttggggaggaattttgaacatggtctcaaaatctacgtccattcctgcaaagacaaaggtaaaagattagtgacgctgggtaaaaacatttgttttgtaaatggagtagaagtttttttcaaaaaaaaaaggggatgagttcaaaccatgccacagttcacaaagaatgatgctcacctttggaaatcacttgtaagaatttcctataacgattggccgtttcttctttattttgtttaattggatcatcttcaatcctggaatcattcatttccaatttggattgaagttcaaaatttttgggtgtatatggggaggatagatgtttgctagattccgctgctgcaaattttcgaggttaaatttctgaaccaggatgggacttctcgacaggagaatgacaatcccaatctctagatgaaatttaccaaaccaggggtctatggaatatagctaacataaactatacctaataaaaaaatatatatgaaccctagatattgaaccaaacaaagtaatgaggcgtaaggcggatcatcactcgagtaagaatgaggtagtcactgtgtgaagttgaaaggctggatgctaaaaaattctacaaatgaagacataacacccggtaaaataagttttttcaaaaattgggagtcaaagggtgggtctgaacaagtttgcagtaagagtatcaaagatggaaatggaggagaatagattcttaccattttatactttgggcctagtaacggtaaggtcaatagatggaagatctaacggatagaagtggaaaggacaggtcattaatgctaataatgacccttgaaaccatgaagccgcaaaaataaatggcatgcaaattttcaaaaagggattatgatgaatataccctctgtggtcatttaaaaaggactttttattaaaaagaactttttaaggggcaattgttatactcgaaattcg

SEQ ID NO: 387942 - DNA, 632 bp, Cannabis indica
tttgagtggattatttaccacatccatgtttgtgtaaatacattaattaatatagaggatgaatgtagcgctgctacaaggtcgactctaggcatatgcgggttaggtctgtgtctaggacccacactttctggaggcccaaaataaaaattgcaaaattttattagatttttatttaagtaaaattaagtgaattctaaacaataaatattcacagcttaattatgcatgctaaatttagagacataatttatatttgtgtaaataggttttagcaacaatatatattttttaataataacttttgttttgtgaaacttacaagtttaaagcaacaaacttcacaaagaaagttacaatttatatctattatagttaattatatcgttacaatgttacaattgttatatatcattaaaaaaaatatgagtttttttttctttttttttttaaataaataaaaaaccttgaaaaacataatcaagctcgactaattaatgtacatattttagctaaactttatcttctaaaatcataataaaaacctaactaatgcataatatgtccagggccggccctaaaatttcgtgggccatagaaaaaaatttattttaggtctttatttaaaaaaa

SEQ ID NO: 387943 - DNA, 1503 bp, Cannabis indica
atgaagagccattcccattgtggttcggtcattgagaagataacaatgtaaaaatgcatatttttatataattgttctttaaatcctccattaagtaccttatcttgctcattatctcaacttatattgaatcttttgttgaatttgctagcacattatgtgataagggagaaattgagctaattctcagtttcttgccaaattaccacatcgttttgttcttgtttatgtaaatttttcagtgctttttaagttcaggagttataaagataaattaagtctacaatcaaatggtcaaatttgaaaaattaattagtatatgattagcacaagaagaaattcaatagtttttttttaatttaattagtaaatctattcttgtgtttattcacgtgactgtcccagtacacaagctttaatatcaaaagtctcttcgcaagatcattttctaaccttggttgtaacatattttagaaaactctctaaatattttaaattataataaattttcatcatgattaagttgcggtataagatttatagtacaattattacaaatattttttacttgtgccacctacaatttgaattaaattttttcttaaatacaataaattagtttatctaagagagtagatatattcaatttaaaatccagaagtggattaagaagactttcttaaaaaacacaccaacatttatcatcttactctgctaaacatgttaaaactaaatcaaaactaaaaattgtttgaaaatgtatgaaacagtagtacactattaagggtagaggaagatgaaagaccaaatttcagaaaagccaacaaaatctttgatctgtgttgtaaggttttggactagaacagagagagaaaatgaaatttatataggtattagagaaaaccttctaacaatacaatcaaagaacactcaactaacagagttagttaacagtaacaactaactaactaaccatcttctctaataatccccttcaaactgagtgtggttttggaaaccatacacaatttgtctcaaagtttagaaaacttagtgctggagattgaattagttagacaatcagcaatatcagcagtagctagaacatgcttaacattgatgtgctgatgttggactttgtctcgaacaaaatagaggtcaatctctatgtgtttggtacgagcatgaagcacataatttgcagcaaggaggattgtactctagttgtcgcaccacacagagagaacaacaacgtgaggaatttgaagttcatgaagtagaatgccaattccgatgacttttccgacgctgacagcaactccggcgactttttcgacactgacagctactccagtgacttttctgacactgacggcaaactatagcgacttttcggccctagtgacaattccggcgatcaccgtagtttcatttgtttaattttttattttttaaaaatatgaatggaattttaataatttttatggtaattcaaagtggcat

SEQ ID NO: 387944 - DNA, 989 bp, Cannabis indica
aaactcattttgtagacgctctatcattttcttcatttttttggtgagcctcctctgttcaaccaactctgcctaagttgcctctaagtctttggtcactcgcagcaagtttgggtaatggtcatagtaataaccatccttgtaatacccatctctgacatagttgttgccatcaccttcttcatatcctccttcaaggtttttgccatcatcaaggtcgtcaaacacgttctcagtgtcctcctctcagtttttggcgagggtcgtaccttcctctctgacaccacctgtcaggaggtcagaggcatgggacctggcctcctccatgactatgtctagcagagttttcttgctggtgttcattcacgtattcaccatagttgaagtgaggcaacaactaataaacttttctcagctctcaatgaaagcaccaaaatatttacctagatttttgaaaaccaattaaagagcttaaggaaatgcaacatattaaacaacgaaaaaaaaaagattttctatgttgttcaggcgttaatgatccttcatccacgagtgagaagtattagccttctttggcaaatgtttgagtattaaaagtgtttacaataataatctttgtattccttttggttctctttaagaagaaagctctctaggaaatttagcagattctataagtaaaaattgttcaccctctaaacataaaaattgaggtattatttataggcaaatgagtgggtaagagcataccctttaccctactagtgtttcttactcaccacgcaaaaaaaggtcaaaaaacactacaagaccatctaactattggtttggtaggtagctcttctatcgtgtggtgaataattcatgtagcctatcacgtaaagatatgaacacatgttcttcaaaggtttttcctttaaaagcaatatatatcccagacaagtcgttggacaataagcactacagaggcatgtacacgcatagcccca

SEQ ID NO: 387945 - DNA, 1557 bp, Cannabis indica
tgagatgcactatttgtggaacggaaactagcataataagaactaccattaactgcaaataataatgaaattacatcatcaataattagtctaaaaataatattgaaatcaggacaattgacccaactacaaactattgaagaatcacattcaaccctagaaataaaaaaagtctaattggttaacctaaaaagaagacccaatctcaaagctaacaactcacccacatcaacccaatacccacactccacctcgacagcccaagacgctcaaaccacaccctccccatctcggagtaccccaccaagaccggtgaagcccctacttggcatcaccgtcgcatttgtgctcaacaaaaaacaaccctgcactggtgaaacccatctcaactgatgcacccccttcactgcatctccaccccacccacaccccgtcgttgcaactcttagaactccagtaacgagttaccaactagcacctcaagcatctccacccttgaatccttccaagcaaacaacacagaattgcgttcgaactaaaaccaccaccaaatcatcgaaatgagctcaaatttcaccatcgaaagttcctccatcactaccaccagcaactccagaaatgggcccccagaccgccgtcttagcttcccccaaacctccaatcgattccacatcaaaatacgcgcagggcagaagactagagcatgcttcgacgactccactgattcaccacatcttgaacatccaagaagtttagtctcaaatagaaagactaaacttggggagtacttacaaacaacagctcacaaggtcgttaatgcatcgaggttccccaacctccagacattctaacatagaagacttacggctcttggctagcctgcatagtagacttcgctaataactcatcaacctcaactgtagacacttcttccacaatcacattacattttttatttttaccatcacttaatacttcctcatcatacttatgtttaccacctagaacaaccttaggtgtattttgatgtcgatattaaccttcttactatatattggttttgagcatgcgtcataatttgatgggataatttaggactaaggggagtagctaaagtagacttatttcgggctaaatatcttttggaataaataagtgatatctacatcgtacattgacgtgtcatgctttatagactttccttttccaataataataaaagaacataaattattttattactatttcgtatattacttggttcacatgttacttttatgatcatatgtttgatatataagttctgttaatttattatcatattattattcatgattatagtatcgtatacataataaaaagtaaatcatgaatatacggtataaaatatttcgtatatttcatgtgcctacgagctgcctccatggctctctgccccatggatgtgcctgctccccgactaggtcttggggcccaaagtccgttctctcctcactggagggtcatccatcatggactgcccagtcggcgcaggccttggaggaggaagaggaagag

SEQ ID NO: 387946 - DNA, 1696 bp, Cannabis indica
gctgcccactttctccctatctgtttttgttagtttcagaaggcttctcacgtctcttgcagtatgaagaacagttgggtaatcttaatggttttgctatcacacgtcgggctccaccaatttcccatttatttttcgccgacgatagtctcctattttgtcaagcgaatgaaaattcatgtttggctatccaacgagttcttgacacttaccatcgagcttcgggacaattgctcaatccggataagtcagtgatgtctttctcaccgaacaccactttgggtatgcaattattttttcgaaggcaactaaatatggccatttgtgaatgccatgagacctatcttggtctcccagccttctcggggagaaacaaaaaagagctattcagtggggttaaggaaaagatttggcgtcttatgcaaaagtggagagaacaactcttttcagctgggggtaaagaagttcttctgaaagctgtcgttcaatctatccctacatatgcaatgagttgctttcggttaccagttactttctgtaatcagcttgaatctatgatgtccaacttttggtggggttctaatgaaaatggctctaaaattcattggcgtaactggaattatatgtgtaagaccaagtccaatggtggtttggggtttcgctctttcattcattttaatcaagctctattagcgaagcaagcgtggcgactccttcaaaatcctaactctctactgagccaacttttcaaaagccggtatcaccctcacaattcttttttggatgctcaccatggccattctccttccttgacttggcaaggtattctttggggccgtgagcttctgaaatctggtttgcgttggaaaattggggagggccgatcaatcttgtgtggaagtgatccttggattccaggtcacacctccttcaaaccaattgcttattctggacctgcaaatggggttgttgctaacttaatcactgaaaaccgagaatgggatcttccactgctgcaatcttatttttctgtgatagatgttgagaggattatgacaattcctctcagtttctttcctacatccgatcacctcatctggcatcacaccaacaatggtgttttctcagtgaattcaggctatcacacggctgccagtatggaagaagctttatctccttctgtttctgcaacaaaggctacatggtggaagtatttttggtctctaaatctgccaccaaaagttaagatttttgcttggcgtttgatgcatgatgcactacctgttgcaaacaacctggtgagaagaaaggtcattactgatgcttcttgttcggtctgtcgccttgcgtgggaatcgattggtcatgctatgtttgggtgcaaatatgcacgttcggtatggcgagctgctggttttaactttgactgggtgcatgcttctttgatgactaatggagattatctcatacatctttctaccatatacaacaaatctgatttgggtctaatcttttgtctcctttggtgcatctggtatgagcgtaaccaagtagttcataataagcgaaccagaactgctattcatcttgctggttttgcagcaacttactatgaaaactttatagcagctcaagcaaaaatcaagccaccaaaccagtctattgcccgctccacctctgctgttcctgcactgcc

SEQ ID NO: 387947 - DNA, 2160 bp, Cannabis indica
ttcttcatctttgttagaatctactttgagattattgctctgctagagcaaaactatttcgtgttaatcttttttcagtggaaaattatgttggttacccttctgtctgtaagagtgttagttacatctagtctggctttgataattgatcatttaatactttgttagatgcatttgtttatctgtaatctttttattgtttgttaggtcagcatcgagttcatttgtgtttgttggaacaactcattgccagttgtaatgagctggtaattcagttggttaagtcggttgtaccgaagtagaggttataaaaagcttaataagctttttctaactaactcttcttcatctttgttagagtctactttgagattctttctctgctagggcaaaactattttgtgttaatctttttgttacagttgattaattattggattttcaggagctgaaaaagaaatgatgatctgcattgtttgaagggagttcagctgagaagaagcaaggggatcttgacttcatagactaaggggacttagatctttgtacttgattgtgaatcaagtgtattggtaacttttgtatgaatttatttctgtttactttgtttgatttgtaatcagaattggagattgtatttcgattgatttcatagtgaaagttactttacccggtttaagggaacctaagcaatactcggttggaatgtgtttccaatatcaggggaagcttgtaactttgtgttcctgatttactttaagttttaatacttaagttgtagattcaatcaattagcatttgaataaaattgaattttttagaaggtaatgtttgtattgttggaaacttattttactgtgatctaggtttactaacatgtatgttgattataattttataatctaacatcctaaatataaaattcctaaaaaacgataaataaacacataaaggtattgaaaaccttacaatgatggtggcagaataatatgactccttccgttcagatctctagccattgattcctgtctgtaggagagcattattaagatatgaagttgtatcttctcctccttcgattgtgttcaacacaatcttctacaaaggcatgaatatcaccttgaatagagtgggatgatactcaaacacctttggaataaaattttgagagagaattatgtaatttcgaaaatcaagagaagaggaagaagtgacattgggtttttcaattcttttctctttctttatataggtattcacataaggataggcttagatgagatggtcttggaataaagacttaggctgaatcttactcttagggtcgaatatacatatgggctttagagttagattttcgccactttattcaactaatgaaataaaagtgttttttctaattttaccatttatctcttctaattatttaaataccaattttattttaataattatcaaataaaatataatttaaatatatttattaattagactcaaaaagtgtcctaattaacaaataaacctctatttctcttttcttttcaaaaatacttaaaatgcttaaatttggtgaaaattctcatataaggcacagtatattttcgaagtctaattgacttattaaatcaattagttgagcttacaatataatattatctcaaacaatgtgaggatcataggcctatgtaaccatgccacgaaccatatctataactacaatataaaatttattttactaccttaaactagctgaaacgaagtagaatgactttgaaaattcaaacattaacttttgaaatttcaagcatatttatttttagtccgaaagcactcttacatcttaaaattattaataaaaacgaacgaaatataacaggagagacaaatttataattatttcaattgtttgaaggaaatttttacaagaccctataaatgttataatttggtgggtaaaaatcttatttattttaaaaaaaatgtgcttattacaaatgaatatattaaaaaatggtatatttagatttattgaaagaaaaaaaaaaacactaaacactaaaatataaaatataaaaggaacaattatatgagcaccatttttttttgtaaaataattatatttttacggttttttaaaaaataatacgaaaacaacataaa

SEQ ID NO: 387948 - DNA, 796 bp, Cannabis indica
ggtatttgacaaaccttataaaattattaagtaaattccggcttaaatttgtgtttaagaaactgaaaaatcaaagctttgttgtgaattgttaatttttttgctttttgattttgtggggatcagcttggccattgagttttcacatgaaacactgctctatgttatgaaatcgaatgctggaagatcattccttcttgtttaaagttgggacaaaggtttgttttgggtgattaaacttaaagtattgtgcacaaattcaattcattgagctgaaggacctttagtcacttgaatatgattttaagaagttttccattatttgttttgctttggaaggatcatattgtgttatgtttttatattaaaatattatactatattttttctcatatgcctcttaagcctcctagctagtcccctttaacctattatgttttatcaatttttgaatggttaagatacaccattagaagtattgagccaaagctattatgtggcaactcaagaatcctttgttcctattcaagtagtcattataatattcactcttgttaagtgaagcttacttggatatttattttttctactgttctcactctatagatgttccttttattctttaatgtttttacttttttggtctcttacgcatcatttgaagctcctttattgagctaaacaaatgactcaatcattaccaaaatacatgtatatctatataaattaggggtgttcatccgattcaatccgcacttttttgatcaaacaacattcaatccgcactaagtgcgga

SEQ ID NO: 387949 - DNA, 2076 bp, Cannabis indica
aaaaaaaaagaagaaaagaaatgtgattttctaccttgaggagaggaaggcttgaaggcttgatgaagatgaaatccaaaaggtgctctcacattgttttgggcatgtgcaataataagaaagtcttaaaaaatttgttctcaactcacctatttatagttgagtccaatatcctaatcctaaagctaatgggagtcttttaaatttaaggctttataaggaataggtaaatgataagtaaaagatataattatatcttttcccttctcctttttctaagataattttaaaattcctatacaactagtaataggaatacaaatttaaaaggtaacaacaattctcaatgctattgggactaaggaaaaattagagaaattaaaagaaaaagataaatgataagaaaaaggctgaaagcgttttctcttctttctttctcactctaattttgaatggcaccaccaaatatgattaggattctaatttaatcctatttccataataaaaaagacaataagaaaatttgaaatttttaaagaaaaagataaaagataagtgaaaaaaaaatagatttttcctctttttctttgttaattaatttttgaaattcccaaggactattcaaaagtattcaaagtcctaattcaattaagaatgcttgaagaactgatacaagtgtctaagaatgtcaaaattgatgcccatttgatagtttcaagcaaaacaaacttgattcacgtcatcaagtcaactccacacaagtgtaaagttgacttgcggggaaaatgttaacccaaaaccttttcttggtgacttgcacattaatgtttgacaaggagcatgaaggatgatgacacacagttgagtaaacctgagtcatagcagtcaacctgggaaggaaccctagccctgcgccgaagttgactctgggttctccaagatggaagttaggactttaagagcttgaatcaaacccactatcttttagtattatgtaccattaacacatgaagcaacctaatccaagcaacaagagttgaaattacatgaatctgtaacctggaagccaacctgggcacgtagggtttcacttggcgccaagttgatatcctcaactagggtttcagtttctgagaccgtcttaatgaaacatggtcaaaaatttcatggggacatcaattagacataccacagacatatttgaggcatcaaaattagaatcagagcaagtagatttttgagcacccagtgccttggggttcgagcacctagtgcctaggttgacaatttgtctatctgggtgccttccaagtgtccgataaaaggtccaaatttttcatcgtattcatcttcatgaataaaatggggcaataggttcttccagagaaaaaacaacaattcttaggcgcaaataatagggaccagtgcccaggttcacatctggggctagccctgtgcccaggttttaaatggagttttttaggaattctttcaagcatcttctccatcttcaaaaaatattgagactcaactatttttggggactaaacagaatttttcaaagggcaaaaatagggacctagcacctaggttgacacctggagctaggccctgcaaccaagttgacacattgtcaacttgggctgtttctaatcaagtttagcaaaaagtgttttgggcattttatccatcatcagatataacaaagattcatgtaaacttggagagaaaatcacaagtctgagtccctacaaatagggccaaccaccaaagttgacctagggctgggcccagcgcccaggatgacaataaacttaggacagtaccttcagttgctcaaatgcaaaatctaatggaactattgaattcaaaactgtcaaagatggggtaggacacctcatccttaaatttagaagccatataagtatcaaaaatgaaatctcagaagcttgaaagaaacggcccatcgcccaaggtgaccaatggcctagtgcgctgggttctacttatccgaatctggtgttgttttgttggaaattattttacaaggatcttagatctactcacaagtatctt

SEQ ID NO: 387950 - DNA, 667 bp, Cannabis indica
caatatatacctacaatgtatatatatccaatagaacttttatttaaaaataaacttaaaattaagtaaattatattttaattaaaaattataatttaataaaattacactaaaaatatcaataaaataatgataacaataaaaaaaataatactatattataataaaattatttttatacatgtattataatttagaataaaattattaattttatataaataaatttataaactatgtatatatattttatttaaatataattattatatagaaacatactttttaatatcaaattttaaaaaaaatatatatataattaattataatttaaaaattacatatatttataactaatttagacttaatttttttataacaaaataattttttataacaaattaaaattattttgaataaaatatttttatatctaaatttagcatgattatatatctttcataagttatattttggttttggtggtcaaacatgccaacctcgctaagtgtgcagtcaaaacatatatgaggttctttggggccaagaagaaaactctgccccacacccactatatattttccattataaaaaaaatatagaacattatttttcatataatcatatacgcacatgaaaaaaaataaataaaataaaataataacta

SEQ ID NO: 387951 - DNA, 895 bp, Cannabis indica
caatggctaaaaatgagtcttcctttaagttcttctactggcatagttggggcaaaacttgtctctgagcacctcactaggtagtttaatttttttatggattagaaaaggatgcttggggatttctcaatcacgggaatatttatgagctaatggacagaagcgagaacctcatatacatggtaagcatcttttactcctttccttttacgtaatccttctgaagttctaaccttgtctttttcttcgaaatttaggcttctcggatggcttacaagagctttaatttgcatacacatcactcttctcgcatcaatcgtctctttcaagaacatgaggatcagaaaaacactctcgctatcgagcgagattcaactttagataggattactctcattgagaaggagaatcttgacttgaaagcttccaaggatcaattaactcttgagcttgaggagaagatttagaagattgcatagttaaagcaatctttgaaggacaaggttgatgagaagcagagagctcttgaagagggagttgaagtgtaacgccctaatgaataggcatcttacaatgacttttttaattgcagtccacacctttgctaatcaaaggattttttcaaaaattgtgataatttaaacttttgattgactttaaacttttataacatatacatacaaccatgcaaaaagtcgggatcttgcttttaaaacttatattcataatcaaaataaactttacaaatatgtcgcacagagactacaaaatgaagcctaagttgtcccgagaccaaactctctaggtcgtaccatcttgacatgtacaatcatccccgagctctggactcactaatgctgaatcttagcctttcctttatctacacatgcaaaca

SEQ ID NO: 387952 - DNA, 1051 bp, Cannabis indica
gaaccggttccacaaccaagttagtaaaaatatacaagacacaattactcagaaactgtttataatttaaaaaaaaaaaaaacataataaatattatgatgatcaaactatgcacatgagattgaaaaagacaccttcatcacaattttgttactctaataacactctaagaactattactcaattacacaagaagagacaaaaaaggaataaaatgatatgaatgtattattatttatatttcattattatgaattatcgagctcaatgttaagagcacattaagcaaactattttcctcacaagacaccaaagcaacaatatgtaaaattaagtaaattagcataaaaaaaagtgaatacaataacaacacaagagaagaaaacaagtcaaacaaaaactcaaatttgcgattcactatatacaaaaacacaagcattacaacaacaactaacaataaaataaacacaaagcaggatgcaaaacaataaaagttgacggttatttttccttcgaacccaaaaaagaaaaacttgagtaagaataaaaatgcatatacaaattaccaagttaaatatcatgatatacatacaaacatatatcccaaaactgtttgacattatctacaatattaaaaagttttaaactctaattctaaggatcaattattagataataccagtcttactaatttcaagcacatagttcggtaatacagttttacgtactattaatctccatgcatataccgtattcttcttctctttcgatttctatatatgtataatgtcaattctcatcatcacttcttcttctgtaccttgctttctgcagtataatttcggtgtctgtaacacctttttgaagttgcaaaagtgaaggataagactgtagcaacctattattgctaaaacagaaatatttgtaaagtttttttttggcaagttagatgccaaaatatttattcttttatggtaagattgatttgcattcatatccgattttattactttgtatattcggtttttattgctcttttctatgttaggaa

SEQ ID NO: 387953 - DNA, 822 bp, Cannabis indica
gggatgacaatatggcactctctagtacaggttattaattttaattaatttcttataattttttttaaatttaatttaattaattaatttaattttaatttcacaagccgtttaattgaagaaaatattaatttaattttgcagcgtcgcaagccttggatcaacagggagcagtgagggctaattaataatgaagcggtggagccagaaaataaggctaataacatatctatctatatataataatgaagtggcggcattgtgtgtgtgtgtggagccatgtagagaaattaatctcattaaacaatgaataaattaagtatatgatgaagttgtgaccttattattattatcattattattttaatacataaagtatatcaataaattttttgtccagaatgtatgcaatttacagaacaaagatatttcacaaaatctccatagcaaaattaagaatttttcaccttcaattgtgacatgtaacaaattataatttatgatcattttagactaaaagaaatttctccaactattaagataattaaattaaaaaaaacttgtccaattttattaataaatgtttaatgtagattgaagtaaaaaacaccttttcatatatgctaaaattcgaaaaatggtaaatataatatagaaggcatcctttcttacatgaaaatataatctagaagcacttgaatccagggcggcggaagtatgcattgactttcctttattttcaaaaccttgcattattacacgagcattgctattagacaccagtggtgcttagcaccttctcgacatgtcatgttgcgattg

SEQ ID NO: 387954 - DNA, 1016 bp, Cannabis indica
tcacctccatcttcctttctgcatagataaacctgtgcgactattagggaggtgacaaccgaatcaacgaggaattacttagttttctatactaagactatcgctcagtctggacagctagttccacctctaagagctcatcgagcagctcttcgagcgactttgaagtgagtagtggttctccagaacctgatatctagcatcatcactattttgaatgaataggtggtgaaacttacagacggttcatttaggaactgaaccgggggtggagacagttcctttccaagtcgtagacttatatcgtccagcagggtgtgatatatcatgtatttcaataagtctcatttatcaaaatttatacagtttcatggattcatgattattataaagaatattaattgtcttagtattaagaataatttaatttctttaattataataatcatttgtgaatccaatactattttagtgagtagtatactcccactaaaataattaataaaactttttttactctaaaaaaatcctattcttttattgtatttgatagttatgaccattaaacttttaattttgacattcaaaattaattcttttaattatcactattaatgagatttgattagttgaattaaagaattcagttaattattctcaatctttatgtgttctcaacacatatttgtatcataattcaaaattaaacatctttaatttaaattatttatttaaatcatgtctctttatatatcttcatgtataactgtgatttaagtttattagttacttatctatttctataaaaagattttaactaataattttaaatgtttacttgaatatttaagtagacggttctaattaaatattcttaattttactgtaaattctttaatgagtctttgattatacaaaattgggtttgaatccctaatccttgtatattttgaataagtattcaaaacttgtagttaaatctcatttaattattaagtttaaattttagaattaaa

SEQ ID NO: 387955 - DNA, 1598 bp, Cannabis indica
gttccttagacccttagaagagttacaagcagctttagaattgaaagagaactagaatagaaaagaaaagaaataccaagtacaaatagtacaagtggtagaaggaatttgagtagttagtaggacaaaaaatacaaaaacaaaagaaaaaatctacaatgaacaaataaaagtagtacaaaaatcaaaggaaataggtaagtgggcagtggaggtaggaaatgtccaggcataaggtgactaccactgtacaaaaggaaggtcaagacaaaaagattttgtactagataggtagaaaggaaagtacaagaatagaaaaagaaggtgaatcagggaatgttgctattccacataatggttatgagtcattagaagctttgatggtgtgtagcaagggttcaaatcataaatggacaatggaatcgggttgttccttccatatgactcgcaacagaatgtattttgaggtagtttaggaactggacagtggttcagtgcttcttggtaataatcagtcatgcatgatcacaagaattggagccatcacattcaaactccatgatggaattgagaggttacttgaggatgtcagacatgtacctaacttgtagagaaatatgatctcattgggagaattagataagaaaggttatgtgtttagaggagagaatgaaatcttgaatgtagtgaatggttctatggttgtgatgagagggatcagacaaaatggtctttattccctggctgaacatgtgatagttggatctgcagccacttctacagaaaagaaaatgtcaaagactgagatttggcataagatattgggacatgtaagtgagaggggcatgttagaactgaagaaataatttctagggaaagataatttggaaagaaatgatttttttgtgaacattgtatttatggcatgtcttgtaagatgaaattcagttctagatagaaaaggacaaagataactgttgattatgtccatgctgatttgtggggaccttaggacatgctctcattctggtgtaaggtatttcatgtcctttgtggatgactactccagaaaacaaggggtgttcattcagaaaaccaaggatgactcttttgaaaattttagaaattggagaactttaatggagacttaaactagaaggaaggttaagagattcaaaattgataatggactagaattttgctttgatatattcactaagtttttcataaatattggaatagatagacacaagatagttgtcgagaatccctgacaaaatggtctagatgaaatatttaatagaaccatttttgaaaggttaagatgtatgatattgagtgcaaacttgccttagatttttttggcaaaagcattagttaatactgtgtatttgataaatagatgcccccactgccattggaatgaaaacaccagtggaagtctggtctggacacccaccagatctatcaaggctaaaagtctttgagtgtattgtctatgctcatataaggcaagacaagttggatctagagcactaaagtgttggaattattttacgaggatctagatttactaacaagtatgtttcattaacatc

SEQ ID NO: 387956 - DNA, 913 bp, Cannabis indica
actatttaatttaatatttttgaaaacatttgtacaaacaaataaatttaaaatcttttgcacttcttgtcatttttcttttctttcagtttaatggcttttttttttgacaattttttttggggtaagttgaaaactaccactttttattacacattaactaaatataactccaaaataattttaattgataaataccttcttttataatcaaagtaccaaatataatctcacaaaatttatcaaaattagactttctaatgtacataatgggaatataacttataaaagtgggtataaattaaagagtagtaaaataaaggtaaaaattaaaaaatgaaacaaaaagtaagtataaagtgtaatttcctcattttttatagtgttggaaaattttcacttttttaatttttataaaaggccaacaaaatttcgtatagctttccttaatagattacctataaaagaaatgaaaaaagaaagtaaagaaaaagcaaacttgctttacctaccattacctataaaaataaaagataaaattatttgccatcattttaatttggccccaaaacttcaattcacatctattttgacactcaatttttccactcttcttatttagtccttttggtcacttttttgttgttgttataattgggaaaaacttgagtccaccttagaacaagcataaaattttgggattatcttataaatatataaaaataacaaataattttatatttttaaggatctattgttttttacaattctttttattattttttttatagggagtgttgtttttcattattttcaaaatacagtagaacctctatcaagaatacacttgggaccaagaaaataatattctaattgagaggttataactaaatagagttacacttaaaaaaaa

SEQ ID NO: 387957 - DNA, 1521 bp, Cannabis indica
aattaaaaatttcagtatgtgctataaataattcaaaaaactatacttttttgtaaaggaattttttttaagcctttaggctgggtgaacccttggctaggcacatgcctagtatggcctagggggatcacaaaataatatgttaaagaccattattattaagcattagtaatgtttataatgatatttcataaaaattattatattaaattatataaaatctcgcaccaatagcgatattatgctttaaagggtgttagacattgctgatgtcttttatcgttacccttttttaaacttagaagctaaacactgttgtattggcatttggcaatgatgcttaattttcttttttctcattaattgacttattaaatgatggattgtgggttaaacaaacaatgtaatttgcccaatgctaggttctcaacatcgcatcatatatagagcactgacatcaattttttattttatttttcaaaatatcttactgaaacattacttttttttatttgactttatacttttacattacatcatatattaacttcttattatataaaccaaaaaaatttaaaaatagtaaatgaaaaagaataaaaaaaaggagaaattatttaaaaatatttaaaaataaacagtacttttctacatgtatgaactaaaattttgagtactctaaggctagctactcatcaatatgaaaatctaagatcatgtattggtaatgaaatgaaaaagtaaattcttctgtttaattggtgtttaaaagttctattatattttatcgaaatgttaatttcatcaattagtggaaccaactcatcaacttatggagatttcaaaaaaaaaaaaaaaaatactcatcaagttatggagagatgacagtacaagaaggtgattctttagctatgctttgctaaaacttacaaatgtagcaaaggtatcactaaatatttaaaggggctttttatttttaattttacagcaaactgtttttgtaatttgttgtaaattttcaattcatattaaatatcatgtatttcctagttaacataaaattgtagatgataaaatatgcttagttatattggtgtccaatggcagatgactcaatttactcttaatctctttagttattgcataagagtaatcatatcatcactaaaaatatgaatcttactactctgtaactctttagtatcttcattttggatttggatgtcaattagctcataccattaatttccacactggactaatggtaatctatttcaaattcaaatgtgatttttacaagtacttcacaaattatttagtcatagagtccattaatacccaagtagataacccttcacataacattgaagtggcactaatgataaaccttaaactatcacactacatatgtatgatttcaacaaaatgaataacataacatccatataaaataaaacaaaagccttcaaaaagcacattttaactattcttcctacacacacataataataataataatct

SEQ ID NO: 387958 - DNA, 1095 bp, Cannabis indica
atttaataagatgattcaaaaaaggtatgtaaaaactcatattactctttctgtgtactttacttcttttatttttgtttaaatgttgtataataatttgatgaggatgaatattaatagtccaatacgtcgttaaaaaaataattgtactcttttattttgataaggggagtgatgaagatgattatgaatagtgaacgtggtgttgattaattttgtgatataatagctttttagatattctgaagttaaatggtcagataagtttcttttctttcatttttttttttggatcaaattgaatatttgccttctccatgatggggaatggaaactaatacttttatattgaactttgctaaatagcaccaatcctattgcttggacaaaatcctttgagaaggtaaatactatgtttatgggatttttttttatttttgtgtaacaattaaaatgttgatcccttgctgaagcagaagcaaacagccaatattttcttttaaagatgggaatatatatggaaggtttattggtaaggtttgtttgttctttacttgctagaaacttgagaaattacctacatgaggcacttaatttaaaaaagttgttttagttaatgtttctttcgtttctatgcctccttagtcacttgggcttcataaaatttgttgttgagtgttgacctataatgtcagttcaactctctaaccttacaagaccgttacaccaaatgctaataagttcttgttatgcattaaatttgagttaatgcagatagcatgtctatttgttgttattggtatgaatgggagcacttttaaaatgcatctgcaaacttttaaatatatttcctcatagcacaaactatttatatagacatctcatttctatgtttcagttactatacttgtgctttcaattattttattgtttataccataatttgtttgtgttatgcatgcattttcattttacaatatgaattcatgtattctgatcttcagtttagtgtttgaagggtcttagaacatcaaaattatttttctttggtatcaagtctttttgtgttgctaaatttttttgaaccatgttttt

SEQ ID NO: 387959 - DNA, 2252 bp, Cannabis indica
gtaactaaatgtgtttttagtcacaatatttgttgtgactaaaactaaattagcgacaactagtaattaaatactatgttttagtcacaaataattttttgttgtgactaaaagtcgcatttaatcacaaattttatgttgtgactaaaaggttgtcactaaaagtagtaattttttgtagtgcacgacgcacctgcaaccgccgctcctccaagccggcattttcatggaaagttttggtaagtttatatatgttatagaaattttctcactatattctcactatatatcaagtgtatatatataatagaaattttatatttaattttttttttatgatgttttgtttaacatgtttttgtatttggatttttgggctataaagaaaaaaattataaattgattgatgataataacgatagtctctctgatttttgattactttcttttttatttttttttgaatttttttttattaatttattgtgatactatatactatacatatcactacaagaaaaatattctactggcacgataaaaatagtgcctagaagtcacttttttcgtgcccatcgtcctattggcatgatatatcgtgcctattttgtcgtgcctgaaagttggtgccaaaaaagtgtactttggcacggcaattaacgttccgaaagagttctctactggcacgaaaacatgacgtgccttttgcttattttaattaaaatactaatatttattttaacttaaaatataaatattaatttaattgaaaattaggaagaaatgtaaaataatttacatttaaataaatataaagtaatttatattaaaacaaaagattatctttatactaaattaaaaatagatcaaattcaaataaatcatcttaattacaagttaaagtgttctatcctaattctctaaaaatataacaaaaaaaaaaaaaaaaaaaaaaacaatacaaagatgtacaaatatacaaatttctacaattatcaagtcttcttcacgcttcttttagcaaattccttcgtgaagtcgtcatacgtttcttccataaacctaaagaatcaaatgaaaaatttaattcattaaacatcatagtgtgaccaaataattcatataaactataaagtactaagtcgcaacaagtttgctcccgataaaatattaattagagcaatataaacaagcaagatccatttactctctatatctacactacattacatacatatacatatatacatagaagatcactattccatcaaagaatattttgtttccacaacttctcttttcctaatttatcaaacattttatgacttttgtttcaaaatcaaaacagagcccacattgatgacaatcgagcacaaataaaagaaaattaagtcacttcataattaaaaccggaaaattttagaaggaaataaacctccttgccaaatgaaccaaaccatccaacttccatagctttaaggagctccttttgccatttttacatctttctttttaaatttttgaagattgtcaacttaagttctagtatgtttagctttctttaaaactaataataacaattataactctataagagcattacatacactaaaaatccttgaaaacctatataagaaatttattagtctagattacaaaaatctaatcttcaaataaattttacaaaaaatagtttattttgcttgtaaaacaacacatatgtaaatgactgatcatagatattacaatcatatcaaaatgagaacataaaaaaagctttaattactttattgtctctacagtaagtattctataaagcaagaaagccttcaatcattataccataaattcctaaaattaactacaaaacagaacaatttaattgtgctagaccaagaacagtaaaaaacaaccaattagaccaaaaaaaaaaaaataagtgaaagagaaacaatattcagaaaacaaaaagtggaataatacttttatataacaaaaaagactaacctcaaaaaatatatgtttttttacaatagaaaattaaaaagattaaaaggaaaaaatcaaatattaataagtaagataggaatttacttaaaaaacacaataggggcagccaccggggccggagcaggaatcttcgccggagaggtcatccatggtcttaaggctttgggtttcaacaatttcgacaccgggaggtcatccatggtctccgtctagccgcgagaacacgagagagagagagagag

SEQ ID NO: 387960 - DNA, 1159 bp, Cannabis indica
taaatataataaaagtaataatagttttattgagaagtgggagtgaaaattaggagtcgtgtccaaatattttaatataatataactataattttttaagcaatataactatgttattttaaaaataataaatttagaaaagtaaaaataaagagaaaatttgagagaagtgagacttgggacccgtgttgttatattagtgtgtagattgtgttaagaagttgggcaccacctattgtggtgccaaattagtggtgccaaatttaatcgtgccttttaacctttattcttgtagtgagaccggatcccaactagaaaatcgttttctaaacatgctgcaagggggaaccagtagactggtttagtgcacgaaaccctaaaaactccaccacatgctcaaaactacccaaaataatgcaaaactctttagagtacctaaatataccataacaaacttaaatcatgcaataaaccccagcaataacctcagaaactaaaaccaccatcgatcgaagagcaaaaatttaagctcttaagctcaaactttgtctaaacacaccaaagacaacaaaccaaacttaattcagctcaaataacaacaaaataacttactaaaaatcataaccaaactcgaactaaacctacaacaacccaactcaaaaatcttccatgaaaacctaactttcaagcttaaattcaaagagacaaagaggggaaatcttacctcacaaattactaaagttacagctgctaaatttctctacaattggtctaaaatggagatggaaactgttggattcctttagttcttagtggccgactctatggagagagagaaagacaatatctattctttgatttcattttaatttttttaagtaaatccttaatctaattcagcataacccaaattcactgaagacaaactaggtattaccattaacatcccaaataatatcacaataaaaagctaacatgaaatgacctaaataccgttttcttcactaaaagaaatcttaaaacctaggagtattatggtgcaaaaccaaaaccccgaacactcctgatattttaaatatctaactaaatcaccccactatttctaagatactaaatcagttctaagtgactctataggccaaacatcgcattccactgt

SEQ ID NO: 387961 - DNA, 1304 bp, Cannabis indica
ctctcatcaaagagagtcaagtattccatttcatttctctgtttgctctctattgcttcccctggtttttacctcttccaggtttttaactattgatactgatttcaatttctacatatcaacacttcctctacaagtatctagaattttctatcattttggaaaaattatagaatcatctagaaatacataaaattaatatccataagaattttcaagaaagttttaaaattgacaattgctagaacattctagcacattaatccaccacattaatccaccactcatgaataatataaatataggagttggtcctgtggtggtgtgtggtgagtgtaatctaaatattcaaaagagtgtcccaaaaatgtgagttatatttatacaagtgttgtaaatgtgtttagcattaaaataagagagtgagtgtttagtgtatttgtggtctagtaaaaagtgttaagtctttgtgtaattactttttcaataataaattaattatatttttcacgtggtgtcgtgttcaacaagtggtatcaaagacgagtcgggtttattctaaaagagtattttgttgagtttcttagagtgatcgtatgtggtttagtactacagagcttgcacgatgggtgaccttcaagtggtcggtgcaattaagaaactcaacaactaaaattacatcatgtggtcgatgcacatggaggcatatctctaaggacaaaacttgtgggagatcgttggtggcaacaaagtcacacaaccggaggacgaaactgctttaacgagatggaagattaaagaaggcacaaccaagttttcgatacaaactatagttgaagatgaaattctagagcacatcaggttggcaaagacaccgaaggaagcatgggacacttttgcatcactgctcaccaagaagaatggcacaagattgaagcttctaaggaatgagctcctctcaatcaggcagcacaacatggcaatcaaccaatagacttcaccaagataaaatcattcagtcgcaaaatttctgcattagactctgttgctagtatttcctatgctagaattagaagaattattattcatggattaaggccagaatatggaacttttatggctacaatacaaggttggccataaatttgctagctgactgagaaattttagctaagcaaacatgtacacatcgataaaacaacaatcacgccatatattcatcccaaaagaagttacactccagaatgtctatcatgtacctaggataaagaaaaacttactattagtggcacaacttacgacat

SEQ ID NO: 387962 - DNA, 930 bp, Cannabis indica
agagagagagaggttacatgcctcatcaagcatgataacagattagcaacctaaacatatttgatgactgtttttaatacacagagttcaacagaaaatagaatatggaaaaattagcaagggcaagaagtcccaaagttcaaagaatccaagaataggacaatttcccttttgcaagcatcaaaaaactatgaacattctataatacatgaaaattaagacagcatgaaaagcaatgacttgaaccacttattggtccatttaagcaagaaaaaaaaaatccaatgatggtatcattatctacaatacctatagggagaaaatgaaatatcacatttcaatttcatcaccttcaaggttcaattatttaaacttggaaataaatccaccacttcagcaagtctacttattatataaaatgcatatctatatacatatctaatcatttatatagtcaagactaaatacatatccatatacatattataatgtgtgggtactcatttatatatactattgatgaattacgttaacaagctttttcaatgagcaattaatcggtttattcatacatatggaagagctaaagacaatgagtgataagttagacgtctccaatgcttcaaaatcttaatgatcatcttttttcttgataaatcattgtccaataaatcaaactaaataagctttatacatttataaaaagtaaaatatatatataaatacattcagatataaattagtattagtaaaagaaaaaaatggttcattatatagttaagattcaatggtttagtgagtccaaataatacaaaactccaaaacaccacatagagccaatctacagttttgatttccaaatttatgagataagatcttatataagattgatatatatatatatatatatatatatattattactttaca

SEQ ID NO: 387963 - DNA, 1188 bp, Cannabis indica
gttaaggtagttggtaaatagttggtagacaggttctaatttatttatatatattttttaaaaaaatatataattaatattttaaaattaaaaataataatataaaaagctaattcatatagtacaaaatacaaatatatttcgtaatttaatatatgatcaaatgtatattttatttatgtatatataaatataatttaaaacaaaaatattttttttctcttcttttccatttgttaattttggttttgtttgttttaatttatggttgcagacaatagtttgttttatacatttaatcaatatttaaaaaaaagtaatcaatctaaaataatagtttgaatccgcactattgcagattgcattaaatttgaactattgtatgattagatcagatcaaaaatataaaatatatactaagtgttaattgaatacactttaaataaaatagtgtaggttggattggatgaacatccctaaataaagtcttctcgagtgtaaagtaattgattcatttcttatttaaagctattgggatattatcgaaattagaatctattaagtaaactttcagtaataataataatgtttaagattgttagaatcttcagcttctaactcaaagacacgcaattaatagacaataggcaattagtggtaattttgcagaaatttcatgcatccatgaaaaattggtaaaattaaaagcaagagtccaaaagaactcgatccggccaaatagtaagacatacaaaaccctaattgagataaatagctcgagacacaatcttgaagctttttcgtcttcttcgagagaaaactagggtttcaagcacacgatctcatagatcaatcactcacacgcaaatacagaaatcaaacacacaaaatccaaaactcaagcacacacacacaaacacaagtgaaagattagagttgaggatttgagaggaacatatagaaattgagtagatctgaacaccacagtttgatcttagagttcactctagaatgatgggctatgtttctgtcaagctacctcagagggcttgatttttcactaatccaaataggtataacaaagtttttccaacagatttcgaatcacagcttttgattgataatctgtgttattttctctttaatttttttttctttttctctcaaactaactctctctctctctct

SEQ ID NO: 387964 - DNA, 1222 bp, Cannabis indica
cacaatacttcaacacctcaaatggaaccttccaccaaaccacagtcctcttctctacctcaccatcattcgatttctcctctgatttcacttcatcaattgcagcactttcattcgaaaaagcagctccttctccttgcaactcggtggtcgaatcaccaacgctcataactgtttccttggcaaaatagccaaatcccgtagccgaaataccatcatctccaccagtatcagaccagaactcgcgggtctccttagttagggtttgaatctccccaattccttcaaaactcacttgacttttcgcattttccaaaaattccagttcctttttcgcatcaaattccgtgattttacgatcgtcggacccatcactgcccgaatcagaccagagctccccaggatttatactaccaaagcgagtatcaggcgcaggatcgatccaactcgggttgtccgactcaaccgagtccgaaacctcatcgctaacagcagcagcagcagcagcaactcttccttgattatcgagagagaagtaatcagacctgatcattccctcagaatcaccgtcgatgccatcgaaattcttaggggcgttgtcactagagtcgggtgcagcggtgtcggagttgtgaagcacctcccagtcgttgaactcggtattgtctccgtccatggtgagtttggagtatcgaattgagcagtgggaaccctaaccctaacacaaaaaaaaaagaaaaagcaacaaggaaagcaaaggaaagcaagcagaggaagaaaagtagtttttattggtataacccacagggaaatacaactgatagctccacgctacaaggcagtcaatcactcttttagtaataaataattataataataataataataatagaatccaattccataactctccctccattctatctattcttctctattttagggcagaacatttgtacccgaaaacccacccacccacccaccaagaaaactcagtggattctaacctaaaaatctgaaaaagaaaatgagatttaaaaattggttaattagcaatttttttccctcaaactttgacttgtactaaattatgccctaaactttttggccgttaaaattccctaactgtattagattgtaatttaaggacttttgtctaatttagtaaataattctaacatggatgaaagttcaggggcgatgatttagtacatatcaaagt

SEQ ID NO: 387965 - DNA, 802 bp, Cannabis indica
aataattttatatatttaaatttgaaaataaactttacttttacaataagggattccctgccccgtccccaatagggaataagcggtgatggggaataaaatccttaacgggaatggggacggggagagcactccccactaattccccgccccgtgtgcatccctaaatatgtgatttaattaaaaattttactaatttatttaaaatataatttttttgacattataaactatttagggttgggaatcacctttaaaattttgacaaaagataaccagacaatattacatcaaatatacacaagtcgaaagcatcttaaacaaaactctgacaactcagcactgctagccgaatatgctgatacatacatttgctggggaagagctttaactcatgcctgtcctaatttgttctttctcttatttgtaccacaaagcacatgtgagtcacaataactcaacaagaaaagaaataacttaaacacttcatatcaatacacatataaataaagatatccacacttaatcataaccaaataatcacatacttaatccataagtagaaaaccataaaacaaaatgtaaacattcgtcagcatcaaatatttgtttattaagacaaaccattactgatattttataaagtaaccctcatctcttgttacttattgagacaacctttttaccgttgtgttgtgatattttgcacacgcaagtgtacgtatcattacaagtagtaaactcatcaggagtgagatcgatcacacagggattgtagttaagtacgttgaaattaaacttt

SEQ ID NO: 387966 - DNA, 2262 bp, Cannabis indica
aaagcaacactttaatcgataaccataattgtcttttggtatgtatttatttgaatttaaaaattagatatatatataattctagactatcatcacatatggactataataatataagtgactaacacacactatcatcaaaataaaaatatatgtttttttaacttttaatctttcattttaatttcaacttcactttcgtttttctatacaaaacaatacattattcacaattggaaagacaaatcagtaaaaataaaaatactttaatgaacttatcaccaccgatactaagagaggtagaataggaagtgatgacaaatactctaaataagagctttaagaaattagaagttagtgacacgacatcaactcactcaataatctacactcaaatatatttgatttgtaagatttgacaaagaggaagaaaagtgtatatttctcattgatttaacaaagtgttacaaacagagtatatatacacataaagccaagaggtagagttagttgagacaaaactaactcactaactgaaatcagtaactaactaatcttgatttaacagattaacaacttgacagctcaacaagattagtgtcaataataggccccctcaaacttagtgtggaggagcaaaccacactaagtttgtccctaagaacaacaaactttgagttggaaatcagttttgtaagtgtgtcagccagttgatgttcagcagggacatggttgacaatgatctctttgtgactaaccttgtctctaacaaagtagagatctatttcgatgtgctttgtgcgggcatgaaggacagggttagcagcaagcatgatggtactagcaatgtcgcaccagattagaggaggtgaagacagaggtagatgtagctcagtaagcaaggattgaatccaactgatttcagaaacaacaacagctaaagtcctaaattcggcctcggtagaggatcttgagatggtgctttgtttcttggattgccatgctattagattgcctcctaaaaagacacaataaccagtggtggatcgcctatcatccggatcaaccgcccaatccgcatcacagtatgcttccaaattaaagtgaggagatctttggagatgtaatccatagtctaaagtgtcaacaatgtacctcaagattcttttaacggcaacaagatgagaatgaagtggttggtgcatgaattggcaaactttgttgacataaaatgcaatatcaggccttgtaatagtagcatattgtagggctcccacaatggatcgataaaatgatgcatcaaggactggttcactgccgtagttagaaagtcttaacccactgttcataggagtactttgagttttaactcattacatttcaactttgcataatagagcttgaaggtactttttttgagagagaattaggccatctgaactgggaaggacttggattccaaggaagtagttaatagagcctaaatccttgagagcaaattgagaacttagagctgaaataagagctgaaacttcactttcgttgttgccagtgacaagaatatcatccacataaacaaggacatagagacaggtttgaggagatgttttcacaaagagtgaattgtcaattttggcaaaagagaacccaaagtgagtaagagctgaagacaacttttcaaaccaagctctcggagcttgtttaaggccataaagagctttgttaagcttgcagacatgatcaggaaagttgggatcaacaaagccatgaggttgagtcatgtatatttctttattgagatccccattaaggaaggtattatccacgtcaagttgtcttattgaccaaccctttgtgacagcaagagtgaggatgactctaattgtgataggctctgtaacaggactaaaggtcccattgaagtcaaagtcagcttgttgatgaaagcctttggcaacaggacgagctttgaatttgctaactgagccatcaggattttcttttattctgtacacccatttgcaaccaatggggattcagtttggtggtaacttcacaagaatccaagtgttattcctctttaaggctgtgaattccatgtccatggcatgaagccgtttgggatccttgagggcagaggaaatagtggctggagtaatagaagtgtaacaccctaaataattaggcacactacccaaaatacttatgaaaccctaatcccctaaacaggattactaataaaaatagcgtagaatttaaact

SEQ ID NO: 387967 - DNA, 924 bp, Cannabis indica
aagacattattagtggtatttaacattctctaacgtgttttacaatttaagtatcaaatttcatataatttaatgtaaagctaattaagatccaaatcgtattcctcaaactttaacatatatcaaatcatgtctcctgaatttttatccatgttagatttttcttactaaaattggacaaaaatctttaaatccaacaatctcaataattcaggggagatttttaacgaccttaaaagttcaagaaatatgatttggtatatgtcaaaataattcgaaggtaaaaatactaattagccttaatagaataacatacttttataaaaaaaatcgtcaacctatcgaaaagcactatatttcagtggtactaagcactattaatactttatagcaatcttcataatttagtctcaaattataacatatattaaaatgtaaaataccagacatgataataaattatatcaattaatcaacatttttgataatgctcttattctttctaactaaaaacattcaatttgaattttttaagtaaaaaaaaaaaaaaaacatctaattatatttaggaaaatgacatgtattaagtattttgttgatagtttactatctgtttaatgaattaaattaaagaaaaaaaaaaaaggccagagctaccaaaccaacaaaccctaaccaataacaattgggaactactaaaatattaaatacatttattgataatatctgaatacaatgcttacacgttattatataaataatattgcagaaaaaaattaaagtttcatgccaatattgtggtttacttatacattatatgaatcattatttatttatttattttctgacaaagaatgaccaagtatctatatatttgtttgtctttcatttaaatgaaatgataatctttttcaaatttgttga

SEQ ID NO: 387968 - DNA, 1014 bp, Cannabis indica
cctctcctcaaccccaacttgaccgtgtccttagtagcataaatgctactccaaatgaagctggggttggaccccaattcagcagataaaaagtcaccctgagaatagtatcttgctttaaagaccttgctgaccaaggattcttgtctaagcatgagtctccaaccttgcttgcctagcatggcgagattaaaatccctcaaatttcgaaatcccattccaccttcagctttattccttgtcattctatcccagttcatccatacaatctcgcttccattactgttggatttgttcgatttccaccagaagctagccatcaatctctcaagttctttacaagtgccgatcgaaaataggaaaacattcattgcgtaagaaggaagagattgaaccacagatttgatgagtacctccttgccagcccgagagagaaatttaccttcccaactagtgattcgctttctcatcctttcttttagaaaccccaaaacagcgtttttatttctaccaacaatacttgggagtcccaagtataagctatctaccccgacttcttgaacttgcatcaaactacatatacgtctcctaatatccaaccttgtatttcaaatcatctatagtaaaaaaatatagtagtatgaactttctattttttataaatatctatataaattatataatatatagattatatataataaaaaacatatatatataaaactctcttaatcgggttagtcgggttagttcgggttaattgggcggattgatattattttcaactcgtccaacataaaaattgggtggattatatttttgtcgggtttttcggtttgtattttttatcggattatctcggtttggtttgggcgggttgttcggattgggcagtttataaaaatttatgtacacccctagttggcacaagatatgtatatatacatttactatttaattcagtttgcatattcctagaagtgaatatataatttactaatatttgttagtgat

SEQ ID NO: 387969 - DNA, 1060 bp, Cannabis indica
tcatccatatgggcatgttgcatgttaacttcttccgaacaggcaatgcttggctcttcaagttattcggactaggttttttttgtctaaaactgtgctgcttgctaccgtgtcaaccgtgctacttgctagtagttttcataaaacaacctaaaaattaagaatgtgatttttatgtgagatcgtcaaatgttcataattgaaaaaagagttgtaagttctaattattagatattatttattatattatcaaacaatctaatatatatactaataaaaatatttttatgtaattttaacaatactttttgggacagactcgatacgatgcaaaaataaaaaagatttatgaccattagagcgagagttgttagcaaacttgcttgcagtggttcacggtgatgactagaacacatgtatataagaattattttttttttttactttttctatgttttgataactcttgaacacttagaataatttttaaatatttatgtaataaatttacttagaataatgtaaatatatacatttatttaaattgtcaatttaatttgtagttatataaaataaatgtataatataatatatttattttatataactacaaataataatgctcatacacaaaatactttttaattttaattatttttaccaatgatatattatattattactgtcataataacccaattatcttccccaagtggtggagatgatcaacacaaaaagaaacattcattactaataaatagataaataaataaaatacaaaaagaaaatttgaaatatcttaacttttttccacacatacaataaacattaccctaccatgaattgccaagttggtaaagtcctctaacaaatacatgaataatatttaataaaaaaaacatcattcaattaattatcgtggcgtttggtaaaacttttttaatcagttttttatttttgaaattaaaaaagtgaaaatatttttcaaaaacatgttctataaaactgttttcacttttcaattttttaattgagaatcaaaattttaaaaataaaaaaa

SEQ ID NO: 387970 - DNA, 1229 bp, Cannabis indica
aaaatcactaagaccccatttcaactgggtggtaaagaactccaatgccctcttcagtctctcctccgaggcatccattacttgtggttgtctaacgatcagaccccgaatctgctcttcagaccaaccaaagctcttgaaaacgtcgattttggacacccatttgtcctttctcatccccgacagactggccattccatggatgaacatcaagctcgatgggttgaaaccaagactcttagcttccttcacgagctcagtgaatgcgtccacgctccaggctagagcttttggtcgaattacgaacattttcgctatgttgtaatctgagacgccgtgattccgcagggtttcgacattggacgctgttgtttccgagaactggtggagaacccaagtgccgcgcttgaccaaaaagagggaaaccacgtggtcgatgctgccgtagaagctcttcaaaaaccgaatacaaggcgatatttgcttctccaagcttcggttgaggattagagggtcggcggagatgactcgaaccagattttcgcgggacattccgctatcggagaggaatttgagcttgggttcgagtgttttcactgagaggatctggaagcttcttgtgaagattttatcgatttgatcggaagagaaaccgtatcgactgaaaagggcaacgtcatcgtcggtgttgtttctagtttcacggccgatgttctgcgccaccgccgcggaagcctcagttgagaggccaagagattttacgggccttggtacgcttaaaagctcctctctaagaccttcggctgtcaaagaggaagaggttgaaagagagagggtggagaaggatttgagggtaactggacttccatggccgccgacgttagctctgccagtgccattagtagcagtacagttggagttggtattgagaaaggagaggatgatacgttggaggcgggactgaggtttaggaaggaaactcaacattgagaattttcaatctaagcaacaaattggaatttgaagctcacaacaatggcggccctctttgtagggatttccggatttggttctctctgcaacttttaggatttgttttatggtcacttctatcctattcctgtcttcccaattttgaaattttaccgatttgaccccataaattttttattggcaaaatactattcgaaaattctacaatacacccttttaaaatagatacattgatg

SEQ ID NO: 387971 - DNA, 612 bp, Cannabis indica
tggaaataatgtatgtgtcatcacttcaggtccgacaagtttctgtgtttctgatcaagtaaaggaaatcctcaattcagaaggcaatacctctgtaatagagaacatgaggtaaacaccttggatagctatggcaggctatgctgcaagttttttttttttcagtatatgctgttctaggaagctttagttttatcaatgctgatctctttaaggctgttttagctgccattcgaaaagctagtgaccaaaggtttgagcatggatgaaatttcggaagtcatatctatgccaggtgtggatgcatgataggattttcagtaaatgtgatgatttgtatgcatgattcacttttgtatagatgacttgaagttgttttctttcaggtgaaaagatgcccaaacttataatttctgtgctcgaaacatttggttgcgttatgaaggttagttttacagattaagggctcgtttgtaacgccgtattaggtcgtgttgtattgtattgtattatattgaattgtattttatgtaatatttttatgtaaaactatatgtggtattaacttttatggacacctaaatatataatattttagtataaattaaagtt

SEQ ID NO: 387972 - DNA, 813 bp, Cannabis indica
gggccaaattataaatacttaaagatcattttatgacgagtctataaatagctaaaatattccaagaaacactagggttcctgtattctctctttctccatcagaaaaaatactttagagaaatattgtattattgaaatatcataaccttccgtacaatctctctaacaatgacttcagattaatacttccacttatatgtacgtatttattttcttttttaatttagcaaaagatgtttaaaaatttgaagttttttatattaaaatacttttaaaaatatatttaaatttgtgataatatatatttcttgagtgtttataacctagtgtcataagttaaagaacaaaaataattagtattctatatatataacacgttgtgtacactctttcttccgaattaacacagaatatatattaataatgtatattatagttattataattttttatctataaaatttaatgagaatttgaataatctttacattgtaaaatacaagcttcaaaataatacatgtgcacataagaaaagttttaaaatatacttgctttcgtatttttggcaaatacgttgatactacaattttatattttttaaataaccaaataagttgtttataaatgttttttacacatttataaaataaaattaatttttgatacggtaaattatttaaaattttataaaaaaaaataatagaaaatccatataatatgcatgataaatttttgcatgtgtatatttttaattttatatataaaggtgaaaataattattttaaattttattttaaataatttaaactag

SEQ ID NO: 387973 - DNA, 1086 bp, Cannabis indica
aaaaattaactaaatttttttcttaggtaccgaaaaagataagaggtctgccgaaacacatatttaagagaatgtactatatgcttatccatatatataataaaatagatttttttttgacaaattaaaaaaaaaattgtaataataaagcatttccttatatctttataatattataaatgtagatatatagttttactactgtagcttctctccctttcaaaatggaagaattcaattttttaatgattaattggtagcataaatacttatatttaactctcgattatacataagtacctaagtaaacttttgtacggtaaaaataccttcatcacaatttaaaaatgtgtggccttctcaggactgcccaatgcatcatgaattataaagattccaagtccaacttggcaacaagtcccaatgcccgagcatgaagaagatcataattttgtcgctcgcattatttgaacaaccttgccactcggaagccgccgataccacagatggatggtgccaacatgtctagttaagtttaggaataatcgatataatttttatatctggaattgtgtcgacttaataacccataggtttgatagttggtatcctgagtttcatgtttaaacttcgtgcaacagctcattttttggaatcgcgtatcagtatgggacaaacgatttgtgagttgatgagtgtgagttgtcgccttttaatttttttgatatttatgatataattgagtataggggacatagtggtctccctattattgagtctcctcgcattgatgcctcgcctcttcgagcaacttctaacctttctgattgaagtttaggttgaatttcatccttatgtagagaatgtttgtgtattatttcctctctttctttgttttttaaattttacttcattttgccttcgcaggatgaatgatttggagaaccatctttgtagccctggtgtctcggttaggcgaggtaaaaacaaagcgccttcgagatagaaacttcttaaaaatagcccaaggtttccagtaagaaggagactagcaaaaagaatgcttcttgtgacagtcagtagtcc

SEQ ID NO: 387974 - DNA, 2515 bp, Cannabis indica
ctactaaaaaattgtcaaaatctaataatttgcatacttaaagcttgtgaaatattaggtttatggtaggctatggctgggttaggtttaccggacaaaaatcttgattgagaaaactaaaattttaacattacatatacaaagcaaatgtatataattatagcactatccaagttattatattgttaaaagtttaacattacacatacaaagcaaatgtattacagtactttaaacttattatattgttattggtgtatttaaaatattaaattaatataattaaataattattttaaatattactaacaatatgtactacactcattgattgaagtatgatacgatagggtaggtattggtccttaaattaattaggcaaaacctctagctaattatggatgtagagaaggtacataagtgtgaaaactattcattttaagtgaagtgtttgcaatggcattagttatggagaaatttggcatgaacttaataaatggtctaaaattttgcacttaaaacttatttaaggtgtggctggcttaacttttagaaaggaaaattacatcacattacataataatatagaaattaattacttttatatgtttaaattttagtaataaataacatatattttttttagagaaaattaaaaataattttcattaataaacaaatcagacaataatcaattacataataatatatagcttaaagagtagaatcaacaaaataggtaaactatatcgtttacaaaaaaggaaagaaaaccctaataaaacaatcaactaaaaaactaataagccgccaacaatgaaacatcaaaaaagcgcgaagttttcttcttccacctaatgtgatagcggattataaaaaaaaaattattttgattaagacataaagaacctaaactatatggcaatatcttacatctctgtagtataatacacatataatcaacaatatgcaataatccaaatgctacatgagccacacaaacacttttgttttgtatggaaactatgactaatcaattatagcataactagtattcacttttaaaaattatatattggaatcataaattatacaaaaaaaaaaaaaattgactaatcacttatatgcaataagcacaaataaaattagttcacacatttaattgaagaagaaaaattaaaattgcattaatccatgaaagcatcatatactctccattacaaaccctaaatatgggtttagctcataatcatcattctaaataattgcattaaactaattgaaagcataaaatcaaagatggaagaaaaataactctttgaaaatcaatagatgtagtctccaaatctcgttttctctccaaattcgtgcatccaaaattgcttaatgaaagtccctcttctaattaggttaattaaacctaatcaggctaaatttttgtaagcgggtcacggcatggtaaaaccaatttcatggctactatcttcttttttttttttttttaaaaaaaaagctcatggtacattttgaggaggcaggccacggcatggtaaaaccaatgtcgatgcgcgcctaaaatttttgggacaaaaattatgtcatgccactggacgcctctcaacctttaattgcatggctctctgctatttctttctattttagcgtcgtgatattgaatttttatgttatgacgctaatccaatcttttcaaattctttatttttagagactcaagatttgccaaaactttacaaaacttccaaagactcttcttttggtgcgccaacaacttaaatatatatatttttttctttaatttgcagcaattttctcaaatcactcatttttttccttattcaccaaaacatgaaaaatacaaacaaactaaagtgtgaaatagaactaagtaaaataaaactaattaaaaacactaaaaaacatcaccagaatatgacgtaaaataacacctaacaataatagttatcaatctatgttaaaatgactttttgttggttcacaaaaaaaaatgattttttgtaacaggattatatggtattaaatattgggtttctcttaaatatttttttggatcttaaatatttaattaaccaatgtttgaacataaatgagatagagttatattttgtattttagtagaatttatttgattaattaacttttgtcattagtatcatgttatcatattttgaattggatgtaatttttttttttcgttatattataaaatctcataatttagctaaacaaattatcaatatattattttctatcaaataatatattaattgatattatattattttcaaataagtttatataatttcattttttgttgaagcattagttaaattaaacttgaatatgatgattataattttttttatttatatttattaactaaatcaataattacacttatatccacatgtctctatatatatatatatagtttctacacctataaaaatgataatacaatataatagtgaggctc

SEQ ID NO: 387975 - DNA, 1341 bp, Cannabis indica
ctctctgtctgataggcaaaagataaaccctgtttactaagagttcatatataatatagagacaacacatggcccataaatagacctatacatacattcatcctttgatgattttcctgtctaaattttctgagatctaatattaattgcttcttatctgaaagtgatggctggttgcccccaccattgttggggtttctccctccatatattaatggttggttttttgtatattttgtttttcttttttcttgatatgatcataatcaagtgattattaattaattaattaatgacataattattaataaaactacatttttcggtagatgcatgaacttttatgaaccccacttagtatttggaagggaaggatatgttgagcgcaatgcagacagggccatatggctaatgtaggtagttgttgtttgaatagggctaaagggtactgaggcatatattatgtgaagggtttgacataaatgacacttttggctccgaaattcatatcatgtttttcctctctcaacacattttgtcagctcacccagctaattaattgcttggtctatttttttgttttctttctttctcatcatctgtccaaaaacttctaataatatgtatacatatacattaattaacgcgtttttaaataaacaattattaatattaattgatgcatcaagcatgtgacacgcacaatactttgtatatataatatatgagaaatgttaaagggtactaatggattgtctaacatctttataagtgtgagtattgatattggttcaattaattattaaggctcatatagtttaaaataataatttttaaagaatattgctaactaatcacaaaataacatatctagaaaaggaaactactggcgcccattaacaatactaataatatatataacgacaatcccgggaaactttccttctctattgaagttccaataatattagcaattaaagatttaatatgtgagaaaaattattgggtaatattgtctttaattcattagtgtttagtatatttaagtacatgactaagttgtaactttattttttttaattggacatcatatataatgtgattgcataagacctttagaaattttcataagataatggataattaggattcaaataaatgcttacaatttcctgatttttatatcataatagtataaaatttactgaaaagtctcccgtagatataattatctattctataaaaagtgtgcctatataactaaggaggcgtttggttgggaggaatgaaaatgtaggaataggaatgggaatgggaatgggaataggaatggaatggaat

SEQ ID NO: 387976 - DNA, 637 bp, Cannabis indica
aagtcaatttggttttgtaatcatttgagattaatctaataaatttcattcttggccgtggcccctggactaggagaaattcgaaagagttgttgataccacatataaaatgttgtgtgtcattttattttctatatttttactttctgcattatatttctattcttttagattctgtgtgtgatagaacatagataaattttgttcaaataatttactataatatcgcattattaaaattgttcaataatttcacttagtaattataaaaatagaatttcaaaatattattatatcaggtattattttggagtaatcaaacaatgacgtggttgcaattatacttgtgtgtaaccgcctttagttttgaggcagatttctagaggaaaaatgttgagatttaagaagcaactgcttgcttcagtagttgttgtgatagtcctgttagaggcattacaactctattgtaaaataatacaaggactaaaataagagattgattaaatatatgttacaatacaaatatatgaactatatgtaatatattacatatatataacaagaaaataatgtatatacatccactcacaaccttgagtgtagattagtgggaatcaccatgacttgaacaaggtat

SEQ ID NO: 387977 - DNA, 943 bp, Cannabis indica
taaacaggttgacacgacacgacctacataactagtttataaataaatttatttaaatatgttaacccattaatatattaattatattttaacacgtttataacatatttaacaagtttatgactcattcataacctattaaagaactaaataactttaaataggtcagtaaaggttcgtttggtacactgtgttgtattgtatggtattgtgttggattgtattagtattatttaatacaatactatgtttgatattaacttatattaataggttgtttaaaattataatatcttgaaaataaacttgacccctaccccgaccttggctttaagacccagacctgtgacctagacccgaacccaagatctaaattgggaccaggacctaaactcaggacctagatcgagaccaggacctgaacctacctgaacctgaacccgggacctaggatctggatccagccctagccctagagttaccactttataaaagatatacttttgtttatcacattaccaaaaatactctcctcataatttctttatccctcactctagctttttattttctctctatctcacttgtttctctctcatttaatcgatctcttctctatttatttctttcctctgtcaacctcacgcctttgatgaccacatacctctaagactctatctatgctttcaccttttgaatcaaactccaactccgacatatacaaatgaactcttaatttttttctgccatttttgttagaaagttaatgccctcgatgtgaactcaacaataatttgatggggagtttttaatcagtgtgatttttacaagaaatttgatgcccttgatgagcgcttgtaacgtccccgcttcaagcctccattgggtccttccacccacggaataatggctcttatacacgagtacgccactctggctgctt

SEQ ID NO: 387978 - DNA, 1826 bp, Cannabis indica
caatacatctataaaaggatgaacaacattttaactataaattaagtgatctatacataattaagtccctaacaatatagtcatgagcacaaaaaaaatatttttctaggcaccttccaaaaaaatgttgataaagtcttgctaacaaaagacctactacttgtgattctttctctagcactgtttctcgactcaaaatgtgccaaccaaaatttttggactttttctagacgaaaattgagatttttgttgatatgaaaacatgacgttaaaagtctatttttctatagtaattaactatatttcttcatgttattcatgtttttaggagagggacacgtgcacatctaagactctaattcaatcaacaaaggtccagttgcgggcccactcaggataatggattacactcactaagttaggccatctaggttccggatggacatctcatataggcgagagaagggcccagcggagaggacatctggataaatttttgtgatacttctagaaaggtaattaaatagatctctgaatgtcaaggctgatatgatgcccatttcatatcaaatcccatcatattatgactttgtcccccaaagtcatatctagagatcatgagaaccataaaagaatatatggtaattgtccaataactatcaaattacctttattacatgcgaaggtggcacatgttttttacctatcaaaattaagtagtttctacatgtacatataaccattgcttcacgggctaggccttaccaaataggtccaatgttaatatattacttctatttactccattagtggaatatgtttacataaaaaccctagcctataaatataataaaaccccttcatgcaaattacaaagggttaaagattcaattcttacaagttaaggctaaagccagggttcataaactagacaagaacactagtttaatactcgaagacttatctagcaagataatattgactcgtcgactagagtttgtcaacactcgaaccatgtaaaaaaaattcatcttgatatttatatttaatttattttctttatctttcattctatttttaatcagtttttgaaaaactcggtaaatattttgatactttcattgagaactagagaaaaatttgatattgacgttgtatactacaccaatggtagccactagaaccaccgccaccaaacctacaactcgtgatgggaataccactatggatgatgttaatcctcctcccactacacacataaagatgggtgttgttggggatagagagacgtcaaaagtgagcaaccaccccaagaagaatcaacaatgtgagaaatacatgataaaaaccccatcgacgaggaagatcaggaggatgatcctgaggacaatgggtataacaagaacgatgaggagtataattacgaacaagatcccaaagtgatttggatggctcaagaactcattgagaccaaaaaaaaattggtagagtaggaagaattatcttgccaacgccgatcttattagtcaatagttattactcacatcttgctattgtctatatggcatcgagtttgaatatttctatttactgtaattctcgaggtgagttatttaattttcatttaataatacacagcttgggttggttcatattccaactctgatacatgtgttagcttcttattgctagccgaaatttaagtataacaattgtcccctaaagtatgagctttggagattagagttctgagttcagagttataatctccaaagctcatactttagattcagtttagagagagagtccaagatcatagtgagtgt

SEQ ID NO: 387979 - DNA, 1168 bp, Cannabis indica
aaaggagatagtcacagaaaatgccttgtaatttgtaagtttagagttctagaacttttgcaaagaatggggaatccaactctcattctcgaccccaagatatccacaagccaacgatcaagcagaattgacaaacaagattgttgtcaacacattaaaaaagaggttagagaaagccaaaggaatgtgggcagatgaattgcttggtgttctgtggtcttatcgcactactgcaaaaacctctactggtgagacccctttctcgctcactttcaaaatagaagcagtcatcccagcagagataggaattcccacttctaggtatgaacatttgacttatggtcagaactggcaaagtatgaacctcaagctcgactcacttgatgatgaatagagaaagccttgatcagagccccaacataccaacaaaaggttactcagcatttcaagaaaaatatccaagcacgaacattcaaggagggcagttgggtgctccgttaagtatttcaaaacaccaaagaggcaagagctggtaagttgggcccaactgggaaggcctctataatattactaaagtaatagtacaaggggcatatcgacttcaagcaaaagatggttgagaaataggcaattgttggaatgccattcatctaaaatagtatcatttctaactcaatcctttttttattacagtttctatgaataatatactgacttaagcattggagagtcgacagcataaatcacacaaatgaggcaatccttcaaaacctataattgacaaactagcggccattcctaatcataagtgcacaagccgtgagcactaatcaatccatgggctcaatatactattagaatcaaatcaaatcatgaggaagataggtcatgacaaaaaatttgtaatgtattcgacacttgacgctttttaaatttcttttatcttaatcgctctctactgacttaagcatcgaagagtcaatggctctgccactgactaccttctcagatactgttgggttttatgccctaaataaaactcatttcaatataatcagatttattagttaataaagatcagaattaacatttaatgttgtatggttcacatgatttatttcatgattatgtacataatgtatgaattctatttaagtccacaacatat

SEQ ID NO: 387980 - DNA, 1313 bp, Cannabis indica
tataattgagtattgtgtcttgaagagttaaaagattaaaatgtagttagagagagagagtgtgtgttttaatagttacaatcatttcttcatttcaatttcacctttatctaaaaaaaaataaaaaaaaaaaaaaaaaaaagaaaagtgaatagtaaataaatctaagtgttgattccaacaatataaatctctcttgtctattgcattaagtgggaattgagataattttggaatgaaaagtgaggcccttgaaatgtaaaagcttatggtatagttaaacctaaaagacttttttatcaactcttacctaagcctaacgttataaccttttaaaatcttgttgatttcaaaacatttgttattgatattagtggagaaggttaagtgatgcaagcatatggaaaatttggttgtggaattgtttggtatgagttgagcatatatgatagaatttaaattattgtggtcaattgtgagtcatattagttatttccataattgaactttaaggttgtactttgaggctgaaaatttagtttaaaaaccacaattaagatttcatggaaagacaatgtagcatagatagcaatagtggcttactttttgtgtgtttgatgttttcttttccgttagtttaacttggcccttactcgaggaagaataaagtttcactttgagggaatttattaggtttatttttatgcatttttaagagtcaaatttagggtgtattttaatatttttattattttatttattttatttattaattaattaggttataagagtaagaaaacatctatgtagcttaataacacctgccttctcttagccatggtctttcttttactccaaataatgttacacgctttttttaagtgtttcaatgtcgctctatgcgtgagtgggaaagtcttctcacacgcgcattgagagacgctatagctaattagttttttttaataaaacaaaagtaatttaaaatttcagaatagttttagtgacacgcattgtgggttagcaatattaaatttttaaagtcctataatgcgggtcactaaaaattctctgaaatatattgtgacgtgcaccttttgtgtgggtcactatagagtgtcactaaaagtcaattttgtagtggcagtttcttcttgtcgacgatgcttgtttaggcacgagcggtagtgagtgccaggctatgacagactcatttgattaggtgacacaatacattagtgccatcactactacaaaaaccccctttagaggcggtttttaagccctttcagcgtcggttttcgcgaaattcg

SEQ ID NO: 387981 - DNA, 808 bp, Cannabis indica
acctcctctctctctctctctctctctctctctctctctctctctccccccccccccttgtctcttctcgttcttggtccaatttgcaccaccaccgccacccaccttcgagctgacgagttcgagtcgatgacccaatcgtaccaccaactggccacctcgctctctcttgctcctcctcttctcttctcgttcacagtgaaaaataggtgagagtttgttatattttttccttttacattagtattttcgttgtgaaaatctcgctaatcttttgaaaatccatgacaaaggagcgatatatatggttgagtacttcgtagtataattattgagatttgtcttcaccgtcaatggatgggtgcaaaaattaatatatatatatatatatatatatatatttgtaatgaatatatatatttatttactgtattgaaccaaaatgtggtgagatctggttccatcggtgagatatggtttcaaattataatgtttttaagaatataggtgtctgtttaaaacgatcgtctatactataaattttcgtctatattgctcagtatttttgacggttttgtattgttaggaaaaagttttttcgataattttttatcgtcgcctattctacttagttttcttgttggtgaccgatggtaatattttacctgattgtttaatccagcttttagtagtgctagtaccctcctcgatattatctatagtagagcacctccaatggagatgtaaataagtggtggaaagctaaaatatagctcatttaataaaaaaatgtgtttcaatggtgtgc

SEQ ID NO: 387982 - DNA, 584 bp, Cannabis indica
ggatagggcaagccatctagactgggacttgtttccactaaatccctttgatttgtacataattactggttctaggtattttagtagttattatagtccttcttcatcatcgtctgataactattttaaatttctctaagtgtgagtttatttcccaccttcttattgtttattttggataagtactgacttatttcttttttttttgtagatatggacctcgatcttgaagatatgctcaacaatcccactctcagaactaagaagtccaagaagcaagtgacttcaacaaatgaagcctcaagatctaccaaggagacttcaaaaagaaccaaaactaccgcaaataaaaagcaatcttcaaatcaactcactgtcgagtctacaaagtctctagagaagggcgtgccaactactgtgagtgctaatgaacaggcccttgggactgttcaccaagtaaaattttctggctcttgctcagagatggcattgctagaatcttcctgccccttacccgtccatgctagtacataagtataatgccctgtcctacagggacgccacatgtgtgtgtgtgtgtgtgt

SEQ ID NO: 387983 - DNA, 1222 bp, Cannabis indica
tttttctttttctttttaatgttagtagcttatgcattacctgagaattaatgctttgtttgctctgtgcagtttggagacacgttcttggcagcaatgatgttgtggatggaatagatattgctctgggaaaatgtaatgttgcctacctctacctagtttgtctttcttctttagttatattttaaattgctagtttctctgaatcctatggctgtattatatatctattgtatactcacttgagtattgttttcaaagtatgaggtagttttgaaggtaggtatattttagatagagatatttacttaccagtagtactaaaccttaggaagtgttttcactgaatggttctcctgaatacctgattattcattgatgatattatgtcaacaagcaacatgaatacaataaacttaatggggaatacaacattgtttcttctgcatatctatgtatctgaaactaagctagttttcatacacacaaaactatttcatattagttaaattggttacgaaaataaatgaaagaagcggagtttgtttttgaaggaaatctgggtgtattttctaacatgcagtgctaaatttcttcctgtcgactataagtgcatggccagttggctttaattgttgatataatggctaaacgtttctctcatttttttttcttttctagatgttataaccctgtcatctgggggaggtatcttgagagcttggaaccttcctgatggtcaaatggtttgggagtcttttctacagggttcgaagtcctcaaagtctctattatccattccggttagtgacattatgcttattgaagccttcctttgatataaatatatatatatatatatatatatatatataagaagtgttctatatatatactaggtggattaatggtagagaacgtgccaaacactcccattaaaattaatggattaattatattttttttaattttattaattctatttaaatgaggacagataaaatatctaattatattagcagattaaatgtaaaaaaattaaaattctaattgaagttactaaaaatatgtacatctcccacaaattttaatttaataaatgatttaaaaaaacatgctaactaattattgggtagtatggtattgagcaccttaaggtgtcacatagcaataatagtacaaaaaatcttttaccgaaaaaatagtacaaagatcattcata

SEQ ID NO: 387984 - DNA, 969 bp, Cannabis indica
aaaaaatattttaatttacttccaataatgtcttgttatattagccctcataaagccgtatccctagcaagaatgtacttgctaaaattgtatgatataaatcactctataaaatttctcaataccacttaacagttaacacaacataatctataattcataatttgtatttttttaattttggtccaaattcatttgaatatgcatcaaatgatttataatcgttaccaagcaagaaaaatattctcaaatcacattagaattttgggataaaatgaataggattctatttcaaaaccaattgacaatgggaggagtagcccattcattttatatatcacaatttatttacacacattattaatgtgggactaactctaatacaccttcctcatgcacaaggccaaatatcgagaaatttgtgggtgtacacgggaaatttgtgaaatttaaaaaaggtcaaagatcccaacacttgaaattggcacacattggccaaaaagtcccaaatagaggttaaatgggagacagcggaagtatctttttggaccggtggcacttttgctcacaacggatcagaaacgaatttttagaccggtgacactttgagctcacaacgaatcacaagtgacaccatgttagaatttagggataagatgaatgagattccatctcaaaaccaattggcaacaggaggagtagcccattcatcttatatatcacaacttatttacacatattagcaatataggactaactctaatacacgctattcagatgagttaggatggatgataaactccgtatatacccaaaaggcttagagtaatttgctgcataacctctttaagtggccaggcttttgcaactaaccctcaattctaaaattttggtggtaaaaccccctaaactcgtattctgttagcagtttaacttttccatctatttttagctgttaactgccatggt

SEQ ID NO: 387985 - DNA, 1108 bp, Cannabis indica
aattgacgatagctctagattgtcagttattcatgttggagctgttatattcttgcagattcagtagcatcattggggattggtctctcacacactcccctcttgattatgtggagtctaattgtttagttttggttcttatttttttaggggctcttcattttgtaatgagctaggttatttattagttttttgcctagtttacttcacagttttcttaaggcatccctagttcatgttcgtggccatgaattagtagtgcatgcacttaagggtggatggtgaattagctttgaattaaatattttccttcttttgtattgatgtattaaactttgatttttgttattaagagtttaatttcaaaaaaaaaaaaaaaattgcttcttcatttttctaaattatctaaccttacctgctctttctctctttttgtagtggatgttggaagatcttgaatctaataatttagaaacattcaaatgtacaactcaattttatatgcaattcaagatgtatagttttttcgatcagtacgagtgtacatatatatatatgtatttatgttacactctactttttttaatcaaatttatttttgtccatactttattattgaatatttttattcttgggtgattttcttcaaatagaatcaatcttgacaatagaaaaacatgatctcttaaatgagactacaaaaaaaaatatgatgaagaaaataatttcctaattttgattggtaagtaactatattaatatattatacaatgctatttttttagtcaataaggactattgctaattaagtttatataaacatttatactatatatcactcacgtcctaaatattttattggttttttttgacaaagtctattacaatacctcataaaaaatttactaaaaattttctcctatttgtatacaattataaatgactatattgttttattggtgaaattccgtattttaatatttccagtttaattatttaattaagtgattaattaaatacggaagaataaaactggtactgaaaacagtttttccgtagttacagaatacaactctgtaactccagagaaacccagaaaaacaaacag

SEQ ID NO: 387986 - DNA, 902 bp, Cannabis indica
acgcatatgaaatagattgtttggatactattttttatatgataattattctaaatttttcaaaatatatttgataattataatttatacgaatataaaaaatttagactcaaattttttttaatggcatctataattaattaataataataataaatatttgaccgatgaatcatagcaaattagcaaataatttggaagtgatgtgtttaaatatgagtgaaacaggttgcaaaccgacaaatctaattgatcattacaataacgactatatatatttagatacatgaaactaaaaacgccccaataaaatttcgaagtggagttgtgtgggttagtgctagttatccaggtatttcttaaatggaagcaaaccatataaacgagtgtccgccaaaacataatgtcgtctgccctttcgtatttcacattattattatatttaatgagtatcccataatcaaagttctaaaaatggtacacctttgcacaattgtggaacaatgtagaagcatacacatatggatactactataagataaggatagatatagaataataatattggatacactaacatgcacaatatatattgctatgaaaataatcctgatgggctggcttttgtgctgatatatccaccaagggaagagaaagtggtagacatataacttacaacgaaaggtgatattctgtggcagtgaaaacaatttataaaaaggtcatccacctaaaaatgtagtaatgcaccctttaatatgttttagtatttaaaataattttttagtcaattttttttttatattcgtgtacgttatagttatttaagatttcttataaaattttataaaaatttagaataatttacaatatcaaaagtagtgtttaaacagtctatttca

SEQ ID NO: 387987 - DNA, 618 bp, Cannabis indica
aatatattttctcacagttgtgtaatttgcatttctataccataggctctaaccttattttcaagcaaacaatttttttctccagtttttactgctttcacaatatgtctcataatagatctctaatgtatgtgccaatttgtgaaattacaattcaaatcaatcaagtatttaaatcctaacttttaaatcttaattccatccaagattttcctttttttcatttctcacttcttactcacacacaccaaaaaaaaaaaaaatactaatgaaacattatggctaatttcaaccttatcacagagtacagacaacctttttatgttccccttaatagtgaattaattactcaaatatcaatcaaataataataactttcttcaaaatattgctggcaaaagtgaacctgaattgtatattgcagggtctaaagctaatgaatacaactaccccaaagtcagtcaataataaaccacatcaatccacacacaataacccacagaccccacagatccattccccaatagatttcaaaaattattctctatctaaccatgtccaatttgaccctacaaacagagaaattaccaaaaaaaacctcaactacttcctataaag

SEQ ID NO: 387988 - DNA, 559 bp, Cannabis indica
tattgaggcataaaatcatttctaatttatctatttatacttttataatgggatctggagtggctagctcaatttgaataaatcatagtggagatggaataaaaattatactttattaatttaaacgaaaatcttaattaatattatatggcttaaactactttctttttcattagagaatcgaaggaattactttagcttgaatttgtacgtattcttttccttttagaaaataattcttgtgagtccttttttctttgaaaaatttgataatagagtgaaaaaccattccatcacttcacaccaaatggtatggtataaaaacttatatatttattatatgtgggtgtgagacaatagtaaactcatatatgttaatgattaaacaagaaaaatgaaatttattaatcatgaaactccacttcgtataaatttttatgtggtcaatactttgtgcatttttcagtaaatcgcatgtggcatgaacaagatgaaaaaaaagtggtgaaccacttagaggctagcttaagtggctataagtgggtgtgtgtttggaggt

SEQ ID NO: 387989 - DNA, 2587 bp, Cannabis indica
tgcatagacaaatgtgatataaaagtgatcttgttgtctagccggccacatttttagatgtatcatttgactagtacattgtagtatatttaatattatctttaatattaaatgataagatcatatattctaaatataaaatatatgaaaatttgaaatttctttttaattattataattgaaattatcatcttagatattttgatttgaaaagataagattaattgaacctctacattttaaaataagatagctattaattttatttatttaaaattttaagattgaagatgataaaaggaaatatattttttctcttattttttcattttagaaaataaatattattgaaggaaagttttgatttataaatcactaaattttggatatattttcaaattgatttaaaacttaagatttcaaaattagcgagatattttgtttaaattttaagtttaattaaaatgataaataaatatttgtttttcctaaataatatattttatcattttaatcttaataaaaatttaagaaataaaatatcattaaaaatataaaaaatatttttggatagatattttagttatttataacaaaatttttaaaattatatacaaatattttattcatttaaatcaaattgcataattaacaaactttcataatatgtggttttattttgaattatttattgcaaatatttttgtaaaacctattatttaatttggtctaaatagttgtgattcacattactatagtccaaatccatcacagacaattgttaataaaaaaaagtaaataatttgcatgttaggtgaatttgtaatctttccttcatctgtggcataaactagaaatatttgaggtcgatccaaatcttgtagtatatgtgagcctttatttattttgggcttagaatcatataaaaattcttgataattaaaatagattacgttgctaattaaattggatcacgttgatagattatatctaagcccaattagtcaatgaataaaagaaagttaaataaagattaaattccttttttttgggccttgtgtaagagttagcgggtcataatattaggtacgatatactgaactcagctctcccttatatgaacaaccacaattgtgaagacccatttgccttgtttaaatagctgtattaggctaattacattagtttaacctaataaaatttgattagcaacataattaattctaaaaatatttgaaaataatttttcaataaattatttttaaattaatcaatgagaagaatttgatcacgtactgcgtgaaaggattcattgagcccttttaggaattggagtacttgattatggttaagttgagcatatgattttgtgttacagctgcccatgtacagggaatgtgagacctaagttgatttatttcatcccacacagccgtaagtttagtgaaataaacaccaacagaatcatcaccttgatgaagataggtaagagtttcatttaattcaaaattttttagaccattgccttgattgaatctattgtttaggactgtccacacctcagatgcagtatcaagatacattatactactttttatttcaattgatacagaatggagaattgaagacacaccatctggttgcatcagacccaagaactaaagagagaatcattacgaggaggttgagggagagtaccttcaagaaatggtattttgtttctggccccaatagagagcttgaagtcacgtctccattgctggaaatttcaattcgtaagaacaggtgttgcgagagctaactctaggtgatctgcattactgagatgatatggagatatgacattttcataggcaggacgatctgttgaaattacacgaggaacttgaaacagagaatcagattgtgtgggaggatcgatagaagcctgagatggtaaaggattagtatgtgtttgagtttctgtggaattgtgagatggtggttgtactgtggtggcatcgaccacgggaatagtggtggtagcggaagtagtagctcttgttctcactattgttgaattgttgaagctgcaattgatttcttggagcttcaccttgtttcatctgataccatattaaaacgaaaaacaaagtattttattcatattgttttgttaaactgttacaatggcattggagctcttatataccggaaataatagtgcaaaaaaaaaaaatcatgcctaattgttagccctgtgcatgggttgggttggccgggttgaggctattttggtgggccaacccaatgagatcggcctattaaattctaacccattcatatcaaattttaattataacccaacccaaaccaacccattatttatcgggttgggttgggttgggttgggttacaaccctaattttttggcaattaaaatttcccaattaaaaaaaaattagagttgaatgattgaataaatataaatttcaggcaaagttataaaaaattcaaacatcaaaaataacttattacagtcatccaatttaaaataagttaaaattgtctaaataattaccaaaacttaaaataaaatacgatgttc

SEQ ID NO: 387990 - DNA, 2007 bp, Cannabis indica
tatatatatattgagcttgctaaattttaattttatttccaactccttgaggttctggttctaagggcctgaacctttgcgctttcaattaaatggttagacatggtttttcctttttaataagttgccttaagagacccgacccattcaaattaaaatagaacaagcacccacaactaaggggaatggaatgttgaccacatggtgaaatgatcttctaatacgagggtgagtgtctaggaaaaatggttccaatgacctgaacctcggtattttaacaacttatttttagaaaaaatttattaattatttttaactttataattttaaaacttaaatatttaattagcttgagttaattaattactcaagaattaaaactttttagtaagtgttacttactcccaggacttttcaaacttaaatacttaattaaccttaatttattagtttatttaagaaacctgaatgtcttagttaattaacttgagttaattacaaagcctaaacttttaagttaaattaacgtgagttaattaccaattgctctaaattaatttaaagtatactaaggcaatggcttatttctaattccctggaacttcagtttcaggtgaaactttctacgcttatacttgttgttaatttagttatatttttatagaagaggtataacattataatgatataatgtatgctactccccaagtgattaagagtttaaacttttgatcacttgttataagacaaaactttaaaatgttgaaattgaaatgaaaaattccttctttatttaaatggtttattccctgaggcgtacattgaaattgaacataaaaaaaagaataaaaatcaaagaaaagtaaaaggaagctggccacccatagtctactgagagtatcggcacaagtggtcagcattccatgctcttgtaatttttgttccatctagccttctcaagtgataggtctcatcgccaattttatgttgaactttacatggaccttcccagtttggtcctaagactcccactccttgctcttgagaagctagaaatacccttctcaaactagatcaccaatttcaaatcttttgcttttgactttggaattgaaatttttggcgatgttttggtacatctagagttggacttgtgactactcttgaagctcttcaattagatccaaagactcttgaagtaaagcatggtttcgagtggggtcataagtttttctcctatgtgaaggcaatatggattcaactgtgattattgcttcgcatccatatgtcatagagtatggagtgtcgcctgttgaagttctttctgttgttccataggcctaaagaacccttgaaagttcttttggcgttgaagcttctttttcaaggttgtcttcaaaatcttattgacaacttctacttgtccatttgcttgaggtctgaccataactgaaatgcttttaatgattccgtgtttgacacaaaacttggtgaattgaacactatcaaactactttctgttatcagatacaattttgtgtggaagcccatattcgcacacgatgttcttgattatgaagtccaaggcctttttggaaggtactatgttcatgggttcagcttccacccatttattgaagtagtcaacaactaaaatggaaaatatgactcctcccttttccagttggaagtgatcccactaagtttatttcccaaacaccaaaggaccaagaactgttcatgagggttatctctgttggtagagctcttggaactttggaataatgctagcattacttactttttcagacatattcaatgcaatccctattcacggttggccaaaagtaaccttatgtattggggtcatccaggaagttgaatgatcaacggttgacacccccagtgtttctgtgcttggagtaagtatgtagcacactaactagcataggcgtgtttacgtgatttttaaacgtactgtgcagctcgttgctaatcagcgaggtt

SEQ ID NO: 387991 - DNA, 1218 bp, Cannabis indica
acagtaggaactccaaaaaactggtcttgtaagagactttggatttcgtttctttggtatgtagagatggattatcatgcaatgaagaggaaggagcttcaagctttgtgcaagactcatgggattccagctaatttgactaatcgtgaaatggcggatcggctaaatttgcttctcaaggtacccttttcttgaattttgttttctgtttgtttccctagaatttgtatgtaaaattcctgtaaattttgttttgtcaacaggatggtgaggcttctgggtcaaagggtttgtgcgaaattgatggtgaaattcaatcggtggatgttgataagaaggttaagaaagtgacttttagtcctgataatgagacatttgtttttgtgggtacggatctggattcagattcggattactgttcaaaatcgaagaacgggaattcgaggaagaggagggctacgagtaagaatgttgtagtgaagaagaatgttgaggtaaaccctgttagagtaacaagatctagagggcagagtgttgttgaagaggaatcaaaggtggtttctttggctgttgctgggagaaagagagggagaagagggaaggaaactgttgatgtttgtgataaaccgtcttcggttgttgatggttctgctgagtgtgatgaagggaagaaagaagagggtgttaggcagttgagaggtagaaatgttgtgattgaagctggtgggaatggagaagaaggagaagtagttccaagcaagaaaatttctcttagaggttcaaggaagacgaggtttgtttcggtggatgagactttacaggagaatctcgttgcagaggtaaaggatgagtcaaaggatgaaggtggctgtaatactttgagtcaagatgtgagcagaactgaagttggggctaggaccagaaggtccaagacgcaggtgaatgtggctaaggatgatggctctaatgcgttgagccaagaattgggtaaaattgatgttggagttgggtctagaaggtctaagactcagatgaatgtggctaaagatgaaggccctagtgctttgactgaggatttggggaaaactgttgttgagggtaggaccagaaggtctaagaggactcagatggatgtggtggctaaagatgaaggctctagtgctttgactgaggatttgggaaaagctgttgttgagggtaggaccagaaggtctaaga

SEQ ID NO: 387992 - DNA, 1322 bp, Cannabis indica
agagtttatttttgagtttttagtgtgttgctacttctttaagagtgttttgagttgcattcattttggtttctcgttacttttgtgcttagttactgttttgatttttgagtcttcttattccatctatacctaaagaaatggttaaaactcgttcttcaatttctccttctgaagatcaatgaaggctttgagtttttttatggatttgaagtttaatgaattgaaggatgctattgaaaatgcaaaagttgccaaagttagaaatgatagtcgagtggtgagaaggctgaatttttgagtgtatacttatatgtttagtttaattttgtttttgtatatatatatatatattatttttttaactgtttttttttttttgcaaggatgatggtttaaatgatgttgatgtgattggcgctaaaaatcaagatgcaatggaaactgttggatttgataagaatattcaatctacacaggttatttttgttttgtaaactttttaattgtttattgttttgttttcaatataattttttatattatcattttgattgttaacacttctttatgtttggtttattattgttctcattatttgtgatgtttaaattttatttttgtaggtggttaaagatgatgctccttcatttgatattatgggttttatttctagtaaacctgaatggttcgaggaagaaaatcaaactggtaaagtagataataaaaatcaggttgtactgatgataatgttctttttaaggatggagttaacaacaacctgagaatcgaaaaacataataacctcctcccactggttttcgcttgcctagtccagagcaagcttgtctgcctccatctcagcacccacggcactgaattccatcgttagttttcacaaaccaggtctggttatcaaaatcaatagccagaattgctccaccaaatttcccttcattgtaagagccatccaccagtatcactttaggtgtaaagagccatccatcaaagaagaaaatatttgatgaacaaaacaatgaaaaagatgttaaaaggactttggattttacggaactaaataaaacacttactcactagaaaatgacggagtatcacttgactgaatctaatcacacacaggtaactacctactcatacttaatcactcttatatattattgtttttgtataatatatatagtagtacaaacgcatgtggtaagttattaatattactttatcttttgcagcaatgcaattggcactactacaaaaaccccctttaaaggcggtttttatgccctttcagcgtcggttttcgc

SEQ ID NO: 387993 - DNA, 906 bp, Cannabis indica
taatagcaatgctcatgaattaaatcaaaagattgaaaaagctaattgctgtcatgttatgtaattacatttatgtcaatatttaaactcgtgaactttcttcttttctttttttttttttttgattagaggttccaggaaccaagaaagacaagaagcaagcctttacaagaggcaaaacaacagccataaggcagagcaactaaagaagtagcagaggcaaaacgccccaaaaaaaacttaaacaataacaacaaagcaaagaaaaaaaacagcaaaagtaaactaattaactagttccgcacgaccatctgcaagcacctgctgcaggaaatcgtcaaaattgggtaaatcaagaagaccgaagctgttgttctgatttgcccatcgagccacagagtgggctacaccattgcagcctctaggaacccattgaatctcccagaggttgaaaataccagttacattgaagaagtttcgggccaagtcatgtatgttaaaatgcaggttgtgtatgtgtgttggttttgaattcagagctgcaactacacttctggagtcacactggaagatgacatttctatagcccaattgtgcgactgcttcagctcctttgcaaactgcaaaggtttccccagcaagcggatcattgtagtttatttgaacagtgaggatctttagtatcttaccggtatggtctctgagaatggtgtaacgtcctcgcttcaagcctccattgggcccttacacccacggactaatggctcttatacacgagtacgccactctggctacttcctggattgatgactggccctacagaccaacacgagtgttttcagcgtgctttgtcctcactcgcacgcatcctgggaaaacttcccaggaggtcacccatccttgaaa

SEQ ID NO: 387994 - DNA, 774 bp, Cannabis indica
taaaaactacatatgatagcatttcatatttcttatatcaatatattctctttacacacacaaatacatacaaacacatataaaaatacataaataataaataaatttcaaaatattgtaccaattatatttttctcattcacaacacaagaagacatgaaatctaactacttatacatatacatataaatattcagatggcttaacaattaatgtctttgatttcaaattcaccacactcaaagtataatctaacatcaaaaattataacccttagctacatctgaaattccaaaagcaaaataagaaaacttacctaaatatctttatgctaactctactcctcaagctatataaattctcaatttctaaagataaattaattgttattttagaaaaggatgagaatgaatgaaggtttgctgctctgtacgagagagaatgaatgtttaggtttataagttttctaagtttatcatatatataatcagattattatttttttataataataataataataataataacaacaactactacagtgacaacaacaataatagtaaaattagttaataattggttattttgccattttttaatcactagaaatctctaatcttagggtatttagtcactacaagtatctcaaaatatcctaataattctaaagctaacttactgtaacaatcctattaaaactactaattaaacccattgtgacattattggcctccgatcgagtctccaaggtcgccaaacttgaaaatattt

SEQ ID NO: 387995 - DNA, 1072 bp, Cannabis indica
ttatgaaacaccagtagaacacaaaacaaaacaactaaaaacaacagtggaacaactaaaaaacaacagtagaacaacaatgaaaacttaacacagtatacagtataaaacttacacagtatttttgaaaaaaaaaacacagtattttcgaaaaaaattccgccccacagtataaatgtaaaaaaaaattaaaaatttcagtatgtggtgtaattatcccttattttagatcatttttaattttttaaaaaaattaaaatagtttaaaatataaaaaataaaatttaaatattttcttacacatattattgttttttatatgaataataaataattatttatattttattttagacactatatactatttaaaatattttaaaaatttaaaaaaaaagtaataaataactacaatgtttataaatattatatataaaaaaaaacaattaaactaaagagcactctaaatatcgaaaaatactacaaaatataccagaacaatcctttaacataatttgttacgaagttacatgtacatatccattcaaaaaaaaagttacatgtccatatcgtgttagagatgattattattgataggattttaataagcataatagcatatgacttaaatacccactaaacaaaagatcccatcttgagaaatgctaaagggcaccagtggtgcctaacacctttctatgtgtcaatatcgctattggtttaattaagtatcaggtcccacataatttaatataatagctttaagaaagtatcgttagccaatcgcaacgcgacatgtcaagaaggtgttaggcaccactggtacctaatagcaatgctcccatcttaatatgttatactacttaatgcttatttttgtaacaccatttctaaagtacttcgaacattttaatgttttcaaaatctctaactcaatttctctctctaactccctcattctctctgtaactcccgaaaaaatccacaccgatgttccaaccccaaaccaaacccacaccggcgtctaaacccaacaacctagttcggtgtctaccccaaaccaaacccacac

SEQ ID NO: 387996 - DNA, 821 bp, Cannabis indica
taattaattaattaaaataataggataagtctatgatatgtatacttttcaaaaaaggtgtttcgatatacttttaatttattttgatatttaccagaatttttaatttacttttattatgttcgtgtagttataaataattagaattacttataaatttttaaaagaatttaagtagtttatagttttgaaaataaagtacaattctacgctacaaaaaaaaataatcacttgtataatcaaatatttaaatcttatttttaataatataaactattttaaaattttacaaattattttaaataattataatatatatgataataaaaaaaaaattggattaatttttttttaaatgtcaaaagagataaaaagtatatttaaataacttttttgaaatgtactgtaaatttattttttaaaaatttaaaaataatacacttaattttattttccactctaattattattttcttttatatagtaattgacaagctattattaatttataaataatatattaccatataaattatataaaaacaatagatcaaataatttacctacttttttaactttttctttgacttttctttgtaaggaactatgaactaatgcacatgtgtttttaaaaattatgagtgggggcagaccaccacagctatatacacagtgcctcgaataattattatgaagaccccacaaaatataaattcttatctttaagaaattaaattgggaaatctgatttttttttttgacaaagtgattaaaatcactcataaatttatgacgcccacgtccgccaccggcgctggaac

SEQ ID NO: 387997 - DNA, 1215 bp, Cannabis indica
tttagacggttttaggtagttttgggcggttttttgcggttttttgcagttttttggtttaaccattttttttatttcaaaaaccgaaaccgatcgccatgtcaaaaaaactgataccgaaattgattgccaaattcggtgatgacgtggaaccgaaaattcggttacggtcaggtcagtttgatggtcggtttcggcttatcgatttttatgaacaccgtcaggtggaagtgacctcaccgccaagctaactaaagcgaaaattgacttggaggccgagcgaaaagtggtcacggaacaagaaaccaagaggaaggtggagctggaagccaagcaaaaaatagaagtggaattggaggctcgaaagaaggccgaagaagacacagtcatccaatgaataagttgaagaggagctagccacgaccaagccccaaggagaagaagaattggttggtgctcttgtagctactattcacttgctttcgaaaaaagatcaaaaaaattgaaagaatgaagacttcttccaccaatgaggctgaagagttcgaatctgaaacagggcttccgattgtggaaccaattaatgaaccttctgttctggcttttgatacaaaactgcctcaaacgacaccaaaaccaaaaccaaccaaaactaattatatattgaaaataagagattaaaaaatatacatctcaaaatttaagataaaaacctccaaaaattaatgtatattatatagttgattatatttttgtttgtgggtttagtaattttaccaatctaaataaatttatttacttcccttgtttattatttcacttcaagtttatctttttttcccctccaaatataacacattttttagatatatattaattaaataaatgtatttaattaaatgttatactagtagagatattttggtaattctcgaattagagtattctagtaaatttatatttatatcttaaaaacaattcttatgtattttatcttttttttttaatatacattatttattcgtgaaaagatattattttactttaaatttaattagatatttaaataagtgaacaattaataccaattaaaaaatatcaaaatataaaataaatacacccccattataataattaaatagataagggaaattttatttacaccccaaaattttttaaatacaccccattataataatttttattttatattaa

SEQ ID NO: 387998 - DNA, 1036 bp, Cannabis indica
taattataaataggagcagtttatactgaaagagggacggaaaaatcattagagaaaaggctctaaaaccgtatcaaaactctaataagattgactcgtggactatgcagaatattaactgcaaaatcacgtaaaaaacctctgtgttcttattctttctttattgcttttgttttctgtgcaagtctaccacaatttaggctcaaatataattaacgaaaatccgcgttaacaagtagcatacaaataagtgaaggaaagaatgatagtagtaatagtagggtaaaacactaaaataaataggcacacgaaactattgtgaacatattaaaaataaaataatattataataataaaaagaaattaggttaagttttttttccgctccctctaggcataaattgggtcctatccatataggttgagaacgataacatgcaatgtactctccattatcatatgtttattaataaacaatgaaaataaataataagtaagtcattctcttatctttttttaatttatcaaaattaaaaaataaaaatttaattaattaaataataataaaaaaatactccccttactaattttttaaagaatattattaaaggtaataaattttatttaattttattttacttttaatattaaatatataatgatgattttattcattaaaatatatttttataaaataattactatgtactataatttaattcaaaaagataatttagtcaatttaaccatttcaattatacttcttgttaaaataaacaatagattattgttattccatttccaaataattttagtacacaataacatattataaatattaattcctattattcttcatttattccgttacatttttttaataacttatttcaatactctgtagcaaacgtacaataaatatattattaactaaatttaggaggtttttttttttttactatttttacactttgaaacagtttttttttttattattttttttttatttttatagaattctacatagaaattcata

SEQ ID NO: 387999 - DNA, 1253 bp, Cannabis indica
tttaattttgctaatgtggcgagtgtctatattctaaattgtgcccctaaactttaatttctatgaaattaaattcctaaacattaacatgtaccaaattgtacttttaaaatgttcttctatgttagattttctttagtaaaattggacaaaagtccttaaatccaataatctcaatagtttgagaaaaaattttaacgacctaaaaagttcagagaacatgatttgatatatgtcaaagttaaggggataaaaatctaaattagtctatattataacatgtgatttcaactagcaaacaataatgtactatttgtaagttgtaactcactgatggttgggtattcactaaatcttaattttttttagatcgattattgtttattatttttttaaacgtttatatatctattctatataaaatgtggctatgtaacagaattcttggtttaacgatttttttttaacgtttcttttttttttcaataaaaactaacggaaagttcacgattgaaagttttcaatcccatttttaaatccaaaatatactaaaaaaaaataaaatctatcttttttgagaatttttttcttcccatgattaacaacaataaaaattaaccatcgcaattttttaattctattcttaaacccaaaaattctttttttttttctaggatttagaacaatgaaattttcaattatattcaaacctaaaaatcctgtttttttttctacaattgaagacagcttctccaagttcttgtagttgcccatctccagcaatcttccgagaagagtcgacgacgacggaaactcccccactcacagacgacggcggtgcaggttcttccctactcgcagacgatgacgacgcaactattcccttagctcctctctcgcaaacggcaacgacgcaggttgattttctttctcttagttttcatttcacatagatttatcaactatgtaatgtaatccttcgtttttcatgtgttaatttttttttctccatttgggatctagatctatctcttgagtttattttttttaattgtttatcttcttcatttttacttcggttatagcaagtaagaatatgtgggttgatgtaatcataacagtattgttaacgcagattttcgttaaccaaatttgagtctcacggtgataatctcatacagaaaaataaagctataaaagtaaaaatatgaacacagagtttttacgtcattttgcagttacaattctgcata

SEQ ID NO: 388000 - DNA, 3443 bp, Cannabis indica
aaaaataaaatttgatatggcccgatgggtccgatggtgggcccgatggggcccgatgcctgtataaaaaaataaaatttgatatggcccgatgggcccgatggcttgacagtgtagtgaaataaaagagagaagaagagagaggggggtgatgtaaatggagggtattttagggatattataaaatgtgtcatattccacaaatatcaaatattataagtttaaggaaaaaaaaaaaattaagcgtatgttagcataaaaaaccaaatttctcgaataatattagacataaaaagtactttattatgtccagcattgctagatataaaaaggtaagaggacatcatatataattattaatttttgttggtgtatacaaaattatccaaacttatataattaataaataaataaataaatatttcataaatttgaaaaaaaaaataacaaaaattgcaaattgtgtatttctttgcaagttgctagacgtgatggatagatagatttgatggcatcaacatctaccatgcatatattaaaaaggaaaataattaaaatttaaatagtacatataacaagagtaaatatcattttagatcatgtgttttgcaaaagttattgattggaccctctattttgttaaatgacaaaatagactcagtattttctaaaatagtaaaaataagacccttagtttaatttttgacaactattttttaatttaaccaacttgaagataatttttaacacgaacagatatagaaaatataaacaattttatcataacacatttagatcagattattttaaaattttagtttgataaaaaatcagttcagggtcctatttgtaccaatttagaaaatgtaggatccattttatcatttaacaaaacagaaggtccaattagtaacttttgcaaaatgcagagtttaaaatgatatatatccatataacaaaatggtagtattatatattaaattgtactacaagattgatgtaataaattacaatgagaaatttgaaaaaatatgcataaaatactctaaaaaattttccctaaatccataataccccatatttcccatatattaccacattaccatattccccataatacccctttcatttgaaatcccaaacccaaaccgcctcctctctcttcctctctcccaaacccacggtgaacccatcccaaacccatcgatttaaacccacggtgacggcgccccctgctatcgacggtagacccaatctcaaaccgaccgtgacggcgccccttgctctcgacacaatgtctaaggtgtgtcccttttattttcttttcttttttcttttttttgtgagaaagtgttaaagattgatttagcttgtgaaatttaaattttgttagatttagggaaattttgttaaatatttttgtctgatctgtgggggaaatcatgatttggacctgtaattttcgtcgggcccgatgcaggtccgatgctcacgcgaatgggttggagaagatgaagacccgatggggtctgatgcttgtgttggaaattaaatttctcattaggtccgatggcacttgatgctgggtccaatggggcccgatggggccgatggtgttgagggattttacaaaaaaaattgtgttggatccgatggagcccgatgcctatgtgttgttctctttttttttgtgtgttgggttcgatattgggcccaatggtgggggcgatcggttgcgtggatgacgggggcggttgagtgtgggcggcttgcatggacgggtgtgggcagtctccgtctgtgtccagtgtgcatgcggttgagggtatgcgagacagagagagaaagagagaaagagaggggagtcaaatttgaatgaggggagtaatgtgggaattgaataaatgttgtcctatcttaccaatatagggtattttaagtttaagggaaaaatttccccctaatgtaaggataaaaaattaaatttcccattacaattaacgtccatgtatataaattttctatttttttttattaatatcgtattttatttagtaatttttttgtttgtcatggtaattgtatactctcatactgtttttgtttgtgttattgatggattattaaattttagtaatttattatttatttcttaaaagaaaaatatattctggaaataaaatataataatatataaatttattatattttttgtccaagtcatacaagtattttagtggatacaattatcacgcccaacaatattggacaacaataaaaatacctctttaatgaccattataatattatatcctgacatgaaatgaatgtgttagggaatttcatgactagattcgatggtcatggattactacgtagtagtggtattttggctttaatgttaataaaaaaattctaaaatttaactcactcctcaaaggtcccggtctgggtctggatcccgggtcccgggtcccggtcccggtataagtctgggtccgtgtctgggtcccggtctgggtccagagtcggagtcctgaactaggttcgggttccggtctcggtctgggttcgggtccaagtctaggtccctagtcccagtccgggttcgggtctgggtcatggtctcagtcccgcgtcccaagtcttgggtcttggtctcggtctcgggtcccggtctgggtcctgagtccgggtctaggtgtgggtctaagtccgagtccaggtcccaaggcatccgagtctgggtctgagtcttgaattaagtttttttttaataaattgaaatcgggtcggatcagatccaatccagaaaaaaaattaggcggggcgaaacggatctgatccaagatccaataagtatccaaaggtttctaatcagtggtgatccgtcggttcgaaattctaacccgctccaactaaatggatttttttgacatgtctaactcccctcttatatatggtgtattaatttggtgtaaaagtttcatttagtgggttttagttgagagtggttgagattaagggaatctcaaatttaaatatttaaagagtttgagattaccccaacataaacttaaaagtgagatccactttctcataatttttccacaaatattatacctaacatagatattttacattctcatttccaagaatcaaacaaccttacagaaatgccccattagtgtgatttttcggactaacaaattaaagacaaagaagacaatatatttaccagaattcacattttattcctctatagtatatgcttctgtttctctttctatatatatataaatatatatatatatatatatgagtgactattcaatggttacatctttattgtggccatcatgattacattttcttttgacctgtaataacaggttagtaataggtaaacatcttttttttttaaaaattaattaattataatt

SEQ ID NO: 388001 - DNA, 1799 bp, Cannabis indica
acctaaatttcaatgcgctttcacccatgtttcttactagaaaatatcgcctgattctattgtaattttagccttttttcttattagtttgagttaacaaatctttttgtatgtatgaattgacattatgttttaagtgcaaaaaataaagttatgtctggaacatgagagcttagccttccaggagaaagccactttattactgcatgcaaatataatactctattcaaatagttaatttatagtaccaaaatggagttaggccccatggaccgttaatgatctgataatgaacttaaaatccttctacaatacttaaaaattatctggctaaagttcattcgtgccatgaaaataccctaagtcatctaaagtgttgatgttcagaagtggaacttccttctttacacttccaaagctcaaggcaatggagtatactactggtctgggaccaatgctgcgtccccttctgctaccttagtctacctccttgctcggatgaaggtggaccttctctaaactatcacgacttccctgtcatgacacctcttgaggtattggtgggcttcctccaccttcttcataaccttagcattaaattctttggggcataagggcgatttaaagttaagggatgggatcgatggaatggtagtaggcacctacttttgcgactgttgttgtttgttatcttgttgtggaggttgttgaagttcctttagtagtggttgttgagtttgttgctgttgtggctggtgagtttggattggttacgtcagatgttgtttttgttgttgttatgatagttgtgctaggatagtttgttggataacctgttgttgttgtagtggttgtgattgggatggtttctacttggtctgccattggcttgggatcttgcgtggcttgtcttaggtctccttctcccctaggagactactgcctcagcactgccacccttgcctttttggcctgtttcccgaagccaataggaggatgggggcacttggcatgagaaactacttgttagtttttatggtccatatcagagttaaaaaagtggaagcagatttgataaaaatagtttttatctaatatgaaatataattctaaggatctcaatataatatatataggttaaatctagactaacgaaagaaaaactgttatcctaatttttttcccacatgatgtggcatgttcacgtaggcaagatcaaggccatgtggaatacaacgtatcaataggtgagcaaagtcaccatgcacaacacatcaattaacaagagatccaaatactcaggcaagaacaagttacgagaaaatatccaaccaggaaggtctgatcggaccacaccctagtcggccaaggaagtctatgtgccagccaacccttatgaaaaggttaggctggccagcacaagcaatgtgcatcaaaaggggattcaattgaaaggtggggtccacatccatctttctgaacgggtcacaacttggttttagttactagacaacccacgaaagaagggattaaaccccaaattatctacctatcttttagggatgttacctagttatttttgtaactaaatatatgataaaagagtagttttccctatttttaagggatgtttacttacttaaaggttgatcatttatgaatattctatattgttccaagtaaaaccacacataggtaggggtgtttatctaatctaatttgtattattttattgatagtgcattttatccgcattaagtgggaatttcacattttgaattctattcaatctgcataat

SEQ ID NO: 388002 - DNA, 472 bp, Cannabis indica
tgtttgaagaggtcatgagccttatttaaaggaaaaagggccttatggtcgtgcactacaaattggccaagggtttccaaaaatacacttggcactattaacacctgctcttcacttaaaaagaaattggcactcatctccctttgacacttgtcacttgtatagataaaaatttataatttacgcatttaattatgcgaaagaatataaatttgtcatccttagtcaaattaaatttcttttcacatagttaaagttgaatttcacaaatttagagagaagttactagaatacataattgactcgtggcgacgaaggtctcaatcggatactccatgagacgacaaaataagcaaaaggtgacacacttattattttcaagacaagcagggtacaataacattactctttcccgaaggttttcgacaaacacttttgaggggcaaatgttataccttaaaacacttaaccc

SEQ ID NO: 388003 - DNA, 3672 bp, Cannabis indica
tgactgtccgatcttatttgctgtagaaaaataattgctttaattgtttctttgtcgtgtaggtggagtaagtgaagaaagggtcccaaatgtactatgtaagtgtcgtttttttttttttgggggggggggaagcctttttaacttttcactttttacattttctcttctctccctaaaaatttgcatttgaagaagttcttccttctctctagagggctgaacacatcaagcatcattctcgtaagatgtttgcatcgttttgatgattcaagcttcccacattctttctcaatagttttttgtagtgggtaagctttctattcttgctatttcacttgattttgttgatatttccatgaatgcatgaacattatttcttgctttgtacatcctttaattcctacgttagattgttgttcttttggtattttattatgcatgatagccttaggatatgtaatgcgttatttttagatgattgagactcaaatttgtatattttaagattttaattgtgtgtataaaatcgatttaattaaatattttcatgcttttaattaaaaaaaaataatttaatgggaatgtttaatgtattttggttttgtgctattgtcagatttgttaatgaaatgttggcatatttggagcttgaaaaccaattcattgattggtactttttataaaaggaaacaataacccaagcccaacatgggagaatgatttgtgccattttagatcaacctatcgacatatagcttccatcaacatatatacatatgtatatggagctctatgtccatccattccaagcttcggcccatttatttcatttcaaaagcccaatgactttgaccaagtccaacaactctacactttcaatatcaaaggtcataacttgttgtgacacacttctatgcaagggtgtggtatcatggtatcaaaacgtggcaggttgttcccacttttctcttcaatcaatgacacgtctcctacattctcatcaactcctctgtttttgcaagcatcttttccactcacttgcacacgtaaaagtaaaattgagaacatatattcactataaataggccccattagattgtaaaagaaatcaaattttagagagagagtagaaaatcactttctcattttattcttctcttattattattttatctatacttattttagtgacacaaatgagtatattaaaatagtaatattggtaaagttagagtataactattgtacttttttacgctttatattaatattgattcttttgttctttatctccatatcttatttattaaattgttattcatcttttaatttttcttccaaagttaatagtatcttttatataagttcagtcatgtttttcttatgtaagttaggctattaatatttttgtatatttattatattgtatgtcatttactacattttgccaatagtggtattttatcgatttatgatatataatataatatgctgtcaagttagaggtaagattcaatttatgcaagattaattgatttgtgcttttattatatacatcttccagttctaattaatggtgtagtattacaactgtgttttgaattaatatcggtattaaaataggatttgcataactacatttctaccataccaaactctttatagatcactctcattcactcaccattttattatttttaatttatttatatttttaccatattctatttatactaatctttagaggtaatttacctccctatggatacgacatagtccgtttactaacgtgactccagtgtaactaattgggcgacaacactagacaaaaaagaattaaatctgaccttcgttgtgattcttggctctttgagtcacaaagaacacgaagaacatgtttgagttcttgaaaaaaaacatgttttggcccgtgcaagtcttgtctgggcaaggaggttttgtttaagacttggctagccaaggaaggctatcagggggcctggtcggccaaggggatgtaccccataggctgcccggcctatgcctggaacaaggattcctagccagcgactaggttgggtcaaggggtttggccagccactaaggcctgaaaccctggccggccaaggccaaggctctaaggggccatccagttttcttccctctgttgctagggtctcatgatggccttggaggcatatacaactgtagccttatgcgtggttccccttgggaactctgtataaggctcgatagtgagtccattatagtcaattgtataacttaggacttactatatgtcttagtaagtgtacttaagacggtacttggtcgatgactgaccttgtacattatgatttacctggaaggtaccattaggtattgctgactagaatatgtttatagctttgtcaagttgctcaactccccttatctcttctatgcaggtagcactgggtgttggatatgggaggtgacgaccattattttgtaattatggttagaacgaagcagagttgccgtagagtgcctccatatgacccccatgtagctatggtggctacaaggggtcaagtaaggatcgtagaggaggctactcaaccacatgccgatgttgatccaaagattgatcagggggatgagagtctcaatgctaagtctgatcttgaggaggctgcactggttatcctgagtgcccttgctgtaagaaacattatcttagagagtgcaattggaagacatgctttcagtgtggcatggttgggcattttaagaaggactgccctcagacaaaaagataagaacaaaagcaagaggcaaagcctgtacctgcttaggtgtttaccattactctagctgatgctgcagccagcccttctgtggtaacatgtcagcttcttatcaacaactcctactttatcgtattgtttgactttggggctacacattcataagtggcgtcgagagtaattaatcaattgggtgccttctgatttcattgatagggtttggaaccctattgcctagcggagaattagttatctccaaaaggtagattaggtctatgccagttgttaacgcagatttttgttaactaaattaaagcctatttcgtgatgaaattgcacagaattaatagtaataaaagaaatagaaagaacacaaagctttttttacatggttttgcagttaaaattctgcatagtccacaagtctagcttattagattactgatacaaaactagggctttttctctaaaggatttttcatccctttttcggtgtatcctgctcctatttatagttagataggaggaaaattaattacaaattagaatgatatcctacaacaataatcccctaaaatgtgggatttgattacgtcccacgtaaaataaatgcggttattatttgaaaatcacacaactttgattagtctgcttttatcgggtcaatgcgtacatgtattaaatacgttacaaagtgtatcatgctaggatatctccctaggtacatagcaacaataaccctggcaacgagctggagctttttccatgtctttccgaggttgataatttaaatctcgtcgtctctgcgattgaagacataacgctccatctgacaatcgcagtgtgtggtgacaagatgaacttcaacagtcaacatcat

SEQ ID NO: 388004 - DNA, 1547 bp, Cannabis indica
ctttggtaatcattttggctatgttacatgttgatattgcttatcgagtagaatcaaataaaaatagacaaaccaaaccatttacaagtttacaagaaggacgaaataacatcttcaattataaatgacccataaacggcaaacatcttgaggccaaatatttcgaaagcataaaactaataataatattgacatatatccccaattaaatattaataaattaaattaattatttaaaaatgtaaaatacaatttttgttatgttatcaacctacggtcatgttatagaaaaggctaagttatagcctcttcagtaaacactatgtattataatgaaaaagaaaataaaatacatgaaataaatagataaaatgatccagtcaagaggtaataatcgtactgtgattggcccacatggtacaaagggccaatgtaatggtgagaaatacaccaatcttcttcaaaaacacagacaaattatttgcacctcttatgttaaccactgaaacttttcctgtctcgttgcacaacttagctccaacaccccttttcctttgctttatgaagaagctgacatcagaaccattttcattttcttcgaagactccagctctagtaccacttgaagtaccaaacacatttatcttttctacctgctcaacacttgtccaactaagtgatatcatgcaaatgatggtgctcagtattgtccaccatgctaccatcattgatttcgtcatttccactatgtttttattatacttcataataactgtggtgaaagaatcttgatcacgatcatgagtaagggtctgatcggatttccttgcaaaatttatatcatgtgtccctttagaacctaccaagaagtggttgctcaataaaagcactggattcagatggacttgaacagtttgagaaggcacagattgatgaaagaatgtctcagcaacctgacgtgtcgagacgaatagtccatgattgactttgatctcctctacgacctcaaaacttggtgaacttgaatattcatccatgtttccttcctcaattaagttttcatttgggtcgctattgatgaattcaagggaaaattgatcgtttgtctgttcattttcttcattgaactccttattattgcagctgctttgatggcatgcttcacctacatgtataaactccacactcgtctcagtgaaatgatcgaagaaataatatcatgtgtatacatataatacggacggaacatatgttcattattcgatataatttaaacaatacgtatagaatttagatcaatcaacattaccattattatctgcgtgttcttctctacggtagctagaaatattttcaaatggaactatcttctgttcttccacgaagctctgttaatttaatttaaaagagagaagggtttatgttaatatatacaaataaaacactttcttgaaaaaataaataattaaaatatatatataggttgagccattatttttgcacctacttaagcagcattttttatttttaatacatgaaaaaaaaaa

SEQ ID NO: 388005 - DNA, 1665 bp, Cannabis indica
aaaaaataggttcctagattgaggtgctctggccactttacggcgaatatgactttactagtttgaaatgggaagtcgatgttctgcaagtgggaacaaatctcagtttgagacatagttacaaaatcattgctgacctgattttgtatatatagttgaactcgtttaccaatatgactttactagtttgaaatgggaagtccatgttctgcaagtggggacaaatctcagtttgagacataactacagaaccattgctgacctgattttgtatatatagttgaatttgtttatcaatataacaagtcaatcttgtataactaacacaaagatgtgcatttgatcaaaagaatatttcatactgttagaatattagctgtaaaaattagtgttaattgtatttattaacttcctctttagtctcctaactttgtatataaatatatattattctatggaatacaatacacaattctattcactattttctacatgatatcagagtaatacttagaattgtgattcgaaattcgaaattagggttcatgaaaaaaaagagattagggttcctttttcggaaaccctagttagagtgcgagttctttctcaccgcccacataaacggattgcccagccgctgacttacaaaaccttgaagtctgacggccaaattcaccgtgcgtgggccccacgcgctgccaattgccgccgccgcgactctcacgcgccggcgtatgagggcgcgtctgacctctttttggtgaaggtcaacgtccgtcacgctcctggcccttcctcgtcctccttgcatcgggctccaatggttcttctcattttgtggtttaatacttttttctttctcgtgtttgtgttcattttttagtgttcgctttctttcttttctctttcaattgtttttctagagattatggtagaaataaaatcatattcgaaatcgatagttgttttcgatgttatctcgtgatttctaaaatcatggaccataaattgattggttcgaattatttggaatggagtaagacgatttgactatatttgaggagtattgacaaagatgatcacttgactgatgatcctaaaaaaaaaaagatgattcaagaaaaatatgactccatgagatgcttgcttgctccttcaaatttaaaattctatcgatgatgaaataattagtttgattaatcattgtgaattggttaaagaactaatggattacttggagtttttgtattttggaaaagacaacatatctcacatatatgatgtttgcaaagccttttatcatgcagagaaacaagattagtctcttatgagttactttatggcatttaaaaaaaatacatgaagagtgtaaacaatgctgaagagaattgtgtatattattccatagagtagtatatatttatttacaaagctaggagactaaatgtgaaactactaaatacaagttaccctaatttttacaactaatatacatttaatattctaacattgcccctcaagctggaacatagatgttacttattcctagcttgttacaaagataatcaactcgcatcccattcaaagcctttgtaaaaatatctcctaattgttcttcagtcttcacatatcttgtggagatcagaccttgttgaattttctcac

SEQ ID NO: 388006 - DNA, 2041 bp, Cannabis indica
aaaaaatcgaattagtgatatcactaccctcctgggcatgagaaagatgcagaatgatgccacttatctcggaataccactgttcagttccaagaatcggtctaaagacatgcaatatctagtgcaaagagtcctcacaagaatagaagggtggaaggctcgtctgctttcgaaagctgggcgtacatgtctaatccaatcggtagggacttcaattcctatttatgtggcggcatcggaggtgatcccttgtggtatagctaataaaatggagcaaagtctaagaaaattctggtggggtgataacgaaaggaggaatcctatgcacactatatcttggagttcaatttgcaaatcaaaatacaagggtggccttggcatccgaagaatcaaagacatcaatcaggccctcctcttaaagtggggctggaaactcgtaaaggaaccccaaaatctttggagttctatcgtgactgagaagtatctaaaagggtcaaatctctttgatgttgagatgaaaggatcagagtcgaccctatggaaagcaattctaaggtcaagaaccttactaaaagaaggtatgtgtcgagaaattggagatggcagggccacctcaatctggttcgatgcgtgggtgcccaatggtgatcacttgcctcagcccctgttggatgctactcaaggtgcaaatttggtcaactatttcattaacgagaatatgacttggaatgaagaaagggtaaggaagtggttcagcgagagcgatgcaagaaacatccttaatatcgggctgccccatcaatccaaaccagactcctggaggtggattggtgatcctcgtggctgcttctcggtcaaatcagcttttaaactggtaacgaattccaaaacgcagcgacatacctcttgggattggagaattttatggaattcgcctatccatgggaggttgaagttgttgtggtggcaaataatgagagatgctcttcctaccagagaaaagattggaatagttctacctctccaatcaaaggaatgtcccatttgtgaggaaggagaggagtcatcattacatttgttttgggattgctactttgcaaaggcaatatggtttggaagtatgtggggaatgagaactaattcgttaagttatagctcctggacagaatggatgacttggttccaggataataagcatagaccaagtcttttgtctttcgatgaattcatgacaggggcactctgtatttttaaagcaatctgggatgcccgaaatggattaattcatggtacgagactccgccctataacggagatcgtcaactcagtgcaccggtcatacaatgatcacttatccagatggaaaccgaagaatgagaagagaggtcatctgcgcacgtccgaagcaggatggtggaattgctgcactgatgtatcaattcagcataaccaatcttttggagcggctgttttcagagatgagcaggacagagttgtggcaatcttcgcggagagactttctgctacgaaccctctgttagcagaagcgaccatcttggcaaatgcagccgagttcgcaagggaacatttgaaggggaaagtggctttccaatgtgacaatgaagttgtggttgccaattgctcgatcacttgcaacacgaaccaatttattgacattgttggtgcaataaaccggttcaaaaacacggtcaggctacttgatgatttcaagatcagtaaaattgacaggacctacaacttcttggctcacaactcagcgaagtgggctgctgcagtaggggctactggtgttcttgatttgggagtcatggacgagaaggtgttctctgatgttcaagaatggaatcctgattaatgttggtattgtgccttcgggcgttgttgggcctctttcagtttaagtagtgggtagtgttggtagttgctgttgtttgttagctaagagtttgctttttcggttagttttgtgtttgttgtactgttcggcttggccgttttttttttcaatgaatggggtttt

SEQ ID NO: 388007 - DNA, 1398 bp, Cannabis indica
aaattttattgtaaattttataattttttttatgaatgagagaattatattgcacaaactaatttacaacctaggagcactcctaaaatagaagcctcaagtttaaatctatacatactttggatttacatcattacaaatcataaaaccactctctatctttacaactcaatttcttgggaaaaaatatgatgatttggcttttgagtctccattttaggttctctatcaacctgccccattccggctgctcctcttgccaaataatcttgttcagagcctcccaaatgatgtacactaagcctgcaacaactgcagcaagtacattcttctgaaacctgctcacctttgttcgacctatccaccttataatatgtggcaggtctgaagctgaggttctccaacccagccaactcttggctgcttgtaagcattggacagcaaaagagcacttgaaaaataagtgttgtgtgttctccttttatatgttacacaacttacaacattcctccacttgtattctaaatttcattagcctttcctttgtctttaggctattcaacattgccaaccatagaataacactatgctttggaatgttcaatcttgcccaaacttcatggctccaagacactcggttaggactaggcttgaacaaagtataatctgctgaaatgtgatatttctgttcttggaatatagcagggtcttgtatggttttgagattgtcttcaagagctacaagcttcttccaataccagatggaatggataaaagccgagtagccccaccattcctctctcttgatgtacacactatgaacccatctcaaccataggctttcttgtttgtttgcaataacccatatgtatttacacatagcagccttattccattcctctgatcttttaattcctaaccctccatcttttttttgttggcatacatcatcccatgccacagcaccagcccaatgaaaagcagcccgccccttccaaaggaaggctctacatatagcctctatgctcttcaagatcttcttaggcataatcatcatttgactccaataagcttaaatagctatgagcactgagtttataagagttattctacctgcatagaacaaatttctcgagcttcagctcttgattctagcagtcatctttttcagccaaaaattcacaatcctttcctgatattttcttagaagaaattggattttaaagataggtaaaaggtagtacctgttgttggaaaccagatttttccagcaaccattgaacttccctttatgacatgttgctgcaatagcaagctatttttgttgggttttgtgtcctaaataaaaccctttacaatctaattagttatcaatataagaaatttgaagtgatttat

SEQ ID NO: 388008 - DNA, 785 bp, Cannabis indica
agagagggagtgagagaaagtaacaagagaagattttggaagattaaggacacctctattcggagtgactacttgagacgaaccttcattggcaaccatggacgaaagctctaagaagatgagaaaatagaggaaagaagaatgaaaagaaagagacaagctctgaaaccatgtaaagattaaagaatgaaactaaagaaatgaattccaatcagtttgataagtaagaagcttagagtatatatacacaagttgaagcagaaagccagctaaaccagagaagctaaaaacaatttcaattctgttacaaagagatgaacataactaattaataacagaatgtaaaactgttggaaaacaatctaagcttctcttaacatgtttaaccccttttttttgtggtagtaccccttttacttcacttttgttggcaaatttgatgcgcaccagttaatttttactattaagtgataattggaaagactactgtgtaaacctatgtatatgtgacagtaaaattccaaaggcaatgaaaatatgccagtatacacaaatgtacacactgataatttagttgatattaacggtgatatttaaccgacacctcaaatttataaagaaaagtaaaattaagggagttttacacaaaaaaaaattagaggttaagtatataaaattaaaatataaaaaaatttagctgccaataacatatatttataggtacactatagaaaattttgagtttttatgcttaatttttctatctaattaaaaaaaatctctca

SEQ ID NO: 388009 - DNA, 967 bp, Cannabis indica
aaaaagataacttccaaaaatatgtaatgggaccctttagttggtccaataaaaaagattctttgttggagtggtaaagtatttgtgattttaattttatacacctaagaagatttgatcatatatataataactatatatatgatcatcatcatatttaaatatcgctttgaaaattagtatgaagattaaaataattggtatgtcattttggtgtggacaaattattgaataaattaatgtttctagcctcaatcataattttggaggtgtgaatgattaggcgttgcttcgagacattttttaattgaataatattttactctttaagttttactgtttttttttctttttcctgaaattcaatgtcatgtggatattgtttgttcataaaatcgtaattaccattacatctttgaaacgaaggagaaaataaaagtaaaaaaaaaaaaaaaaactataatatcaaattaataaaatatttgattagataaggctgtgaaaaataattgtgtgacacattgatagttttgtcaaaaagtaatatgcaataaaaagttacatagcttgaattgaatattaattatagaaaaacagttgtgtatggattcacattttctctacgggaatagtcctgcggggacccgcccggggtggagattccctgtttaaatgggaaacggagtggggatggagattactttttgtccccgaatattaaacggggcggggacgagaatcacacttcccgcatcgacggggacccgtttagtattttatcttatatttctagtaatattttataatttataatttatgtttgcatttttttaatatacgagtacttttttatgaattttaagttgtgttttggataataatttttttattgaataattaattaatgtataatattttaatttttatgtagtttaatatttttatttattaaaatttttattataaa

SEQ ID NO: 388010 - DNA, 1247 bp, Cannabis indica
ggctttttcggcaccgaccgctactccggtgattttttccggcactggcagcaaactccagtaactattttggcatcagtgacaaataaaactacctaaacaaataaaaacattaaatatgggatttgaaaacctaacttacatatatatggcatatcaaataccataaaaacacataaaaacaaaaaaataccatataaattggtcaaacttaaatgtgtcatatttatcataagaacttttaaaatcccataataaatgtagtttcctcctactaatttttttttttttttaaagttaatacctcaagggaacttaggttatttttttctttcttttttcttttcttcacttgcttggaattttgaaacttaggactactggcaggattaaccgggtagcattcatttgggaacaccgcaagatgcagatcatatgataagtgcaccccatgaaagttatccgttcagtttagatattttgcactattctaaagtcaattaggaccaatttagtaccactatacatgtgagaaaaaaataatatgttgtggaaaaaaattaagttgagtatttgataaattataaattgtaaaatgatatgaattgttaaaattttattataatgataatgatattataataaaaaaaatatgtaaaagttgacgttatataattttttttattttccatatttttatttattattttcagcctaaattataaatttatatgcatctgataaagaaattataatatttttaattatatttttatcacatgttaagaaaattagaaactcaactatagacaaaattccaagatgtggtttgttaataaaaaaaaaataataaataaatagaaaatattgtttaaaataaaataaaaaataaaagatttatatataaattattttattagatttgttttaatattttgttatatacaataaataattaaatgtatttttagtaaaaataaatttattaaagtctttgaaattttatattttaatattcctaatttattaattaattaattgattaattacaaaataataaatatgatattgaaatagtttattctgtaattactaaacacaactttataactactgaataaaactagaaaataaatagtgtagaaaaataaaaacacatcaggtttttatatgtagtatcaacaatttttgcagattgttactagtccacggggccacgctcaaagataagattcattagataaatc

SEQ ID NO: 388011 - DNA, 790 bp, Cannabis indica
gtaagaagctcatcatctatgtctttaaacaggttaaagatctggtctttcgaaatgatggttctgttatctggccttcttcctaatccaaaacttgaaacatcagtcttgtcaatcaggtttgtacttcaattcaaatcaatgctattggtaacttataagtttgaagttcctaacttttgtagcaacaaatttcagccttaacacagctacattggtgtatatgttacctcttgggcttggtggggtgattaggtgagcttaatgactttgttaactctaactctcttaagaaaatattgtcttcacatgattttctattgcattgattgtcagcacaagagtttcaaatgaattgggtgcagggaggcctagaatagctcgcttagcattatgtgtcgcgctatgcatggttgctacagaaggcacctcggtgggtgctgtcttgatcttaggccgtcgaatttgggggtattgttacagcagagaagaagaagttgtgaaatatgttggagaaatgctgattttgatctcaatttcccacttcttcgacgggattcaatgcgttctctcgggtttgtttttgttcatttttgctttgcttctttttcatgaaagattctaaaacacttgtgatgacaatttcaggtagtgttagaggcttagggatgcaaaagattggtgcttatgttaatttggcagcttattatgttatgggcatacctatagccatagttctagcctttgttttccacattggtgggaaggtaataaataaaactcactctca

SEQ ID NO: 388012 - DNA, 2398 bp, Cannabis indica
tactttacgcgcgagcaacttatttgcccgtccctcaatctgcgatccatcattgattccacctcgcgatcattagcaatgatcttattttaagcaaattcaaatatattttcaatgaacttgtcattttgtatattttcattgctaacatgagtagttaaattttctacccacgtgtttgctttaagtattttttcaagacactttgatatctcctttaatactttcccttagcgcgagtcgttagtattcaactttatgcgctagtcataacctttgattttcctttctcgtcagataggtataaatcaaaaattacagttatttgatccctttctcatcaaaaaggtttgatcaaggcgttataatgattcgactccttttccctcaaaaaggtttggtcagggagttataacagttcaaccccttttccataaaaaaggtttggtcgaggcccttagaaagttttcaaaaaaaattattttttgaaatgatgggtttgcattgtactatgtatttccagattaattccggttaatcatacatatatgcccctcaagtaattttaaagggcttacgcttataattacttgtctgaaagaaatgattattttattcacaactgaagttcaaaatattttatcagcaatgcgatttacaatcattaatctcataagaacttccccaattcaatcatttcttttatcaatcttctaggagcacctggtttcgataaaacgggttttgatgttcagggtcaatccctcacatactccctcaattatttcgatatccagggtcaatcactgacatatcccggggttccaggtgaagtaatcctggttttgtctttggctgctactggttgacgaccaactttcctcgtgccagctttatatggcaaccacagcgggttgatatctactcacgacacaatttttttttaaaaaaatatttcttttaccggagtaactgccccttgtattcttgtgacttgctccctctcgagataactaagatgtcacttcctcttacagaggagggttataattctgggtcgctcgagttattgggaagatcgagctgatcatggacattgcactgcccctttatatatcgtttaaagtgtccttgccacatgagaccttctatctcatccttcagctgacaacactcttccacggtatgaccaatatccccataatattcataccgcttatttggatccctcttgcgcctcgcatgtttcataggtcttggctctctaaaaacggcttcctgtacatgtacgaggtagatatttttttgagtttcattgatttcggtatattcgacataaatagggatgtagttgattttcttatccttggatagccttttggaatcgtcttctctctttgatcctgaggcatccgaatcaagttctccaatagtatcttgccccggttgtcttttgggtttcgtggcttgatgacttctgaacttattctccaactcgttcattcgcaaatggagtgactccttttgctttggaccaattcgttgacgaagatcaggcttcttcaagttcagatgctctcgtagatcacttttgtcgtgactacagtcggaccttgctcttcctctcttaagaattgattcaccttattctccctgtatgggtttgtgcaaatttatttctgatgaacctgaagagaggcttggcgattttcatccaatgttccacatatcccaggctgtatccccagattttcctcagtttccttaggtgtgtctcctgagagttctgaatatatctctgggttgtcttctgccccttggtttgtgagctgcaaggtttgcctcgtgaatctcttctcccaaggtcaggttggttctgggtaccattttcatgcactgcccttaccgcggctatttcacgctctaactcagtattacgccagtttgcttcctccaattgacacctaagatggcaattttctaattccacgattggtatgtatcttgttgggtcataggcaccatcctcatcaacctggttagtaagtggccgatcattgtttacccaaggtccatcaaaccagggaccccaatactgggttttcctggggcttgcagtctgttcatgcgatcactcaatagatccgtgaggacttaatggtgcttttccagggcgatgactgattccttctagcagactattatcttcaatgtcatccattacttttaggttaagaggccttttctgagcttgttcacagaggcttataatgaaagcacaaaactgttaacgcagatttttcgttaactaaaattgagcctcacaatactgatctcacacaaaaaataaaagctattgaaaaataatatatgaacacagggttttttacatggtttt

SEQ ID NO: 388013 - DNA, 1031 bp, Cannabis indica
gtaaatgagaatgtcgtaaaacaataattgttggatttggatatagtacttgtgattggtatatttgctactgttgttagtttgacttgtcaaactgaaacaagataatacctatgctacagaaaactctaggccacactagtaatttttttttttttaatttttcctaaatagaaatttattaccttttggattcatcaaataccattgtttcttcattaaaaaaacaattctttttaacaaaataaaacttacatagacattgtataaatttataacattttggaataatcataaaagtattgttggttttattgaatgggaaattatatattaaaaattaatattttattaaattttgggaaaatgttttttttctctctattttttccctaaaaattcttgaaataaaaaaaacgatatattaaatacattatcatttgtaagggtaaaattttccaataaatccttctctaacttactgagcccataaactataggtaatgaacactaggttgtctacacaagctacttctttcgtgggttgctcaagagaaccaaagggctaaattctagaataggccttaattaaactgcaataattgtggtctttacaaagtagaatttacgtggggtatgggttttttaaaccttttatgataaatatggcataattgattatggacactttatatggctttttttatagtttaaccatagtttatgggattttaaagcccatacggttggaatttatttgtcaaaagcccatagtatgtgtattgtagtttatttaggttattttagtaattttagttcagtttttttttaacataaccattttttttttgtagagttttgcatgtaatcatcaggttttgatggttgtttctacattttaatttacttttgtagttttcaattcagacctattttccctaaactgcctatgccattatttctctccctctcttttttcatttcaccatttcttcattttcctctttcttcttttcctctttagttttcgt

SEQ ID NO: 388014 - DNA, 1608 bp, Cannabis indica
aggagagagacacactggaattttaagtaggatttgatgcatttatagagcttacgctaaagaaaattaaaaatctcaaatgattttattattcatgtgtagattgttgtaatatatcaaaataaaaaattacgatgattaaagatcatgtgtatttaagatgtttcaatagaagttatactacttggtattgggatggaaaatatttaactaataatttataatcattaggaaagcgggggtagatgatattgagggtgacgatccatatccatatccatatatacactaggcttaactggaggagcaagttagtcagggacaagttaaggtccatggccaaaatgacattataacgcaagcgctcgggacaccagagcatcctggacgtgtcaaggctgctaggtatgctagtacttaaaaaatattatttcattagttagacaaaataaatattcattaactttatttatgaatttgtaggttcattgcaaaggcatctaaactttttgctaggaaaaaaaatagaagtttctgatgctgtggctcaaaaataaagagaaacatgctcaagattatgttccacacgaacatgctcatcaggagcatgttccacaaaattatgcttaggacactactacaaaattgggttttaagtgacactcttcagtaacccgcacttacaaaagtgcgggtcactaaagggttagtggtaagtttttagtgactctcataaaatgactctaaaatttcaatgttagtgacttacaatttgggtcattaaaaagtaaatcatataatttctattattgtttttttttaaaaaaaaaaagtttacctatagtgacgcgccaaccatgaatgggtaaatatttgccgacttgtttggcgcgtcactatatcataacacaaattatatataaaactccataatcataaatgtaaaagtaaagatttattaaaatatatatatataaaagaaaactaaaaggtggcacgattttctataatttcaaaccctaaagcttttttcttaaataaaaacttaccaaaaaatataaaatatttattaaataaaaagaaaaaaataaaaaagaaataagctggggtctgaacccctttctctctttcataaagaaaactttaataactataaatattctcacctcttcccccctctctctcttcttctccaatcttttgctcttgcctcttctttcttctcttggcagttgttgctgcccagcctcccccggcgacaagcgcctgagactttgggatttagggcgtagacgacagagatgaggagcttaggccgtggatgcaacatcgagctggattctggtcaggtgcgattggaatcgcgtgaggatcaatggtgctcactctcttacacctctctgtttctttctctcatcaatgcctagatctcatttggggacccatggtgtgacccaaagtgctctttgatggtcttctcagctattaaaatggctagctcgagatgatatttttggaatatattttactaggatctagattaactaacaagtatgtttttaatatcctaatatgaatttttaaaacgataaaaataaacacataaaa

SEQ ID NO: 388015 - DNA, 626 bp, Cannabis indica
agtcacatggagagtatattgatatgacaggggtaaaatcgataaagtgtttagaaaaagaagtaaaaatgataaattttaaaaaagagggtaaaaatgaaagagaacaatataaaaatagtataaagtctaatttcctcttctaatagaacatctataggactcttcttaaataaatattattgactaaacgattcatacagcttaacacttgggctaagacaagttaggcccatacttagggtccatttgatttaaaaacatttaggcccttttgttttttaattatattaaatttgtcttaaagccgatcttgaattcatatatatcataaatatttttgtttatattttgtgtgatagaaggtttgaaaaaacaaaaaatgggttagaatcccttgatggaaactatataggccatttttttttttattttgtgtattttgctacaaacttattaacttttactaaaataaagattaattatgtagaaataattcttttcttaattttttttactttttgtgtctttatttagtaattaacttcctattattttagttaatttaagtattttgtgtgtaattgtttttaatttcttatattgtttgttctatttcatcctaa

SEQ ID NO: 388016 - DNA, 3423 bp, Cannabis indica
gcgaacacgaattgccacctctacctcatggaaacgacctcatatatcacatcaatgatagaattcgttggtgtgatttctaggatgacaatacaaagtgtttggaagatcaaatagtcttactggaaggattgcagcgctcaacaggtttatttaaaatcaactaataaatacattctattctttaaatatatataaaatacacatgcaaataattatttgaatattatattttttcaaaactcaaaattcttttaaatgtcataaaaaactaacaagatgtctactatatataactataatatacattattatataaaagttataatttcaccatatattaaaaaaaaaatctcgtacagtagaaacaaaaataacgcttctatctaatttttgagaaatcacctatatactaatttttaactttttttttatttttacggtttggattgctccggtggttgctatgtggattgttatgtgaatttaaattgcgatttaagttactccgttaattactatgtgggttgttatataaattttcgtaaaaaaaactgcttcaaaatgtaaacatgaaaaaacttctaatttttttttctatatataaacaaaattagctccattaaaattgctataaaatataattgtccactgtataattaagtttagagatattgctaattaaaaagaaaatgcttctgtgatttttagtttttaatatatttttacaaatatattggaaatgacttaagttaagtaaaaaaatttctttttatatttttttttatttaagcgtttatatattacaacaatatataatttgggactcgaactcagaatctccaacacacacgtacccttctatgattaaaagaatacagatttaaataaataaataaaataaaataaaaaaattcagggtgtctgtttaaagcttagatacactggaatgttttcttgattgtggttttaatctcaaaatttgtgtaatgaactttcttggtgcgaaagaaaaagatgatgatgccaaatgtttcaattcagaccactttccaatttcccggaatgaaaagaatcagattatatattccattaccattaatggacttagtaacagttacccaaaagaaaaaagaacaaaaaagttgaattctttcttgaaaaataatgttattactagaaagtgatgatggcaatagcttagagattacttcaaagatttctcaccagattgtgggcagaatcacttttaagaaattgacccagagaaaataatatcaggcataaacaagattatgtgacaactgttcttttttcaattctttgcttcttaaaagttctcatttaattatgattattttttaattttgggggaattaattttgatttaatactaacaaatacttaagcacatacacaccatagctcactctcttttagcgttctcatttcatgcattttatgtatatatttttttaaataatgaaaacattgtttaatttcgattgagggtggtgggcaaatcaagcatgtttcttaattgttatcgtattaatagtttgatggtcaaaaaaattcaaaaattacttattattcttgtaaaatgttattttcaagtcaatttttgctatctttattgcttagaatttttctagagtataaaacacacataccaaactctttgttgtaagatgcttgttagttatatttacttagaaaagttaccaaatttaagtgttcatatttttgtgagtatcgagatttgagaaaacattttttgaatttttattgattctaagaaataattatgattattttggacatggtactagggtttaattagatgttactttatggaataagtaatttttatagacaaatcttattagggagcctttgtgtaattattttgtttttgaaaaaaaaaaaaaaagaagaatacaagagcaacattttcatcattatatgttgcctcttagaaaaaaaaaaaaaaaaataggcaagagcaacatttctatccatttgtctaacatgttgcctcttgttcaaaaaaaacggaaaaaaaaagtttgtattagttaatttttcatttgttatggctcctagaataaatgtaaaaggttgtctattttctttcaaaagttccaaaaagctagtttgtagtactctttacagtggtttgtctaaataattcatagcctatcttcgtttcaatgtttattcaaatgttagtcctaaattgtcaaatccatcatgagtgctcactttttaattttcaactctatgagtgaaatatgtagccatgaataaatattttcaaatacttgtgagcctaatagagtttagacttttacttggttcatttttcgaaagcttttatgtgctatggtttgcggtaaaaaggtttaagattggtgcacacactcacaactctaaatttattcaagataactttgcatagttcatattggcttattactaacattttgcttgaataattgtgtcatttttaaaaaatttaacccgaaaatattatgttttgacattattattctttcgcttgaattgctagagactagcaataagctagttgggggttgagattaaggttcaaatttgtacattttcagtccttaattatgtacataaaattaatataaattaaatatttgataagttttaatgttaaatttattttgaattgaaatatttactttactttaattttgtgttatatttcagatttgagcaaaagttggtaaatggtgaaaaagaagaggaatggcccaagcttatgtgtccatatcttttcctcatcaaagtgttcccaggccacacgtccagagctcattaccaatctatctcttactctaatagtaattgagcccaaattgattattaacaataacgatgggcatgtattggattggaagtcctcaattggacatgtagcaagcaacaatgcactcacctgcaagtcactccagatgctatatttgtccccatgttcccacttttaccagaaattggagtcattttctccatttatttagccacgaattgtaccaatgtaccatatgtgggtcttaatttctctataaatagagaccctgaaaaagggcatgggtgttaatccgatccaatccgcactgttttggtcaaataatatctaattcgcactaagtgcagatttcatattttgaattcaatccgatccgcataacagtttaaatccaatccaatccgcaatagtgcagattggatcagttattatcggtgttttttaatgataattatttaagaaaaaaattcatcttcattgatatataaatcaaactaatatacatgtatgtcaatatatatatatatactcatctttagatttacactaaaatatatatgtattcattactaaaataaata

SEQ ID NO: 388017 - DNA, 517 bp, Cannabis indica
aattgattttataattaatctataaaattacttaattacttacgttgaaaatctatataattaattttttaaacatttatatttgttattcaaaggacatatatcattaacttttatttgaaatatatttataaaatatattattattctattgtatataaaaatagcatacgtataaaaaaaattaaaagcatagctaattgaaaatatatttatacatatataatgtgaaaatatatatcctaaagttgttagaataacttgagaaaaaaatatgaaatattatatatacatttgaaaaatatcttatatagtttaaatttaaatgtaaatttaattttatttttatttatcatacttgtttaattaaattattattctaatttgaaaaataatattgatattgttttgaaaaatatattaacaacataaattttgaattttcacaactttattaaatctatactcaattttttttttctcttcatttttgaattttattgctaaacttgaaaag

SEQ ID NO: 388018 - DNA, 800 bp, Cannabis indica
gctgatcctaaatggcatgctgcaatgacattggaaaatcaagctcttatccgaaaccacacatggacattggttccctatcaccctgacatgcacttagttggaaataaatgggttcatcgagtgaaactcaatgcagatggtacacttgacaggtgcaagtctcggcttgtagcaaaggggtttcatcaaactcccgggattgatttttctgagacgtttagtccggttgtcaagctagcaactgttagaattattctcacacttgctgtctctttcagctggcctatcactcaacttgatgtgtcaaatgcctttctccatggcaacttacaagaaacagtgtatatgccttaaccacctgggtttgaagaccccaatcgacctactcatgtgtgcaaattgcacaaagctatttatggtctcaagcaggccccccgtgcttggaatgacaagctcaaggccactctactcaaaaaaggtttcactgcttctcggtcagacacgtccttgtttgttcatggtgctggtgccactttagtcatcctacttgtctatgtagatgacattttagtgactggtcctaacaaagggttaatttctcaacttgtttctgatctcaacaaagaattttccctaaaagatctaggtcctcttcactattttcttggagtagaggttctaagggactccactggtatctatttgtctcaatctaagtatatctcggatctattggtcaaggtgcacatggagggtgctaaaccaagcccaagtcctacaagttctactcattcatt

SEQ ID NO: 388019 - DNA, 2862 bp, Cannabis indica
aagaaagtattttttttacaaatgctactttttagaagatgattacatcaaaaatctcaaatcacgtagtaaaatagtgttggaggaaatgtttttagatctaaccccaaaagacgttccttcatattctacaccagtagaggatgatcccgctccctctattgaactaatgaaagctgagacaactgaagatgagattaccactgaagttcccattcataaattcacaatacctcgttgtagtgggaggatttctaggaacccacttagttatggcttggatggcgcaagcaacttggtagttagtgaaactcgtgatgatgacgcgttgacctttaaacagtaaatggctagtacggaatggaaattttagttagcaaccatgaaccaagaaataaattccatgaggaaaataaagtcttagttgcaccagatgactttagggccatcaagtgtaaattaatatacaaaaagaaaagaagagttgatggacaatcaaaacttatctagttagacttatcaaattacattttaatttaatatgaaagcttttaattaaactgcactttttctaaactaatagattaactaagaattagtttgtaaaagcacacacgtagtatccctgtggatcagggcgttataggtaaattatccttactcgatgtagatcattaatagagaatcattgattatttagattgaaacaatggataattaatagcttatctgtatttggaacatatagagcgttctatataatcaagaatgcaattctgaatctataatagagtcaagaggaattaataagatagagaatttacttggtaaattatagaactactaattgagagcttgattacatagggctatggtatccacactagttgagataatattgacttgtagacttagttaattggttttaattaatcaattagaattctaaattagactatgtcttatttatgaatgttcactaagcaatgacttaattgagaagaaaagagattttaaggtttgtttattaattaagagactttgataggtctaattaataaataaattaagtgataattttatttaataattaattataattgttaaataaataaaattggtatttgtagagttagagttaaaatctggtatttaagaaagaaagataagctatttaataaagtagcaaaatggaaattcgtaaggcacacaaggggttcggccacaaggattcaatttaaagccattttatcttttttttttaatccatatttaaattctaatctaaccctaatagacatcatatatatagataattatatgctcttattttcatagcatgagaactaaaattcactttgttagacaaataagagaggctcttttaatttttgaaatctcttctctcctcccctcttgaattcgaaccctatagtgaagagattacttgcccacataattcaagtcaatactcaaatatagtgtggaagattgtgaagaattccatcacttgaaggagatctaagttcaaatcttggtaatactctgcgacagaaaggaataagggttagagatctgaatagaatgagccattatattctcctaccactaatataaggttttctataactttatatgtgtttatttcattattttaggatatttatgtttataatgttagattatagattataatcaaacatacatgttagtaaatctaaattctgataaaataagttacaacaaaacccctagcaatttaccccactttcagcaaaacagacaattttgctaatatttcctacagaacccatgtgcaagtgtatcccacgagcacgacaacttgctaagatcccctaaattttttaactttaatataacacctactaatggaccacacctacttattcttaaatcaactaacccagcaccaaccaaaattatcacataaaaggggtcattatttgaaactcaatcaaccataaaccttgcaaaattattctccaacaaaaaaccctagaaatctaaagtaggaggagtcgagagtaacacttactgtaatcaggaggtgcttcatccacgttacactttcgaaatgccatttcatctcctttccagccaactttcaagcttcgatccttcttattttttcttcttcacgtcttcgtctcgactcttttgctttttgttttcgtctccttcttttgatcttcatctccttcttcttttcctcgtcttcgtctccttcttcttttcttattttaatttctgattttggtttccttaaattagtttagctttgattttatttctattttttttttagttttaagtttggtttatgatttatgttaattggttttttgtagagaagatttatattaagtttggtttatgatttttatttattttaaatatttactttttatttttatattttctgacttggtaaatgtggccacgttggccaataattagatgatttatcattgccacgtaagcaaaataaggagttaacgatgctggggagatgacaccttatatatatgcaaacaaaatagtactttagaagatttttccactaaaatttaaggttagatagttatttgcaagtgaattgatggcatgtttactaatcaggattgggagtgataggtatggtaatcactccttttcatttgtttactttatttaatggttggaatactctaagggaaaggcataaaattaggagaaaataatgggagaagttttcctcccaatttcttcaggtataaaccattacgggtaatgctatttttagtttttatttatttttaattaaaaacaaaaagacacttttgccaccaaatattatatacc

SEQ ID NO: 388020 - DNA, 614 bp, Cannabis indica
ttctcaatatatttttgtactacgttttttttttttacctagttttgagaacttaatttattgttaccatagagtttgtaatcatagaatttattgtaacgactttatactttcaatttttttctcattttctttttgagttaatgacacttaaaataataatatattttttaaaagttaaataaataattacattaataatagaaataataaaatcttatgatttcaaaatgggatataaaatataatgggtaatataaaattaatatgtctatctactactacactttgtgtcaattaaaaaaaaaatatattatcattgcagttttataaaatatgccaaaacaataaactaaatatatgtacctaaactaacaaagtgttatttgtattgctggatgcctgttacgtggcaatcatgaaaaggtgccacatcgaactatttacaattaatatgtatcttccacttattagcatcacgaaagaggctatattccaagactaagtcaaaggttctccatatcggcaaggacggaaaggattctaggactctcgctattcatccgctactgaaaaggatcagagtcccttgaagccactgttgggttttatgc

SEQ ID NO: 388021 - DNA, 604 bp, Cannabis indica
catacatgaataattataaattatttagttagtactcacgttatatctttgttgaggtacctcaacattctctcttcaagatgcaaaagaagatcccaatgatacaaaggtacataaacttctatatctatatctattatactaaaaaaaaaatgtattaaatttaaagaatagaatagaataaaatccaaattatgaagtgaaaacgagaaagaaatgatccaataataatacctttgtgaagaagagcattaatgagattattgtaataaccaatgccctcttcattgacattagttcccaagccatcgtggaagatttcacacatgaaattgaaaagcaataaacttgaaatcctagctagaaaatcagctcaaaaatgtccaaatctaaaaaacactctatcactcatgatgaagctccattaatatttagtttgttatactaccagattaaaataattcaacaagaactcaaatctttttcaatgatctcacaaatataaaaaaaaattaaaaatttcaacttataaaaaagttaaataatacaattgcttataattatatatatatactagtaaaaagttacgtgcgaggcacgtata

SEQ ID NO: 388022 - DNA, 650 bp, Cannabis indica
gttatgaacaatattcttgaagacaagggttcggaatactagctcattgcggtaagtatatattaattttcttcttcttcttcttcttttttatatatatatatatatatttatgtatatatacatataggaattctttacatatataaaaataaaatatatacaaattttttttctttttgatgaacaaatttcaaaattttttattgtgattatgtaaatgctatgatttctacttttaatggggtgtttatgattttggatcatataaatttgaaatgaaatattatcacatgatgttgtgtttatgattttaattcatgttcttgcccaaataatgattttataatgattttattaagtagaagaagggaaagagactgtttttttatttttattttgatgtttttggataaatgtttttttatttggatttgtggtagtagaaatttagtatattgtacgagtatttaaaaaaatcattcataaacgatgaaaagtacaagagatatgaaagtattattaaatgacaagtaaaatataacctaatatttctcatgtttacaaaacttaaactcagaagtaccccacttatgggattttttttgggtggtcctacaaagaaaaccctatatctttatatattaaaa

SEQ ID NO: 388023 - DNA, 4004 bp, Cannabis indica
aataaattccaacagtgtcctcacgctatgagaacttctatatcatctttcaactaacgacattcttctattttatgcccaatatctccatggtattcacatcatttagttaggtcccttttacgtctcgcgtgcttcataggcttcggttcactaaaaacgatctcctgttcatgcgcgattcctgagttccattaagctcagtttagttagtataaatgggtacgtatttgtcgtgtttcttctatttcttatctttggacgacctcttagagtcatctttcctctttgaccctaaagcttccgactcgaattcttcaatagaatcgcatcccaattgttttcccggctccccgacttgatgcctcctgaacatattctccaactcgtctattcgcaaatggattgaatccctttgctttggaccaagttattgacgaagatcaagttttttctggttcaagcgttctcgtaggtccaattggccataaaggctggcggatcttgttccactcatagactgtattttgcctttttgatcatcgttgtgacgagtattctcttctccttgcattgatcgaatatgagttaccgtgcgcctcatggtagcactcgcctcttcacgtcctgctcttcttcctaaggtttggttcatctcgttcctcctattgggatttgtgcaagctcctttcctatgagcttggagagaaggttggcaatccctgaatgaggacccaggcatcccaggctgttccctagatgtcccttattcctgtggggaacttccggtttcttggttcctggttgatcatatggcatctcaccttcaagttatcccccagtttcctcaggttgtctctcctgagcgttctggggatacttttgggttgcctcctgccccctggtttgcgagttaggaggttttcctcgtggttctctttctccatggtcaggttgatttggggagctattcccctatgccgccctggctgtagctacctcacgttctaattcagcattacgccaatttgcttcctccaatcgatgcctgagatgacaattttctaattcaaagattggtatgtaccttattggatcataggcgccatcctcatcaactagattaagaagagacgattatcttaggcccttcaagtctgcttcccaaatcctgggttttcccggagcttgtggcctattcaaatgataggtcatatgatccttggggactcattggctcttttccaggacgatgagtggctccttcataaggattgttttcttcgttgtcagccataagaagaatattattttttatgtaaggaggattttgtttgagctttttcacgaaatctctcaatgaaagcaccaaactgttaacgcagatcttcgttaatcaaaatttgagtctgaatggtaaacattcacaaaaaaataaagacggtaaagaaaaggaaaatataaacacacatgattttttacgtgattttgcagttaaaattctacatagtccacgagtcaatcttattagatttctgatggtttttcagggattttttctcttatcattttttcatccccccttttttagtctaacttgcctctatttatagtcacatagtaggcaattaattatagggttgactgatatttttacaacgattatcccttgaaatcatggggtctgattacatatcacgttaaataaatgcggttattatttgaatatcacacaactgtgaatagcctgcttttactgggtcaaaataaacgtgtattaaatacgttgtaaaccgtatcgttttggaaggtctcgttgggaatagagcaaatagcgagctggagcttgtcatacttctttccaaggttgataatgcaaatctcttcgcttttactatggaaacttaataccttatctgacaattgcagcttttagtgacgaggtgatctttaacatgagcatgtcttcctatggcgaggtggccacctcgctgtcagttgctttggttcacccgtctgtcatacgtagcttgtatactgtaaattatacgctaagtgttttcacggttattatatcctctccacataacaaggttagtgcctcgtcttgtacacctgaagttacatgatttctcgttaatgcacaaggcgacactttgtatatctttatctcccagaagactatttagtcatctgagttataaaacactttatcaattatgtttttaatgagttattcctcttcaaatgtaattataattatgtgtctagatttatactttcccagcttgacatgtgtcttcctctgatgtgctagccgaatttcgggttaacacctttgttcttgaccaaagtgttgcatgttcctacaattcaaaaaaatctactcagtatatctcaattcattcttgacaataatgttgtaatcttgtttgacgcaaatgtctgctttgttattgataagatttcgaggcaagtccttttggagggaagccttaatcaaggactctaccagctttctttaccatcttctcagcatcatcaacatgttgcctctgctttagtcacttatattttgcatacaccattagtgaattttagtaccactaaaccctgtaataaatctacttgtactcccagtacttcttctattaataactataaagaatccaatcgaattgttgtaatgtggcacaatcgattaggacatccctcttttgtaattcttggaaaagtcttacaaacaatgaataaaaagttttctcaatctgccttatccttttgtgatgcttgtcaatatggtaaaaatcatcttatgcattttagtagttcatctctcaaaactactcaaccattccaacttatacattcagacctttggggtccttctccatatcctacacttgaaggatatcgatattatatattgtttgtagatgcctttactaaatatagttggatctatcctctgaaaaaccaaaacagaagcctttcccacatttctgacctataaaacctttgtggaaaaacaatttgacaccaaaatttagggcctgcaaacagactgggggagaatacagaaaattagaacctatgttgcaaaagttaggtattctctttagacacccttgtccacatattcaccagcaacaaggaagagttgaaagaaaacataggcatgtcactgaaatggggttaaccatgttggctcaagctaagatgccactaaatttttggtgggattcctttgtctctgctgtatatctaatcaatagacttcccaccttagtcaatgcatacaaatcaccatttgagagcctctataactccatactagaatataattttttgaaaacatttggatatgcatgttttccttttctcaggccctacaatcaacacaagtttcagtttaaaacatctaagtgtgtttttcttggatatagtccatttcacaaaggctataggtgtcttcattcctcaggtagaatttacattgctagaaatgtcaatttcaatgaacatgaatttccatactccactttattctcatccaagccaactgtttcctcttacaacaataaccttgctcctgcatatgtaattccctctatattagattatattgatctaccaaatattcagtttggttccatatcccatagcatagcatattctccaccagatattccacatatctcctcctctttttccaacattgatcccattttagatgaaaatcatctctctcagtctcccattgataacttagcttccaattcatcctcttcatccagtgaaaccatattatatgctgtacacatacctgttcttcctccccctttgcctcagggacaccctatgcaaaccaaatctaaatctggtgtctataaacctaaggtatatcttgttgcagcttctaaacagaaattatatgaagaaccaaaaatagtaaaacagaccttgagtttgcctcattggaagaaagtaatggacactaaaaa

SEQ ID NO: 388024 - DNA, 1458 bp, Cannabis indica
acattaagatgatattgaatatagaatttttaataagtgataaaccttgacctaattaaaattgatattaattacagtaattaatagatgtatatgggttagttcaaaaaatatccactaagagaagaatgacttggtcattaacttcagaagataaacatttgagttattatgtttagatttaaattttgatgtgattaaattcaaataatataatacagtagtaattttatatatcaaatattattagaagaataaaatattaattgatatctatgaagtataattactaataaatagtattactaaatgtggatttaatagtacaatataaaaataagaatattaaagtattaaataaataattcaaagaatattcaatgtatgagatacaagttttgaatattataattgtttaactattgaaatttaaggatacttatatgatgagattacacaagtaataaatttcaaactataaattaagaagagccttaattaaatgatcaaagaaaatagatagataaggaactgtttaattgagtgagactattaagtatgttgaaagtatatttaaaagacgattcaagaggtgaatccatttgtaacgacttaatagaatttaagattaataaaataattaatttaagaatatatattattgtattatttgagaaacgagaaataactactcttattaattatgtaatattaaataatataatcacttaattgtgtcagtttcttaaaacaagaaaggatgtgaaataaaatgattcattccaaatatgtggcttgattaattatgggatctattaagttcattagttatcataattaaaaaattaattaaatatgactaatagagagttttagattaatcaattttaaaataaagttttgaacaaatatatatttaatatattaaatgattgatcacacaagcatgaaccgaaggaaataaaagaatgaataaactaaatatactaagatcaaaattctgtatattttttcaatgatgatgtggtggtctcacagatctggaactacattatgtggagagtctcgttcatatgacttaaccgaaatagtcaaatgagatacaacatctataagagttatagaatatgttgcacttacttttagtgtaagtgggagattattgggacttattccctaaaagaaagtaattaatggatatatattagagaatatgtgacatgaaattataagataaatgatacataattataataatataattattaaatatctaaaaattctttgttcaattggagaaggtataatcttgtatggacgtacaagataattaagattatacgatatgaataaaataagtcaatattatattacaatatttgaaatctttaatatgaaactgctaagtacgatttactatacaatatacttctagtatgtgtgattttggttcggatc

SEQ ID NO: 388025 - DNA, 732 bp, Cannabis indica
aataaacgaaaaattacaactaaacaaaatattagagagatgtttacattgatgaatataattatcaatacttcaattggaacagtttccttttagacccttgataaaatcactctcaatcataacaacattgtgcttcatcagaatagccgtctcataagctaatcgacataccgcagcttctccaataagcgggtcaaccgactctaactttcttgtaatcttgatgcaatactttatttgaattttaagtattttgattgtaattctcctattatctcttgaaaatattttccaccacatggaactaattgaacctcaaattttaccttttcatcttttgacaattcacaccaaatgttccaacatccactttattggacagccttagcctctgttggagatgctatgtactcttcttgaattttcgaacatggaagaagaggactaggatgaagtcctctggaattccttcaaaaagtccctctattgcctatgttagcaaatgtcatcttcaattgagcagttgggctgataatgtagtaccttcctatagtaaataatgtgataggtgaaaataggtcatggagttgggaaacttcattttgattagtgggatttgattatgggaataattagataaggtattatttttaaaaatatatatatattacgtttaaagaattttttttacatactaataacaaaaaataacatgcagataataaaaaa

SEQ ID NO: 388026 - DNA, 1455 bp, Cannabis indica
gtaggagtggataggattgtttcgtcagctaaaaaataccttaatcaatgcctaattgctcataaattaggcttggagtcttcgtgcctagcttaaggtgacggagcaggcaatggacagtaccacaagaagttagtattagggtcaatgttgatgctgctttgtttaagaaagcttgtcagtacggtgttggatatatggctcgagatgcaaaggggtttctgattggaggatgcattggtctttatcatgattcagtctcaccaaaagttgtcgaagctatgaggatcaaagaaacattgagttaaattaaaaagcgtcgatgacaacatgtatttcttgaaattaattgtttatctgttgtaatgatttctctgtttaatcaagtgaataatgattgtaagacaatacttattgagttaagaaatatatttgtttattatgtaaagcaatcaagtaatatgataactataattttgctacaatatctatattatataatggttgccgatttaatttagagaatattccagctgacttccgtaattaaaattgatggttaataaatttatgattttccaaacattgagctttgataaaatttttatcaaagcttgttctttataataattcattgatgaatggatgagagtgacaaagaagcttgttctttttcagtttaatattttagtaagatggattttcaattgtgttggttgagaagttaaagaaaaaagtggaaacctttttttgttgttttaaacagaaacgacagaaacattagaaaacgacaattaaaaacattggttcgtcactctcaaagcctcaaacacagtcactatcactactttcgaaccttaattccatggtgagattttgttgagcaactcaactctgctattgatctttcttgacaacacaagtaagtaattaattattgattctggaattactattaattgcaaacttcctataaggttattgttctttctacgtcataattattggtgggtttaatgtatttgaggagttgtgtaagagttgcttagccatggaaaattttgaactgaaatatgtaaagaaatcatttttatgtatttgtttcttatttcttcttctgggctcattataaatttcatttacattactccattttcaaaccaaccttttattttctgtttttaattttgcaagggttaaaaaccggattgaaaaggaagaggaagaggaagaagagcttaatcatacacaatttaaggttagccactcatttttgtatttattatcctttttttttcttttactattttcattttcaactattaacatagtttggatttgaagtttcattttgtctttcagataggcctttttctggatatattagtatattgtgttctatgaatgaacaaacaagtttgtttagtactatagtacacagggatgcaattttta

SEQ ID NO: 388027 - DNA, 1411 bp, Cannabis indica
attgccacgtcatcttttttctatattaatctcaacatttagttcctactactttttctacaacaaaatccctgcaaaacttcagcaaaacttgcatgttttctattaggctcttttcttcactaaaactcaaataaaacgtaataaactccactaacaactctaaattacccaagagagcataaaaatacaaaataacacatattcttacaaaataaaaggaaaagaactaaatataagtaaaatatacacacaaattaaactcaaaaacatgacaaataactctttattcaagagttatcacatctccaaacttaaaacattactcgtcctcgagtgatgactcaaagaggaatgaataaaagacaaacgacaaagaaaattgactcaacacacaactcacgcaaaagaaaataaataacacacaagactcaagacaaagagagaagatatttactgagatgaaaataaataacaatgataaatgctcttaaaactttattgagatgaggatggaagacgacgacgacgacgatgataattatgcctcttgccaatgcctttgactaatttactcaaatgttaatgaagtgttaaaattataatgcaagtgtctttcccaatagctaatgcataactctttacaaaataaactcaatttttcctagaacaagctcgacctcaatcctaaagcctaacattttgtctccataagctgatgttaggttttgcaccctaaataaaactcatttcaatataatcagatttactaattaataaaaaagatcagaaatcattttatgttacatggttgacatgatttatttcatgattatatgtttaaatgtataaattctattaagtcaagaacatatagattatatagttgttcatgattatagtgtcctcagcacaataaaatataatcatgattatatctctttcaataatctcattatatcatgatcatgttgttattgttctcattcctatattatgaaatgattgtcttgtttcattcataatggtcagtacaatgaaacataatcatgattatatctctttcaataatctcattatataattatgttgttattgttctcattcatatattatgaaatgactgtcttgtctcattcataatggtgggtacatatcagctggtatcgagatggtgagtttgggttcagtttaggtggcagttgtctagagatcgtggttgtggggatagtgtttctggtgtagtggtggtggtgggagaaagcagtgtagatcgattgaagaagaagaagaagagggacgaagaaggattcgaatgatctagagaagaaaaaaaaaaaaaggtttttcttttatcatatttaatagtttttttattataatattcctatcaagtatcagttctattcca

SEQ ID NO: 388028 - DNA, 928 bp, Cannabis indica
ctataggcttgtactataaaagacaaagacacttggactcaattccttgagtaaagcagctctgtagagagagcaactcctgacataagaaaattgtaagccaacatagccattgctggcttgactcatcaaccctcccatcttattattaattctcaataacaacaaaccaaaaatatatatatgtatctttgttatgagttataatcgatgatgagctataatattgttagaacttccttatatatttatacaaatatattgctcaagcataaggtacgtagctagaaagttattataatattatagtatgggacgtatttagaaaaggaaattaagtattatagaaggatctaaaagattttaacaactgtgtatatatatgatttttaacaactgtgtgtgtatcagtattttaatgaagtatatataatataacagcacatgaagaattaatatgtaccgtttacattacattataaagaacagagtttatatataataatgacataataaactattcactccttcacaatgagttggctcttccgcgtcctcttggtgcttgtgaatttcgacttcgttctccattattgaaattattgttattataactcccccttccttctcttcgttgtcctcgaccacgtccacgttcgcttcctcggtcacgtcctcttcctttttgatctttactgttgtcagaattttcttcttattccaaggtgatgagctttagtaattgctccatgttctcctttcgctttgtttttcccttttttgtttctcctcgtaggcttgtaaagaatccaagagttgctcaatagtcatggattctaaatctttattctcttcaatgattgtagcaatgtactcaaaggttagactcacagtacgaagaattttttctataacctttacttcacta

SEQ ID NO: 388029 - DNA, 725 bp, Cannabis indica
taactgtacagaaatgtttcttatgaaaagcaaaatcatacctgtgggattgaagagatagagaaccgtgaggtgagaaaggagagagaaagagaggcgtgaggtgaagacgaggaagagcaactcagaaaaagcttacatatttatacttattattttaaaaccagtaatttctgataaataattaaattttatttttaatgataaattatattactatataaattttataattactaaatcaatggctaggtacataattaaacttaaattttataacataattaaatttaaatttaggcatattattattatcaataattaaatgtagtagtaatttacaaacaaaaattaagctttaagtatttaaatattaaattagtcttttaaaattaatagagtttaataaaatatataaaattacatgagatacatacgtttttactttgaactaattaaacaaattagaattttttatttctaaatttatagcaataagaggttttttttttttcgaccagggccaccgatttttcttgggcatagatgcgacttggttaggattatgttttgctgttgcgattcgattttttctattgcgattagtttaatctctgtaacataatttgagtgttttagtcttgtctgtgtgacagtattttattttgttttgtttcgttgttagtacttctttgttcttcaatggttcccatcaaatcgatgtt

SEQ ID NO: 388030 - DNA, 848 bp, Cannabis indica
tgtcgttgcgaaaccgttgaactggtttttcttcctaaccttttcagccttcggagtctaaagctatctcaacttttcctacttcatctgttggcgcgtgtacccacgtaccaattggtttcgacttaaaaaagtgtcggagaataagacatgatgtcaagatgacattattatcgaagtgatttttcttcgtcaaagttataacccgtttattacgtggacagtttgaataattttaatcctatctttcttttcatttacaaaaaatattacctttctttttatttattatctatatattttacaatacaccctttaagagatatattgatatattattatttcgatatttaaaataattttcagttaaatatttttgtatagtctttttgttatttaaaacatcttttaaaattttaaaaaatctaaaacattatgttatatacgtaattattttattttatacgtataaattattttaaatttttcaaaactaattttatataatattttaaataattataacatacacaaatataaaaaaataaattattttttttaaataacaaaatagataaatagtgcattagtgcatctcttttaaaaaaaatgcattgtaaaagcaccttatatttcatatttaaaatattagcatattaaaaaattatgcaagctagcattaaatttagattttccaaaaattagggatataaataacttggcaaatatatttaaacaaaaaaaaaatatattttaacaaagttataaatgattatattattaaatttatatttttttttatgatcggcctatacaataattatgagatggtataaaattttttgtgt

SEQ ID NO: 388031 - DNA, 1523 bp, Cannabis indica
aaaaaaaaaattaaactataatttgcgacaaacttattataattgtgccaaatttagtataatatattgctatgtattaaatttacatcagtatttaacatattattagatcacagtacttttttgttaaaggaaccatattttaattttccaacctcctttcaagatttttattttttttacttatttgtaattatattatctacctatagctttttttgtcataatattttttttattacattgatgtattatggaaagtcacatttgttgttgtgaaatataaagtgctccctctcatgtggtaataaaaataataataatttaaaaaaatcattgcaaaaaaattaataattaaaaaaaatgaagttattattaattaagcttggctaattgttcagccacatgccatccacattctttattcaatatatattatgtatcatatcaaatttatcatttgtttaatattcttgtatcccatattataggccttgatatcatataaatatgcaatatttattagaagtaattaataatttgcttatatatttattagaacccatcatgaagtcactacaaatattatatatatatggtttatattcattccacacaacgtgtcttctaataatagtactatctatatgtattatatatatgcgtgatttaacaaaataataagatgatcctttaaattttttatgttcacactattattaatttatatgtatatatattttggtgaaaatgtgaatctctaaattgaggcatgagaaatgccgtggcccgtcggcaacaacacatgcacttaatttgttaatatattaattaattttcagtacctaaactaaaatatatatatatataatacttatagtgattaatttttttagtcctaacaaaatttttttgtgattaaatataatttttagtcacaataaaaaaattacttaagactaaatatagtatttagacaaaagttgtcatgagtaatttagttttagtcacaacaaattgtgattttggtgactaatattttagtcacaaactttttaatcacaacgtatgaatgacaacttataattagtgatgtggtgtgacaatcaaagtgctcaagctcttgttcacaatatagttttccactcgactcatgaaccgagcacattgagctttaaattcactatattctcagaactgatcaggcagttgatatgtttactattttagtttctttgtcacaaagctacacttagaacatgctaagtagagcttgagaagagtgttagtgaaggttacacatcagttagttagtaaacaactgaaggttaggcagagtttgctaactcgtctcaattggtattgtttttatgtaacagaattcaattataccatttttatatattcactacaaaaaattgttatttttagtaacaaccttttagtcacaattgtgactaaatgtgacttttagttacaacaaatgttacttgtgactaaaatatagtatttagttacaagtt

SEQ ID NO: 388032 - DNA, 1453 bp, Cannabis indica
aaatagaagcttaaagctcattagtggacccaagtaacataaactgggccatgcccaagatccattctgccttttgagagaacatcaatacaactcgttcaggtgaagttttgttaagcctagttagcatttggaaagactatctctgtgtatctggaagaggtccttagcgtatatctggaagctcaatactagttttctgtttttgccaaatcgcacaagatcaagaattattttttgaaaatcttggacagaagatataatctcactaaataaggaaactagataattggaaatcaagtaattaacatgtcattaattatccatgaatatgggacacagtatgaacaactagcttcgtcaacatacacaagacgcctcatgtgatggatttaccagataagcccaaagtcaatatattatctgtaaattcttcattaaaggaaaaaaaggcaactagtatgatctctataacactataaatactcattgaatatttcatgcaaaggattggaaaatcatgacatacttaagcaaagaatagagtgctcatacttattgtaattccttaagcttttctagcaaaggacttaataatattgactcatgtactaagtctcgttaacaccccaaccacgtaaaaactctgagtgtcttcatgtatttctctctgaattatattttctttagcttttatattcataattagtattctaaaaaatttggtaaaatattttggtgctttcattgagagctgaagaaagtagtgataccctctaagattacattcagtaattatggtactcacctggacagaatctggtattcagtaccaagatgatgttgatttaaaaaccaggcttgatgatgatcgtacggaggcaactagtcgccaaaaagggaaagatcaacgtgatgaaaccaaccttcatgatgaactcatcgatgaagaagaagaagaagagaatctaaggatttagatcccatggatccagaagacgatgatgtaaataagggagatgagcaccatgaaccaagtcctgaaatcattaggatggccaaaaaactagaagaaactgagaaaaaattggtagcacaagaagaatttctcaaatgatgttggagaaattcgctatgccaaaagcgacatttggaggagaaaaccagaatcatgacgaaaatatacctaatgatactattcctcataatattgctgagaaaacaaatcctaaagatcccgactcccataatcctcctaaggataaagggaaagggaaagtaggagaaacctccaaaaaagctgctcccagtgatcgggaaaagagagcgaatcctgccagtcaacctcctaagaaaaataaaggaaccgatgctttaaggcaaggtcaccagattgaatctagaggtagaactgcgcaaaaggaaaattatcatgcacaagcacgagagtctt

SEQ ID NO: 388033 - DNA, 1221 bp, Cannabis indica
taatttatcctcctgttcaattattcgtagttagatgggatccacttattactgatttgcattttgattaagttgatggcgtaaatcaggtgcattttggttcagatgcttgcgaaggtcaggttgtctttgatttacgtgcccgcaaagatcaagatgcctttgctcatagttacttacagaccttgtctctgagtaactctcggattgataacttcttgaattacatatgctttcttggtcagtataatgacgtcgagatctacttccttctcatatttgtctactcgactgactatgccctcgagacgttgactgtcccgagcttgagcttgcttcatctcgcactagccttcttcttttgaagagattagactaacgtcctctatataagtatgtgtgtacattgtctctatctactcagaaggacgttgggatgtctcggaggaagcctgctttaccttggttgatttcttggatttctctcattattgtaagggattccctaattccctggtcgaggttgtcatgcctctttattcctgtgagatgtttttggcacatcagttcgttcattcccttggctagaaaatacatgggaagtttgtggaatatctcgccgatgttcttgattcctagtattattaggattggtttgattgtccattgagacatcccttgtattcctcggttgttcaacctgggtgttttggggattcccctggtttgttttctgtctccaagttctagagccttgaggtcttccttgtggtcttcttaccgttgaatcaagttggtactaaggagttgttccctaagctgccctggctattacaacctctctctctaacttagtgtttcttgggttagattcagccaattgttctcgaatttgtctattctctcactctaccaatggtatatatctagttggatcataagcatcctcgctcctaggtacgtatctggcagaatcattgacatcctcattccttctttataagttttgatcctttttaccatcattccttcttgaacgtggcatttcaaaagtgttggatctttgagatctcatgggctttttgccaggatgatgggttgttttcttaggttgattattgttgtgttgatcatcaccagccattaaatatgggtagataatgtttataaggagggatttttttttagttttatcactaaggctgtcaatgaaagcaccaa

SEQ ID NO: 388034 - DNA, 791 bp, Cannabis indica
atattttcttactaaaaataaaatcattaggtaaaataatttttaaaaaaattaatttctaacatttatatatatgaagaatattgacctcagatgttgaataataatttgatgccatgagactatcaaaacaactagatatattataagtgaataatcactcacatttggatgtaactcataaagtttcagtagtgggaacagagtagcattacttttcttataataataataataaattgaaaaaaataggacattattgaactgtaataataatcatgcatgccaccatatcttctttcttttttacttgttttttttttcttctttttactcctttctctgttgttttgtgccacttgtataagtactatgaaattaaacaatgaaaaaatacattgcacgagtttcatttactattctaaggtgaatagaatagtcctttcaaaaagaaagaaagatatatatatatacaaatacaaaatacaaatactattattatattttcactcatgtggattttataagtttttggagatttttgaatgatgattttattgttccaaggaaggtcggtgacgaaaagttgatatagttttttgcaccacgtgcaaattcatcatttttcattgctaagtgttcaaaatgtaaatataatatatgcaggcccgaccttgggcataggcgggctaggcctgtgccgtgggcataagcgggctaggcctgtgccctgtgcataagcgggctaggcctgtgcctagggcccacctagtctaagagcccaaaaaaaa

SEQ ID NO: 388035 - DNA, 1701 bp, Cannabis indica
ttggcattgattattgaattttaacaaaatgaattttggtaagaaaaagggtttattttctggtttcttcctcctcttactcgaactcactctctctcaaaccctctttgaatttcaagtttgaattggcgaaaattagcttgagttgaagctttgagattggggatctttgagcttaaaattaaggtagtttttctactgagtttatttgaaattcttactgaaattattgctgagtttattaaggaaaaagcatgttttgggttgtcttgttcttcatttgcatgtaggaggagtgggtgttaaatcttgataggtttgagtgttaatttcttgatcttgtggtggttttattgttgaattatggatgtaattctagggtgcttctaatgcttgaaacttggtctttacttgttaattatgctgctgaatatgaggttgaatatgcttgtgaatttaaggttttgatggtagattcttcatgagttatgctcaagttttgagctcttcttgaatcttatttttagagagttttgttgttagaattgatgtatgaatgtgtattttgactttctagtgtttattagcaaatctaatttttgttttgggagtttgggtgtaattggaatgagtttagttgagtttggaagctgaaattcgtgtaaaagcttgctggattctgggtttggaacccaagtaccgcagcatggtctttagcatgtcgtggcccgcccctcttgatggaacctgaaagtttgtcccaggtgccgcggcatggcttttgcatgccgcggcccgcctcaagtttttgggcagatttgagttccaactttgaatatgcataactttttgatccgaactccattttgggagttctatatatcgttggaaagctcgttctgagctctatctgattatctgtatgtttaaatgccatatatatattttatgagtatggaatcaggggttaaccctatttgtgaaaatccaaaaaaaattgtgactaggattaccggcacttggtcagggtcactcggggatttggaatctctactattgccgaacatcgggtaagacagtagtagcatgtagagttatgcgcagtgacacttatattggaaatgatatatgtgagtaatcagtaacagggattacgattattaccctaacatgagcggtttaatttcctagggttattaccctagtgatatatgttgtatgaatgctatgccatgatatatatatatgagtatgttatgatttagggttatgtgttcaaggtataaccaggtttgactcggtaactagacccaagataaatcgttctaaggccttattgtatttagacatgttagcacaacatgtaggtctaagtcacgtagacataaataggcatgtgagcgtaacatgcaggtctgtgtcacacaggcatatgagaatgacattactatttatatagtatgataaacatctgtcttggtgggcttggctcacgggtgctctactatgcagggaaagggtaaagctgtttctgatcagccatgagtatgggagctggacgacgaacgtacatgttcgagccacactagaccaagcgagggttgggggtctaccagtgatgcattttgtgactctgtttgccccctaggtcggccagtgaaaaaggacttgtaataatgttttgtaaaataatttttggga

SEQ ID NO: 388036 - DNA, 1186 bp, Cannabis indica
ttttttcactcaaattacaaaataaaatatgaataatcaagaaaaagagacataatattatacctccaccatcatcgtcgtccattatatgactagtttctgggcatctctactcctctatcttcaacctttagggatttagcttaggaatgaggatctaatgaggtcgatatggacaaaatcgactggattttaatgcatacacaattttcatcttcaattttgagggatttaggttcgatttcgtgattttggtattgggtgtcgataatggttctgagttatggtttctttctgaaatgaactatgaaattttattttgtttctttttgattctttttgttttaattcaatcagtttaattaattttagcttaatttaaaatttgttttatttatttgttttaggttttattagtttgttttagttattacttttatattttagggggaaaacaaaaataaaaaaaaggattaaatttagggcatccacgtgtcacgttagttacactaacggactgggtatgaacggacaaacaactttgttgactttgggtattttcactgtcaattttcgaggttgggaactaatctggatcaacctcaagtttttggggacttttgctacaaatatcccaagagaatataaatatcatagggtaatttcacggtacatttcttatctgtttcggcatctaagaaagtattttagtgtatttttttatgatcgcctatgcttttgttgtttaggattacttgtaaattttcaaaaaattctgaatagtttatagtgtcaaaagtaaggttcaaacagttacttaccacgcatataaaaaggcattcactcatataacaaaatacataaattttatctttggtatttatttttttaaatttataaatggtcttaaataacaacaacattcacaatatttctaaatactaaaataatattatcacaataactaatattaataggaaaattttggacaaaagtctgtaaaaagttcactttgatgtagactagtccttaacctcgaaaaatagcggaaatagtcctaaaggtcacattttttgtaagtacgttacttttaaatttgacggatgcgttaagttattcataactgccacatgttaaaccattattggtccaaataataattttaataaaaataattaaaaattaa

SEQ ID NO: 388037 - DNA, 1928 bp, Cannabis indica
ggtggggttcttttgggaaaaattctaaaactcactggaaatcttggtcctcactttgcaattctaaattttttgggggattgggttttcgttctttaatccaccataaccaggcttttttggcaaaacaagcttggagaatttttactacacctgaatctcttgcttctaaagttcttaaagctagatattttaaaaactcttcttttttggaagcaaggaaaggtcattctcccttgttctcttggactagtttgctttggggtagggatcttcttaaggatgggcttatttggaaaattggggatggaaactccatccgtacccttcacgatccttggtttccaaatctcaggtttcttaggtacaaggataactaacttcctccctcagacaaagttaattttttcatcagtcctaatggtcaatggaataagaataagttgtctaattattttgatagtgacacagttgctagcattcttcaagttcctattggaggacataataaagctgattgtcttatttggaaaggatatcattctggtctccttactgtcaattctgcttaccatcttgttaatactgcttctctgcccccttcatcctctaacctcagtttctacaatagttggtggaagaagttttggagcttatgtattcctcccaaaattaaaaaatttggttggagaaccttttgccacattcttcctacggcttacaatcttcatacaaaaaaatagttccctctccttcttgctcttcttatagttgtccttagaaactgtaactcattcactactagactgttccagggcgagacaagtttggaaactttctcctttatatcatttttaccttgtgcaaataaagatattagagactttatgttatctggttttattgctctaaataattatgacttttctctactgttgtgtacttttatggtctatttgggaatttagaaagaaaaagcttttcaggaatactcatttggatgttgaggacttagtgcagtggaccaccaactacttgtcccagtacaaggacgcacaagctaaaagaattgatgttgttccagtctgcaacttgcatgccacgacaaaggaaaatcaaacttgagaaggatcttaccaattgtacacagatgctgccattaatatcagaaacagtaagattgggcttggagcggtggttaaggactggaataaataggtaatagctggagtttcattgcctttatcaattcaagctacacccatcatggcagaggctatggccctaagatcggctttaaactggtgctgcaatataagaattccacttgcaaatattgtcactgattccaagtagctggccagcaagattaatagccaaaagaaagagctttttgctcttgctgatgttatagaggacatcaagagttccttgtctcatatccccaatgtttctgtatgctatataccatgagattgtaacactcatgcacattatatggcgaagaaagctttagagctagatgaggaattagtttggaaggatattcatccaaacttaaacattgtaacttgatcatctttgttttatctgtaagttacaatcgtccacaaaaaaataagccagaaaaaatacaaaagaacaaaaaaaaaggaaaaaaaattcacaaaaacaaatccacacaaaataaaaaagaaaaattaaactgccataaaaactcagttctcttgaatgtttagtaaatctattcaatatatcatatgcttttatttgtctcaagaaaataactagctccatcacattaaatatttaaaataatcaaatacaaatagtatatatgagtttcggaggaggtttcaatggttacaattttattgtaaccatcatggttacattttttaaagccattggattactattaaatggtt

SEQ ID NO: 388038 - DNA, 686 bp, Cannabis indica
gtcgttcatcgttccaatccagtcgatagactagcttacgagaatgttcgatctccttactacctcagtacaactgatcatcccaatatagcattggttacccctgttctcacagaccgcaacttccaactatggaaacgtgacttcaagctttccattagagcaagaaacaaaacccccttccttgaaggtacacttccttaacctctgttaatgatccccttcttgattcttagacaagattaatcaaatggtgatgtcatggatattgcagtcggtttctactaaaatcaagagcagtatcatgtacttagacattacatctgtgatgtggaatgtcttaaacaaccggtttaatcaaggaactatacaatagatacttaggaaaaaactatacaataaaactttaatatcaaaaagaaaatctctaatttgtgactttccatcccaccaacacctacaaaataacagaaaaaaattattaatatcaaatatttaataaatatatgaaaattttgcaaaaatagcctaaatgttggagtacgttaaaatttgcaaaccatcgtagtaataattgtcttagggaaatttcaatttttggccttaataatacaagccatatcaaaatttatacccttccttaatttgtacaaatttagtccattaattacatgaacttcccattt

SEQ ID NO: 388039 - DNA, 722 bp, Cannabis indica
ttccatttatcacatcacttattagtccctctaaaactattgtctcttaagcagcaaattaaaacagaaaaagttcaaagttcaaagccttaaaaatgaaattgaatgggaaacttacattgctatttttatatatatattcacacacatatacatatatttatatccttatgtaacaattgccattaaaacattaactcaaaatcaaagaaagaacatcaaaggcagtaatgtcttacatgatttagttgcaccagttgaaacaatctcattcgaaaccaatgcagtcttccaccccttagcaaacacatattcacctaaactaacaaaattaaaacttagaaattctagagccatgaaataaaaaccgatcaagttcttctccaaatcacctcttctttgttttgacaatcaattttaggaattgttaaatccacctgtcatctgaggagtctacgaacctcactgacccagactcgtccaccattgatgcagtgcttcaataatagttcaaaaagtggaaaaaacagaaaaatggatatgggaaagattctgaatcttagaatagttggctttaatggtttatgcctatacacacatacaactcaaacacacatagattgcagatataagttctttttaacttaaatcttataaatattaaaagacaaaactctaaaaatgtagtatattagacaaagaaataatgaattcaaacctta

SEQ ID NO: 388040 - DNA, 1766 bp, Cannabis indica
aaaaaagaaagagaaggaaggtgattgatgactactattactacagtactactactactactactaaccttttgtcaggtttcttgagtgaaagtgtgattgttgtataggtagttttattgggcttttggtctcctttttttattttttatttttaattaatatattttgtaattgcagttagtgtgatttgttggtggtttttgttaatattcttgtaatcagatgcagataagatctttctttcttttttttatgattgtgttaattgatctgtattcttcttatgtttgattatataaattggtacactagagagttatacaccttgtagtttcataatatatatattctttatggtgattcttaatgttaggtaataatatatattcttttctagaaattttaaataaatctaaaatattattttttatttctgtgttgtatttattattacttttttttagaataaataaaatttttgctatttagaacttttttttgttgtaaaatttttttaactatacaaattgttataaatatttccctttaattacaatatatttattttttaaaataatttatttacgtggatttaagttactagtaaagggcatatttaacaaaagttacctgaaatttagtttatgggaattaacatataaatatttactatgagaatgtggattcatattcttataattcgattattagactgttaattatgtttttatttttcatctatttatttattcttttgttgaaatggatgtgtttagattcaaacagtcgttataaaagcatcaatttttataaaattgatttgattttttggaatgtgagttatgaaacaactataataagatcaggtatgacacctgtacatgggctgtactgaggtgagaggtcttccctatcacgaaagccctaaaaaatatccaccaactttgtaaaataaaataaaatccttattttgaataaataaatggaaatttaatttttttttaatgcgggttaaaattttatccctaaactcataataattaatatttgtaggatataataatttttatgatatccctaaaatactttacatttacatcacctcgtttatacaatcagacctcccttaatggactccacatcagacacaatcggacccatcgaatctacgtctactacctcgcgaactcacagttccatcggatcttacccaaattacagatttgagattctaaaacttaaatctgtctcgaaatctaacaaaatctaactttaacactaaaatcacaaacaaaatcaataaaaaataaaatatcgaacacgaactcacctttgacattgtgtttaattcggtggtggtgcgccgtgggtcggtgggagagtgccgtgggtcggtgggaatgttgaagtggtctgataggttcgagtttgtgggtttgtggggtggttcaagtggcttgggttgggatgttcaggtatcgagcgagagaggggagagaacaaaggttagagtaagggtgttcgcggtgcggtttttgaccattttttcaaaccaacccgcacatgcagtttttctaattttccaaaccgcacgtgcaccgcgaaactaaaaaaccgtaaaaaccacactataaaaaatagtgcggtgcggtgcggttttttcaaatacaacaaagcttgagcaacacttgtcaaaaataccataaggcttgagaataaatatgaaaaaaaaaattaagttttaacagtacaataattagtga

SEQ ID NO: 388041 - DNA, 828 bp, Cannabis indica
agagagagagagagagaggactatacaatgaagtggggaagagaggagatggagatattgcaatccgacttctttttccaattgatgtgaacctcacttaaagccaaccgaaatagaaatagccccacaaaaggccaccccatgtggccattagtttgttgtttccatcactttttaagtattttgatcaattcctttttttccccatgtttaagctctattgcagtagcccctttctatctccatcttccgcacaagaaagcctagacccacaatgtgcccattgatgacaaccttcgtgaggagcaaatatttgtagaggaaaatttgaaaagaaacatttagacatttaaaaacacacacacacaggggacttgatggttggtattagataaaggaaagttttggtttttatattatatattgagttgtaacactaagtggcaattttaacacaatattaccttccttaatgagtttttacttttttcctttctataaatacttgagataaattattgttatccattatttcatgcatagatcatcactatccaagtgggccatttggtatggggttgaacttgattagacatgctaattcttttcaagaaaaacttacaaaaatactagaatttgagttaattaatacaaaaatactgtcacacggaaatcttttcaaaaatactgtgtttttataaaacatcaataaaacacaaagcagaacaactcaaaacaacagtagaacagcagtaaaacaccagtagaacactaatgaaaacttaacacagtatactgcagtatgaaacttataaaaaaacacagtaa

SEQ ID NO: 388042 - DNA, 639 bp, Cannabis indica
ctgagacttcctttgttttaaataggacacacgaacaacagaaccgaaacttgagcccatattctccaaaaaaaaaaaaaacaacaacaacaacaacaacaaaacaaaaatcttgagcccaaataggctctcccgataaacagaaactgaaatcataatctccgtagtcatttcactttaataaatagataaaagagaacccacgcaagttaaatatattcaaacacaatcacttggaaacctggtgcgtgactcgtctcactagtttagctttgttcaaaccaatcacttgccaatcttgtttagaggtgactgagtcaaagctaagaaaccatgttgagctaattgagctaactgaaacagcagatactaagactggtatatacacatataaaattgaagttgttgtttggtctttttcatggctacactggtatttgattaattatcaaataacatataatgtggtcggtatgatgatgagctctacaaggtaacaatctttaggcattttttctttgaacacctacaaatcccccaagcttaaaactagggctacccgtttgaaccctgcaatatttggggagcaagaaatgatagcaattgctatgtaggtacacctaggagggacaatcatta

SEQ ID NO: 388043 - DNA, 1157 bp, Cannabis indica
ttttttattttttacaaaatgtgttacttttgtttatttgtttaaaactctcgacaattttctctcaggagaaaaaaaaaatagtaggcttccttctatattttttctttcaattttttttttctctattttcatttttcttacacaattttttttttttttcttccacttttctttcctcccacattttgacacttaatggcttaggttggatgtgatgattatttgagaaaaataacaaataaagaataaggagatgcatggaaaaaagaacgattagggtttcattcaactagaaaatcaaaagagtaaaaaatacaattaataagcaagtcttatatagacaactaattaacataaaagactaaaataataaaaaagacttaaataaccctaattaattatttaacatcctcgctcaaactcataatgttgctgcaatatgtattgtgagtttgcctaaaagaaaatgagaaattgtatgtgacttagtaaaaaagtcaacaagctacgacgaagaaagaacaaaaggtaaaataatagtgaccaacttcagatagtaacgaataaaagaataatcaatctcaatatataaaataacaattaatctcaatatgtttagtacgttcataaaaaattgagttgtgagtgtttataaaaaactgagttgtgagcaatctgaacaacattttgattgtcacagtacataagagtagaacaagagtaaatgacaccatatctgcaagtaaccatctcaaccaaacaatctctttagtagtagacgtcgtggcaggatactctgcttaacaacatattgtttctttctcttctaagaaataagagaatctcccaaaaagatacagaaaacagtaacaaatttttgtgtatgaactgggttccggtcatccccaaaaaataaataatacaactattaagcaagtcttatataagaaactaacatagaaaactaaactgatagacttaaataatcctaattaattatttaataggatgagggaaacattggaattgatgtatgtattgtcttttaattaatttttcatgatgtatttgtactttaaattctggatgaaactcaatgggcctttacttaaaagatatgtgatgtagatttttaaaattattaaaaaaaaaaa

SEQ ID NO: 388044 - DNA, 1277 bp, Cannabis indica
gaccacccacacgacccacgaccaccttgacctcgcgaccacacgacccacacgatccatagagcaccgcgaccacaccacccaacgtcggcaatgtcttcctcaaaggtaattcctaatttttcataaatttttaactgtaataattttacattttttttcatgatatagtgttaaagcaattagattttggattagttctgtgtttttagtggtttttagtggagaatatgcaatttttgaggtttttaggctcaaatttttgttttggtgggaatctgtgatttttttcttagcccgatgcaagtttgatgtaggcccgatatagggcccaatggtaggttaatgtggaagggcttgaaggttcaagaagatagcccgataggtccaatatagggcccgatagcgggtccaaaagtctagataattttatgtttgatttgtggcatgatgggtccaatatgtagcctgatcgatttgatagtttcttgttgattttttttgtttctgcatttggtactatcagactaatataaagcatgattatatgttcaatggtgtccgattagtctcatataacacccaatgtataactcgtttgttattaattttttttattcgattgagggtccgataggtccgatatgaggcataatatagaggctgattgtattttttaaatttatggtttttctggtccaaaaggcccgatatgtggcccgattgtggtccagtaccttatacaaaaattttttacgttcattttttttttggttttttggaagtcttctacagctccacgccttttacttctagtgtcaaaacattacaccggtcatgtcacttggcgaggcggtagttggtattaccccaatatgaaatccaaatttgtagaattacaattgttggaaagggtgaaggaggaatctattgggattttatgctctaaataaaacccattttaatgtaatctgatttgttatcaatagaagactagaaatcatttatgtttacatgtagttttcatgtttatggtttaatgtgtacaaaatctgttaagtccaaaacatatagttattcacaattacagtgatgtcaacacagtggaatgtaattatgattatatgcttcaaaagataatgtccctgattcatcaatgcactggatttacactaatgtgataatcaacgataaagcatacttacaccatggataagtgttatgttctttctagaacattggcaaagtatgctcgtttcagatgtatagagtataca

SEQ ID NO: 388045 - DNA, 1368 bp, Cannabis indica
tattggtataattaagtataagacctcatataatttaaataaataatttttaagaaatatcgctaaccaattgtaaagtactacttataaaaagtaatgaacaccactaatacttaataacaatactcatataaatatatatatatatatatatataaaattataggtcttcaattcgatgagcaatccctaattaatgttgtgtacaggtttagaaaacatcacccacctcaaatggagtgttcatatttggcacaataactatttaggttaagcacatattttaatagggttgtacataaatttttataaaccatccaatctgaacaacccatccaaaccaaattgagataacccaacgaaaatataaatcgaaaaacccgacaaaaacgtaacatacccaatctttatattaggcaaggttgaaaataatattaacccgaccaacccaattaagagaattttatatatatttattatatataatctatatattatataatttatacacatatttaataaaaaaattaaaagttcaaactactacattttttataatagattatttaatctttgaattaaacttttatatttgtctcattatcacattaattaaaataaaacaattgaatgtgaaaataaaaataaacattagtccttgatttggacaggttaacctgatcaaaccgaccaatttattgggcaggttgaattttttttcttaatttggcgggttgccttagatttttgtaacatgatctttacattatgttaaataaaatgtaacgtaaactgaacaaattaaccaacctacacctctatcttttaaccctatacaacttcactacaagagatatcacttttaccagcacaattcgccactgcactggtaaaagtaacttttaccagcgcaagttttaccaacgtacatttagagttgttaggatatttttagtattaaatttagcttaattttagcacatttttcggtttagtttaaattatgtttggagtatttttacgcttttatcttttaattttgcagatttaaaatagatgaagagttggaaaatatcagtagaaaaaggataaaatatcgcataaaaatatcctgggaaaaatatcaaattcggattcgaaaaaaagataaaaacatgtggaatttggagcagagagccacacaggtcgcggcatggttttagcaagccacggcccgcccacatggagaagcacgaaggagtacttcacttggccacacaggccgcgacatgggtttagcatgccgcggcccgcctctttgtcaacagagaaaaatatctggcatgaggtttcccaaaaaatcaaatccgaatggaatttaaacatgtg

SEQ ID NO: 388046 - DNA, 3594 bp, Cannabis indica
taatcttatgcaatatcaatcttcaaataatttccccacaacagtgccaaaaacttgttacaaaaattgtaaatagtcgcaagtgtacgcaataaagtagtaaactcacacaggtgaggtcgaacaacagggaattggattgaataccactagactaaatttatgattctatttggcaaactaataattcttataattaaaagcaaaataaaaatttgagaaacttaaatagacaaataaagattaatcaagatgagaaaatagggtagagaatcctgttgatttttttacccaattgttaatgcctaatcgctatcctttttcttgatgtgaatgacagattatacaatttaacctaactcttttcaaatctttaaggttctaaatcacatgttctctaattaatctcataattagaatcacatgtaatcaacactaagcaataatctaattgtcacataggtcacgcaaatactttcgtttcacataaaacctagattatccaattttagcattcgcaattctcacttttcagattttgaattgagatcatagaacatgtaaaaggtgatcaagcttaaacatggaattaacacaaatagagataatttcacaaatcaagataaaaggaatggcaattgacattgactagagaaaactttaaccaacattcattatcttccccaatttggaatttagtgcatgttcaaatccataaccattcctaaaacaaaatttaacataagagaattaaaaaggaaggaagaaagaaaccgttggtggaatgaatcttggccgccactctgctcctcctgtcgttcttgacttcttttaggtctaaaattttgcttccccttttctctttctcgtagttttcttttatatttttcatcccagctttcaaaagacgaagttagccttaatccgtacggaacctcagtgcagccatggattccctcaccgcggtgagtgccgatttagacgaggcagtggagtagctcgccacggctactgagcccatctcgaaagcacctctctgccaaatattggccgcgactgttaataaatacgccgcggccagaagtgcaccaaatcctgatttttcaatttttgtttgcttaatttgtcctttattgtacttttgaaacctcaaaagtccgcagctatgggaaacctgaaaacatagagaacaagcataattctatcctaaaacattgaaaaacgactccatttgtgacacgatacataggctaaaattagcctaacagtccaggtcgtggtcttggttgcccatccgtttctagtttcggttctagtatcaagtcacggggtacggatcgagtccaagcatcgattctcgaatcccaattcccgaggtgggtcctaggtccaggtttgggtctggggtcgggtcccaaaaaccgatccaagttccgaggcccatgttctggtcccggtttgggggcccaattcctaagtctgggtcctccatctatgtttcggtcctaggtcctagtccaggtccatgttcgtgttccgattcgggttctggtgtcgtgtcccggtctgagtctagatcctggtttgggttcaggtccaagttcgagtccaagtcccagtttgggtagcggttttgggtcccaggtccgagtttggttcttgggtccagagtgcagcccggattattaggtttgggtttgggtccgagtcccagtctgtctccaggtctcggtccgttgttaaggtcccaagtcacagctcccggtctgggtccaagtcccggtatgggttctggtttgagtttaggtttgagtttaggtttaggtttgggtcctgttccagtcccaggtctgggttctcatcctagtcctggtccgattatgattttgggtctcggatcaaggctggatcccgattcgagtctgggtcttggtaggtatttggttctgggtcctagattcaaacacttactacggatcaggtcaaagcctcaggtcaagatttggatctcggtctttgatcacggtcttgttctagtttgggtcgcgggtatcaggttgagtcctaagtttgggtttgggtctgggcttagggttttatcccggtagtcaggtgctgggtttcgtgtccaaggtcgggtcttgtgtctcgagtcaggggttgagtttttggtcttagtgctagttctagggcccaagttttgggtctaagtcccccatctaggtttggatccttggttttggtcttggtccaggctcgggtttggggcccaagtcccccatctaggtcacggtttggttctcaagtcccaggttcgagtcttaggtcccgcgtcatggtacccattcgggtccgagtcctagtctaggttgagggctcagtcctagtttgggtctgggtcccacacctgatctcggtctaggtctgagtcccatgttcaagtttgagtcccgggttcgagtctgagttctagtacaagtccgactgtgggtctgggtttcggtccaggtgtgcgtctgggtcggggtctgggtttcggtctaggtgttggtccgggtcttggtctaggtcttgtctgggtattggttctggtacgggtctgggttttggtccaggtctttggtcacgggtcacgggtcctgggttccaagttctagttcgctggtcttagcataattctaggtccaggtttgggtctggctccggttatcgatccgagtctgggtctgggtccgtgttaagttttttttgtctagaacaattcttattccaatgtcctgatgccagttcttgttccaattttgggtcctgggtcaaagtctgggtttgggtccatgtcttgaaatggttccaggttcaggtattggtatgattcaaagatccaaacaccaactacgggttgggtccaagccccgagtcataggtcaagatctgaatcctaatcttgggtcccggtctcatttcaattcagagcttgggtcccggtccgtgtttgtgtttgggtctgtgtccgtcttcgggtccgagtttgggaaagagactaaggtcgggtcttgggtctcagtgccaatcctgggtcctgattgtcgttctaattgaggtttgggtccccaatctaggtttcggacttgggtcgaggtctgagtctccaaacccggttggagtcttgggttcgggtctggttccaactctgtgtgaatgacatcaaaaagctactgtatttgtgacccgaaacataggctaaaattagcctaacagtctaggtcttagaagcaccaatttcgagtagctatcgtcatcgtaggcgtactcatcgaggtttccctcataatcatcatcaggaattccttcttcttcctcggagccctcaactgctcttgaggctacgtcttcctcattcgggtcttgagcatcttctagagggcgaggttgacgagtgcttcgagtctccaccattgttgtaatgtattgtgtgtttacagaagctttcttcagctctcaatgaaagcaccaaaatgttgaccgaggttttcggcaaccaataaaataataaaagattaaagagctgtaagaaattaagagaaggatttttac

SEQ ID NO: 388047 - DNA, 1531 bp, Cannabis indica
agcatggagagctagagaaaaagctattgtggatgcaagacgctgcccacaagaatcgtactctgcaataacatgaatcttatgcatgatggaacaatgcaacccaggtactacttgactaccctataaacaagttctaaaaacaaaattataaatatctaataaatgaattatatactaaatggtttattgtatcacagggacaatcacagactttgtcatagacgaaaatggccacttcaaatacctatgcttcgcgataggtgcttcaatcaaaggttggcaacactgcaatccaataatagtcacggatggtactttcttaaaaaatcaacatggtagaacattattaatagctagagcacaaaatataaatagacatatattcccactagcatttgtaatagtagactctgaaaatgacacttcatgaaactggttcttcaacaagataaaagaatcatacagtgaaagagaagggcagtgcattatttcaaacagacatgaaagtattgcgaaagcagcaaatacaaacttcccaaacctcatgcatgggatttgttgctaccacttgctaaaaaatattaagaccaagttcagaaaaagtggagatgaactcagaaatgcattcaatgatgcttcaaaagcatacaatatttctgaatatgaaaattacatgagtgatttagacaatattaataactgcataagaaactatctggttagtgaagttggaaacagtaaatggacaaagttagacagccaaaacaagcgatacaaaacaatgacatcaaacattgcagaatctgtaaatgcaagactcaaagaagtaagagaattaccaatagcaactttactagaatgtcttcactctttggttcaaaaattgtattgggacaataagaatagagcattatctacattcacatacttggcacaaatcccagagaaaactctacgtcaagaaagagatatgagcttaaagtacaaggtaacaaattattgttctgccttataaatattattccacaattatttaaaataaatctactggtttattactgcaaataaaaaataatacatacacgcattattgaaaataaacttactagtttataactatatagaagatcatacaatgcttctaaaaaatcaacaaaatagtcatcaaataaatatatatatatatatgcagataatcatttaatatagtaacattttatattttctttataaaccaccttataaacatacatatacatttattaaataaactttattagtctattgatgcatgtccaaaatcatacttagatgcataccaataaacatgctgttatatttttatacatgcaattaaaatgtaactaatatgtctacttgtacaggtggaacatcaaacctagttgtatacaaagtagggctgtacatcggtcggtttagtcggtttatactacatattttctaacccaacgtaaagatcagtttataaaattctggatacaacctacccaattaaaaaaaaaatctt

SEQ ID NO: 388048 - DNA, 1734 bp, Cannabis indica
ccaagtggggcccattacacacaccatggccgaccactttatgtggaattttaaattgatattttcattattttaatgccaaataattcctaacctaaacatagtagttgcctataaataaaaagtgatggcttagtcaaaatcataagttttcataagcttttctgtcagaaaattttctcttcagaaaaactgaaccttcccttagtgatagagtaagtgcccacacacaacaagtggtaactcaatcatagattggaagactgtgaaggatcacacacaaagagaaggacattcgggctcagatcttgataatactctgcgacagaaaggatacaagggttagagatctgagtggaaggagacattaattccgctgcatcaatgtaaggttttcttaactttatatgtgtttattttatcgttttagaaagttcatatttagggtgttaaacaacatacttgtgagtagatctaagatcctggtaaaataatttccaacagtctaatttctgatggtaaaaaggaaagaaacaagctgcttctttgattgaggttttttctaagtttttttttttttttagttttcaccctagttttggttctattgctttcggatgttgttcatgtgttttgatacatgttgtttcttagtcttttttaggtttggtttattgttgcaatcgttatatgttcatttgtattatgcattagttagttttagggtttcttttagttttctaacttcagaatcagtttttgcttgttaagtgtttatggataacatctttgaattactgtgttatgtataacatcttttttacaactatcaatcaatggttggacaacttttgaagattcaacaaaatagtcagtgtaataaaaaaagttgtggaactccattaatgtgtcaaatatgatgttaataatgctttatgtttttgttaatattttcgatatgacatacaaccttaaaacaactattatgtaactaatgagttgctcattgcaaagaaagagatgtcggttattgttgtgttgctgaccatgttcacacacaatggatacctcgtgaagttatgttatttcaattttagttgtatgtagaagaataggcttggataatcatttatccttagcggttagtaacctcatttcacttggtattttagttaccgttgagtgttttcttggttgcattctagctcttgcttcaacttgtgcacaagttcttcatatttgaaatcccttgcgaagaattcgccaccagctacgtaatttacataattcattccttaatcaaacttcctgttatcctaattttttcccacatgacgtggcatgtccacataggcaagattgataccacgtagagtacaacctatcagtaagaggaccaagtcaccatgcacaacgtactagttgatgaagaatccaaatactcaagcataacaaagggacaataaaatggccaaccaagagggtctggcttagggatgtaaacggggcggggcgggtgcggggattgctccccctccccatacccgcttcttaaattcacccccatacccgccccaatacccgtttaaataaaagcgtgggcagggtgggtattacccgacgggggaaggattcccatcgggtacccattacatatatatttttgaaaaaaaataatatcttaaagagaattaaaaaaataatcataaaacttagtaaaacaataaacttaag

SEQ ID NO: 388049 - DNA, 879 bp, Cannabis indica
cgtaccccatcacccatgctgcgttggatctaggccagccatatatagctgacactattaattgtgaagggttggttatcacatatcagaaagctgatcagaagaaaagaaaaaaggggactttaagttaataggagaagaagaagaagatgaggaaagcttaaaaaaacacacaacatctgttctcatccatcactttcacaccttatatatatatgtgatcagttcaacgcccaataaggagaatgcatggatagttattaaccacgttgtccgtacgttttctctttgcgacaatcacacagtctactctctttacatttctctgctttcattatattaattaagcccactaattctagactgattatgatccatgcatcatacaatatattatatatgttagtaatataaaaatttaattatactcaaactcaataatattattcataaatttctttctagaattaaatatatttcaaaaaataactttagaattccaattcaaatccaattataccgagtatcaaatattaaatatctaattgtaatcaaattagattggataatttttttgaatattcaattggatatataaatcggttgccggatattggggtgcttaaaaatctatattaattagttgtttggataagtaattaattttacgtttttttatatatatgtatttaattatgaaaattatgattaaattttactactttttttattggatccattaaatctaaaatataatagataattcaatctaattcaattcaaaaaataataactcgactataacattgaaagaaattaaattaattaaggtggcgtttggtaacactttttaatcagttttctgtttttaaaagtaga

SEQ ID NO: 388050 - DNA, 1661 bp, Cannabis indica
cctcctcctccacactctcctccaccttactactataggtctccaccaccaccatcaggctactaatcaaaccattacgagagaatatcgaactactccaagtactactacaataagaggatgcacaagtactcatactcaatacattcaaattacatcaattgatttgtaatataattctttttttttttaataatcaattaattgaattaatgtgccagattcatgacgtctaatatataaacgacataatattatgtaataaattataatattactttatcaataaactcaattttacacaagaaattaggattcttccatctctatctttgtattttttaattagttatacggactatattttacattgaatgcaaattcttttacataccatttttaaacaattaatttcataattgcataagaagaatcaaatacatgtaacttatatatatacactactttcactacaagaaaaaaaatatgctatttacacgattaaattagtgccaaaaaatttaatttttagtgtccatcaatatgttggcacgacttgtcgcactcttttagtcatgccaaaagacaaatagtgcattttagtaattctctatgtcatattataatttgaagaaaattacactattgatgtctagcatctttctcgatatcatactactattagtataattaattatcaaatcgtatatagcttaagaaaataatttttaaagaatatcgctaattaatcagacgtcacctatagaaagtattagagactactagtattcaatagccatgctctaatttatattacattaattaagtttgtaattaattaagtctctacatggtccaagaagaagacttaatcctacttttttttaccaacagccggccgttaaaattaataagagggcaaatgaaaattaattgaattaataataaattaaatacacaaaataatttgttgcatattgtttagtaaactatttagtgagataaaactaagaaaatgtgatttgttctaataaatggaaaatggttcatacaagagatatatagccttacaagtggaggacatgtgtcttaaggaaaaggtctacaaatagctaatctaataataacaaagcacaatactaattagagcattcatattttttttgttatgatcgtagttatttaagattatatatttttttaaataatttataatattgaaaataaaatttaaacaattatttaccacatatttaagaaaaattatcaagcgtccaacataatatataaatcttaattttaacattatacactattcgaaattttttaaaaatttacacagaccttgttgggcctcgctcttctaccttgtcgggctgctacatcaccttgactcctgttagtatgatattgttcgctttgggcctaagccctcgtggttttatttttgggcaccttcccaaaagacctcatactaatggagaaggtggaacacttatatccaagataactcttgtctattcttccaatgtgagatttgagttaataccccaacaatctttccctcaaactaagaaccacatacttgtggcctccctttcagcgaaactaccttatgtcgtcgttatcaccaagggaactcgccgcctgaccatcacctt

SEQ ID NO: 388051 - DNA, 765 bp, Cannabis indica
aaatggtctcagtctcctctccacacacaggtcagtaggcattgttaattttcaaaaaagtggcaagcttacctctagttgggaaggcatccctctccaactgccaccagatgagtttcaaccgacgatgaaacgaagatttccatatgttttccatctattcttagcaggagtgatagatcttctccccctcacaactcggtatgtcaatttgatggaaaattccccactagcctcacccatccaaagccatccatccttgatatcatcttcagggagttcaatattgaggatagcttttgcatctttagaattgaaccatcttctgaacatattccacattccgacgataattgtcatccataaaccaattcacccaagccactcccatactgttgccaatccaaaaagaagagtaggaaacctatttgagcaaggtatccacgggtagaaccatactagaagtttctttgccattaccaatctttctgcaaatacagttagctagaagagaacgagtatttaggatagctttccataatcccgagtccccgttattcatctcgacgtccaagtatttggcctgtgtaactttttcctaaatacttgattgatcggtgagggccttccaatcccatttaagggtaaaagtgttaggttttatgccttaaataaaactccatttcaatgtaatctattttattcaacatcaataaagaaacagaagtattttcattcatttgtgtatgttttggttcactttat

SEQ ID NO: 388052 - DNA, 1309 bp, Cannabis indica
accctctttctctgtccatctcattctatgtttagatctctcttttgtttcgcaggtttcctcgacggtgcacatgtttaaatgtgttatgtattaagccattgattggttctactaattcaacctgtccacttcttgaagtagaagagtcactgttatccattactttgtgccaattgaaaaacccagaactttgcatcaaaagagttgattgtataatcagtttgggaaatttgacattaggtgactagtaatggggttcaagaatcatggcatggaaagtgttttattgtgtcttggggttactaaagagtgatggtcaatcataattgtgaatgaatgaattctgtattttattcaatagaatagattcatatacaaaattagagacagtaaataggaaactaactaaatacaattaatatagctaatatgttctaacagtaattaatccctatgttgcactatattgatataatttgcatgattttctgtttttttttgtttccataagaagggatttcctgcagtagtaaacaagtactagcttatcgagtttgaagtttgaatatatgctctgagagggttgtttattttctaatttttgtatattgtttgaagcagaagaagatggcagcaaagcaaatggaagagatacaaagaaagctagggttgttaaactatcctagagccaatgctcctgctcagtcccttctttttgctggcatggagcgctatgctctcttggaatggcttttctttcggtaattacagctgttgccattaccactgccactgttttcacatcccctactccatgtttgatttagctttgtattcttcagcttattgggagacaaatcccccttctcccaacaaactcacattggagatactatggatcgtgatgaagagacagctcacattcaatgtaggtcactcattcaccaactttatcattctaatgtcattaatttttattctagcagaccctatattttaatcattttgcagatttggctgagattgccaagtttcttggtattacaacaactatagatacagaagccattcaggtcagttatggtatgctattcaagacattggtcttaaactacatcatgacttttgttatttcaaaagtggttgaatcatttagtaactaatgcttggtgtggctgaactcacagggacggggaagctatgaagatcgcactgaaatgcttcgtcttcttgttgatcttgttgaggcaagcatttatgctgataacccggaatggaggttgtgattattttaattcttaaaatt

SEQ ID NO: 388053 - DNA, 1396 bp, Cannabis indica
aaaatcatgagctatgtcgatatcgttgatgaaatttctttgaaccattgaggctccgatccaaccagtagaggtgttccacgatacatagttagacctagaagcgcctccttagatagaaacagatcaggggaaatctaaaaatttgtgaaaatgactatctgagtttgacaaagaatttgtggagcaattttaaggccaaccagatttgtaccccttccaccaaacttaatttcattgaacccatgaaaattggagatcaattgattgctcgaattgatatggaagaggtggttgttgaggcttcctactggtaaaattctattgtatgttgggggcaaacccaccatttcatgtctttaagggttttatcaagaggatttaggaaaatttaggtatcgaccgaattgttagaatgcacccgggattcactctagttagctttcatgatgaagctactcgtgatattattttattgactggtgtgattcaatttgataagaaaccagtggtgattaggacatggtccactgatcttgatattattagaatggtaataaaatcagtaccaatttgggtgagactgaatgaagtagggctgtaatattggggggaaaatactcttaatgctcttgttagtactatatgcaagcccatcatgatagataaggttactagagataagaatatgattgaatttgcgagaatcttggtagatgttgagatatttgataatcttccaacttctataagtttcttaaatgaaagaaaatagttagtggtgcaatctattgagtatgagtggctgccgacgaaatgtgcgacttgtggtgtgcttggtcacaatgtgagcaattgtgccaaagagaagggtatagtttgggtaaaaaaattgaaaagctgaataaggggaaaaattcaaaagctcatcaataaaaagatgatcaggtggtgattcctaaggttcaaggggagaagtctgatatagcgttcaattgaagcaacatcaatacatcagcctgatatatatttattctcaatagaagggttgggggaatgattactccaaggaaaacaggggtaaagaaaaagtctaataatgaagtgacaacctcgagtaataatactaatgaagtcttacatgctcaagagactttgaatgggaatggtcccctaatttttcagcaatcattggtaattgagtggtgcaacattctgagttggaacattaagattttgaataagaacaataagcaaaggtctattttagatttttctatttgaataaaattagctttggaggcttgttggagactccgttttgggagttctatatatcgttgaaaagctcgttctaagctctatgtgattaactatattttgaatgccaatttta

SEQ ID NO: 388054 - DNA, 1056 bp, Cannabis indica
agggatagtgatgatatcaaagttctggggtatggggtgaactatatcgatgctgaagtcactgagaaggatgggaattgttggcgacttacagggctatacggtgagccaaaccgaagtcttcgtcggaatacctgggatcaaattcgcactcttatggctttgtatgcactaccttggtgtattattggggacctcaataatgttatctcacaatcagacaagaggggaggtaatccttatccaacttggttgattgatggttttggtaatatgttggaagactgtaatttggttgatatggatttgtgtggatatccatatacttgggagaagggtcggggtacacaagcttggattcaagtgcgtattgaccgggctttagtctctccaagttggtttcatgtttttccttcagctaagttaattaacttagaggtttcaacatcggaccactgtccaattcaattacttcttgatgttgtgaagaggactgaggttcaaaagaaatttagattcgaaaatctatggctcagggagcctgcttgtgcgcaaatcgtcaaagacacctgggagcttctttcgggttgttcaataatcgaaaagattagcttctgtggtgacaagttaatggtgtggggaaaggactatgtaggaaatttcaaggatcgtatacgagattgcaaaactgagattcgaaaatggaatggaggcagagatgatgcttcgattcgaaattacaaaagtgttgaggcacggttgcaagaggttctgattcaaaaagagattttttggcgccagagatcgaaaaaattgtggctaaaggagggagatcagaattccaagtattttcatgctatggccacttcaagaagaaggaataactcaatccagcggctgaaaaacgagcagggggtatgtaaagaccgcttagtttaatttggaaattagcagttaatcatgtttaattatgaaaattatttatagctatttaaataattatttatactgttatcattgaattctgagatgcattttatgtcatttagtagtttt

SEQ ID NO: 388055 - DNA, 1450 bp, Cannabis indica
ctcaagttctttgatcttcttttggttggctagatgctgcttttctgcctcctcctttatgtgagaaaccttggccactgagtcactctactttttggctaaggtatccctatgctccttgatatggcaaaccttagtctcgagcatttcaactcactgagatgactgatgatgggtaacataggagaggaaagaagcttgcgaggtgaaggcaactcgagttagtaaaaatgataaaatgagaaaaaatgagaacaagaagaaaaggaaattaacctgatgcagaagtttgtaactccttttggctagattcttagaactgcctcgcatgagaagatcccaatcgtcggacccaagagtcaagatgttattccaatcgttggtagcatgctccgagccttcagtgccaacctcggggggtaggggacatgagggctcaaggagaaccatctctagatgaaaattagagagtttcacctggtgcactgacccattcagttgctcgatgacattccctgcagcagagacctcattctctttctttgcagacttcgctggctcgatggtaagctggtttgaggacttcttcttgttggtagtagttttggtccttttgggttctttggtagaacccgaggcctcaccagcttgggcaactctcttcttagacttctaatcggctgggggaggacttttgaacatgttttccaaatccaaatccatatctgcgaggcaagaaaagttcattagcacttgaacaaaataaataagtgaaaatgggaaaaactcccacttgagaaggttaccataatcttcagaagatgacgtgggaggactataatattcactaaactccctagatcctgtgatcataaatatatcataagggtttagtggatctaaattttagcttgaatctatgtggcctgacctatccaacatggtcccgtactgctcgataattccatagtaagaactagtgcagctagcctgaacgtgaaactttgggtaccaactatcaaacctatgagttatgcgatctatgaggaggggattccaagtgtaaaatttatatcgattatctcagaaagatactaaggtgttacattcgggcctaagcactgtgggtgaccacccacatcgattagctcggggtgttccttcttcctgagggacagtcctctcgagatattgtgcacgagccacgaagtctttagtttcctctttggtaggaaccaggaccttttaaaaatacttgggtattttgtaatcgcaagtgaattcttctgaggcaagtaggcccatgttctttagactcttctcatttaataagaagtttgctgcttgcagccgatatggaagacttagcagaattctgtggcactcgactatctcaggagtaggaactggtctccgaagtgttggacattattttactaggatcttagat

SEQ ID NO: 388056 - DNA, 813 bp, Cannabis indica
ttgaaaaacttacaatattaagtataatttaaattatattatatataaattatttataatcttatgtaaatatactcaattaattgtaaaatatttctctcagcagtgtttacaattaatcaagatgtggttgaactagaatctacaagttatcttgaggtggattgaaagatcaaagaaaagcctactcaagaaaaatatatttttagctgctattgctagtttggtgtacctgatttaatttgagaagctagaaatgaaactttgtggaataattcaaaggcagacccgactactatagagaaacaattgaagacaatgattaaaactagaatatattgtgttttgccaaaaagaacaacccaagtaaataatgaatggtttaatcaattgtaattatttgtagctaatacaaagcaaatgatgtaaagtttttcaggcctctttgaggcgctagtagattgtataaatcgttttgtgagcaatacaactttctgattcataaaaaattaaaagtgaaaattatacccatacttcctatcgttagaatttttagaagtgtagtggagtgttggaaaaacttattgtaattaataataatatttttctcctttgtatgttaaaaatgagatacttatcaaacacaacaataaacaatattaaatatcaacatctaaagcaccacaagtaatagaaaatacacaaatcaagcataaaagtgagacagtaagacttttacgtggaaacctaatacggaaaaaaatcacggaactgtagtccactcaaatcatcactatcaccaaagttcaataa

SEQ ID NO: 388057 - DNA, 558 bp, Cannabis indica
cccatatctatgagacaattaagttacaataaaattatatatacataaaattacgtattttaacaattaacaacatacctgattttccttcaactttaattcctcgtttgtctcagattgtggatctgaaaatatttaaatcaatacaaatgaataatgtttttgaagattgtaagagatgcagaagatttcatcataaataagataaaatcagacaggaaaatcagaaaacttacattgataaatagagcgtgaaatggcagggaggatgatggttaaaggtcgtggctgaaatcgcagtgaagccctaacaacagagaagattgaagagagaagagcattaggtaagacgacgaagtgtgtctgacttgtttgttggtttggctgagtgagaagaaaagacttcaaaggagggatttcgccatgggcttgggtttgggcttgggcttgagcttgggccgggcttctacatatcacttaaataaagggaaatttagacagtatactaacttttgccattttttgtaaaaatactctcagccggtatttttacttttt

SEQ ID NO: 388058 - DNA, 1897 bp, Cannabis indica
atagtcagaaatatacattagtgatataagttctcaattacggagattttattgaattctaagtgtgccatacgcgttatatatagaatttgacattttcatattttatgcacgataacagtggaaattcaatattttggccagaaacattgtcacagctttgatacagtttaatattttagatttaacggggcaagatttattgacatctagaatatcggggttatgcaaggtatttggttatgactattttacccctagctatggagattgtgttattggtacagtaaggacattatggtaattttctaaataaattttaattgattgattgattgtagtggattactattgatttatgtggaatattagagatatacttagattctaaagctagaaaacattagattattcaagagaaataacaaaacatcattctctctccaaacccttttactttcggccctagctcacccaaggacaaaccaattgttcagacaaaattcaagttgtttcagcaagggttatcagttagaactttaattcaaggtatgcgtgagcctcttcttcttctttcaatttctaaaggaagtatcttgtttttttgtgaatttggaaaatagggttttgtagcttgtgcatggattttaaaattatttttctgattatttttaaatcagattatggttgaattaaggctgttgtagcttttgtagctattggaaccaagttttgagtttagaaactcaaaccttagtctccaatggtggattttatttcaggaggttttcaatgtgtttaagtgttggaatatgtttagaacatgattataggattctgaaaattttgagtaagtttggggtagaaatgaataaaaaaaagattgagtttttgagctctacatagaaatggtacaccgtttatagagaaacggttcattgtttcttctaccagggcttgggtaaacgggttaccgtttagggatctggttacccatttggggtgatttttgggtatcccaattttcatgttttttcaatatttatggtattgccacattatttatcgattgagaaacttcaaaatatgaattttaagtctttgaaagtgtcttagtgagacacttaccaattgttcattaattgacttaggatctttgattatctagcggcttttccactcaggttgactgacacacctgattatatattgaggtaagattagtataacaaatgcactgtttagcgtacatgttttatgtttgtcaattagataacatatcagtatgagcaaaatttgtgtacatagagttgcaccaggatatcgacaaatatatgttttgcaattttttaagaattacaaactaatgctaccaacactagtacgcctagagtactgagggcatatggtattatgattagttgtgctttcaaggagtacactagtgctaccaacactagtacgcttagagtactgagtgcatgtggtattatggctagttgtacttagagtattgattgatgctatcacattagtactgctagagtattgagtataggttgatattatagtcaatcgtactatagttaagaacattcaagacttaattatacgcattggacgtgggttaacatattataaaattaatatatgaataatataaaatagataagaaaaaacgaagaagaagatgaagagagaaagagaaactaaatgagaatttcttaatagtttatttcaatcgggtgaaccctatttatacaaaaatatgactagaataatagaaaaataaattaatgaaataaagaaaaaatacaataatatttatggtataattaagggtaaataccattttggaccctgtgtttacaaaagttaccaattggaccctgtgttt

SEQ ID NO: 388059 - DNA, 702 bp, Cannabis indica
taattcttaagttgcctttaatgttgttgttcattcacaacgcttttgctaacattattgtctttattttgcagtactccctcttttctagtccaagaacctgaatctactattccttagatgacaagtctaattaaagttttatattttcgtaactcagtatacgaatcgtatctgcctcataattctgaacattgaattaccaattgtaaattccaggtaaggcagagggtatggctagctgataagctacctaatctccccgtttccagaaacccaaacataccaataaatctgagacttaactttcctttcttcccaacatggaatttaatatccctatacgctagatcagcataactctttcattcaatctataaagcaaacatacgaactcgaatctttcctatggcctcaatcattcttagatcgcatcagatccaaggttccttcgttcactgacattactccaacgaatgggtaaatgattgataactctaagatttagagttattttcatatctttaagcttgaatttaatgtgaattgtggagcaattaatgtctatattgtgtaattgtgtttagtttgttgtgtctttgtaataaatggaagtgtgtgtgttagtaagtgttagatggacttatgttgttgtttttatgtgttttaagcagaaaaaaaatacaagaataggtatttgga

SEQ ID NO: 388060 - DNA, 529 bp, Cannabis indica
aataatattattttgtattcaaaaagtctcgataataccatttaaattgtaagcaataaaattaaaaaattatatctcaaaaaaaaaaaaaaaaaccagtgaataaattttttacaaaaaataacataattatcgatttttcttctttcaaatcaaaacaataactatatctttccctatataattattaaatctttttctaaagacaacaaaaacaaaagctgacttcaaaagcttatccactagggtataaaatgtaattatttaaaaaaactcaaggccaaaaatgggtataataaaatccttaaatattaagcacatggttacaaatatttcttattataaataagcaaaataattaataatataataaaagtaatacgtcgacggaataccacatattaaaatataaataaaattatattggggacaaaaaaaataaaaaagtaaaagactcaaaaacaatatcaaatctaatagagcaatttgcggcgaaacccccttatgttttgatttttatacacttaac

SEQ ID NO: 388061 - DNA, 748 bp, Cannabis indica
acatatatactattttgtgtaaaaatatacgtaaatatacaaaagtattacttaaattaaaattgaaactttgaatgattttgttgtaagttttcagtgaaaaacatgaataaaaaagcattatgcagtcacttgtctcaaacaaataattacactgtaaaaagctcctaatccaaagcataatctataattaagaaatttatgataaaattatgaactagaagagtatttatttatttagtcttccttttgtcctgatctagattcactactttcagtttcagggacaaaactgctagtgctagattgattcacttcgtctcgagtgctgaccctgggaggttcttcatctcctctgatgctttgtattacgaaaatagttgcaaccacgaaaaatactaggtacacagcattgctgccgctgaatagtgaatttatgaagccaagcattgatggaccgctcattcttgtctctattgttctcccttccctgtaaccctccagaaatcgcgatacttgcgatgcctggtcttcttcgtcaatgctttctgagccattaacctgtaatccaatcagaataaatggaaaccaataaaataacattaaaagatagcagcaaactagaaatcacaacttcaatcacctgtattaggattgaagttggcatatcttaatcttcaagtagcatcttcaaaatctttctcaacatatctaaaaccaggtataacataaaataattcccagctct

SEQ ID NO: 388062 - DNA, 1904 bp, Cannabis indica
cctaccataagtaaaaaagtttcttgtgcaggcatcattgtagtgaccagtactgcaacactttaaagagaactgtggacaaaaaaaatgagcatgaaaaagaaaaatgcgacctcatcttagcaattaaattcaattcacatatagctcaaacaagaaaagataacatgcttacaagcacatgcgcataaaattagatgcgttatgcatttacttaaaacttcggcaaggtcaagctcacctaccttaagagttgtatttaagttattccttgcattgctaaggagctttatctggtcatgattgtctattaaattctgacattcttgacacagactgatacaaataaattaattaagtcaaaaatatataacaattgaatggtgctaaacataaaccctcagacatgtttaattgaacacatacttattaataaaaacaaaattttcacgaagctgatttattgtcttcacagataaagctaatgattcaagcccagctgcttgctcaacctgttgtcgaaaaaggattatgttactaaatttatgggcttgccattattcaattaccaaagttctcaactcaaattataagagatcatataatctgaatcaaatatttaattggagttcttttaagcttcgagtttaagtttgaatactcacctactcagcaaccattgtactaagttgagcatcatttgcctgacaataagcacaatcaataacaattttttctttattagaatatgcataaaattgatcatttaaactatattccacatatgcaatgactcatgaatattgatcaaaattccccaaaaaaaaaatccccataaaatcaaaaattcaaaatagtttataaccaatgtacaatgtaaatagcttgaatgtcataacagtaacatgagtcttaacatattctcatcaagtatatataaacatatatacactataattcactcgcaattcttgtacaaacaaacacacctaaattcattacctattaagttccaaacaaacaaaataattattctcttgcgatcaaaaccacgagcaattacattgatcagtcaacaacaacggaagccacataatacccgaattatcctccagactcaaaaattctaatagtatcggagaagatagactgatctaaagtgagaatgaactcctttttgattctttcgattcagtctcctcaactgaaatcacattcaacgatgaaacaaagagaatgcaaatgagaaaggaaatacaaaccctagacgccattgtcgatcgaagctctctctctactctgttgattttgtttctctctctagcttctgagaaaagcttctctcactaagtggggttttaaaggagactcgggcagagaataagatgagtcgatttcaaaatgccacagtttttggattctttcgattagaaagtagcgattaagaatgagattgagactgagagcgcgagagggaagaccatcagaccggagtgtggtgaagagattgggcagaggccaatggtgatgcaatttctcatttgagtgttaaaaaattaaaaattgaaaatccattctaaatgagaaattcatttatcaatttcaatttctatttcaggagatggagaaaaagagcaattttaggaggcgatttcaaagagaaggttaacgtcctggataaaatattgtgtgcggccgatcaatttacagaactgattgagctattcttcaggaggtttcaattgagacgctcacgttacccttccgtttacgttccgtctattttcaaaatataaaaaaaatcgttaaaccaagaatcgttaaaccaagaattgtcgttagatagacacttttaatatataaagagatatgtattagtaatctatattttttttattattatt

SEQ ID NO: 388063 - DNA, 651 bp, Cannabis indica
tttttttcacaaataagcataagagtagaaaaataacaaagcaaatcactaaaaccaaagagaatctaattgtacatggtgaattggaggaatgggtttgtggtagcgcagagatgtaggagattgcatcgaactcgaaattgacatgatgttaggttggaacaggctgaaaccttaattttttaaattagggattttttttttaataagggaggaagatgggtcaaacgattattgcaaaaaaaaaaaaaataattagatgtcactttaaaaagaaataattaattaatcaaaaattattttagaacgggtcgaagtttagtttttgtaaaaaaaaaatagaatttcattataaatatcatagttaaatgatttaactgttgaaaaaatataatagggactttgttgacctggaaactttctcccgtgacgtgaacatcaatgattgacacgtggcaagaaatatgacatctcaaaattgagtagtactgagtcatagcggtcgatcgacctgtgttaggttatttttagtattaattttagattaagtttagtatatttttaattgagttttaatcgtgtttgaagtatttttacgcttgttatcttttatttttgcagatttaaaataaaagaagattagaaaaatat

SEQ ID NO: 388064 - DNA, 1155 bp, Cannabis indica
ggctaaacaattgaaaaagttgtaattcatttattgagggatggagatcaccaacatagagtgagctccttaccatctgacccaccccatttgcaagctgcagaacatgcgccatctttttcacttttttgtttattgtattatagtataggtacgtacgtagaagaaaaatgagaagaagagaattaaggaaataggtgatattattatattgaaagtaactgcactaaatttatataatacgtatgagtgtttatatactatagtgttatatctaatccacatataaatagtactcctattggaaaaaagatatatacataatacataatcctatattgttaaggacaatatcagattttgaaaacattcgtctattttattttttttttgttttcttaatataactactcatttaatgattttaattaattagtaaaaaaaaaaataagtgggtgacaatataatatattatagtaattaaatggtgtaatggtaggcatttagagttatgttgggagcgcgtccatggcgtgttcgtaggccgccggtagacggaaagtacgatggtagggatttgtgcagctaagttgaaaacgtaattatgaggtaatattgttttccctttacccaatatatctgctatttattttagtacatgatcttctttcttcatcttctcttgaattgctttcaaaattactaattaaattaatatataatataaaacatacatttgttcctctgcaaaagtttttttaatctgatcaattttatctttgttgtttagcttttagcatacacgtgtgcttcaatgaggcctatttggcaaaagtagagttttaaagatataatacgatcattttctagaaataaataattgaaaattaaaatataataagtaattaaaaatcaaaaaataaaaacaaggaatgatatttatttagactctaaagtgacagattatttattgacgggatattggcagctaaagtatctgaactttacgatttgtcgttttgctctgcagtctaaaaatcatagttaagtgccatggtggactgtccacgtgtacacacttgtacacgtagcaagtttttagtagtacacgtaatattaattttaaaaaataataataaaaattaaaaaaattaa

SEQ ID NO: 388065 - DNA, 2341 bp, Cannabis indica
actgggggtgcttgcttcctaaagctctcatatgaaggctctatacggttactagcaataggttgtctgctggcaccgcaggaatcgcaacagcaggaggctgcaaaggaggcccaataggagcatcccgttgtctaagccttcgaatctcatcttcttgttgagtaattttggcttgcatctcagtaaacctctgctcccaatcaattggagcctgaggtggattctattgaccacccctaggagcacgaccgtagcctctaccgcgtccacaggagttttggggatttctaccaccccgaccacctccagtctcaactatttcgccccgtcctctaacgtttcgttgggcgtccattacttaggacttagcctgcgaacccatgaggcatgcaggttagacagtggtcaaaatattttcaagaccacatttagagttaaataacaattaatcatatgcaatatatatcttaaaaagtttgcaaaaagtaaagcttatgaaactgtgaattgagctcaacactggccttgattgtacatattttgacggtcttcagtgaacaacctggtggctctgatacaaaactgtaacacgcgtatttaaaacttgctaaactcaaatatgaaatcttaaatatattatagatattaaaactttatagtcaggatcccaagctttacaaaacgtagttgaaaatttacactttactgtatataaagtagtaaactttccttagtatatattttttaacaacaggtaactcaaaatattgaaagattgaaaccctccaggttacactgtcgcgatatgtacaatcactgttgagcgtcaattcactattcctctagcttagccttccctttacctacacaaggtagcaaactgaatggttaagaacgttcttaatggaagtacgaccattgtaccatatgcactaaagtaccaattctatactcgttttggtagggtcttcactatactcccaggagttactaagtgttgtaccacatgcatgacgtacctcccctggtactcttgttggtaacactgtaactattctattatcttacactatactaacactcttaaaccacatttccattagcgttagtagtgtaagcaattaacacaagcatacaatcggctatacatattatttatgctatcttacctcgttccagattcaagcgttccggtcgacttgaattgaaaatccttgagctagacggaggtcctaagtcacataatacaattagataaattacttgaacaactaatacaaaaaactaactcaaaacctagagtaatcttaatgacacattcaacgtactatcaccctaaatactaaggaaaaccaaaccatgctcgaaaaataacacagattcacaaaagttgagatttcagggtcctggcatgtaaaccggtgaaccggttttacataccctgtaaaacaggtggaccggttggcaccaatgaaccccaaaaatcgcacagctcgtccaaatcttccccaaacgcaaccataccttccaaaacacctgaaaatacattctaagacaattctcaaacaataatagcaagaaaaacacaacagaatccaacatgccattgctgagtcaagtttgagctccatgaactcaagcttgaccaacctcacaaattaccaccaaaaataattccaacaattttaaaacatcatttaagacctactgaagctaaccctaaacgaaaattatcaacacgtaatcaaattcatcaaaatcatccctaaacctaacaaaaccttccaaaaacatcataaactcacaatagaacaagcttagggtttttacctcagatcaagccctcaaattccacctaatagtctctgaaattgaaagaaaatcccccttggctgacgattcttgctgtccgaacaaagaagaaggagaacaatgaaggggtttttcctcttctattccttattactcaaattaactaataaaaggttatttaattaacctttacctaattaattggaagttgtcaagatatggtgaagacaaccaattaaaataaaggtaattttctaaattacccccatcactaaacctagttcaaaaatcggcttaggagtaaaatggtccacaaccacaaccccaccaacaccaaccatttgaacttacatgacatattttctaacattaccaaattctatatttcctcaagtgactaaaatatcctccgttgcattttctatcgtcgctgagctaaaatcacagagatggcatattttacatttaacttaatcatttacataaaatttcaatattaatgataataataataaaattagcactt

SEQ ID NO: 388066 - DNA, 786 bp, Cannabis indica
tttagtttaggcatgttttgacaaatttagataaactcttcgatttttttttttaaatgttctttgattttgttatatactcgtaaaattacgtctaggtaaatatttacatattatctatgacattttattctattttctatttaactatgaaaaaaagcacatcttgaggagcacttgatgagtaaacttctagggacaggcaaaagtaggggctcgccaacttgcaatgaactgcttggtcttgagttgtttgggcactccaacccttcgttgtgtgttgttgaactgcttcctgaactccgacacccttgcttccgaagtcgagtaccaacaattatcaacttaaattgccataattcttgtattctaatgtaataataaatatcaatattaataatagagtttttcaacacaagatacaataataataataataataataataataataataataataataataataataataataatttacattaatcatgtaacagccaaaaaaatttatattatgctaattaactattttttattatataactaatttttcaattaatttttaaatgaccattgtaatattaattatttaatatatataactttttaattatattaattatatacattgaaatttaatagtaatttttttaaaaaaaagtattattttaatgatttaacataatatatataaattaatttaaaatcactatgtaccattaaacatttttttattctatttttacaattgaacaaattatatataatacatgtattaaa

SEQ ID NO: 388067 - DNA, 1755 bp, Cannabis indica
tataataatatatgttatagttaaattatttctaattttttcaaaaaataaatagtttatagtataaaaaaataaattttaaatagttacttaccataaaaaataattgtacgtgtaataaaatacataaatcttattttttagtattgtaaactacttaaaaaattttaaaatttacataatcctatatatataactataacatatactatcaacgaaaaaaataaattaaaaaactttcacaaatgtcgaaagtaatctgccaaaattactagtggtgtcaattatttaaaggttcactataagtttatccaataaatttcttttatgaataataatacatgaatgaatattactagtggtgtcactattctatgattgattaacgatacattttaaaaattatctatggattgttctttcgttaaagcttgtcggaatagatctatggttagtatttctaattggtcagatgttagttttggctgttggtttcaatctctttcggtagggatcaaccttcaagcgttggaggaagcagccatggtcgcttggggtatttggaaggcccgtaacaaggttgtatggcaacaaaaatctcttactgttgaatcagttgttctgtcagcacgatcactctttgatcaatttctttttgcacaatcacagacgatgacttcgttgtctaacagttcggtgggactgctttcgcgtgtgcaatagattacaccagccgctaatcagatcaaggtcaatgttgatgggactctgtttaatgatgccaactgttttggaatgggttgtttggcctgaaaccatgtcgatcaagttcttgaagccttcactaatagcaaatggggaattattcgactagagattgcagaaatcatttgtattaaagaagctttaagttggattcagcgacataattggctaaaggttttattggaatatgatagcttggtatgtgttcaggctatctattgtaatttgcatatgccatctgagtttggtttgttggtgaatgattgtcggattattttatcatctttgagtcatgttgttattcagtttgttgaacgatctgtggataaaatcgcctattatttagcaggtagctattgtttttctccaaattatgttttttaagattatcaattacctcctaaattaggttctattgtaatagttaattcttcttgttaatgaaagtttaccatttattcaaaaaattatctaataaaattaataataatataacacaccccaaaaaaaaaataccaatggccaatcacttttaatttctataaatgaaaagaggagtgagagatgtgattgtgattacacgcgctcctcatattggtacggtaactaaaattccatgttatttaccgcgtttgacgcgtggctttaatctttttgacttttatacaaaatcttgtttaagaaaaaaaaaaaggaaaattgaaaagggcttgccattgccaacgttgtaaattactctatttcagaagcttgtttttggccacgcgtctctctctttttcactttctttaaattaaaaaaaaatgtcaattgtcgtgactcgtgatgctcgtgtcgttttttcttatgaaccttttattattattattattaggaataatttcaaaaactaaaagaaaaatattaagatatggtatgtataaaatttttaatatttttatagttttttaaattttatttacataatatatataggctaattagtatttt

SEQ ID NO: 388068 - DNA, 1894 bp, Cannabis indica
actaaaacactcaaaattatgttacaaaagattaaaatactcaaaactatatcatagaggcaaaattaacagtaacaaaatcgaatcacagtaactaaacacaattttgaccaaactaaaccaattaatcctaattaaaattgagtatattaatttttctcaaaaaagaaaatgagtatattaatatttaataactacttatatgtgattgtgatagatatatatgttaacgtcaatcaaggactaattacacactttttgttttgttccgttttgtgaggtattgtatattggactcaccataatttgaatataacacgaatattaattaattaatttcagcttataaattgatgattttgttgaaattaattattaatttgtacatttatatatagtggcatagtgatgatcatatatataatataatgatggtcattaataataagggcaccactacttgaacataacatattaatggttagtcaaatatttaattccaacagccgaaacaatacaaaagtttgggatatgaaaactacaatttcctaattatatttattattaatttatatttatatatgttctttgactatattttaatgtcaaaattaaaaatagtgcccttttaaaatttaaacaaaaaaattaattaaaaataaaaataaaaagtcagaccttaattttcttcttctctttttctgttaatctttgaaaataatgtacatttacattccactatactagacatctgtacggagtaggagaggttttaccaaaatgtgtgcccttttttctatcccactatctattttatacataattaatttggtaacattaattttaatctcataattagtgcaactaagtaattatatgtgtagtcttatcactacttacccccaagcccaactaattattaatctccaccatatagtgctttttttacatatattattgcaccaaaaaatatgtaaaataatatattattttaaaatatatattaatagtaattcacaataaaatctttttatatttttatacacttaattttcttatttttttagcaaaacccctttaatttttattttttttcataaatttgagacgtctgttaaatattaccgttaaatactaactgaatgactactgtgtacacctgtatatacgtagaaaaaaaaattgaaagtcaatacagtaataatctagttggtatttaagggtgatattcagatgattcatcaagtttgtaaaagtaaacataaaggagttttgtcacaaaaaaaaaaaataataataaaataaaataaaaaagctaagtataaaaaatcaaaacataaataattttaccacaaataaccctatattttttaaaagaaatattctttaacatttttgtttgttttagttttaatatataagaaattttaatactatatcatgtttttttaatgtcataattttcataattatttttaaaatatcatatttttcattaatatttacaatatattttatttatgtataccaatttttttttttttttaaaaaatatatatatggagaagtatatatatggagaagatgataaaaacttgattaatttgtaggtgtcttaaacaattaagggtgttaatatgatgtctacaaaaaaaaaatccttttattggtgaagaaacatttaaaattaataattaattatgaaaaagtcaagctaatgtatcaatacataaagcaaattaaataaaatcaccgctgtgtgaacaagtgtagcattagtcgtaagggaaaacgtaagcattacattacacaattcaactaaaaataaaaattaagaaagttaataaaatgaaaattgtgttgggtatatatttattatattatttgcctaaaa

SEQ ID NO: 388069 - DNA, 1228 bp, Cannabis indica
acttattaaatctatctttttaaaaataaaataataatttatctctagaagtttatcacgttggtaaatgttgtagaatgttgggtaaaataatagattagaataatatttttttaatattatattattaaaaatagttgtaaaatgaaaaaatatattattattttattatggttatttttgaattatgttagattaatattgttaatgatattttttaataaaagtattttatatatatttgaaaataatagtttgatattaaaatgtaaatataagaaatgaaaagaatattatttatatattatagttattttttaattatgttatattaataaatctatccaaaaaaatatcgttaatgatttttgaattataattattgttatactcaaaattcggttaacaaccagaagttgatacgtgtacctcagaaaaaatatgaatgagtttaataaatgcattattaaatacaatttaaataacttgcctaaagtattacagtcgatagaaatattcaaactcgctcccacgtaagcaaatacgagataagagtaataactattatccattgagattagcgtgataataagttcatctcgagatagatagagtacataataaaaattgttcaagacaagataattaagagcttgcagctcattgacccacatacttggaaataagagcttgcaactaattgatccacgtatttgtatgtggagaggataactatattcatctgtctcgtcttccatacattgaagtaaccacctcgttaatatcaccatggtaaaagaggactgggaggagcgttatatccatacttagcattttttctacaaagatggtaaagaagaacaactcgtacttagcaaggaacaaccaacatagtcagcataaccgtttaaggataatgataaaagagcggttggatggctattaaatattatcccatgtacataaaaatgaagtggagaatgggatgatacgatcccaagaaaaaataattgtcatcctataaacctataaatagggacagaatcttgagtaaaagatatggcaaatttgagagaaaaagctagatacagtagaacctctatccaaaaatacacttgggaccaagtaaattatattctaattgggaggttatagctaaatagagttacactaaaaaaaaattaaaaaccaaaaatatcaatgtaataataataacaataaataatca

SEQ ID NO: 388070 - DNA, 971 bp, Cannabis indica
aatcaaaaccttcttagatttcataactaaatgtgaaaaaacaaaggaaatttcaacactacaatattcatccaaaacgaattcgtgatgattgttaaaaaaaatcacagtaaaaaaatcaagtatagaactataattaagtgataagaattgaatggcgaagaagaagaagaagcaaaccctagcatgagaggtttgaattccggaagaatcgagagcgtcgtggagagaaaacttgaggtggctggtgatgggtatggagcgagaggatgatccagtgcagcagaggacacgaaaagaggaagagaaaggagaagagaggtggtgatgttgagaggttgaggtgaatttggaaggtagagctatggcggaagaagaagatgaagtaggagatacccaggccatggttggttgtactgtactaagttccaacttccaactccatgaataggcaaaatcaatttctcaatattatatattttgaaaaggcacacttctacaatcacttacttcattttcaccatgtcaaatacaaattatcattttctatttttggtgtaaattttttttatatttatttaatatattagttttttttaataatattctaatatattattgataattaaaaataatatgaaaaataaatgtgaattttgttgcactatgtttggcgcacactttttgttagaatttgataagatgtgattaaggtgcatgagtttcatttcaaaatcaattaaggatgaaaaaaaatagttcatgcatcttatatggcattagaatcaattacttttgaaataaaacatcatgcaccataccaaagtcttaacacttttaaccaatttaatgcataatctatttatttttagtgcaaattcaataccaaataccaatggaattctgctcaagctccttatttggagacatcacggatgggttttgtaatacccggaattaagaaatggatt

SEQ ID NO: 388071 - DNA, 877 bp, Cannabis indica
aataaatgaaataatgaaataatgaaataataaggagagctaaaaatgttgtacatgctaacctcacctagtttaataaatgtgacaaaaaatataacattttaaaatgtaattaatgctattttttggtgtaggttgccgacattgtatcatatttagatttttttttttaataaaaataaaaattagcatatgtagaaaagtcagtaggtagtacaaattaacttaggagttgcacattaatttgggaaaatgaaagtaagtgagagaacactgtcccaaaagccaaccactccattcataataaaacgttgaggcacacacaaacacaaggctgtcttgtcttgggtcattatttgtcggactcctataacaacacatatatttatgtaacaagaccatcaatattgtaagagcatatggggcacctagcaacgtaagacgtcgttttgcgattggctaacgatactctctaaaagctattatattcaattatacgggacacgatattaaattagacaaatagcaatattaacacgtaggaaagagtttgacaccactagtgtcttttagcatttctcatattgtaagattgtgtgtgtcggatttatattttttttcgtactttaaaaaaatggactatgttctactgtgccacaaaaaaatataagccgtgtcgtattaatatttttaaaaagtaggcctaacacgattcgaaaattcagtattttcgtgtcgtactttgtttgtgtcgattcgtattttttaaacaagctagcttattttcaaatccgaacataaatttctattttatttttttatatttttttactattaattatatgtatattttataattttaattatatttatataa

SEQ ID NO: 388072 - DNA, 2363 bp, Cannabis indica
aaaaaaatgattgaaggaaatcaataatcgataaatgttgagttcaaaaataatcaaaggaaatcgaagaacgattgtcactttttttgcaacaataatcgtgaaactcaaaggaaggaagaaattgaagccgcctagaatgagagtgattgtgaaaccgaaggacaatatgaaatgggaaagaagaaattcaaatcgaagccacccaaaaagataatcgaccaaaaatagcagattttgcaaatcagattgacagtcccccagtccccactcaggttattcttacttcttctcctttcctaataagcagaggggaagaagacgacgacgacgaagaatttgaaggttttttgaatcgaaaggggctaaatagtagtgaatataattgaattggagttctgttcgaagtattggatttaatttcaattttatgatgttgatgagagaaaggtaaaaggagaagaaggatgagcaagccgtcgataaggcctcggccagctagacttgtcaactttgctattggtaagcttgtttgccgattttttcttgattattgagtaccgactcagctatggtgatcaaatatattggctttgcttctagctgttgcaatgaaagtcatgatttatagaaattttatactgatgacaaccatcttgatgtggttgcgcaacaaaatatcagtttggggaaaaaagacaatgcagaggatgccattacaaagagaggccacaaaagaaacttgatgtggttggtcgagaaaccatacatccagatcttcaataggaatagtattcaggatgtcatcattagaattctcagattttgttcttgtggagtagtatatatgtaaagatggtctatgatcaacataatacttgaattgtttggtacaagtaagagtgttgatgagatgacaccatgatttgtccacacatttacaaggcagaaaattcttaacaggcaacctcgacaatatatctacccacaactcttctggtaagctgggtttgctaaaattgatgaagccaatgattcaaatccaatcggacaacatcaaatcttctggtgcaccaccctattgattttcaataatgatgttgggttttgcaggaagaagaaacaaggaaaagggggcttaatggcaatcaagatggacatgaacaaagcctatgatcggctcgaatggaattttctcaagaaagttctcgaattgtttggtttctgccctcaatttgtcaagatgattatgacttgcatctcaacggtctcttatgctattttgcttaatggtagacctttaaagaaattcatgccaagtaaaggtattcgccaaggggacccaatgtccccgtatcttttccttttgtgcaatgagatccttttgagacttatctttcgtgaacaaagtttggggaacatccatggtagtcggctggcccgaaatgctcctgaggtttctcatcttatgttcgctgatgacaccattttctttcttcggctaacactgttgaagccatgaatctaaagaaatgtatcaccatctttgagggctggtctggagaaaaatgtagcaagcaaaaatctgggatcttatttcctagtaattgtaccagggccctcaaaggagctgtggaaggacacttggagttcgagtgtatatccgattcgtagaaacacttgggcaaccctttcactttcaccagaagtaagaggaaagatttcaattttcttaagtcaagattttgtgagcgtcttgaaggatggaggctgagaactctatccaaagtagggaggatggttttcattaattctgttgcccttgccatgccttcctactcgatgtctactttcaaatttcccctctcctcttgtagagatttggatgctgttattagaaggttttggtggcttggatctcttgacaataggagattccttgctaccaaatcctgtgatgccatttgccaatcgaaacagagaggtggtttgggttttagaagacttgaagatgttaaccttgcctttctctccaaactggcttggttgatggctaccaaagtggatagaccctagttttatgcactcaaaggaaaatacttcccgcgcgactccttctagagtgtgatggagaaaacttctgactattttatttgtaagggtatattgaaggctcggaacatcttgctagtggtgcatgcacggttattgcttcgggggaggagacagatgttttgtggcaaccttggatcccctggctagattacaaaagttttcgtgagctgatggaatctataagacacaaagctcctagtcttaaaaatgttgctgatctcatgtatcgaaggacgaaaatgtggaac

SEQ ID NO: 388073 - DNA, 1683 bp, Cannabis indica
tttttcttttattttatattaaacataggacttcccaaagtaataaaattaattagggaaaaaaagaggccaaattgagaaattgcatgaccaagaaattgaagaagtaaacactcctcacaaaagcaggggaggcagtacacaagtaaacatctttggtaaaaatgctcatgttttttgacgttcagtagatattaactgtacattgagcgtgcctacggagtaacgtaggtagataagacaagggctaaggttgacttctagtgagaaatttcttaacgtcctacacaaacttttttttttttgcgaaatatgctcccacactaaattaattaattctgaggaaagctaagatgatacagctggcatttacaaatagcttatcaaaacgaggcaactcttttaacattctttcagtagctctctatgactccaataaaataagatgtacttttttttttttgaaagaaaataagatgtacttagataactataaattagatacagagagaattaccttttttttttttacttttccttaccgaaagaaaaaataactgttaatgcttcttttattttaccacatgtcataagtatgacatacgaataactgaaacataaaaagagatagaaaggtgaagaaagaaaccagtaggtaaacaattgagctgacgacaatggtccaaaaacgcccggcaaatgaatcagcaatgagagcaccaatgagtggcatgaagttggcggtgccgccaaagttagtgagggtgtttgaggccttcactaatggcaaatttaactcttgggtcaaatatgagatcatgttcgcatggaacccactgcttgcaaatctatcacatatttcatttgctaccataaaaccaaaaattcaatgttactaaaagaaattgattttagaaaaagaataaaagaaattgtcagctttaaatttcatagttatagcaatatataatattatcttaactaaaattaactaattgataatcgatgagtgaaattaaacacaagtggtgtacaaatttattgtttgttattttggatgaactctatattgatagaaattttatatgcactcatgaccatatgagcaaagtaaaaagttaaacttgaactaaatatatataataatcaaagtctctcgaacaacagtacataccaaaaatgaatggcaatgttctaatgccaccgaccttctttactttcatcttcttcgatttgttctcgtcattttcatcatctgccacggccatgttcttgttttccaactccattatcttgcaatccgattccaaggatgagatctaccgaggctatacatatttatacataaacaaattaagtataaatgaacaaaccaacaaaatacaagacatatgtggggtccataatatttctgtggctttttcgaataggatattgttattctaataccatactaataatgtgacgaggcattgtcagtgattagtaaattggtatgttaattattaaattatgttagagatgatattaaattatattaatagaaatatatagtcttttgtaggaataaaattcacctgtcccaaactctctatcccattcctgttcctacaatcaaatactaacatgtgtccattttatttattacatattgactctaaagtttctgttagttttagaatt

SEQ ID NO: 388074 - DNA, 865 bp, Cannabis indica
ataagtacggcgctatagcgcctaagacctgcactatagcgcccatgagatatttctcaataacccacgtgctgaattatctttttttttttttagacctgcgctatagcgcctagcaccatttttcatactctggcttgtttctcgactggattgctccttgtttctgtcatctgattagtattttgctcataacttctttaatacaactcagaattggacgattcaagatatttcgacaagctaattagaacgagatctaaaacattcatgttgagctctaagtccagtcctgcttctaagtttattaaaatttgcaattaagtttcactttgtaaaactgatctcatcgacttccactattttccaccaaaatgtgctaaatccctcaaaatgactctaaatgcatgattattctttaaaatatccaaaacaattaaaatcacactaatcaataatttaaagaatcaatttaagaatattaatacataaattggtcatatttataagataaatatggactcatcaaattctcccacacttgactcttgctcgtcctcgagtaagctaatgataaaatgaaagatactttaataaatcggtctttatgaaaaataatttggtctttataaaaaataatttgtttcaaaaattgtacatccctttataattctaagaaaatcccacctcttcaatcattagaattcaactcaaggtaattacttttcaagctcaatttttgtatgtgtgtgtaatcaactcatcatattactaacattcaaattaattcgtgcatgccaatactcaatgctcatctcaaaagaaatgtgtatttcaacaaaaatctactccataagcttaatta

SEQ ID NO: 388075 - DNA, 1085 bp, Cannabis indica
taaaaaaaaaattagaatagcaaattgtgatgttgcattaaagttgctctaaatttagagcaactttgaaactggtctaaatttatatataaagttgctctaattttatatatgataattaaaaattaaaaatagtaatattaatatttatttatcaattaaaatgataataataatcaaattataataattttttatataattgcgtgtaactattattttatttaattttttttaaaagaaaatgaagaattttcattaaaggcacttgtgtatcactattattgaaaaaaatatattaaagtaactaaaataataaaatacatatattagtatttagctcatcatttataataaaaatatagaaatataaaaatatgtagcacgagtttgaacttgtataaaaaaaatagattaatctatttaaaaaaaacaaattaatccccataaaatatgatacaaaattactaaacttgtaaatcgtgtcacgcgagcctaccctataaaatgtataagccaacacaaacaataccataatgtgtatagtataattattagtttgggtaataaacgaccaaaacatatattttaattttatacatttaactctatttttttttttttttttttttgagttagcaatactagtgtaccactttaattttacgatttttagtaaatttaaagtgctaattaaatcttatgttaaatatcaatttaattgtcattgtgtatatttgtgtatatatagcttgtttgagattttactgtcacgtgtacatatatgttcacagtagtaattttagtttgtatttaacattaaaatttaacataccttaaattgaaaaaaaaaaagtaaatttaaaggatattgctattaaaaaaataaggaagttaagtatataaaaagtaaaagataaaaaaagatcttttcattaatatcctattagtttttatgatttttaattgtttattatattaggtgtgaaaaaaaaaaaatttttacaccatatactaaaatttttaaagtttttacttttttactatgggacagaattttttttttaaaaatactgtgtaagttt

SEQ ID NO: 388076 - DNA, 550 bp, Cannabis indica
acaggtaatcatttttaaaagatttttaaactgaaattaagatttgaaacaggtaatcatttttaaaagatcctaatgtttgtagaacaaaatagatatttaatgtatatatataacgttttcattttcattttctgcacataatcaaactatcaaaatactataaaatctagtgtccagtccacatctcttactttcgacctatattatatagtgatcacactcatctttacaaaattttggaaatggtatttcattttcttattccttctttaattaattagttaattattattattattattgttgttattattattaccgtttatgttagctagtgttttgattttatattacttagttttgtcaatgcaagttagttgttagttattatttgtttcttaaacacagtatttaaatacaaaagattatatctcataatatcctaatcttaatagtataactttaaagtttatatatatatatataagtaattacataacgttttcaatctcattttcacactcaaaattaattactctctcttact

SEQ ID NO: 388077 - DNA, 914 bp, Cannabis indica
tgatgaagatagatagagagttagagttagttttggtggaagttgaggactgtggtgatatggtatttatagggatatgcatgttttgcatgtatagtacgtggaaaccatgtagggtatgtggtcagtaatgagattggtataatctttgttccacgtatagtttttaatttctatacatgcaaatattgatgtgtggcattactagaagggctgcttaagtttgttctctagtgaaattaaatatagttttgagagcagtagttcaatactactaattaatcagaagttagattactaataacattatagaaaaaaaaaactactttcacaaatttctaataaaaaagtagtgaaaaaaaaaccatttttaggatataacacaaaattccactaataaccgttacatagtgtgtttaacataacacatcaaaataacaaaagtcaaacaaaaacatttaaattgttaagtatcattgtcattactaaaattagttatctaaacgaaataaaaaaacaaattaacaaaaagactactccggaacatccacaccctcttctcaagcttcttttcctttgcctttagcgttttccttctcctttagtttctttgacttttccttcctaacttgaacatcatcttcaacctgatgcctaccaatctgtttcctccaaacatgagtaaataaattaacagccatatcatctctgtaagttgcgatcttatcagccatatttcgtggtatctcatttatcttctcattgatgaacaaatcagcaaacttaatcacaaaaactctacaatcacagcatttaataaaagttttaacaaacaaaaatataaaaatatcaaacttaaaaaaatatattataaaactggttataataaaaaaaaaataaagaaatattaataa

SEQ ID NO: 388078 - DNA, 757 bp, Cannabis indica
cctgctctagaaagaattttatcattccaaacattcattttagaagcaactttctggacaagataatggaaatgagagttgttcattctacctgtgcagtggggaacactaagatattttctcacaaagcccacacaacctagacctaaagaattttcaaaaaaaaaaaaaatagacttcattgttagtattaggggagaacatgatggaggatttggccacgttcacagtttgcccagttgctttgtgataagaaccaacaatgtccttaatggcattgttagaactcttagtgacaggggtgaataagatactgtcatcaacaaagaggagatgggagatgataggagcattcctacatagtttgagctcaacaaagttattgcaatgctccttgacacagatggaagcagagagaccctcaaccactaataagaaaatgtaaggtgatagaggatcaccttgcctgattcccctagtaggagtagtgctctcagagagggtaccattaacagagatgtgataactaacagaggagatgcatttcataatcagagagacgaaggttggtgggaaaccaacatgggtgaggatggctttaacaaagctccattctactttgtcaaaagccttctccatatcaagtttgagggcatcccaatcttgtttgcctttcttcctataatggatggcattaattgttggaatatgttttactaggatctagatttactaacaagtatgtttcattaacatc

SEQ ID NO: 388079 - DNA, 1430 bp, Cannabis indica
gattaaattttaaatttttataactttaatttaattacttaattaattaaagatatcacttttatatttatatttcactacaaaaaaaaattattttaagaaaatctagcttaaaactcaactattttttaatttctctgaaacccaacatcagcctatattaacttaaaaataagagattttttttattaattttttaaatggataataaaattaagcataaaacttattattttcctagtaatatttactaaaagaacccatattatataaagttttgttattgggcactagtggtgaccacataagtagcgctctatggttactgatatttttttaaagttattttcttaagttatattaaacccgatacttaattacaccaataattatatgataccgaaaaaaatactaaacacccgtagtactttttaacaattctatatatagttaattattattgaacaaacatacttgttatcagttagttattacttgtatatattaattaatcaaccctttgactactgactagtatctagatatattaattcatacttttttttatatataaaaatgatgtccaaaagatcgaatctcccccccttctatttttttttaaaaaaaaaacttataaaataacagcatgtacatatgctatttataggttaaaatatgtttatgcagtatatatttgcattatgtttgtgtcataattatataatacaacaaatttaataacttgtaataataataatattaatagcagctagttgtgatatgcagtgtgtatctgatcattaattaataaaaagagtttagggcagaaggacattgcaggaaaatttgtttgtttctatggttagagatgagtagagatcgttcgtactgaaagtaaaaacaaaacaacatgtacaaatatagctcgttaattaatatagatactgtttctgcacgttctgttgaagatacgtgtaattgaccaaccacttacctaacaagtgtttataatggcaaaaaatacttgtagttgtaacatcaatgtggtcactacttagttaattaatattccaaatcacaaccatgcactgcaccaccattctatatattcatcatattaaaatatgtggttaatattataataacgtacataaaaaaattgttaattttttcccaagggtcgtgaattgatagtgaaagagatgcttttatttattcttaattataatttcatatgcttgagaaaaaaattataatttatatatttatactgatttagtattattttaaacaaccactttagttagtagttttctttgttttaatatacatatatgaaacacttcttaataggtaatacccattaatgggaactaaaaaattaataagataataatccaataacctttttatcgaaagtttctaaaaat

SEQ ID NO: 388080 - DNA, 550 bp, Cannabis indica
agcaggagtgtcgctttggagtttgttgtattgctcgtgatcattatggaaacatggttgaagattacactattggcaagttaggtcgtgttcaaccggagattgctgagattattgacattaaggaagctttaagttggtttgctcgacactcttgggggcaagttgttattgagtctaatagtttggtttgtgtccaaatttatttaaagcaatattttcatgtcttctcaatttggtttattagttcaagatgttcaagatgttcgtactttattattgtcttataatcatgttaatttgtgctttgttaaacaatttacaaataaagtaactcattaccttgttaggagttcttgtttttttaataattgtatgctttagttggagaattgttccactgaagtataatggaaaattttaacggttaatgaaattttactagttttattccaataaataaagggaaatttcaatttttgaccctaataatacaagccatttcaaaatttatacccttccttaatttgtacaaatttagtccattaat

SEQ ID NO: 388081 - DNA, 1173 bp, Cannabis indica
ttgggtgcctaggtgctccaaattagaagtgttccaatttttattataatgcctctaacatgcttgtggcaggtcttatttgtgtctaagtacaaagtttgggtggttttcactaagaggaccagttactgaaaccctagggccatatgtcaactcgggcgcttggtgaaaccctaggcgcctgagttggctttcgggatgccaaattgacatctataattttctaggcttgtgaataagagtcttctttacttgttttctctgaacattgaaagatggtgatttggaaacgacttcacggattcaaatacctgttccagatcccctgatgtcaacatgggcatagggctaaggactcttcctaaggttggctactatgacctcacgactctcaactccaagaatgttttccttttttccacatttgaaaaatgtagtccacatcactaggtctagtttacgggtaaacatttgcccctaacttagccttgcactcattcaaggttgagtttacgatgtgatctacgcttgtttcatacaaaacaatcagttgggcatcaatttttgacttctagaaattgctttgcggggtgtctaaacacagggtgacaggaaccttacttttcccatcgggatgagagttgtctcgttgaatcctgtgagctgtgaatcgctaagtgaaaggtccctatccgtgagtccgatggccgtgaaagcttctttgaataatagattcacgaagcttttgttatccaccaatatcctagccgcaaccttattggtgataggagtttctatgactagagcgtcatggtgggggaaacgcactggcttcacatcttctttcgtaaaagtaataggttggtccatgagcctgggcctttgtgttgggagttgagtgacctcccatacttcatcgtgttttagggctccattgtaacgcttcaactcattcctggtggtttctccgatatgaggcccaccaaatatcatggccactcttgagatcgaacctaaccatatcaggattaagatcatttgatctaggatcaactaggtgatattaaattgaaaagatattacggtaactttatcatatctaatcaaagttcaatatcggtcccttacaatgtactccatacatccgatattggtaaactttgccaatgccct

SEQ ID NO: 388082 - DNA, 2242 bp, Cannabis indica
tatgaagtaattttctttttttaagggggggaggagacataagtccctaaaaagtttactttaatgcagataagtccttaatctcaaaaaattatggtaatagtccctggtatcccaatttttatccttatggcgtggcatgcttacgtggacgaactagtgccatgtggcagtacagctcactaaaaggaaggctaagtcaacatcttaacaaacaaagaccccatcactcaaatgcgcatcaagtgatagactagctctttcttaggagctagccggccacccctggctggctctatggtcggccaaccttgggacagtaccatggccggccaacctggcctccacaggggcctggccagctaaggagtgccctgcaggctttcctggacacttctacacatggacaacagctatgggctgcgaattgaactttaaaagcccaacagaatggctgaataatatctagaatcaaaggcactttggtcttttgtaaatatttaacaaactatacgaatactaaaggatttgaattgtaaacctagggttttaggtctcctatataaaggccttaaccttagctaaaaagctaagttgcctctaagctagaaacctacttctaaactctaagtgtctgataaactctctctctctctctcttccttacttcctctctctcacatgcctaccctggtacttctcaacacttgagtgttgtcagtattgattcataccttgtaatcctaagggtactatagcagatcacaacccacctatagcaatctggatagtaattcccacggtataaatacaactaaaaggggagtaggtcgttactcgctatcacaagagggccaaacctctataacaaatcttattgtctattacttttcattctaatttatgcaaatacctggcaagcatcatatatgtacgaccctgctgtcagttgatcactttttgaggtcaaaagtttggtgctttcattgagagcgtggatttcatgatctgatcaaatgccatggtgaacacaagaaggactcatgtcacaccatctgcatcttcaggtcttcctcaagacccatagatcgcagatccaggcactcaggttccagtcacaactggaatccccatgaatatcgcagatgtggtgaatcccgtccccacaacagacgctacaagtctggctactacagttggccaaactgatatgagcaccccagttaatcaaaatggtaggcccacgcctccaagagtaggcccaccattggcgcctcccactaaaggaaggacccaggggcgataacgccctggaacaacaactggacctcgactccaattttatgctggagagacaggcctgggagtgggtgagcctcacctacacctaggagaagaccttgagttggccagactcagggaagctgaaggtcgtgcgggcctaaatgaagaaccatgcgctgctgattacaatgctttcgctcagtagagatgcaaattcctaagatagatggatgactaggaggacatccttccatctcaccaagcaaaattagatcgccgcaaccgggaggccagcgatctaataagacggttcaatcagagaaccgaaagaagaggtcaggatctctttagggatccacttcaaggaatactattgccgagctctttaggaactaggactgatcttcccctgctagagggaggacaaaccttttgtcaaaggtcaaacggcgagaacaaccaaatcttagcaaccagcggcatgggggttcagccagggatctctagctcaatagcaccccactggccagccaacctccaacaagacccatggccagccagagtacatcactttctccccaaggggagtgaggtgcacagaggtcaatctttgaccgacgaggactaagagtgggtggaaacacccaaaacagtgattcaagaagtgaaaccggtcactttaggcatctagattgtaacaccctaacgagcataggcgtgttagcgtgattttaaacgtactgtgcagctcgttgctaatcaacgaggttattgaaaatcgtgaataattaaaattttcatatttaaataaaaacttaaagtattacatatataaaattctgggatcccatttacaaaaaactttttaaaagtttgttatacacataaacaaaagcttgtcaccaagcgactatacagcaaaagcctcgatgtctcaaagatcgtacgctccaggcct

SEQ ID NO: 388083 - DNA, 1076 bp, Cannabis indica
ataagcataactatatatatacaacttttattcatataattttagcaaaataaagaaaacttcatttatatataccgaactctgtgtttggtatatattataatatatacaattaattaattaattaattaatgtggatatatatagtgccaccaacttttacttcaaagtacctacggaaataaattatttgaaaagcttttaataaataatgttattcttatatgcctatcttaattaagttgtccttgcccgtatgtatacatatatataaataccaatccatatataatttatatgcgatgtagtcatgcatttagtgagaatatatatattaatatataatagaaatatctagtatatatattatttggaagatgagtatactcaatgtatggttactaaaaacattaataaatataaatatcgattttaaaaataatgaatgaaaaaaaaagttcatacttaatttaattatataattaaaaaaatatatacgaaaatctcttttaacgatatatcaaaatagtttatagaaaaatatataacataaattcaattatttttttcttttttagttaaatattttttttaattcttctctgccatatactgtaaaaaaaagatttatttattttttatttttctattaattatttaaataaacttagtacgtactaaataataattttgttattaaaattaaaaactgattttgttttatatatataattaagtttattttaatcttttgcataatatatagaatgcttaaacttttcttttttttgttcttttgtgtagtgggggccatggccatccactcgatcatcatgtgtaatcaaacatatttctatataattaaaattacatcatactaagaataaagaataatattaattagccaatatatattttgtcttagatttttttatataaaaaaaaagaataaacatagcaagagaagtcaattttaatatcaagtacttgtgagtattgaattagggaagagggtcaagaaaaaaaaattttaaggaagaggctcggtttttgacaagtgaagtggttaggtgttg

SEQ ID NO: 388084 - DNA, 1488 bp, Cannabis indica
ggccgccctccgaggaacctacaacttctcagtctccaaacgcccttttagggccctacttatttccttctccctctgtatattgaaagggtcgacaggaatcaccttcctagggaaggcgaaccctactgaaggcactcttggcaaggctaaagggagagacctaggctggcccaactcaagttaagaattgggaggctagaggtgggtccccattccagagattgacatctcgagcctttacttatttttagctgaaccgccacctgatgcatcagaagagctgattctttccatcgtaggccctgtatacctacaagaagtcaataaaatagcgtgacgagtcaacacaatgcatgaccccaggatcctcaaaaacggtagatacataacaaaggttctgaaggcaaattcaccctcaccactcactcaaaactgtacgccaagtgagtagaaaagaaggcttacatgttgttgagaaaaatttgaggctgatcgatgtggtgcaaagccctcaacctgtagaaattgcgttagactttggagatattggaaaggtctcactaaataagggaagaactaaagcgaaggaactcttgtttgaaaaaagaaaaaatgaagaaatgtggaacggctgaaggtatttattgggtacctggaaaaggagtctcccacgtgtagcgaatgttcaatttgtccgtttaagggacatccaacggttggaaaagcgagaagctgaggagatatctcacttcccaacagtcagcttccatcattgtatgcatcgtaaaaaaatgcttggcaaatggaaggtctgctcaagtccaatcactgccattttgagctttccttgaacacacacccagcacgcgtgtagaaatctggaagtcagcatttaacactctgacaaaaagactgaagaaattatacttcccaaatgatgacactttagtttggcagttggtgacgtcatccattaaagagcttctcataagtcccacgtgcgcgaagatctctcagaagatgatacaagttcccggaccatgatatgccctgaaagcttagggggtaaatgttatccgcatttttacaggcatgacatttagatataaataaaggagtcattaagttgcctaagggcctcacttagtgccccaagaggataaatgcaccgacctcggggaagggtgtgcgtgaaagggagattccccaaatactagccgcatagaagtcatccgtgaactagtgcctcgctctactccgagagacaaacccctttgctctcacagggagaatggacattttccagacaggacgcaccagtccggcgtacgcctttgacctacggaagcttagcccacgcgtgtcaggctatggacccaataaccatgcttttctatgtacgatgtcagaggttgtctcccacgctattgctggaattattttaccaggatctagatttactaacaagtatgtttcattaacatc

SEQ ID NO: 388085 - DNA, 990 bp, Cannabis indica
tgtattataaacaagatacaaatatgccctcaaaaataatacgcaagctaaagtatgaataaaggattaactattcatacaagcaatcaaaaatatttaaaaatagttcttaaaagaactgttcaaaatacttgaagttggctctaaatatagcagattactaactgctcataaaaatatggcaaaatattaactgctcgcatatgaaagaataagataatgacattggcatacatctaatcctaaaatatcccaagctaaatcgaggaaagtattattgtaaataaaaacacaatacataagcattataaactcgagaaaagtgggataaactagcataacaagatatatataaaaattagtagtgttggccatctaacaaagcaaagtttaaatattacaaaatgccacaaaggactaaccatttaaccattgtctcggcctaaaagccattgttcagaaattagaataataaaactaaatctacatggtcaagatttagtggggtcaacttcttcttcttcaacttccttatcttcagcttcttcatctcttttgatttgctcgcgaaaatcccgcagctcatcaccaccatcttccaagaagcttagatccatatctggatttgttagtcaagccttataaatggaacacttggcaatcgagttgtatctagccctagtattggcttcagcctcttcaagctttattttggcttcattaagctcctcttaggttttttggtgggcctcaaggtgatccttagcttttttggggcatcctcgagctcaactttgtgggttttcttttcctcttcagcgtcctgataggctttatgccctaaataaaactctatttcaatgtaatctctatcatctaaatatcaataaagagacagaagtattttcatcacttatttaatgtgtcatttggttcatgttatcatttattatgtttatttgtatttataaatttcattccaaatcctta

SEQ ID NO: 388086 - DNA, 1623 bp, Cannabis indica
aatcatgtaataaattaccaaataaaaaattttccacaattaatttaaacaaaatatcatataaattccaaatatatgtttttaaaataaaaataaaaaaaaattgaataaatgtaatttatttgactaaattaacacacattaggaaaaaaattagtattccaaatatataaattttttacaaaaatttcggaattttccgtttttttttttggtaaaaatctgtcccctcaaatgacatgtcgttttgcataaacgaaggctgcccataaagatgaaaaacgacaactcgtttgtataaacaaaagaaaaaatgacacgtcgtttgagagcttcttcaacctctagccaggttaaaatgacccgttttcagccatgtgggtccgacagacccgacccaaacctgatcaaaattttcaattccgacgaccgaaacagacccaaattaaatagcaaatagaatactaaatgacaaaaattaagacattcatatatatatatatatatatatatatttcatccatgaaaactacataaaacaaaaactttaaaatcagcaaaaaaatttgggtccgaattgtatagccagaaaattttgaaatctctttatttttctgaagagtttttcatgcttaaaaagatctccaatactatatgaatgtattgatacatataagaattgaaacaaacatcgaaaaataaaaactcaaatttgggatcgaaactaaacattcatgtttatatatatgtactcgtatacaatacatatcacataaaattattaatctaatgtaaaatatatataacgaatatatataactatatataaatgcatatatcatagatatatatatatatatgaatatatataatatgaatgtgtatataaaatacgaaataaacgaatatatatataaactatatgacaataggatcaaaatacctcaagctattgattctttgagtttcaatctcacacaagctttgatctgcaaagaaaactgattgatgtgggtaatcggtcttctaagctctctctactctctttagatgaatttactgtgtttcacagaatgagtagtgaactcgaggaccgagaccgtatatttttataggtgagaccttccatcaaagtctctcatacaattaattgtttgacaattaattcaaaaaattaaatcggaaaatcaaatatttgataaatggtaatgtaacaatgtatagaacatcaataaattaattgtgtctagattcaataaatataaaatattcatttatcttaaattaattcattgattctattcttaaaataaaaattattctaatattcacatctctattcataaagaggagaggtccaagtttggaactaccctcctccaatataaaaataataataataaaaataataggttaacagacaatggaaatggtcagaccaccaacaaatataagtctccttttgatagaactaatgggaaatttcactttttgtccttaataatataccccatattaaaatttatactctcccttaatttgtacaaatttagtccattgattacatgaacttcccattttatccttttttttcaaaaaaaaaaaaattggtaaaaattgaaa

SEQ ID NO: 388087 - DNA, 1224 bp, Cannabis indica
tttaaaataattaatataaaaacatagtgaaaagaaaagacctttaaataaaagtccaaacatataaatttgattattcaaggtgatttaatatttttcttatctcaaaacgatttaataataatgtaattttgtacatatatatcttctaatttaaaatgatgtaattctaatataattatctaaactacttttatcacttttgaaagaaattaaaaccattttttttaccaataatgtaaaattaaaatacaaattcaataaatttttttttcttaaaaaaaaagtataactcatcggtttaaatgtaattctaacaatacactttgttatgaaatatataaaaatgtgaatctatatctctttatataaaaatatatatatattatattcatatataatattaaaaagaactactgtacagttttatatttgagattttctcaaatagaaaatttaaatgaaaaaataaattgttgtcaaaattattttttgatagacatgtggtgtctttttatatttttataattttatcaccattattaattatatatttttattattattaaaatagacatatgtactgtaaatcatgtaaaataaattgccattaaatcattcattattaagggcattttttcattgttatatctcccatcattattattattccaatctcttagtattccaccaatataattcataacttttaattaatacataattaatctcgtgcctataatatatatggttctcagtcttttataattaatttgatcatatctctttccatcttatctagctttaaacattgtataagcttcatatttttttttttctatttatttatttttctcttaaatgaaaataaatggattcatacacatagtgtaatattatatatatatatatattattagagaaaatgaattttgataattcacatagtgacttatcttttagaagaaataatatatatttttttattagaaaattatatatatttgaaattttgtaatttattatatgtaattgtatattaatatttttttttatttttctatttgatatttaaataacacgtattattggacaattcttaaagatattgatatactatatagtttaaaaaataagtcattaataattgtatatttttgtctttagtagttcatatatgtatatatatatatactaggtgattgttacgtgccaagccacgta

SEQ ID NO: 388088 - DNA, 1342 bp, Cannabis indica
attggtggcgtccctaaaattttgttaaccgggaataacaatttaaaaaacgtttaaaaatatgtaaatataatccttaaatatagtttatagtaaatctcttatctattttagtaccaaaaaaaatttagtacatttcttttttcaagtgttatattatttagaataatataatattaaaataaaataaaatgtgacatgttacatgttatatactaatataagattaatatataattattgtaaaatatatcattcaatcaaaagatttcattttctcaccaaggctttaatttgtgttctttttttcaaaattctgggtgcaaaaatttagctattggaattgcttgttttatttatcatggatcttgttaaatgtgcggctttgaacaattcatttgtctacgatgatagttataaggatgttattgagggagatcttgaggtaacttttgttgatgtcggcaaagatagtattgcaaaaactctagtggaaaaattgatttcatccaaggtagttttcagggagcatataacacaagtattgaatttttttaaaagattaatggtaccgtaactgtcaaggcagttggtaacaatatgtttttattttgattttcagatcttattgataaatgtaaagtttttggtggcggtccatggcttttagaacatcaacttttggcactcgaaattcctactggtgttggtgattatagttctttggcattttgtagagtgaaattttgggtccagattcagttagttttgatttcgtgaatgtcaattcatatgggtagagaacttggcgactttcttggactggtgaccaaagttgatgagaattcttccaagcattgcctcggaaggttttatgggttcttgtcggcatcaatatctccaagccccttcttaaactcatgaaggctactttgatcaaaggataggagaaatctaaatttcctctcaaatatgaaagattgcaggatatttgattttgttgtggaattattggacacccttttagtgagtgttttattgtcgaaaacagttgcgagaggccataagtggaagtatggtgattttataagggctgcctcgattgtagtgtaaaattttaactgatgctataatttattctaaatgtggcacaatttttaacatgtatcaaatttaaatcgcattatatataaatgttatcccaatttttgcactctaacgtggcatcactcgatggtgacacgtggaatcgactccgagtatttgctcgcaaggcacgaaccgaacaggacacctcacacattcgctcggacgaagtcctctaagccgagcagtgagcaat

SEQ ID NO: 388089 - DNA, 1694 bp, Cannabis indica
cacctaatatcaaatcagttatactattattctaataattaaatgcatatatagatagaggttatatgttaacttttttttcttttttcaaaatgtagtggttatgtaattaatatatataaaaattcctattataaattgggcattgatttgtttggtgcaagtaaagtttaatattggccaccaataaacagttggagaggcagatatacctttattatgtataatccaaattttatgcccaatttttaatacataataattaaaaaagaaagaaaaagctagccctctttcatctcgtgcatacaaaatatcaaatacaatcacactaaattaattatattattcgacatatcactaaataaacagatatatagctagcaataataacttctgaaattgtatacatacataaaaaaaattgaaaaatcagtatacatatatctatataccataatacatatattacaaaaataaaacaaaattaaatatctaataattttgtgaatttctttcatcacataaccaatatatattaattaattaataataaattagataataagaataataatatcaatcatttaatgaaaacgccggcgtccactgccgccaccaccaccggagtgtacttccatcacgggtttcatcataacattattattgttgttattattacagttataaccattattattgttataactacttttcttcttattattattgttagatctcatcttaaacaacatctccttttcatcaccaccgtccattatatccacacgatgatgatgatgatgatgttgatgacgatcaacaccgtccattatgatctcctcttgcttaacaatactcctcctcttcacaggcattggcattgcatccaatcccataagtttcgccacaactcccggcttacaccacacaacgctctctccagccaacgtgggaggcagcacaagccccccaccgcctccccctaggccgagtagtctccccctaagccttttgagctcaccacaacacaccgatctccttccttgctctaattccatcatcttcatattattatcgtcgtttctgaaggaagatcggtacatagcatccttcccatcaagggagaatctcggatactgactcatggcagcatttctcgctgacatgagtatatctgagctattgttgttgttgttacaataagacattttgcgaccatggttaataccatgttcgcggttattagtagtagtggtggaatattttcttgctttctcttcttctaactctagtttgagaatcatctcttctaaggttccaacttgattatgattatgatcatgttggagaagaggaagaggaagatgatgatcagaaggtggaggaggaggaagaaggtggcggtcgagggtggatgtggagtcgtcgccgttgcaaaaagttgaccggaatccttttctcatctttcctcctaatgagtttttcactaagaataaggaaaggtctttcatcataataataatattatcaaggcatgcatattcaatatatgcatgaaaatgaaataatatttagaggataatgatgatgatatgtttatatatatgtggatatatataccaatagaagaaaagaaaagaaaagtgtgaaatagtcttgtgagttttagaaagaaaaaatgtgatataggttag

SEQ ID NO: 388090 - DNA, 1051 bp, Cannabis indica
gtcttataactctcgagctcaattaatgaatttatttctatgtgaagtttgattattatatccgtttagttattcttatgtggtgttctcgtatctgagctgatttgtattaccagtatttttggcataatttgccataattgaagttattatttgtgagatttataagacttttgagtgttgcctaaataggctgtagtatttttttaactattgaatgtaacttttgtttttttaaaaattaaacaaataaagaaaaagagatagaaaagtaaattatgatgtatagttatacccaatataataataaaaaagataataaacgattttaataaactagtttataagaaaaaataaagctaccttatcattcaaaatctaccttcaccattgccaaaaatacaaataaaaaagctacaatcaccaattcaccattaccaagcctaatttagtatgacttttttttaaaaggtcaaactttatggtagcgagtaaagatagttaatgtttgatagtatggaagtatcacataaacttgcttccagcgttaaggtaattgaaatctactaatatttattacgttattaaataaaattgaggtatgttttaaactgcccgtctagctcagttggtagagcgcaaggctcttaaccttgtggtcgtgggttcgagccccacggtgggcgctttttccatttcattgttatttaattttatatcaaattgaattttaataaaactttaatttatattctcacactaaaggcgtcgatatgtccgagtggttaaggagacagactcgaaatctgttgggctttgcctgcgcaggttcgaatcctgctgtcgacggtactgttgactatttttatttgagaaatatgagtcccatttattctattttaatcaataatcgatacctcatagcaaagttcatatatttttagttaataatgtaaaataaaactttaaaataaattaaaatttagagtgtcttaagtaataatttttcaatcagttttttgttttttaattagaatagtgaaaatatttt

SEQ ID NO: 388091 - DNA, 1168 bp, Cannabis indica
ttgtaaacttatcaaaccaactatttgctgcctctatcaaggacgtagggaacaatatgcaatacaagttattagaaatattacttgcttgcattatggtattgaaattatttaaatgtgtaaccgagtctgtggttttggtgtactacatggcatgagggttcttaaatcctctcaaaaactgcaagtttaaaatatttgggtggaaaggttctaggtcgtcgtctgaatcataccttggaagctttccatattctctatcctgatattttttgaaccgatcatccagctgaattatcctttgttggatggagttatcaacaagttgattagtttgctcattttcttgctgagcatttctattcaatctctctctgtgatctagtgcatttctatttatctgctcgcgtagattagggcgcctttaatttatatggtctcgtaaattaggctgatcacacatgttttggcgtcaatcttatctgtcattgtaactgctcaccgatcgacttggggaaatactttttgattggtaactgcttgccttgatattcatatcaaggtgttctctccccacgcggtgggttttcccatgtgcgtgacctcaaggatcaagtttacccttgactccttgacctactctggctgtattagcctctaattcttatggtaattcttcagtaggtcttcaccttttaaataagttaatgaatctacctctatccaagtatgtatatatactgtctctttcttctctcctatgtctttgtggtggacgttgaggacgaccagaccggttttaggtggttgatcatttgtattttcattatttttttgagatgttagttgtccccttgctctcatttgctgcaaagttgtggcaccctgattttggggacctcatccatcaaaaataatgtcccttgtttcccctggttgttgctcttgggggtgggtgggattatttagctcctattctttgatgttgggtccttgtgcccttctagttagtgaaccacatggccttcctcgcgatcatcgtgtaggttgctcttcttgcactggcagtgctttgttttgagtcattctatgtaataccctaagattaaggaaacaaattagcaaaccctaactagttaaatgtgtattaatgtggaattgtattatt

SEQ ID NO: 388092 - DNA, 905 bp, Cannabis indica
ggcaaataaaagaatttaataataaatgtgaaattaggaatatgatttcaattgatacaatattacacgattattaatactatttagccattttttttctcttatgtgatgagagattacaaattcactttaaatttttttcagatcataaaaattttaaattgtatgtcaactatgtatctatgaaataatacaatacataaatacacattaagcaataatctaaaaattacataaattatatataaatacttttatttcacattaaagcattcattaaaagcattcccattattcacttttttaaattttatattaagatcattaattaatcatgcataagttgatcagtcttaagcatatattaaacacaaagataaacaaatcacaataacaaagaaaaaagaacaatcaaatagcattaaacgatcaaataatctcagtcaatattcatcaaatccctaaatagaaaaattagctcataatctcagaatacatatagtcaaactaaacagagacattaacacagaaaataaagagaatgagaaagatgaaaaaaatccaaactttgcatagaagacgccactgtgcacgaagccttctataaaattttgtcgtggtgctatttcctccgtgacgctagtattgggcattgcaacgcctgacacatgaaatggcattttcaatttcaattccacattgtattttcgatatatttaatccattcgtatattccaagtgtggaaacttgaaaccaaaaaacaacaagtgtaaatttattctaaaaactatcatttaaaaagaaaatgttaggaatactgtaaaacttaatatagccctaattaattcatgagaattaaacaataagattaaagaatagcggaagcgtaccggagtccatagaa

SEQ ID NO: 388093 - DNA, 1473 bp, Cannabis indica
aataaaaaataaaaaattttaaagcgtctccaataaaataacaacagttaccactattgcaaatataaaatacaacaacaataaaatttctgttaaaagtaaaatacaagtagaattatcaaatttaaaattaaaaataattaaaaagacaacataaaaagataagtaacaacacttactgctattacaaatataaactagaagcatatttatttatttatttatttcactacaacatactgcatgttttaaattaatgataattaattaaatatatttagtaatataaatagttatcaataatattgatgaattaagagagaaaaaaaaaatacccttcgttagattaaaatttgaagtaaaattaataatattaggtgcttctacaacacacctttttaaaataagtgtactgatgcaaccctaactatttcggtatctataagaatattttactctaattttttttataattgtgtatgttatagttatttaagacatcctgcaaaatttaaaaaaaaaataagaataatttacaatataaaattcaatgtttaacccatctatttcacacgagtataaaataaaaaagtcatgcgtacaacaaacactttgaccattgttttcaacgtgttaaattttttcaaatttctcaaaattttgctagatgtcttaaatgactataatgtatacgaccataaaaaaaataaactaaatatttttttagataccgaaacagataaaagtgcatggatacacctatttcaagggggtgtattgtagaattttacattaatatttatactcatttttaaccttttttcactctaaattactattttagactttacttcaattttttttttttttccattcaaaagaaaaaaaatgaagtaaaattaaaatagtggtgggagatgaaatagtagtttagagtgaaaaatgttaaaaaaaataaaaaaataataatttaaagtaaagttaggattaagtatggtcttaaaatggtattttaatagaataaataaattgatgtgagtggtgtaaagtagggtaggatataagattattttattggatttggattatggattgagataaatttaatactactttatgtttggtagaatattagattacacatattaataatacgtataattatggaataaagacaagcatttaagaaatatatatcaaatctttataataacaagtgtggataagagtgagacttttttcttaaggagataaaatatattgagtaagtctataatatatttgtttaaagagtaatttacggcataaatactttaacttatagttgtaaataaatatatacgtttaatttttggtggtaatgatatttaagttatatttctagaattctgtaagtaggggtgttcgcggtgcgggtggtgcggtttttgactatttttttaaaccaactcgcacatgtggtttttcaaattt

SEQ ID NO: 388094 - DNA, 1613 bp, Cannabis indica
gaaaaataatcgaaattcttcgtttttcttctcactagaactcttatttccaacttaaacatcgaagaatcttctgttgaaaaatttactcagtactccgatcagtccaagccgagaagaatataaagaactcatagagaaagggagcataggatcatcacaactaattgcctattttagcaaagtatttaccatgcaaattttggaccaacaaaaaaatgtgcttcaaattgccatattgaaataattatagattgaagacaaattacaattattaaatgcaaccaattccaaccaagattttatttttatttcaaaagaagaaaaaaacatcatttggtacaatacttcaagtatggttatatgagttggaatttgcctaaatttagaggacacaattgagacagttcattagataccaaacaaacattggtgttgtatctttttgtttaatgattgagatagtttaccaaataataattatgatatacaattgcaaattgttataataataataataataattataaagtgatgaagaaaacaataaatataaaatttaatttgtgaactccaatgttgtgtttctcatataaatactaataccactttaattaattgatcctaaaatacagctcaaaatatgggaaaaaagtttaagagcgtttgcagaattaaaaattaaggttaaagtttaacatgcagttataaattaaaatattatattagtgtaaataaaaaaatcatgtgtatattgtataaacactatttaaatacaggaaatattagtcactatattaattatgaaattgtgtattaaaattaaaatctctgtaccaaaaaatttaaaattggtctcttgaaaagagttataggttaatttatttagtttttattttcaatctaaagttacattttaaagtattgtttgatttcaagatgtagaactttattgtagaaactcgtggtagctcgaacatcaatactgataggcgagatagttagggcttttgagtttttacttaggttgagattttaaattcccacgatctttgtgtttgttggcggaattatattttgaaactagaggattattcttatctttatttttttggtaaaattttcatatttatgccttatttttgtgaattattttgtttaaattttgttctcgctctcgatgaacaaaattgataagttagtcacaatatatatatttgtatattagatatattttgtctaatttatatattttgttgagagagagattgatcaattgagtttgtgttaaagattaaaatttgaatgtaaatgtatgtaattggttatgatttgtttaatcaatgtatataattggttatgatttgtttaatcaatatcacaatgtaaatgtaaattgatcttagcatgcaatatcactataaatatcccatctcctcatcaaaatcaaatcatacaatggatatatacaaacttaccaaaacacataaatccaaaaacaaaccaaacttttccaaatccatccatctcataaatttacataaacatatattcacttaaatataataatcctatgattttcattgttaatattattattattttattttatt

SEQ ID NO: 388095 - DNA, 1179 bp, Cannabis indica
ttaacgagttattccacctcaattgtaattataattatgtgcctgggttcgtatttttcccatcttgacacgtgtcttcctcttatgtgttagccgaattttgggtataacacatttattacttagaattatcaatatgatgaataaaataaaaatatagctctaagtttttttttggaacaagagaaaagaattttatttcaacaatcaccaaacaagtacaaaaataagggaactccccaacaaataaatcataagctgtcaatcatttggactatatcactttccctatcgttaaacttggaaaagttacagtaaaagactctagccttgagactatgtttgatcttcaagctaattactttggctaagtcacatttcccgtcaaaagtacagatatttatattacaccaaatgtaatagactgcagctgctatgacagctgatttggccaaatctagcagattggtttggttctctctcatccaaaacttccaatctttaaagtttctaggccaatcaataaggcccaacaagttgatagcttcacaaatgaccaccgcatacttggctcctcctcgcccagtgggtaattccccaattaggtcaatcccccatatagcaaatgggtagggcgagatcatcattcttagttctattggcggcacgcgaggtatatgtgaaaacctttgacacttatcacattttttgacaaactcatgagtgtccttattaatcgttggccagtaatatccttgtctaatgatctttttagattggctttgtcaacccgcataatccccacaaaagccttcatgaatttcgctgatgatttcgttcacttctgtagggagaaaacaccaaagtagaggtattgaataacctcttctatatagtttgccttcaattattgtgtagcgaggcaccgaatacaagagtttttgtgcctcatttttgtcagttagaagttgtctgtggagtagatagttgattatagggtcatccatgtaggggagctgtctatcatctctacatcttccgtttcacatatactaggctcgctcagcatctccaccggaactaagttccgttcatccaagtcgttctgcgaggccagttttgccaaggcatcaacgttggagttttgttttcttggaattcgctcgattttaaagtaat

SEQ ID NO: 388096 - DNA, 564 bp, Cannabis indica
ttttacatttttcatactcgaaaatatatccttctaatattttcacaatttttaataattaattaatctattagtaataaactagtttataaaaaaaatcacacatgtggcgtccctatagattagggcattacaaaggtggtaaaattccaatctttaagaacagtagaaacaagcaggattttttctttcacccttttcaaattcaaaattgttaggatttatgcctaaaaggaagtatttaatggataatatattagagaatatatgaaatataaaatattataaataaatatattaattatagaaatataattaataaatattagaaaatttctactcataaagagagtgtatgaccttgtaaggaaatgcaagagaattaaggcatactttatgaatagaataagtcggtagtatattaaagtatgtaatatttaatacgaattatcaagtatggtttattaaacgctatactttagcggcatgtgattttattcgaatcacgaatagacattttgttagaaataatagatagattataatggaagaataaaataagat

SEQ ID NO: 388097 - DNA, 2198 bp, Cannabis indica
taatttttctacggcctgagccatacaactttaatgctcatattcttatggtaacaaatactaaaagatagtgagttagaaataacttggcaggatccaaacacccatacagagttctcagagttaactaggcgtagggctagggacccctcccaagttgactactatgacttaggactactcaactcttatatattttctttcttgaaacatgtcaaacatttatgtccacatcactagggtaagtttccgagttaacatccccccccccccaagtcaactttatacttgtgtggggttgacttaatgacgtgaactgagcccatttatctcgaaactacccggtgagtatcaattttgacaatattaagtagttctctttgttctttaagaattcttaagaggattaggattttgaactcctttgctcttgtgttcgggaatttttgaaaaatttttagtaaaggaaaagaggaaaaaacttatcatttttcactttgttgacgctgaaaagtggccaatactagctctctagattgcagagataaacaatgaatataagtatataatttagagagacatgtaaaatttataatagttcactctccatgtcgtgatggtaatggagctacgtctattttgagtttttatttctcacgagaaggtaattacagaaaaggctaagtgttaaagctctggtttctagagagataaactagagagagatgctttgaccttgtgggtaattttttgaatatgaaaaataagatatgggatctatccttttataggtgaaagaggccaaagagtaacccttagagtcacttggccaacatcagttataaatgtcactcgacctcgtggtgaccaaagtcactcggccaaagagtgaataaacgtcactcagcctcgtggtgaccaaagtcactcggccaaatagtgaacaaatgacatctgacctcgaggtgatcgaatttactcggccaaagagtgaacaaatgacactcgacctcgcactgaccaaagtcacttgaccaaagagtgaacaaatgtcactcggtcttgcggtgaccaaagtcactcggccaaagagtgaacaaatgtcacttggcctcgcggtgactagagtcacttagccaaagagtaaaaaaatgttagtcggcctcacggtgaccagagtcactcggccgaagagtaaacaaatgttagtcagcctcacagtgaccagagtcactcggccgaagagtaaacaaatatcactcgacctcacggtgaccagagtcactcgaccaaagagtaaaaaaatatcacccgatcttgtggtaatcaaagtcactcggtcaaagaatgaaaaaatgccactcagcctcaagagcgacttaaagtcactcggttgcatggtgacttaggtcactaggcaacaaaaaaagagagaaaagaaaaaaagggttagacaaggttcgaacatgagacctcttagacaaggtgggaagaatttaccactactccaaggtgctgattgtgaagtgaaattcatgcaagggagaccctctatatataatgggcatattcttgaaaaacgtggagaaaagaaggctcgcacttaaactgagcaagaccccaattcactcagccaataagaacacttaaaagaattattgtagactagagggcaagtgttaactctaaaaattagcaaagctaacttttgagttttgttaacggttaacccgttgttaactctaagaattgtcgtttacaattccaagagacttttccaagcattttggagatcggactcacgatcgcgcacaatcgaagtgttgtataagtggggaaagcataaagggtaagacatcattctatgaagattttaaaagttccatcatgtatatgtggttgtttgaggatttttttatggaggctggcaggtacgagtagagttagtaagatcaacttactaagtggaaattgttggatgattttcataattatgcatttaaaattaattagatcttgtcataaacataaaatccatagatcattttttcatctttgcagcgcattttgaatcgtctgattcttacatatatcgagagagttatgactaaaatactaagaccgctgaaatgtgatattggggtttccccacttgtatgactgttgctgagcattttttgggtatcaaacggatctcc

SEQ ID NO: 388098 - DNA, 522 bp, Cannabis indica
atgagtttccctctctctatcatcttttgccagcattgagcagtaaaactcacatgaaaccaaccccataaaacacagttgagcattattttagtaatactccatgattttatttgactactatatatatgttgtgtttaatgtaattataaaaaagctataaatatactaaataaaactaaaattttaagtttggctagagattgtcaaagctactgaaagggtggggaaataatttgtccatgtgatctcctttttttcttgaaaaaaaaatattaagttttttttttttatttttttttatttttttatatttatactaatacttggaataaacaccatttttgtaactcatttttttttataacatcatttgttgtggaagaaaataataatgaacaaatttcaattacaaaaagaagtgtaaattacaatttcatattataatatctttctcaatttagtttgaaaatatatattaaaatattttttaagtttttttttatagtggtatttattata

SEQ ID NO: 388099 - DNA, 1736 bp, Cannabis indica
ttcgtcaacctgggctgattccaaacaatttcctaaaaaagtgtgctgggcattttttccctcatcaaaaataacaaacgtacaagtaaactcggggagaaaacaagaattccaaaggggcgaaaagctaagcccaggcccttggttgaccttttgctgggctgagcgcccaatttgacaatcaacctggtgcggtggcttcgatcattcaaatgcaaattctgctccaagcattctcttcggcatggtcaaaaacagggtgggagacctcgtccttaattcaagaaccttagaagaatcaaaatgacatctcaacagcaaaagaaaaaacacctaacgctcaagttgacgaatgacctcgtgcactgagttctgcttatctgattcagattctatctcgagtgttcatctagtttttcatagtaaatgagagctatgaactcatacaagtaaaattcacaacttcatattttttcagttttttggcgaagtgacttagttggaaatggggtagttatgagtctcttgattctgcgagacaaccagaacaaagaaatgatgtcaaaatatcacttacgcataaaaaatacatcctcgacatgatttcccgctcacccaacatccaggttggcgtcatatggcaaccttggcgcttgatgtcaaattaggcgctaggatgtcaacctaggctctaatatcagagaagcctacagtaaaacgactataattcactcattattgatctgattgacgtgattcatctttcgttttgaagttatttcaatactctatcaagttatgtctcacacttcaatcacaattctaacgttatcaactcaaaattttgtcctcaaaagagttacgtatttaagctacaacttattgaaaacaggtcctgtagaagggactcaagctccaaaaattgacaaccgacctccggggtcaatttcaccgttataccatcatcaatggtcaaaaatagtctaaatgtatttttccatattttttaaaaaattttattattattttaataggacttccttccctatagaagaagagttcctctagcttatttttcacattcaaaaaagtacccataaggttagagcatcttctctctagaaattagagctttcagacttaatcaattttcttgtaattctcgtgagaaataagagctcgaagtagacatatctccattaccatcgcaacatggggagggaactactataaattttgtgtgcctctctaaaatatttacttacattcattattcatctttccaatctagcgagctagtgctggccacttttgaacgtcaatattttggtgctttcattgagagccacaacctgagttctcgattacagcaggatttctctgctaggaactttgtttcaaaaggaatttataagttcaagcaagcaatcatccatgacaatgcaaagcaacactaccactcctggtagccgtggcactacttagcgagcagtaggcattgagattccccataaggaagcaaactcttagcaaacttccaaaaggaataagactcagaaatatcgatctatgggttctccctctaatgtggagtggtcacctattagggaaacgagctataagcaagcattggaaaggacttggacttgagacaacagacctacaggtccaccacacgtagctaataggatcaattgcaacttttctcgaagaaattcgtgttgggttttatgccc

SEQ ID NO: 388100 - DNA, 2283 bp, Cannabis indica
gctgctatccgttttcatgaagttaacggtaatttctcgggtattaaaatttgtagaggggctcattctctatctcatcttctgtttgcagatgatagtatgttgttttctcctgtttctcctcgctcgagcgaatctcttaatgctatccttctcctctatcatcaagccacgggtcagttggttaatagagataaatcttccattcttttctctcctaatacttcccctgatgctaagcatagctttcgtacttctctgcatcttgcaggggaaggttttgttagtaagtacctgggtgttcctcattgtgtgggcagagttaccaattcagtttttcactatcttctccaaaatgtttcctcccgtattaacacttggaatgataagcttttttccagagttggtaaagaaactcttatcaaggctgttgtccaagccagtccctcattcgctatgtcatgttttaaaatcccaaaatctatctgtctcaaaattcagagtcttatttccaaattttggtggggttcctcccagactaaaaagattcattggaaaagttggtctgccatctcagtctctaagttttttggagggttgggttttaaaactctctattttcacaaccaagctcttctagccaagcaagcctggagaatttggactgatcctgattcccttcttcattctattcttaaagcccgttattttaaaaactctgatttcttgcatgctcctaacgttacaatttttccttcacttggaaaagtattctttgggggggtcaactgctccaaaaaggttttgtttggaagataggtgctggtaataatgttcatctgtctgcttctaattggattcctggtgtttctcaacccactcttctgcaccccattgacccttctaatgcttttgtttcttttttcatcaaccctgatattacttggaatgtttctaaacttaaacacttttttccctcctatcaggtggatcatatcctccaaattcctttggatccaactttggttgactctcttatttggggttctcatccttctggccttattactgtcaaatctgcctatcatatagcctcctctgctgccatttctgctttctcttcctcatccaacccaaacccttttcaacagtggtggaaaactctttggacacttcctattcccgcaaaaatcaagcatttcacttggaaagctttccaccatattttgccttgtgccctaaatctgtttcataaaaaaataatccctacaccttcttgctctgtttgtggtaataacattgaatcggtcactcatgcccttgtggaatgttccagagcaaagcagatttggaagctttcaagattttaaattttttaccatgactatcgaagaactgacattcaggaattctatcttcaagcaatgcaaaccattccaaaacaggattttcctctttttgttggtataatttggcacatttggaacacaagaaactctttactatttaagggatcatttgctactaacaatgtacaagagtttgtctttaattatttacaagaataccatgatgctcaaaaaatcaatcttgagggtctatcagttccagtcgctcaacagcttagtcaccacccccaatcatgctcagttgagggttttcatgaggattcctcagccctatttgtggatgctgctttagaccataacaaatgcttaacggggattggtttcactttcaagattggtcctcatcgaattattacttcgcaaaaccgcctattgcctggtgcatccactcctatttttgcagagggccaggctctgtcgcaaggtatctcttggtgtattgcttctcagttgaagcctaatttcatcttctcagactatcagaatttagtttccaaggttaacggtgtttggaaagaccattctgcactttctggtcttgtttctcagattaggctcctcttctctaacttccctatgcttccttgttgcacttacctcgccaatacaacaccacggcccattcgcttgctaaggaggcgctcaggttgcgtgaagaagcccacggagaatttttctaattccttttgtagctgcttgtgctttgttgtgttttctctctgcagcttgttttctctcaaaaaaaaaaaaaaaaaatcatcaattgagtatgctctttaggtctttataattaaataaagtaaaatttgtgtttctgtccacgtatttagtgtatagtgttttataattaaatattaacatgtagtcaacataa

SEQ ID NO: 388101 - DNA, 637 bp, Cannabis indica
ggaaggcatcacgctaagaaaaaaggaaataacagagaccctcaaaacaaacttagtgactaaacaattatttgtatttgtgatgaaattgcaagcactagtactacttatttagcaaggttgtaataaaatgtgagtaagaataagtgtgaatcccatgattgtaaaccgggtggcttttcagccagatttgtatatgaaaactattgcaataagcaagtgtccttaatctaattccaaccaaatcttctttgctttcctactgaattaagttaaacaacaacttattaccattgatataaataaggcacgtgatcagtattttatatatagctaattccccgacatcatgtttcttttcctcttttgcaaatgaagatgaatttgaatgcaaacaataattgctggagtcgttcctagtaattatattaagtatagatcatcaaacaaattttttaaatctgttaatacttgtaggaataaaaaaagaaaaaagaaaattgggatgatcctacactgagactgagactgtatgtagtaagtactctactcataaaagaatgttagacatttatatgtataaactgaaatatatgtgtgtatataaaatacgaaataaataaatatatacactata

SEQ ID NO: 388102 - DNA, 526 bp, Cannabis indica
attatacttggcagcacagcttttaacattgttatatgaaaataaatttagtgataaaagcttaagtattccacggggtcacatgtttatataggagtttgcgttgtcgggttgattatcactaaagaaatacattaatcatcgaaattttcacttagttttaataatattctctcatcgagaagaaaaggtaactaaacaaacttagctaaattaacttgggatcacaacaaatacaataatctaaatgacatcaacatatgtaatatgtaagtatatcgtttcctatgtgggtcattgtttaatttcaataaaaaaaatatcacgattggacattaataatatttaatatcttttataggtgacgccctatgatacaattgattagcaatatttcttaaaaattattttcttaagttatataggatctgacacttaattacatcaatagcattataatatcgaaaaaatattaggcaccaataatgtgttttagcatttctcataaaaaaacaaaattcataag

SEQ ID NO: 388103 - DNA, 1034 bp, Cannabis indica
tccccaacacaatctttaaacttagaatgactataatgttctctcttcccaatcctctctcctttttctaggatgtcattaaaatcccctagaacaatccatggttcctatctctttaactctattagatccttccataatacattcctcccctcctcatgattaaaaccatagacaaaagaaacatagaaaaaattcctcttgtctattgaagtaacccgaagatgaaccagttggctagagcaaaaaaaaaatatctacattgtaactcccaggattccatgagtattaaatgttgactttactttatggagatatttttgtaaataaaatgtcaatttatattttctatgtaataattcctaagaaattaatgagaatcaatcaattattatttattggtagaataaataataaatcttatttgtggcaaaattgagaaattaattttggaccttaaaatatggcccacatgtgtaggcatattctacacgtgtagggtgacatataaaggcccatgattaatttggtttaattatttattgtgtaaaataattttaattgaattaagttaattatctttttttttggtaaattagtgtaatttattactctaaatatctcttttacatcctaatagcgcatcttcaaaatgaagacctatatatattttccatctatatatacaataattcttttatataatatatattgaattaagtgaattatcttttaattattaattaaatatattatttgataattgtttaattaaaaggataattattaaaataaaagatctattaattttttgatatttgttattagatatttatatttgaatttaaattttgaatttaaatcaaattagatattaatcttttattttaaataaatgattaaagactttatttataacactatatatagagatatatagtatcataaacaacaacagtttaacaagtcaaaaatagagaaataaatagagaaattattattgtttttctcaaccatattctctctctctctct

SEQ ID NO: 388104 - DNA, 1192 bp, Cannabis indica
attaactgtcatttcatcaacttcacttcacgcaccttctcggtaataattatctccacggattagtaaagcgataccacatgttgcttcattttgaaaaaggaaagttgtcagccactaacacaactattttggaatgcctaaaggtgttacctttagcctccatctatccatccacatagtatggtgcaaacatccacaaccctcagagttccgaaggcttagggggtaaacgttatccatgtttccaaataaggacacgtaaaagttctataatgaatacaacttaaatattccaggccgaaataaaacaactaggctggatccgtaaatgaccagtcttttcgggtgaataacgagtgacccgtccaggcaggatcccatgcaacatgatgtaaatctagaagacattaaaccatctatctagaggaagtaattagcaaatatctagctacacacagaagtttcccatttattaccagaactcacaagatcaggaattgcctcccagagatcttgaacataagatcatatttcgctaagtatgaaaagatagtaattggcaaacaagaatttaatgtgtatttattctccatgaacataggatacaattttgacaactattatcgtgatgtggcatccacatgagcatacacaaggcacttcatgggttgggctttaccagataagcccaaagttaacatatatttttgtaaatatcccatcaatggaaaaaagggtaatgattatgatatctcaatactataaatatacaaagaaccctacatgaaaagggttagaatttcattactcacttgctcatgcaaaaagagagagttcatctgttcttgtaaatcctaaggcttttctagccttacaataataatatttacttgtggactagggctcgttaacgccctaactatgtaaaaatcctacttattattgtcctctttctctttgaattattattctttagttcttataaatataaataatcattttcttaaaatctcggtaagcagcaagtttctctaattgccgaaacatgttggctagagccttctcccccaaatacttccattctgagcatgggagttgaatccaaataggagttgatctcacattctcctttttgaaattcatagaagcatcccaagccttcataatgataggcttcttgtaaaaaaaa

SEQ ID NO: 388105 - DNA, 577 bp, Cannabis indica
cttgaggtgtgtaatattggaaaattcttttttgctttatttaatcaagttccttggtattggaacatgtatttcaatcttataagctatttcggtcttttctcattcagtcatttgctgcaaccgctaactggtttgtatgctctttaccgatcaaattgtgtcggattgatgtagatgtgtgatcactggcaatggaggaactccgtatgcatatctaggacggccatggggacctttcggaagagttgtttttgcctatacatatatggatggatgtatcaaacatgtcgggtggcataactggaataaagtagagaatgaaagaagtgcttgcttttacgagtacaggtatactctcaatctccatctgctatcttctgatgaaacttttgatgagatctaagagttgatttctaaaaaggagagcaaaacacaatttcatttgcatcatatcaatcatttttttctcttttaacatgtttttatctgaaattacttgtttgttatgaaattctagcccaatcctagacactctaagatcttttttcaaacttgctcccatttcgagtcaaga

SEQ ID NO: 388106 - DNA, 1029 bp, Cannabis indica
atatttcaaattcagggtttttgtcaaatggttaataatagtacaatttgggtcaatgattaaatggatgaaatatgggagaaacagtagcacaccagtgtttgggcttgaagttattgagctatcattaatggactcaagcccatgaattacactaaagaagactagaagagtttatggctacaaacaagagggtacctaatatggattgtcttgaatttttcaaagcaacatttgatattaggcatcaatagtgctataccaataaatatgaagaccctttaatcttagtttcaagtccaaattatgtacattgtgatttatggggttattattattaatgcatgcagctaagggacttagatatggaaaaaagagaccctcgaacagttgtggcagtcatactaggaggaggagccggtactcggcttttccccctcacaaagcgccgtgccaagcctgcggtaagtcttgtactgtttttccttaattatggtttcattatatcccaaggtattgaaattcactactaatattattattgcaggttcccattggaggatcatacagactgatcgatgtcccaatgagcaactgcattaacagtggaatcagcaaagtttatatccttactcagttcaattcagcttcactcaacaggcatctcacccgagcttacaactttggcaatggaagctttggagatggttttgttgaggtacacaattattcagatcatataccatcatgtattttggaaagcttcactaactatacatctttgttatatggtcaggctctagcggcgactcaaactccaggagaggcgggtaagaagtggttccaaggtactgcagatgcagtaaggcagtttcattggctgtttgaggtattcaagctcagaacttttaggacttgactagctcagaagccttctgaattcgctaacatattcgactctgtttgctttaggatgctagaagtaaagatattgaggatgttctaattctatctggagatcatctatac

SEQ ID NO: 388107 - DNA, 883 bp, Cannabis indica
ctaggtgaatatacaacttaatataagaagatgatggcctatcggagctattaagacagctcaaaggctatactaaaaggcaagcccccaaaggcgacacaacaaccaacgcactcgctcaactagccaactgtgccttgacaaccaacgtaaacttggtacttgctcagttcctcaaagaactaagtccatctgtttcaaaaggaacagacatgctagacaatcaacatggacacgcctacagctacatacctccaaacaaaaaccttaccaaaaagcagggattaggggatggctgcaaggtgtccaatcctgcacagcatagcacacaaaagtggtatcccaacaccaccaaggagcatttccaagaaagaagttgtatagctattgacaaaagtgcacaaaagctctatggtaattatgctgagggcaaggccgattgagtgtagaagagatcaagcaacaacattgacctagccttaagaaggatgtgcaaccatgactttagcaggcagaccgaccatagaatcatcaattcggtcgaccactacctccacaagatggttgaccataaaatcaatgatttggtcagccatagcctcttccaaatggccaagcgatgctccaatgtggctggccacttggtcttgccctggccagcctgatccaccagcagtatgctctcatacttctgtctacagtgaccaagaggtacacaacatctttctagtaggatcctttgtctaaaggaaaagaagaggagactaagccaactcaaggcagcatggttttgcacaaggagttaccaggcccttaaacaatcagattggggaaagaaattctttgtaagagactactgttggaatttattttaccaggatct

SEQ ID NO: 388108 - DNA, 918 bp, Cannabis indica
attggtaatataagtccttatgattgtctttttggtgctaaaccagattacactattttaaagtcttttgagtgcagctgctttcctcacttaagaccatataatactcacaagcttgaattgaggtctcaggagtgcatctttttgggttattcatctcatcacaaagggtatttatgtgaacacccatctggcagggtatatatctcacgaaatgtcaccttcaatgaaggccatttcccagctttatcccactcaccaaaggcaacatccaatcaggtatgtcctttgactccacatcctacttttacttttcaaacaactaatattggttcatatgctaataatggtattgtttcctctctctcatctcatcaacacacggcaaatgagggaaatgacaacaccataccacaaggaccaactattaccactattccacctgcccctcccatacaccttaccccacggcctataacacctactgtcccacaaaatgccaacctagacactactcccaatgttatacttttatcccatacatctatcaatccattaaataattccataaacccggcccctttagtcctcatttcctgcacacagtacccttaacccaattcaacactcctctccaacagctagtactgttccattgcaggaaacataacacacatcagccccattacccaacatgcctcatattgtccatactgatacccctctcactgagaccacaactttaaggactcaccctatgcaaacaagatctctaagtggcataagaaaacccaaagctttcaatgctaccaaataccctctacccgagtccctcattccatctgagccaaagaacactacagctgctatcaacaatccaaagtggtttaaagctatgaatcaagagtttgatgctct

SEQ ID NO: 388109 - DNA, 633 bp, Cannabis indica
tccagcttgaaggacttagcaggatccatcaataaaaacttgaaagccagagacaaagtcacaaaagacgaattatagaagaaacatagatacttatcagtatacttagattttgatatggaaaagatagtgaattaattttgtaaccagtaaatactatgggttacttgctgagttaatattgcaaaagttttagttatgtatagcaacattacattgtgttctctctctctctctctctctctctctctctctaagtaacaatttgagtcagtaatgacacagattttcaaatcccatgtactccttgttgtgaattttttcaattgtgtttgatatgccaaccccacctgctcaaaacccaagtgaaaacctttgttattttggaaaaagaagatatatatatataaggtaatatatgtaagatttaaaaaaaaaatacctagtgttattgcactaatgaagatcattgaagacaaaatgaagataatcaatgatgctcttcctattatactgatgacctttcctaccacatgttgcccaactagagcagaaactgtagccacagctgcaaagtagagagctgcaaagaccaagtttaaaaattcatacaaactcattaatggtaacaca

SEQ ID NO: 388110 - DNA, 554 bp, Cannabis indica
cattgtatatccactttacttaacctattttaatctttacctttatttttaattggatagatccaatccaatttaataaatattggatgaatctagttgaaaaaatatttgatctattaaataaatctgaaccaatccattagatatacatgatatgcatctaatggatacaacaaattcaatctaatattccattggattgaatcagttttaagtgattgaaattaattagatcggattgattggaaaaattcaacatttaatgtatcatttgaccaaatttggataagattaaaaatattaaatgtagtctaataaattcaaagctcctaatcaagagctataagcctgaaacttgaatttcaaatattctaattagacttaggatgcgtttgcaagaagttgctaagtaatttcaattgagtgttatttaaaataattacaaaattttgtgtgtttgttaattaagtaattacatagtaaccatatacagtagaacctctattcaagaatacacttgggaccaagaaaataatattctaattgagaggtta

SEQ ID NO: 388111 - DNA, 1730 bp, Cannabis indica
taccagatgttgcaccagctgcctaggttatgattatgcttttttaagcattttgttagatttgattgcattaaattagtttttcattgctaataaatgaagtttgctattgcaggaattaagtggattatctagtgattcagaggttgtgattgttggtgtaaatgaaggtttagaggagacaccaagaagtaaaagactcggagagaggaggatgcatgattcaattgcacctaatcagatgcaatcccaatcccaacctgaatatgagcatcaaatcccaaccgaatgtgaaccagacattatatcccaacctacatatgagtttccagaagttgaattttcagaacatgattcagaaccccaaattgagactgaagttgaaccccaaattgagactgaagctgaaccccaaattgagccagaagcagcaccccaaattctctatgaagcaacaccccaaactgaacatgtagcagcagcccaaactggacctgtagtagaagcagcacaaccaactgaccacctggctagaattaatttatatgcattttaaagattttaatccattaaataagtaaaacacacacaacttaatttgataccatgttatctttgatttacaggagaccccagaagcaaaagacacaaactgaggaggatgaggagacaacatactgcaacccaaacaacaccccaaccagcaccccacactacacagcaaacaaaccctgaaacagaactccaaacaacagcccaactaacaccccatactaaacagcaaacagaccctgaaacagaaccccaaactgcaccccacactgcaagccaaaccggccacacagtaccccaaactgcagaccaaatagcccagacagtaccccaactagcaccccaaaaagcaccacaatctgaagctaagtttgaaatgcatgaggaggagtataatggtggaccagatgtggagttgaataagaatgtgcaacctgagaattgttcttgatggggaagtcacaccgagttagtgcatgataatgctgatgaaagtgatattggtgatgaagttgaaatgggaagtgtgcatagtgatgaagagaatgaagcagcaaccccttataaaattccatttaaccctgagacaaacacagaggatatggaattcaaatgttacacggaatttgcaacaattgacttgcttagaaagactgttagggaacacttcattcacaacaacaaggagtacatactgttggctaatgacaggcagaaattcagggtgaaatgtaaggcagtaggatgcccttggatgttgtatgcacatgtcaaacaagatgggacaacattcagggtgaacaaagttaagcaaacacatgagaattgtgggattgtcctagaaaacaagcacattaatgcacagtggctggcagctcacttcaaagaccggttagaaatacatccaaacatgcattacgaagcatttctggacatcacaaaggacacaaaatactcaaagtgcagttattggcagttttacaaagctaaagaccaagtcagaaaggaagtggaaggctcagtcatagagcaatatgctatgctggaggactgttgggttttatgccctaaataaaactccatttcaatgtaatccattttattcaacattaatacagaaacagaagtatttttcatttatttgtgtatgttttagttcatcttatcaattgcttgtc

SEQ ID NO: 388112 - DNA, 806 bp, Cannabis indica
tttactgcttcgggaagtgtttgcactgaagtggtagattgtgtgccgagttctgtgccgaattttgtgaatatggagctttgtcaaccaattgaggatgaagaggttagtaaaatacacattacttttacatactaactttttttttattgaatcaaatagttgtattgctcataaaactgttttgtacaaacaaaataacatcctcataaaaggacctatagaaaccgtatattatgcatacaattatttacatttgtactattcactatatcttatagtttggaaaaccaatcttgatccttcctcttgatctctttcggccaaagcactaatacacgggtcttgaatatctcttttgtttgctgcataatctgttttatgttcaccatcttcatgttccatatatggtcatttcttgctttccaaatgttatatatcaaagatgctatggcagatgaaattacctttttcctaaacttggacagcttggctcttcctatctaccgcaccagctacttcattgaattagcttgtgcaccccattacagctattgttttacttccaataggcattgtgctgacaccgagcattcaaaaaacaagtgctcgacattttcttgttgcagattacacattatacatctatcttcctgcactatgttatgagctttcaaccttgcttttgttctcaaccagttttgcattgctagctagaaaatgtagcaatgcttgcgaacattgagccttccccaaacctctctatcccaggtgactttctgctgtacagggcaaagtaacttata

SEQ ID NO: 388113 - DNA, 1745 bp, Cannabis indica
tatagtgctagggttcttgcccattgatggggtaaataaaaataatttaaagacattagggccgatttggtgaggcccagcccgtgaggctttgatcttctgttgatgtaaatgccatataacgttagtaattgtcaaaacatgcgttatcttagtggcaaataaaggcacataaatgcttgattgacaaaaactttttttccttattcggaagatacgaatcttggacatgatattgaaaataaagcccagatattgtgggattcggcaataaagttttgtgatacggagctggatattcggaggcctttatcatctttccagaagcactatcttgatgctatatggagccctactgtgctgaaggtttatctcgttcgagggttcttgccaactgatgggataaatacaaataatatatgacatttgggctgatttggtgaggcccagcctgtgaggctttgatcttctactgatgtaaatgtcatataacattagtaattgtcaaaacatgtgctatcttagtgaagaataaagatacataaatgcttgattgataattattttatttccttaattggaagatacgaatcttggacataatcttggaaataaagccaatgtattgtgggatttgaaaaataaagttctgtgatacaaagttggatatctagaggctcgtttattaccttttcgaaagcactattttgatgctatttggattcctactgtgctaaagtttttatctcgcctggagaaatcatctgtctgtcattcagaagatctgttgatatcatctagagatgtgttgtgctggaggtatagcttgtctaaatgaatcatctgtccaacatctggaaggctttgactttgctaatggatctagtctattatcttggttgggccttcatctgggcctacattagccgaacaaaaccatctagaaattacacatgtcttccttctagaaacacggataacatttacccccaagcttacccccaagctttcaaaactctgcttttcagaagcttgcattcttcctttcaagtagcatgaggacacacaaatgcttgaaatattgaaacccttttgaattccgatgcaaaaaatttgtggttgacaactttcatactttttgttcttttccagtttttatcatggcaaaagctaattaacatgaggaggttaaaatttggagcaagaagaggtcttgtacaaaagattttcttaagagaacttcaaagtggagaagcttgtcaccacaacaaaccttaggtgaattgttctgattgctgctcaccagagcataaaagcctatcacatcaaagatgttcatagcgattctatagaaattaaaaaattcattacaaagatattcgcttatgaggcaaagaaagccatcatgaaagacaatacactacaagaaatgtcacttttgccagcacatttttgtgctggcaaaagttggtattgcgctggtaaaatagaatttacttgtgatgtgttggcaaaaaggggttggcaaatcaatgttggtattagaacttttgccagcataaaatgaaaagccctagtcaaaaatgacttttctcagcgcgtaaatacgctcgtaaaagttaaattttagccactgtaaatgtacgctggaaaaactttgacctatttgccagcgcagtttgcgaaatgcgctggtaaaagtaacttttaccagtcacagtagcgaactgtgctgataaaagtaa

SEQ ID NO: 388114 - DNA, 1412 bp, Cannabis indica
tagtgacttatagcaatgctctttcttttcttgatgaagagataatactgttaaaaataatgggtgtgaatatctttgtgaggatttttgatcagaaggaaagaaacctttcaatttgtcaaaaaataagggaaaaaccctttttaccctctattttctttcttctttttttccaagggtttcgaaaatggcaatttagattgttatatgaatatgtgctatttaaggcatagttttggaatgaatgtgcaattcatctcccacagccacacgaatcaattaattaagcagactgagcagtagtacagtgtcacagtgtattgccaatgggcaatgacttatataaatatatatatctaagtatattgcatgttttgttcgcaagtttcaataactgttggaccctacttatgctacatgctactacttttagctgcgtatatgaacacatatatatgctcctaatattgtcttctagttcttcttcttttcaaatatataacaatagtactactgcaatattaattgtagcttcaatgagaaatagcaatactaaaaaaacattaattgtaataatattaaagattaattagtgagtactaggtttaaagagaaaaagcatagtgaattaatctttataatatatatgtttgtttgggactatgtgactttctaattggttggaaacattatcgagtataactaatttttataagctgcgttcactaattgaaaaaattgttatgtgagttagtacaactctttacattggctagtatttttattaataatttattttgggagaaattataaataaaataccttaaaagagtgagttggactggtagacctcatacttatttttgacattgttatcctaatttttgcactctaacgtggcatcacacgatggtgacacatggaattaactctatgtatctattcgcaagaaatatgccgaacatggcaccacatatattcgctcagacgaagccctctcagccgagcagcgagcaatccgcgcagtatgccaacatttatcaatttctgatcagatcacagagatatggcaagttgttcaaatcccttgattagtgtattttgttttatatcaattgtaatcagaagggaaatacttccctcccaagcttatagccctataaatagtgattcatactcactgggcaagaggtcgaaaaaacttatctaagaattcatcttcagagatactattgtaagagctctaagaaaggggatcattttccttgttcttaagtcaatacaagctaagagaattaggccattaccgaactattctggaccgaacctctataaaattctcgtgtctttatttgatttattatattacatacatattatactacttatcgcttacaaattagactcactgt

SEQ ID NO: 388115 - DNA, 1039 bp, Cannabis indica
aataatattgtctaggcacatgatatctcctcatcagcccaacccctttttcttctgaaacaccaaaccctaacccattttcttctttttcattattcaggcatggtcatatctcctaaaaaaaccttgctgcactcaccacaagactcagagactccccaaaaccccaagttcctcatctcttgtcatgtcctgaaaccccatgagtttgtcgaaatggccatttaagccttaatggcaaaaaacggaggaggagctttaatggcagaagtgtagtggtatctggtttgatggccatcgactatggctatgaaggatcgatggtggcagttgaccggagaggctctgcaaagtggaaggagtatgggggttggtgacggctagggttttacagaatgagacccaacctttagaaggaagaagagaataagaaaaaggaaaaaaataagaaaaaagttaaagaagaaaggaaaataaaaaaataattatttgttaatttttttttaaatttattttttttagtattcaaattattaatattatataaaccaataaaatttaccacgtgtacatttctttacaacgtggaaaattcatttgatacttaacagcaaaaaactaataaagtagtagagaccaaaacgattctgtagattaaggagtttgacactttttttttttttagatgttgaggtgtgcaaccaaaattttacattggatagaaattggaaagattatagtatggacaatatttttattggtactagacattttgaaaatgtaaccaaaaataaattcttgagaaaggaggcgtttggttgggaggaatgaaaatataaaaataggaatgagaatgggaataggaataggaataggaatggaataaaatttaaaatgcataaaaaaattgataaaaaaataattaatttttttttcctaattacattggaatggtcattccttccttttaaaatggaatagccattcccccaaaatggtggaaagagcattccattagaatgccattccaatactttaa

SEQ ID NO: 388116 - DNA, 653 bp, Cannabis indica
caaaagagtatctattgttgtcttgggagggattagcactttaccccgaagcttgaatggatagcttcttgggatccaaggatcttcatttattcgaatttgactaccatcacccacacaccatctcataccttgttgtaaaaggtctcggccccataagatgctgctccaaatcgaagatccataatgaccaagtttagcaaccaagaagctttcctttgggaagtatagagcttttaggattttggacagtaggcaatccggataagtgaggattttccaaccttgtttagccaagagagctttgttgaaatcttccatgtttcgaaaacccattcccccttgttcttttagtttgcaaagtttcttccaattaccccaatgtatcttatgtttatctttcgttgaaccccaccaaaatcgggcaattagactttcaatctcatggagaattcctttcgtaattcgaaaacaactcatgacatagcaaggtaaggcttggattaccgctttgataaggatttcttttccggcttgagaaaataaccccaccttccaaccttggagtttcgcttctattttatctcttgttttcccaaagacttgtcgtttgtttttcccacaaaggtaggcatacccaaatacttggtatg

SEQ ID NO: 388117 - DNA, 405 bp, Cannabis indica
attcttcttttttttttttatgattgttatttttaaaaaatcatcctagatcttataaaaagacataaacaaatcataaaactgtaatttatattttataaataaaaaaaacatagttatttcattttattttttgctggatttgtttctccaaatgaccattaacaatattattatttttttttaacagaattaaccaaaaatttgaaaaaaaaaattatatatttatttcaacacacaaaaattttcacttttaatctttaaatttttttatttacaaaaatattttttgttttatggtttaattgagttacatgatgttgattttttcgttatttttttactaattacttataaaaatgtatttttgatatttctttttaaaaataaatataataataaaaa

SEQ ID NO: 388118 - DNA, 1314 bp, Cannabis indica
caaaaatgagagagaaggagaatgggtgaagtaattaatttctaaatgattcttctaaaagaataaaccttcctttttttaaatattaatgttattttcagctaataacattcccacaaaaggacaaattccaataacaaaagacctatatacccctaatgtgataaaagtaaccatatgcattatgggcaaaattgtccaaccaatttctcgacaaaattctaacaccaccaacacccaaccatggtaccctgataataaaattctaaaacatataaaatacgactctctaaaggcccaacgtcgctttccacagctttcgaacacaaacacataaattaagtaatttacataaaatagcataataaacatatatgatactaaatatatttccagattatgcatttcataaagattaactaaatctcatgcataaaccctagttattcaatagtctaaaatattaatcttaggcggtctttacaaagaaggagaatgagccatctggtgaagtagaatttgatcctaaggagatgtttccctttgttcaagagattggcatgaacacagatactgaagattgcgaggaatatgttatgtggattgaaggtgctcgcttgttgaagaagaagtatgcgttttagtgttctgtccgtgttctttttttaagttattgaaatatattttttaattggttttctttattttggatttttttgttttaattactggaacaatgaaaaaatatctggtgatcttgagcctccatttgattttagcatttctcaaatcgatgacaaatcttggtttgtcatcttacagacttattgtaaagactgcttagctttaatttagaaattaacagataattatggtttaattatgaaacttgcagagtagtttggaattatttatttgcggagatttatttaaattcagaatgtattttatatgtcatacatgaaatttcataatttttcatgttttgtgccccacaacattggaatgcggtgtttggctattagaatcacatcttagtttttttcagtatggcggggcagtatagttagacattgggaatgtcaggaatagttgagattttagagttgacaaaaatacccctaggatattttatgattagttagtgagggaagggcaaaatggtcatttggcctattcgtgattttgtctttatgtgggttgaattatgtttattaaatctgattttgtatttatgttttggctgagatttaattaaataaaaaccttttcatttattcccatttttaaaaaataataaaaaattagaaaaag

SEQ ID NO: 388119 - DNA, 1607 bp, Cannabis indica
atggttggtattgtatgtgttattcatgattccgaaaagagaacacctggcatttccaatttcagtctaatggatcatggccggctcgaaagccctacgagatgatgggccaatgtcacaagcccatccgagatacaagatatctacacccagatttggttgtctacagattcgaaggggcacctcgccctcaactgaaaagaagtagaccttccaaatgagtatttgggtgttgaaaaatattttaccaagatcttagttactactcatgtatgttggattaattatattctaacatcctaatatggaatttcctaaaacaataaacaaacacacaaggggattagtagatcattacactgggtgcagcggaataaattgtcttcttccgttcaaatctctaaccattaatcctttctgtcatggccttgtagcaccaaaagggactggtacaaaagtaccaaggcccaagggaaggaaaaatcacactagtgattcaataaaccaagacggtgggacaggggggacagtacttcgacgatagttggttcacagtggatctcaaaaggcgtttgatgccaagtacgagaaagcaaaaagtgagaaggtgaggttgcatggtaataacctcaagaaacttgaacgacaaggtcagtggaagaaatctcccagatatctagtaacacaaataggctagaagaacaaattgttgcattgacgaaactggtccagaagcaaagtggggccctcgccgactccgaagataaggactcgaagccctgcgtaaggaggatcggggaagctccaccactgaagaacttttaaatgccccaaattgagctgtatgatgggctcactgatcttaagactcatttagccaagtacaacaagatgatgcaagtggcaaatgttagtgaggacgccaagtatttgtgcttctccctaacccttccaaatctactaaggattggtggaagagattggctcccggatcgatccactcctagaaagaattatagtctggcttccggaaacattttattgttgcccgggactatgatttagaaatgggccccatcaccaacaccaagcaacatgcaagagaaagcctgaagagtttcattcagcgaataatggaggtggaagccaacactaaagtgatcggtgacatgaaacgggtggccttacaatctagacttgcagttggttctctcttgtggggagaaatgcaaagaagaatggttgagacattatttgaattcatggctaaggcacaaggctttatcattttggaagacgcttatcagcaagcatttgaagtccctccagcaccggctcctgttgcttccactcttggatttacctccacagctcctgttcttaaacgcagtataccatgacagtctacgaaccatctgcatctgtacaagtacccacgcaaacctatttctctgggtatagagcggcacagaccagatgcagtctcgctcccagacaatcgaaagcaaaagttctaaagcaaatcgtgagacaatcccattataaaagaggaggaaagggtctaggatgaagtaaaaattccaaaaaagccaagaaagaatattagc

SEQ ID NO: 388120 - DNA, 3369 bp, Cannabis indica
gaaaggccaaagttgagcagccaagagtttgaaggtcatagcagtaatgtacatttcagccgcggtacggcccagtggacagggtgttccattttgattgtattttagaatataaagtttatgttgtaaaagaacttttaaaccgtaattaattatacttatctgtttgaaaaagaaggtttatatgtttattttaattagtcaaattttaatcaaccacactttaggtataattacataaattagtaaaaggaagctttgtaagcacacacacacacacgtggcatccctgttggacatgacattataacatggtatcagagtgccaaggtttaaagatcctgaagactggtttgatatgtacattggctgtgaagactcgatcaactcatggttcagtaagtttgaattatttgataagttgttgattacttgattgcctgtttatttgaatatgctagttgttagaaaagtttgagatgtttggaaatacttctcagtattatcaatacttggaatgtgaccgtaggtgtatagattatgcacccaaggcagattggtagaggtaaccgcgagcttactgggcttggggttggcggtaagggcgagaaccctccaccaccaccaaattgggaagaattatatgtcgcgattcatgagactatctgacagcagggtgaacaaattcgagatctaagggggcagcgagctcagcctattccaaaccctaatcttgatcctttggcacctctggtagtgccaccagatgcagggaatcgtctagagccattgtatgagcggtttcacaagcgaaacccgccagtgtttgagggaggagctaatccactcaaagaggagcaatggatgagcatgataacatctatttttgatttcatgcgggttaaggataatgattgggttagatgttctatttatatgctgcgagaagatgcacgtatatggtgggagataatatctcagggtcatgacctgggatgctttctgaacattgtgttacgagaagtattataatgagtctatccgagcagcaaaagcagaggagtttatacgattaactcagggcagtatgatagtaacagaatatgccactaagttcgatcgactcgcaaaatttgcttcagatgaagtggctactgaagctgctagaaaagcaaagtttatttgaggattggatgaacacattgcacgggatatgatacttgctaccaaacatcctggattcgttcggacttatgcacagatagttgaattggccctagctgctgagggtgcagaagatcagagacgaaagaaaaatattacgagaagagattcatggaaacaaagtgttggttctggtaggggtaatgaccttggtgatcatagaaaatggcctaatgaaccatcagctacaggcccaaacaagagattccaaggtaaccaaggtttctgtcgtggtggaaacaaaaactgacagacttttcctgaatgtccaaggtgcaagtggcgccaccagggcgagtgtcaggccagggcctattttcactgtggggtagtggatcacttgaaaaagaatttcccacagctgttgctacaagaacaaaagaaggatgatacacctgcacctgcttgggtgtttgccctgacacaggatgaggcttatgccgacccttccactatgacaggtcaactttctgttgttggtactttattaactgttatgattgattctggtgcgacacattcttatatttcaaatagaataattgagaagttgaataggcctagtgatgtactttctagaggcttcgaaactttactgcctactggagagctggttatctccagcaggtgggttcgatcccttccagtatttatggaaggaagggagttatcggttgatctgatagaactatatttggaatactttgatgtaagtttaggtatggattggcttgctaaatacaatgcaactattgattgtaagagaaagattgtaactttttagcctgaggacgaggacccctttgtatttgtgggtaagatgcagggatctcggattcccttaatcttagcgcttaaggcaagagatttgctatgtgaggggtgcatcggtttgttagcaagtgtagtagatactactaaggaaccaccagcgggaccggagcatgtctcactggtttgagaatttctagatgtttttccagagttactggggttaccactgaaacgtgaaattgattttgagattgatctaataccaggggcaaagcctgtatcaagatctcctttcaggatggaacttgcggagctaaaagagttaaaagtttaattacaggggatgttggatttaatatttataagaccaagtacctcaccttggggtgcactagttttgttcgtgaaaaagaaggacagaactttacaaatgtgcattgattaccgggagttaaacaagttgatagtaaagaacaaatatcctctgccaaggatagatgacctatttgatcagctgcagcgaaagaccgtcttctccaagattgatctttgatctggttatcaccagttgaggattcgagaagaggatattcccaaaatagcttttcagacccggtatggacactatgaatttctggtaatatcctttggattaacaaacgccccgatagcatttatggacttgatgaaccgagtgttcaaagatttcctagatgattttgttattatctttattgatgatattctaatttattcagatacagaagagacacacgaaagacatcttcagatggtgttacaatgcctcaaggagcttaagttatatgccaagttcaagaaatgcgaattctggttgcctcagtgagtttctagggcatgtggtaaataaagatggtattctagtggatctggtaaagattgaagcggtacgagactggcctcaacctaagtcagtaattgaggttagaagtttcctaggattagcagggtattatagaagatttgttgagggctttgcaaagatttctacgcctttaactgaattgacccgaaagaattgtaagtttgtttggactgacaagtgtgaaggtagtttccaggaattgaagcaaaggttgattaccgctcctgtgctaaccttaccaaaaggtgatgaaaagtttgtgatttattgtgatgcatccaaacaagggttaggttgtgttcttatgcagtcagggaaagtgattgcttatgcatccaggcaattgaaggagtatgaacaacgatatcctacccatgatattgaattagcagcggttgtctttgcactaaaagtttggcgtcactatctgtacggtgagaagtgtgaaatttatacagatcacaaaa

SEQ ID NO: 388121 - DNA, 914 bp, Cannabis indica
gctcttgcgatcagggaaaaaggttattttcaaactacagcaatgagtcgaatgacatctcaaaggtcaaatgcactaattctagaactcttgtttgagaattggtttcaaatgatattaagatagatagatcctttctttttgtaatttgtcataagatttttcattcccctaatatggtggctcacacttgaaatgtctatagtcaaaaattgtattatgaaacacaaaacaatgtttgttgaaacatgaaaattgggggtgttagttcggaccttagaatagcaggttggttttgtctcactcataaaggactcctataattggattagatggaattaatgaattcattcattggcttaagaagaattattatttctcttatgaatttctttcttattaatctcagtctcatgcatatcaagttggtatggattgtgaatcaattcttctcttgtgatgactagcaaagtttcaaaagtcttttcttttctatcctagtaagtgaaaatgtgacacttcttttaaaagaaagaactacctatttgacaaccaaaattccccatttcacaattacaccatgtttgatacaattgaaaggaaataggggagagagagagaaaatataggtaagaattaaaaagataacataaatgtttatttgctaaattgttttattgtaagattatacatacattgtcttaaaaaaatcaatctacctatatctatatataaactagagtcttttcaaggtggttattattatattagtgattgattaatttattcttgctattagttgtaattttttattttatcaaaatattaaaaatttgtaaaggctaattagtaattcccccgcgcgcgcgcgaagtttgacatatattaaatcatgtcccctgaatttttttttg

SEQ ID NO: 388122 - DNA, 646 bp, Cannabis indica
gttgaaccttcgtgggaagagttccagagagggacggccacaagtaatgcagcacctttggagggacactaatgtcccaagctatcttccacagtctcttctcatcagttgacaggtgcaatccatcttatttatgtaagaagttataggcatctttcactttgtacacaccagaagtattgaaagaccaataccaaaaatcagaaggagccgaagcgatagggagcttgcaaatcaaatcacgatcacgggtattaaataaatcattccaagtcccaacatctattattaacctccatcagactagcaacttgacaatcatctaacccccaccaactgagatgtacaaagggattgaatgcatcaggtaaccaaggttcccgctggatattaactgaagtactaggcccaatgttgcaacgaaccccggataagattagcttctgaggatcaaagatgcttttccaaataaaacttggattatgaccaagttcagcagtaaagaaagaacctcgaggaaaataccgagccttgtataagagactaacaagagaagactcattaacaatcaatcgccaagcttgcttacccaacatagagagattaaaatctcttaagtctcgaaagcccagaccaccaaaatgct

SEQ ID NO: 388123 - DNA, 2169 bp, Cannabis indica
attagtcttaattatctcttgattgaatcaggaactgctttttaacttgaccctttatttccttgggtcgtgatgcttttcggcccaccactcaaaaagttactcgtttagagttacccagagatggcttcttttcgcaaaaatagatctttcacaatttcacacatcctcttcagggtttggttctttcacaaggtcaagttccagaagtgatgtctatgactaccttagacttaagcatttttctctctttagtcgtcactggcctaatgttttagccaatcatgcaacctgatgggctaaaattttgtgaagtctacggagatgtgtaggaggaattcgggcgtattttttcttttttcaagaattttggtcgaatacgcatcttatctctggattcgtgcttgggtttagcctttgaaggaagaattcaagcgcacttctctcagggagacttagttgaaaatgtttcctatttttggttgcatgcgcgcactgaggctagtcaactttggacgtaaggagttgcaactatcagcaatcggatacacgtaaggagttgaattccccttgctcttaaatgttggatcatttagcccagtacacatggacacacattctctacacgatagcgcataatgggtgacaacctttgatatcatacatgaaaaagcctagtcactgggtccgtagcctgacacgagtgggctgaacctctgagagtcaaaggcgtaccctagctggtgcatccttgaagtgcatgtgcaaggtttgagaagatccatattcctcgcggtagcaaacagtcctggcttctagaatggaataaggctctatctcagggatacccttcgtatggccaatgaatcgggaagacttctttcacggagacctttcctgcgaggtcaatgccttcgtcctcctggagtgctaagaaaactcatttgggttgcttaacgactctttggccttctttgattaatatccatgtgtcgtgcttacgaaaatgcggataacaataggtaaccaaattttccctattagcatgagggcatctccattgaagccttgcaattgaatgggacaaggagttagatctgcttctgtaagccctatcacttgaaatgcaaacttaaacaggatgttaactgagcttccattgtccacaaggaccctagaaactcgcttgttggcgatctgcgcattaatcactaaaggatcaatatgggagaagcgcatttttttggcatcatcgtcggtaaaggtgatgggaaaattcatcatcctagtgcattgtgcgggagattgcaccagctcgcacacttccccatattctacctctctcaagtaccttttttgtgagtttcgagtgctaccagtgagatggggtccacctgagactatggccacgtccccgtccactggaggtggggcgagttcaggagggtatggggttccgattcccggcgcaagtaatgctaccccagcttgtactggtggagaagggactgtaggtgatgatgttctaagagcttgagaatgccctatcccctgtagagaatttacagtgttttactgtcgggaacgatcatgtgtccgtgaacaaccccctgtctgagataaatgatcagaattcgaacccattatcccaaatttccgtgaacattccagttctagaattaacacataaagagaaccaacattcaattcattaggaaagtcaagtttctataattttacatcatgttcctagccatccataatattagattcccaaaatagaaggtataagattcatcttctctgagaaaatttaacgaataaatcaaagaaactaataacatgaacaagagttcatgataactcaagctttaggctgatctactattgatcatcgttatgatatgaattaggaaattatgataaacaacatgttaataaaaacaactttattcatatcggtctttgtcatatataatctctattatatacaatgcctttacttagatgtctcactacattcgtaattcgaaccaagattacttgcacaaagaacggacataagtgatgttagaaatattttaccaggatctagatttactaccaagtatgtttgattaacatcctaatatgaattctaaaacaatgaaataaacatataagagttta

SEQ ID NO: 388124 - DNA, 761 bp, Cannabis indica
attttaacagtaacaaaattaatatgtgcatttttttactttaacctaaaaagataattaatcaaaactcacacatgactatagataaaaaggtcattaataattgaaaaagaagaagaaaaagacgatgttgattaagaacacttaaactcttttttcttcaaatagtacaaccacaaacccaaacatatataatataaacatataagtaaaatatacaaatttacaataagcatatctatatttcagtagttttatggtaataatttttcatataaaaaccaacttgatctacatcatgaagatttgggttgaacatgtggtgatgaaggagactgcaacagatcgagtttagaggcggcgataaatgtgagaaacaaatcataatagccttttgattcacttagcaaaagaaaaacaaaaaagcctttagattattaatttttttagtagaaaactctctctaaaatagttggcatataatgctttggttgttcaagtaacttgggaatagctagtatatctattctatataaagtgtgcctatataacagaatttttggtttttgagaaattcatggggtgaccttttatttatattaaaaataagatagtttattattaaaaataaaatggtttatgagaaattcatgggtcactttttatttatatatataataaaataaaaataaaatatattccattaaatccaacaaaaagaaatagggttctagattttctttaattaccgtatttctaac

SEQ ID NO: 388125 - DNA, 1879 bp, Cannabis indica
cccagcgagatgtcccagcacgagatgcttcgcagcgtatttaatccacgtacgcattggcccggtaaaaacagataaatcacaactgtgtgattttcatataataattgcatttattttacgtgggacataataaaatcccacaattttaggggattattattgtgggatatcaatctgattgtaattaactgccctcctatgtaactataaataggagtaggatacattgaaaaaaggatgaaaaatttattagagaaaaaaccttagttttgtatcagaaatctaataagatagactcgtggactaggcaaaattgtaactacaaaaccacgtaaaaaagctttgtgttctttctatttcttttattactattatttctgtgccaattcatcacaaaataggctttaatttggttaacgaaaatttgcgttagcagtacatttcatagaataaagtccagaaagtatcccaggtaatgttattcagatcataaccctatgtcacaatgtcccttcaaatgcggacatctctacgcaacatgtaaacgacacatctaacccaattattactcttaagccgcatgaaatcaaaaatcgatattatcatactcatctattactccgccttgagtggatctgcaccacccttgaacacagacaaactctgctttctgaatcgcttgtacaaaggctccagataatttccacatcctgtggcactaccagaagtgccagaggatcatgattgagacttgaagaaggttgagctcgctactccctcaattctcaaatttattcaccttacttccgaaaggcctcttgcatcgtggcatacctttcttcctaatttagtggtggtggaggattcacaccttcactgccaaccccaagcccggaaaacttgcaattacctttaccaaactacctcaggtgcatgacctaatacacctccagccctaactttccaccgtctagtacatctcaaattatgagcaatgctaataagcatttccatatatacacatactctttaacccttactgtgatttttcaataactagcataattcaaattagcggataattatcaaataatctaacaattagcacttacagaatcatgagtcaaatgagtcttcgcaatcaatgtacatatcaaactagtcttcaggatctttaaaccttggtcgctctgataccatgttgtaacgtcttgatccacagggacgccacgtatgtacttttacaaactaattcttagttaatctattagtttagaaaaagtgcagcttaattaaaaactttcagaataaactaaaacgtaacttttattaaaaagattactaagttttggggatcccctgctcaagaacctttacaatttagttcaaaattagattctcaaaataaggttacatctccataaaatagtcaaaagggtggatcctatcccctgaaaactgagacaacacggttgatatgtacattgctgggagacctctgactcatggccgatttacagtttctttcctccttacctgcaccatgaagcacttgtgagtcacaaagactcgcaagaaaagcgagtaaatacaaatacatattttacgcacaataaggaaatcatagaaactcacaattaacaacttcatcatcagaataaacaattatttattcattacataatcacataatcacataatattagtgcttcatgaagcactttaatcactcatcatcataatcacataacctcagtacttcataaagcacccttaccactcattagccacgagctgtgtatgtcactatcgttgcccaatatagcaaacgataagtaagaaacctatctgcggtttcaagagtaattactcataa

SEQ ID NO: 388126 - DNA, 951 bp, Cannabis indica
tttttaaattttaaaaattaaaatctacacaaaaatctaccaaactttcaaaatttaattccatgaaaaagaaatgacaaaattttgaaaaaaaataaaaatatggtgaaaatcggacagatgcattgcattctgtccacgcgcgctcatatgggacttggtcgagcgacaaggctgctagtagcctcatttcgggcgcacgaggctcgttcagacagcatccgtccaagaaaactcggacatgcttgtgaaaatgagttttgtctgagcttgatgctagggcatcattcattccgcgtgcgcatgaggggaaaccttaactaatttttttttttcaaaacttcaaaatatcatagttttttcatttttaattgaaattaagttctataaaaagataatttgcttaatttttaaccaactatccaaataaaataatatcaaatcgaaaattaaattgtttttcataaaaaaaaaattgtaatatcataatcaatcatcaaaatcacataaaccaacatatgaacacatacaaatcaaccaaatatcttatttcatgaaaataaattattaacattactctgaggccaattattagaaatattttactaggatctagatttgctaatatgtaggtttaattatagttctataatctaatatgctaaatatgaatttcctaaaataataaattaaacacataaagttattaaaaaaacttgcagaataatatgactccttccgttcagatctctaacccttggtcatttctgttgcagggtatgatcaagatatgaacttggtttctccttcaagtgacaagtgactatacaatcttccacactatcttgagcattgccttaaattgtgtgggctatcactcattcactatagggtttgaaatttttgagaagaaaaagaatagaatttgaaattagagatagctctgtttat

SEQ ID NO: 388127 - DNA, 616 bp, Cannabis indica
tcaccattttggttccaaaacttagagattgcagagagaagagagaaaatgtataaaactggtttataaattatgagacaagagtctcaaaattccttaacaatcatcttttaatgtaattaaatacaatattaatgttaggatagaaaatctcaaagtctcttattggaggactatgagattgtaaaaattatgaacctgcactataaaattttgattgcatatggaaaaataaataacatgtgtgttagaatagagttgagattttgcactccttcacaaaacactatttttttttgttctttggagatttcaaatgttattttgatatataaagaatgatattctgtagtaatgtttgttcaataaaacatacagataggtaatgtcattaaattgatgaatcaagtgattacttgactcacattgcaccccacccccgccccattacccattaagtcgggtaatccccatcctatttggagtgagtacccgtctccgggggtcaaatttatgtcactagtatgtatgtaatgaggtaaaaagaaaacactttgacaattaagataaagacagattgtaaggctaaatgtcaaaggagaaaggaaacaaaaac

SEQ ID NO: 388128 - DNA, 1138 bp, Cannabis indica
cgaatctgcaaaccaactttcttggagcagagaatactggcctggatatgggagacatttgaaggagtgacaataacgagtggttttggggttgtatcagaggtgaatctaagattttgtattgtcgaattcaggacagacatatacaattggtcgtgttgagtgtatatgaattttggatttgctggattgttaggaatatattccgagaagcatttaaggaagttttcttgaggattagctattgaaatttggatattgaatgagagaaagaaaaatattattttgcaaacaaaccaaaaggagaatgttgagcaattcatttttcttcagtcctaatgatattttgaattattatgaatagagaactatcctatttataatattatatattggagttggggcaaataaattgacttaaatattttataatttgatagtcattaaatagtcacatgtgataaaaaataaatcaactaaaattaggcacctttgttaggtgaagcccttattgaaaataaatgtacattgtacattgaatagtttggcatcaataaaaattggatattggaaacaaaaaacaagaaattggctatggtagctagtttgtgggatataggtgcctatggtagcaagtacacataatgacttttatagtttattatggttcccataaagagtgaatatcaagtaccaatatctattttactttttatttggtaattaaaattataatttttgaaaagtaaaataacaaatagcaaaattaaatgaagaataacaaagaacagtaaagtaaattcaaatatttaaatgaaaaattataaattctaacctcctctactatctactttattattcaactagggaatagatccgcgcttcacgcggttttaataatttttttttaaaattttacatgaaagaaattaatttttagttacgaataaaatctcaattcagtctaatactattttattattttttatgaataatataaaattatataatatatttatgtaaaattttcttttatttgtgatgagcactaaattttaatcataatacaataaaataaaaacacatttagaataaagttatttataataattaaaagctattaaaaatataatttttt

SEQ ID NO: 388129 - DNA, 2900 bp, Cannabis indica
ccatttgttgttgaaatgaaaagtcttttgtattatattatgtgtgctgtcttagtgaatagtgaataatgagttaagtgcacaactcttttagtgtaccaataaaagatgattggactaacatttattatacataaaatataatatttatattatggagattgaaatactacgactatttttggacacatacatatataaagagatatatatatatatatatatatataaaaagaagtttaaaaggtgataggtgatagatttagtttatatatgcatataaaaattttgaaattttagtaacttgagcaggggcaatagccccaccttatccacacctaccttcgtctatgtctgtggagatgatcttacttatcattttattacttgtgtgactacgtatacttgcgtacataattttcaacaatagcaccacatgctcaaccacttagggggcataggcgacatgccacagctcgcgaagatcacgcccttcaaaggccaacacattgtgggcaaaagcaaaggacgcccgcgaggcaccaacctccccaagaaaatagttatgtgtccaaatcaaacacttctttgacgccacattccaagccatattccaagcgacgcccacactctcctcatcatccacaacaacaaagaatagtgagctttgccgaggatagtggtcaatctaattctaaaagctgttccattagggttcacaataatacaccccgcaattatgaatgtcgccaaaacaatcgtcccccaagagacgcaagaaggcccgatttgtgagaacacctctatcaaagacaacctaatttcagggaacatttcaatagaagacataactaaattccaccagtggtaaataataactataatatcaatggggtacatgaaaacaacctccccaagctggccatggtgaggaaggataaatcaataatcctaggcttaatgctttggaacaaatgatataacaattaatggtgaccaacaaccaaaatgccactaggtatgatttggatgaggagtcagagccttactctcctagaatattggttttaccatatccacaagggtttaagatgttgaccacaaccaagtacgatgggagtacaaatctcgaagtacacataagtgacttcagaacacttatgcgtacccaccaagtagttgatgacttgagatgtgtgttatttcttgtagcacttactggagctgccaaaacttggttcaagaaatttaagaggcactctattacctcatgggaccaactctcacgtgacttcaagaaggaattctgcaccgccaaagccaaaaaattagaatgttcctcccttgccaatgtgaagcaacaaccgggtgagagcttaaaagcctacatcaactgttttaatgttgaagccacgaaggctagagacgttaatgatagcggaggacttatggcgctgggggcaggaattgctaatgggtcccaattttgggataggttgcaagaaaagggagcacacaccatagatgagttcatgaaaagacctcaaaaatacattaatagggaagagacaaggttggccattaacctccctctttaatctggaacaatagaagctactcccacttcaacaaacaacaacccctccaatgcaaatacttccaacaaaaggaaaaatgaccatggtggggaccacaacaatactaagaaagggagggctaactaccctctttacaccatcttcacagaaattgatggaaaccgcagaaataattttcctcaccaatgagaaaactgtgaattttagagtcccagagccaatgaaaggaatcagaaaaagtcaagacacctcaaagtattgtcggtaccacaaagacgttggccacacaactaatgagtgcaaagccttaaaaaatagaaattgaagatctcatccgagccagaccacttgctcgttatgcgcacaacaatcagggaacaaatgcccaagcacaagggtaggcttaaaataatgcccaagccacgccaaacaatgcgccagccccgccacaaggccaaaatattcatatggtgccaccattggaaggagatgatgtcttggttaatcctggaggtccacactttgcttgagcaagtaatggggcctaaaagcgctacattaataaactgaaaaagtaacaacaacgcacaagttccaccaactcaacctcccccaaaacaaccacgtaccgaaaattctattattttaatgaagaagatggagaccatgtacaaatgccacataatgatcccttggtgataactgcttatattaccaacaaaagagtaagaaggatacttgttgagaaagggagtggggtcaactacaagtccacccttgacaagatgggactggagactcatgacttacaaccatgccccacatttttatacggatttaccaccgaaggcatagcaagtattggaaaaattactctccccctcacaatgggagaggccccgcaaactgtaacaaaaatgacaagatttattgttgtaaatattccattcatctacaatataataatgagaagactggcgcttatcgcactgggggcagcgacatcggtgagacacctggttgtgaagtttccaacaaaccatgagaatagcatagtacgcggagaccagttagcggcaagggaatgcaacaacgtggcaatgaaaggtcaatcccaacctgggactcaacttttccaaggcaccacttttgtaacatgcctaccaagacaataaaagtggctagacaaagccatttggagaacactctttttagattttatttgctttatcaagattgagcaatgttgttagttttttaattgttaagtgccatttcaagagcacaatatttaattttttt

SEQ ID NO: 388130 - DNA, 922 bp, Cannabis indica
ctattcaggcttaacccagctaccaatttccaagtccaattaccaaccttctaagagtggcattaattcactcaagaagaagaaaaatcaatatgatcaatccagccgctagtgtcataaaaagggttttccagatcattcatttgaagttaagaaaatatgcacccccttctaatcccattactaaaccaactgatagaaagtaatggctatgttcagatatacaaaaggctaatttgttgaaattttcgtcctgttgttattcatcttgtaatttgcaaaacaaccaaatttatgcacacaaaatcatcgagtatccaaatccaaatcgagataccgatacaattaaacaatgggaaatctttcagcaatagttgaagaaagaaaaaaactacataaagggttttacctcgatttttcatgatattgaggaaagaagacattacagtggagataggcttcaactccaccatggatttccctcttttctcggcattcaccattgatctgagtgcttcattcagtattcttctccccatcttccttcttcttctctcttccgacggagctaaaacccaaaacccgaactcagtgatacctgaaaaagacctacaccgagggtttttaagtcttttacggcaaaaaagtcacacttaatctatgtcaaaattattatcgatccccaaattataggctatttgcagaacagcccgctttgataaaataaaaaataagaataattattaatcatgtttagtgaactttttacccccaactaaatcgtgcctttaagaataatacttcttgaaggaatgaaagaaacacattctccattggaggctataaaatgtgacatcttttgagtttcaaaaatcttttgggaatttatttcagtattgaagttgatcctcactagtccatt

SEQ ID NO: 388131 - DNA, 1880 bp, Cannabis indica
ttaacagaaaagtgacgtcagagttgaaggattttctgcacattgatgattttgataaagacacgatattgaagatgttaaaccgagctgcagaggttaaggcaatgctaaaatcaggggacaggacatttcttccctttaagggaaagacaatggctatgatctttgccaagccctctatgagaacacgtgtttcatttgagactggatttttcttgttgggaggtcatgctatatatctaggacctaatgatattcaaatgggtaagcgggaggaaactcgggacattgcccgtgtcttgtctggctataatgacattataatggcccgtgtctttgctcaccaagacattcttgatctggctaagtatgcaactgtacctgttatcaatggcttgacagactataaccacccatgccaaattatggctgatgttctcactattattgaacacattggtcagctagaaggaactaaggttgtctatgttggagatggaaacaacattgtgcactcctggctgttgatggcagcagttatacctttccactttgtttgtgcttgcccagaaggtttcgaacctgatgcaaaaacagttaagaaggcacagcaggctggtattagcaaaattgagattacaaatgatccaaaagaagcagttataggagctgatgttgtgtactctgacgtatgggccagcatggggcagaaggaagaggctgcacagcggcgcaaagctttccaagggtttcaggtggatgaaaatcttatgaagttggcaggcccgaaagcttatttcatgcattgtttacctgctgaaagaggggttgaagtgacagatggagtgattgaagctccgaattcaattgtcttcccacaagcggagaatcgcatgcatgcacagaatgctataatgcttcatttgcttggtgtgtgattgctaacaggtcagctccgtcgagttattgggtgggaaggtactgcttagttaataatgaacttttggacttctgcagtttatttttgagtttagatttgtgtacaattttgtatgttgacaacactctttcatttgtgctagcctaagtcttcggttttatgctcgatacttgttagtttgctcttacataatcataattaagatgcccttttccagaattgaaaaagctctgattctaggactggaacatcataaattgaaactcgctgtcaagattcaagaagatacaaagaggtgtgttgatggacacatttctatggagatttgattccaaataaagaaaggaaaaatgatttatttaaatttatctgggtgagtcagaagagagaaaaattgaatacatgagaagttctcattgatcattattgattcagaaactgtcaaagactcaaagattgttcttacttaagttagtcatctaattgatcattttatcttgttcagaagcatcgtccatctttaattgaaaaaacgaacttgtcaggaaatacaaatgtcatttagtgtgaagcttgcagtatcaaatagagtccaaacagaacattacatccatgctggtattagaggtctgcaattagagtccaaacaaaattattacatgcatggtaatattagaagtctggaacttaaagaaaaatgtaatttgtgagaaacatacttaagtttaattcgcggttgtaaataaatatctaacaaaaaaaaaaaaaaattagtgacatactcaaatttaacttgctgtaaataaatattcaacagtattagttaagtattttattatcattcacgtgttagtctacatcattaatttgtatttcttaattaaaaattcatttaaaaatttgagaaataaataaaaaaatattttaaaataaattaaaa

SEQ ID NO: 388132 - DNA, 1672 bp, Cannabis indica
atcagtgatgtaatatatcaattctgcttaagatgcaagtatgaacatttcattttagtaccactctcggttgacgtaaatgctagtgaaaacaccatcaaatactaattgttgttatcacattggtacgaatagagtactaagaataggcacatattatggtcaatagtactgtcgtacgaatgttctaaacttagtacagtgtaggacgcggggatagggttatggttgggtgtatgggccgctaattgtaatttgggttatatttatgattatgcttttcttattgagtctgttgactcacaggttattgtttgcatgtgtaggtaaggacaaggctaagggtgaacaaaagtgagttcgagtagatgaagattgtacatgtcgggacggttaggctaggagcatacgatctttgggacaacaggctgcattttaaatggttgctaagcgacaacttttgtatcgaatgttttttattacgattgtaaatattttaaattcaatatcctggctatgtaaatgattttttttttatcaagaaggaactctcttcattaatcacaaacaattgtaaactttacaatgcaaagccaggcctaataacctgctaatactcaaaaaatttctctatatatcttttttcatgatctttcaaggtcctatgtttagctatttgtaatctatagtatactattttcttgatatcttgtgtaacctttgttgttgtactcgagtaattgttgaagaggcagttattcctattgctccaaatgctgtaaatcatagcagccaatatcgaaatatgcaccctttgtttcttgcctttgctggtttgcagcagccattgctgccaggaaaagaaaccagtcggccagcaacttactcccagccacaaacagatcttctccaacacctgctgagaaaagtagcagtcaaaaaaaaaaaagatgagcattgctctcagctattgtgtcacataccggacaattagtgttgtctaaagtgatctgaaattgtagaaacttgtctcgagttaagagttgagcattgattgcttgccaaacaatgaatctatgctttggcatgttgagggaattccaaacactcttgctgaattcaaactgagtttggggaaggcatctattacataataaagctaatttaaacctgttcacaccagcccttgctttttcaatagcttcccgagtgaatttgccccttagatgacataacttcctccaataccaactagtgtcactcttaagttcatagtcccataaagtcttgttcttgaggtaaatattgttgacccatttcacccaaaggatgtcccttttcgacaaaatagcccaaatatattttgctagaatggcttgattccatttgacttcatccttgaaacccaagccaccataagctttcaggaggcaaactttttcccaagaggccacatggagtttgcttctatttccattccatccccataagaaccctctgcatagtttttcgacttcctttgtaacactatgaggtaatatgaaaatgctcatctaatagtttcttaacccaagaagcacagaatgaatgagttgagccctacctgcaaacgagagatgccttgtcgcccaggtgtaatgatatttattttcatttaaagagtaattaaata

SEQ ID NO: 388133 - DNA, 486 bp, Cannabis indica
aaaatcaattagaataaaataaattgtgcctcccataaaaactaataatatatttttataaaattatcatacagtaaacttaggcatagtatacaacaaaattttaaaattcatctaagtaacttgcttaatatcaccacaaatcactaacagtgatgtctatattgttactcatctttccttagattattttgacttacataactttatatttacatttattaaaaacttatacaaacttttcactgctacaccgaaaaataacaataataaattactttattagttgtgggaactgaattgtcacaaatatatatgggtcactaatggtcatgtttgattccttctccaaattctctgatataaaaggtcaattttaaaccaaaccaaagaattgctattatttggtaatttttcttttattacggacttctaacccaattattaatatccaaaaggtaaaatatactgaaaaaaacttaataa

SEQ ID NO: 388134 - DNA, 876 bp, Cannabis indica
aaaattgaatcattactcaaagaaatattatagtgttattatgaataatgtaaactaatatctttatatctttttactgttgtcaatagtctatttcctgaacgcatgtcaacttttatcagtgtaaaagttggctgcatactcatgggactcttttataaatatgataatatatttaaaaaaattttacataaaaaatacaaaatttatattttattacaattttactttcatttcacaaggataaaaaacttttataaaatttattgttttgtttacaaaaatatcttttgcacatataaactataaaagtgctgataccatagttctacaataacactcaacactttctacctctcttttctataccttttcttcattttattttacttttccttttcatttttcatttttagtttcattttgaattatttcaccacaatcaaaaaaatatttatctcgaaaaagctgctccccacgatctccaacttccattgaagctccagctcactatttctcacttcagttgtttttttcttctatcaaattctatataaatggttgtcacccgttcttcttcttctccatcttcatctgcaaaaaactcagtgttaagaagccaatttttaaaagttctaaacctacaacaatgggtgtaaaatcattggccaaaaaaggtaaaagtaaacaattattgtggaaaatgatgactctgacaaagatttcgttgaacgaagtaaacaaaacattaaagtcgcccattgaagaagaaattaaagaggatctgtaccagaagttaagaaaggagagaagaatgtcgataaaatgcctaagctttcttttccattttgttgtaatttagaaattgtgtcttta

SEQ ID NO: 388135 - DNA, 919 bp, Cannabis indica
ttggaaaaaatgagcatcccacaatgtgggtttgtagttgcctgatccccggacgattgctgctggttgatctttgaatattggactactactggagattactcctgtaatgatccatcatcatatatgtgttatataattaagtctgtatctatataatccggggccttaaaaaaaatatttccatttaatattttttaatgatttttgaaaataatacatatttcctgtaaaatcatctcaaaagaaaataactcaatcattcatatacatatagaacatattaattatataattaacaaattgtgtatgtatatacgaacctgactgcgtcattgtggatataataatatgaggagagacttagagagaaataagtaagagaatgtgtataatgcaagagtagagtttgtaatttgtggattataatgatggacatgtacacatatatatatatatatagaatatatagagatagatagctatatagtgaaatgtgaggaagttaacctgaaaattttgatttttcttggtgaccagtgagtacagtgacgtatatgcccttggggcggcgccctcaatcggtgaataaactacgtcttgcgatattttattataaatattattaattatatatataagccacattcattcaatatatattatattgtacataacatgttgtgtcgatattatcgtctattttcttatagtaattattagatgaaaaaatgtagtaggttttgccattttttttttatttttttgaaatgttataaagagtattgttattgggcactatattagttgtgctcaatgctagttagccatatttttttaaaaatctaattaaaaatcaatcaaatctagctaattaaatttatatatgaaaaaaaaattatttatatttatttatgta

SEQ ID NO: 388136 - DNA, 1868 bp, Cannabis indica
ttaagaaaataaatgaacaataaaaaataaaataaaaaaaaaaaaacgtaaaaaaaaaaaaataccatcagctctaaacatttttttatatgctataaaaaattaattcttaaaatttcttatatattgtgtattgtatatatattaatatataatattattttaagtttttaattttgtttggtatatatttttgtggtatatagtatttcatttatttaagataatatttagttttcaattttatcatatataatattgttggcatgttatacatattttaatagtgctatatattttttgagttaatatactagttttatttttgttataatatttttgtggtatataatactattacagtatattgaactttctatgctatgatatataaaatattgttgtagataaatgtatatatttaatgatatagtatgtttattcgttgtagttacaataaattaatataaaatattaacaaatttttataatataattttattattatatatatttttttaaaaaatatttttttaaaaaaaattgatatgagataaaagtatttttataatttttattaagtaatttataagggccattttgccaaaaaaaatttaaaaaaatgtaaatacatttaactaatcaatttatttggagttatttttcatattagcttgaataatattttacacattgtatatttatccgcaaaaaaaaaaaaaaagtgatatatatgttgtcaacaaattccaaatgttaagtagttttgcaatatatttaaaatatatatatttaatccatattcaaagtgttttgttgttatattatttatgataatataatatagattaaaatatttaaatgtgatatattatatgttaatatgagattaatgtatatatataatatgtttaataattaaattatataatatatagtttaataatatatataatttgtaacataagagtacttacaaaatctgaaaaataattttgaaacttaaggagcacatttgattgtatgtaattaagtgaattattacatatggatgttatgaaatcaatgagataagtttctagctgttaaaaactactacaatactcatttatattatttaaatgggtgttgggacgttagaaaaagatttagctcataaaggagttacaaaacttaatgttggcttatgatgaccttgctgaaaccattaagctctatcctcaagagtaggttgtttaaatagatataagatctgctttagcatgggggttatttaaatttgtactattacgttatcatgctaaaagttaggtaaagagtcaaaccaaagaggttttcctttgggttttgactctattacctaaacccctaaacattttaccgatgcataggtcacacaccttttccaatttggtgcgtaaatcttttgccagcgcatatatgcaccgataaaggtcattcacacatttcgctgtttagcgcgtaaaccttttatcggttcatatatgcactggttaaggttattagcgccttttccaatttggcgtgtaaacctttactggcgcatttatgtgcattaaaaacctattttatcctttttttttttgagaaattaaaagtacttattgctttaactatctcatttgcatgttctttttcagttttttaggtagaagcagttgctttttactagtaggcttgtgtcgagttcaagatgtgggacttctcgtggagagggttatttctgattcactttctttgatctcagctttggagggtcagaaagtgtatttaaatgaactgggggttatcttttctgatattaaagtcctattgtctagttttcctagggcatctctctctcatgt

SEQ ID NO: 388137 - DNA, 1776 bp, Cannabis indica
agctgcagttggtggtagtttttattgtgctatttcgcgtgttgcgaatggtgtaatccacacactagctaagtttgttactatagttcaataggagttcatgtttagactgatgcttactctagattcttaagtactcttataacaattgatttaatttaatatattatcacgttttttagaaaaaagaaaaaaaaagaaacgaaactcttattttagagcaagctagttatagaaacactcaataatatatttgtaaatatatagaattatgaattaattatttgaacaagtaatttatgtagagagtgataatattttctacatagattattagtgataatattaaaaaaaaaattaaaaaaaaaagtaatttatgtagtgataatattttccaatgaaaattcaaagcatgacttgatatttgaatggctgctgcgaaaacaaacaaataaagaaagtgatgagaaattaagtaataagtatatcatgacctacgtgttgtaatagtaacaggtaataacataaataactaattaattaattaattaaatggaaaatcatagcagggatccaagtcctattaatctgaccaattccaaaaccccaccttcaaattagttaggtctttactttttgtcattatattataaaatcatggatttatatgataattagctagcataaatttttggctttgtttataggtttacatatatataattttaataatttaataactgtaacagaatgatacacgtattacgtatacaagttagactcagtagtactcagccacgaaaagtataaatatgtcaagtagtagtttaaaagtccatagatatatacatggtcaactagtcaatgtcttcttgtaggggaaacaacaaagatgaatcctccaagaaactaatacactagaagaaaatttgttattcataaaagtataatatatatcttattataatacttttcaaattttgatccttaaaatgggtggaccttaaatacttgctagccacactacaagaaatatcacttctacactacaacatattattactctattagtggcagaccactccgcagctaatagccctccattcggccgcaatagattattagcggcggaagtctcccgctaaaagttcggcgctaatactattattagcgggaaaattgggcttcgctgctaataatagtattagcgacagactattagcggcgggatcccgccgctaatgcaccttgtcaattttgtatttcaaaatagcagagaccattagcggcgggatcccgtcgctaatggtccgccgcaaatatcaaaaaaaataattttaaaaatgataattttgtatataatattatataaatatataaataaataattaataattatataaataattaattataaatatataaataataatttaaatataataaatcaaattacaaataatataatttaaatccaataaaatttattaataatttaaaatgtctaaaaataaactactttaacgttaattctattacaatattgtctcaaaattaaattaaattattaaaaaacataaacaaattattccataaaatctttattaaggtctcgatcgagttataaagttttgatccgcattattatcatgacgagttcctgatggccgtggcggagaaggaacatatgcttgatctgatgattataaacccagtgttagattccctagctcagcttggttaagaataggagttgaaaaaaattgttgctcctgg

SEQ ID NO: 388138 - DNA, 486 bp, Cannabis indica
gcatattacgattcagatattaacttatggtatcatgtatatataatatatgatttacgtttatggcttcagtaatcaattttccggtgcgatcccttttgttttgttctagttattggtggaatatgaagtatatgatacatatatatatataaatatatatatgccttaccttaattaacagcccagcccaaaataaattatattgattgcttatgcgtttgaacaacccagttatgacttgcagtatatatatatatatttatttcatacgtttggtgacttcagtattggttatatatatgtatattcattactttatttgaaattgtatcttttcttttggcttcatatctgtgtaatatgtacagtttagtatatatctatatatatttttttcgtttaaacaatttaattcaaattttggtgttggtttatgactaacattttaagtaaattaattgaaacaatatgtcgtcaaagtga

SEQ ID NO: 388139 - DNA, 1361 bp, Cannabis indica
gctaagttactaagtagatgtgacatatactgttacatttttattaagttccacatatttttgatttttataaataatgatatttggtatttttataattacctaatttttttatttaattaattaaaaaatatttatatacataacaaacatgttagaactgaaaatcaatatcatgtagctaaatgaacaagtagctgccaaatacagaataataacgaaagtgataaaattaacaaaaatgaacagaataataaaattacaagcaagattttaatatgatgttttaacaatcttttcagatgttaataatcatgcccaaaagtgagattcatttgtcaaatttaaacaagtacaaaataattgacttaaataaaacttactcttcttctaataattttgccgcaaatttaatgtgctcctatttattgaatgaatcttcttcgtacacagttttgaactgcttttaaatttcttgatgaatgctttgttctttccaatgcaaattggatttaacatttcccaaaggctattcttcatgttcttccctttgaaattttgcttcttcacacataagcaattagaaagccaattagttaaatttggcaagaaaataaaatcttcaaaaatgtatggaaatagaagactttctttgtataaacttaccaaatatacaataaatgataaaggagaaatatcataatattaaagcgataaaataattgatatattaattaataaagttaacctaataaatataacaactaaattcaaaaataaacttgccaaataagaatttaatagtctccccctcacactttgatgaatgaatatatttttgaaattaagaaatatatattcctaaaaaaatacaattgttagagttccttacaactttccaaaaaaataagcacattaacacataaaagaaagaagaaaacaaaccataacgcgagagtgagagaatgatagtagtaatagtcggttaacgatttaaaaagaaagaaagtgaggaagttacccagataaatacaaagaaaggaaaactcaaatatatattttcaattaagctaaataatcaagaaagcatcaatcaattaagtcaaacatgatttttattttccaaatctcttacaactcgtacaccctagttaaaaaatgagaagttgaagaatacatttttttttatacattaagcaatttaccttaaaataaaaattaattcaagtatatctctttagtattgtactcaaattatcctcacatatatattcacatacactattacaaaaacaccttttagagacaatttttaaggcctttcagcgtcggttttagtgaaattcgctaccaacgctgat

SEQ ID NO: 388140 - DNA, 1119 bp, Cannabis indica
caataaacgaatgagctgctccaaatgtcgttcgagagggtcctgagcgggtgagccgagttcgtgtgaagccgagatggctccaggatgttgagttgatagagttgcgttgaagtatgactaaattagctgaacttggttattaagttgattttgttattgctagtttggaatactatataagcaattcttatgtattcttcctttttttcttgaaatgaaatagccagttttagcttggagacttatcctgtcttgaagagaaccacaatatctatcaattggtgctttaattgttcttcttaatttgcaatgaagaacgaaaaattgttgctctgttcgaagatatgaagaagagttttgatgcattctctacaactaacttagggaaatgtgcagagatgttataataacacaaggctgagacgaaggagacattgtcgcaattaccaatcgattctattccagtttcgattcctcagttgccattaatgggtgggagctctaggatagttgagaaccatccaattcctcgtcaatcgaatgctgaagaggatttttgtgatgttagttttctcataaaaaatctcagagttaaagtaacaagatttgatggtttgaatgttaaagattggatgtataagatcaataaattctttgatctacatcaagttaattatcatctgaggttgacattagtcccttttcatttggaaggtgttgcatctaaatcgttttaatggatggaaaatagtgggtcatttgtagattgggattctttcatcagcgccttacagttacgatttggtgcatccttctatgatcattcgctgggtaaaatctctaatcttactcaaacaggtcaagttgctcaattttgtgctaaatttgaggatctgatgacacgtataataggtgcgcctaactatttattcctgaaattttttgtatgaggtcttaagttagaaattaggagagagcttctttagtctaagccactatatttagataatgctatagctaaagcacaattgtttgaggatagaaatgatgatctctcaggtcgttcttgttgggttttgtgccctaaataaaaccctttacaatctgattagttat

SEQ ID NO: 388141 - DNA, 1663 bp, Cannabis indica
tatatatatatttaaaattagaatgatattttttgttgtatagtaagccaatgcaatttcaatttcaatttcatttacatgccattaactcttattcatcttctcaaaaatagaaatatatccaaatatatttgacatgatactgttttttttaaacaataaagttagttgatttaaaaattattatatcagtgtttaatatttatatgtaatttttaagtggacatataatcactccttatatatagtttgcataattttttgttgtatatgtttattaaaaattaattttctagttcaaaataaaagaaagatatggtagtttagagttattaaaagaaaaatggtttgtgtcttaaatgagtgtcttcttctccttatctatttttctcaagagttgttgaaatgaaatgatcactaattaaacatattaaataactaactaataataaactaactctatttagagtatcatttatgttttttctagagaagatgtaatttttattaaataaacaaacatatatatatatataacaattcagaaaattactatctctcatttgttttttgctgacgacactctcatcttcactactgcctctattgcattctgtaattctcttaaagaggctcttactctttataactttgcttctggtcagaaagttaattacaccaagttctctattctcttttctcttaacaccccctgctgtctcttcttatttctttgatacccttggacttcagccaaagccgttcattagtaagtatttaggggtccctcaatgttttggtaggtctaaaaaattcagttttgattttatacttcaagggataagttctcagctctcaatttggaatgaaaggttgctttccagaagctggtaaagaggtacttttgaaagctgttatccaggtcattccctcttctacaatgtcttgttttaaaatccctgtttctgtttgccataagattgaaaaatgatggctcattttttgtggggatcgatgggaaaaggatctaaaattcattggaaagcttggagtaacctttgtacctctaaattctttggtggtttgggtttcaggtctttaatccatcataatcaggccatgattgccaagcaagcatggcgtgtcttctctactccaaattcccttcttgctgctgttctcaaagccaagtatttcaaacatactggtttccttgaggctagtcttgggcactccccctctttcacttggtctagtcttctttggggcagggatctccttaaaaaaggtttgatgtggaaggttgggaatggatgttctattcgaactctagaagattattggatccctaggtcacgatttcttaatttcaaagtcagtgatccgcctccttctgataaagtaagtttttttattgatgagaatggtcattggaatcgtgctaagcttgatcagtattttgaccatcacattgtttcttctatccttcaagtccctattggtggtcttaataaagaagaccatctcatatggaataaagataccacatgcattttttctgtcaaatcgacctatcttctagcaaacattgtgtccctccctccttctgttggaaattattttaccaggatcttagatctattcacaagtatgttgattaaca

SEQ ID NO: 388142 - DNA, 1083 bp, Cannabis indica
gattataaaatactttgcaaattgttatttgaatagggagaagaaaatagagttattgcattaggaagtaaacggtgaaattttttgtcctaaattcaatctcattgttactttattaatagtttattttaattgcttttattttctttgcttgaaaattctgaattttatttgatcaaatagaactaaaagattgattggttggtaattggtaacttggtccttgagaaagatttattacaaaatgtgattgtgtacacttacatagcataaatttcgtaacaagtttttggtgctgttatcggggattgaaaacaaatatcaatatcagtaaattttaatccaaatccaatttaaacttttttagtttcttaatttgtctattttaagtgaattgtgttttatactcagcacaagatgagcatatagtcttgaatcctgagattggaaaaaaaaatctgcaagtgtgagctgaaacactcttgtcaattacagaaaacaccattattcatgacaaacgacaacgttcacgagacaacaatccaaacatatattaaacattcaaacattaaaactgaaaacagtcactaatttaattaaaacacacaacacaaaccaaatattacacattgtattccaaatattaattattgaacaaacagacaatggtgattggctaacagatcttccaaatgttgatatgagactatccccacaggccacagccacttaaattcatatatagtttagtcatcttctgaatctcaatctgcattcattcatagtaatgccaatgcagaaaatgcataagtgtctttgtcactttcacccatttttaaggaatgtatttttatttgaagatattattttttatatttaaaaattttaattatacactaataaataagagaaaaaaataacaaataaaattaattgtgtaaacatagattcaattactcataaaaactttaaactagatgagctcttaaggagaaaagtaatagagaacttctcctctaatttgtctaagtaatagatttacctgtaaaaaatatttttttaattttttatattaaaaaatta

SEQ ID NO: 388143 - DNA, 2091 bp, Cannabis indica
atcatgtccattataagtatcactaatgtgaagtaaggcgaacaagaaatattatgaagctacattcaatgcttcaatgccaaagttattaaagtaggtaaggtgtccaaagataaagtcaagatcgacataggtgtaggagtacacctcagaggcaatgggaaagcatgttgaagagagagttaagtaatctagatgacttctactaaagaatagagaaatatattagtgtggaagaagaaaatcgaagactaaatgtaagcacaagtaagtactaatcgagaagctcgtcagacccctgtagagactattaagaaatatgtacctgatacctatgaaaagatacactcaagtggcaacatcatctctcaacccataaacatcaataatctaagagattattagaagtaaaattgtcatattttctatgaacgatcaaagaggatactctagttagccttaagtggcagtagcaactctagctttctttcctttaatatattatattttaaagagggcatctaagttagcatccaatgatagcaattacactctacttgccctcatgtggtggtacctagtgtacccatgtagccatgtctttatctttatcaaagaaatgttcaatttttcatattacctacatagtttatacaatcatcatgttttctatacttatcagttaaaattgctaaggtgcgcaaaacagtagagtaatcaaaagggtccacttcaagcaaaaagaaaaatcaaaagtgtttgatgatgccaacacaattgacttcacaaggagcatatatctatataaaagactctttcttatataatgattagctacccttgtagaacaaaaagagtaaacaaaaggccatgatcatataacctcaacaaacaaaaaatgaaaagtatgtttaagaagttgtagacaggaaaagaagacctcccaacataacaccatctcaagatgagatagtcgcaaggtacatcctccaacaccattctacatgccacaaatgaaagtctagaatgaccaagtcgtctagccgcataggctcctgaaacaacgcttgaaaaaaatagtattatgattaaaagcaagcatgacacctctccatgaaaagaaatatagaaaatgttaaaaatgataacgaaagcctaagaggtaaaaaaatccctcaccaaaatagtggcaacccatataagagattaagagggctcaagtagctaacactccctcactttaaagaatcctacatcgtaaatgacattcagaaatgccaaaggacaaatactccctcaataaaaagatcaaacatatcatagaagaagttgagaaagcataaagagctaacacttcatcaataaaaatatcctaagaaaagttgagaaggctcaaggcgccaataccacttactaacggaaactcatgaatgaaaccttaagtatgtaaaaagagagtttgtgagagatttctcctcaaacgagtctcaatatataaatatatatatttttggattttaattttttttccataaaaaaagaaataaataagctaatttttgtagtgactaaaaaaataaaaaatttacaatagagcgtatggatttatatatattagataacaatttattttactaaataacttgtgggaaacttacaaaaatactgacttttttctaatttttacaaaaatactgtcacatggcacaaatttcttttatactgtctaggcccattttttttttcttttatacttctcaggcccatttttttcttttgtactctgaacagtaacaaggaaaaatgacgcgtccttcctcgttgggaacgaacagaggaacaacacaagacctgttgtaatcccaaataccacatccataacaacaccatatcaagaaaatgtgacaatgcttgaaaacaacacaacaataattgaaaacagcacagcaacaacagaatcatacacactcgaacaccaatcagaagaaggaggagagtcagaaacaagataatttaagaacgtcaaattcgacatagttgactatacgaatttggttgctgaagaaacggtagaaaaacttaaaaacaaca

SEQ ID NO: 388144 - DNA, 1731 bp, Cannabis indica
atatagtcgcgtcttattctttcaatattaatgcatggatttgattaaaagtataacgaggtcggtatatttcgtatacgtttcgatctgttttatttgatagagaaaaatggctataaagattaaaactctgctaataataaactctagtgaatacataagtgaagctgacaaatattgataacttaacttatttattatgtttagttcaaatcccaaccaaaaaaaaaaaacttttacctaccatattattttaaaacaaaaaaaaaaaaaaaatcaaaattacacctcctcaagtttatacctagtgcgtctttgtataaataaacttatttttatcagagtatagctcacaagttcaattggatctctaaaaaatacaggtcacaagttcaattggatctcaaaattaatacagccaacaagttcgtatctactctactctgttttctcaacatctttaaataagttggaatactggtagatacaatagttaagagttagttgataccgttgatagttaagttagttttattatttagttgtagattgtttcttgcttatcagctactgtaacaaattcatattttatgtatcttaaactccgatacagataaatatttatactctagcatacaaatgagatcagtctataatttattgagcactgaaagagtaaatttaatgtggtgtaatccaaataaagacatgcccgcatcagctagtttagcgttgagagtgtacaactaacagttgtaattagtaaagttgttattcaactttggttggctttgttctaaaaatttagtacacaagtaataaaataagatattgttcctactctatgctgattcattgttaatgactcaaaaattacttcttttcaatttgactattgagatttttgacttttgagaaatgaaagtaagaataaacttatgaaacaaaaaacaaaaaaataataataaacttcaagcacaataaaataataaagaagagaagcaaattaatttattctatttagtaaaatttctaaacccacaaagaaaaagatatttcacttatataactcaaaaatatataaactcattatctcaatctctccactcaaatctcaatacacaatttgcttctttctcagtctcactacacaacaaactcacactcacttctattttcacaactcactctttttctccacacacccactctcttacacacaaaagtacatatttttaaaattacaaaatttaggcaccaagacactctaaaaattggccactaagacactctaaatttagttgtgaagactcatttctcacaattaataattaccctaaaagaaattgcaatatatagataaataaataaaaaaaattatgtcaaactccaacaatctcgaccttgaataaaattctctaagctcacaactcaaacaatcaagttcatactctcattgaacttcacttgagcacttgtcttcacattcttcgatttttaattgatgtcttctttcttcaaacaacctttaatgaaattggagttttctccaccttgccgcattccatcactctaactgaatttctttagtgaaatgactccaccttcacacagttcaacctaaaaaagtcttctcgactaatttatacaaatctcgctctttcttacccttcacaactaccaggccatctttttttttttatatatagttatttcaccatattttgtaaa

SEQ ID NO: 388145 - DNA, 991 bp, Cannabis indica
aaaatatatatatattattaagtgcagattggattgcatcggttaatttttgagctcaaacaacatccaatcgcacaagtgcggatttttgatttttcaatccaatccaatctgcgcaagtgtgggtattcgcattttgcggattgaatttgattagatcctgcggattggataggattagatacttagtgaacacccctaataaatgataagcaaaagattaaagatatttcctcttcttgtttttactctaatttttgaatgtcatgttcaacaagaataggattccaatccaattaatcctaatgccataagaaatacataaaaatttcaagttttcaaagataaagataaaagataagtgaaaaatataaattttttctctttttcttggcttaataattttctaaaattctaaaatacaagagaaggggaattcaaagtcttaattctattgggaattatttgaaaataaaaacaattatctatgattgtcaaaattgacgctcatctggtagtttcagagaaacgggcttggttcatgtcatcaagtcaactccacacaagtgtaaagttgacttggaggtaaaatgttaacctagaaactttccttggtgaagtggacatcaatatttgacacgtggcaacaaagaaaacgtatcggagttaggtagtcccgtgtcatagcagtcgacctaggagggctccctagccctgtgccgaagttgactccaggaactccagaatggaagtttggattccattaaattgtttccaactcactttgttttagtatttagtaccatgaggacatggagcaaacaagtcaagactcggaagctgaaaacacacgatactgcacctcaaaatcaacccgagcacctagggtttcacccagcacccaggtggacaacccaactaggatttcaatttttgagaccgtttaagtgaaaatggagaaaactttacattaggacatgaactagacata

SEQ ID NO: 388146 - DNA, 1342 bp, Cannabis indica
tctttatactaagaacaaaataagagttcttacttcttaccatagaaaatttctatatatataacaataaataattagaactaattagttatatacaaaaataataggttaattaagacttttttcgctcaaactttgacatgtaccaaattatgcctcttgaacttttaaggtcgttaaaaatgccccttaaactattgagtttattgaatttaagaatttttgtccaacatttgtaaaattcaggggacatgatttagtacatgttaaagtcagaaggacatgatttggtaaatatcaaaatctgagagtatggtttagtatataaacaatcactgaaataataaaattgaatgaaattagacaaaaatccttaaatctaacaatgtgaatagttcatgaggaatttttaacggtaaaaaaaaattcaaaaaacataatttggtacatgttaaaatttaaagagaagaaatcaaaataatataatataaccataacacgcaacttgtgttttgtattattttattttattttattttttttgggttaaacataaaaagtgacttattatatattttttttatatttttttttaggtaaattatatcttgagtcttagacattcgattcaccatcaatcactcacatcacatgcacaccaataaaattattaacggggttaaaaagagaaaggacagtagagtacagtgtgtctctacacaaagtagttatttaattaattaagcaaattaaataagatatgatcatcagaattgaatggtcatcatagagtcactaagttatttcccaagtatcgaatctcaatctattggaataaaataaattaagtatttatatgtagcaattcatagaacctggatatatcgtatgtctgtagttcactctttaaagaattattttagcaggatttctatttctttcaacatccaaaatatttttttagttaattttttttatcatcatatatattataatgctaaaaataaggtttgaaaatgttgaaataattctccatataagctgacttatcacaattatcaattaaaaataagttagttaaaaccaattcaaaacctaactaacttaaccgtttgcaatccaaaatcaagaaacagttagttgatcctaactaacttatccagctaatacatcgactataaatagaagaatttaagtccatatatacttacagcttcaatatacttctcggaaatacaaaaaagtaggcatgtttgcggtgcgggtagtgcaatttttgactattttttcaaactaacccacacatgcggtttttctactttctcaaaccgcacccgcacca

SEQ ID NO: 388147 - DNA, 2641 bp, Cannabis indica
aaaggagcccttttgaaatcaatgctaaaatgctcgacatgttactcaagtcttctacgcaaatcgtttcgaaagagtccagagaagctaacaagtttctcatcacttcttcaatcagctcctccacttcaactttgttccttttctgttattgcaattccactgaacaaagcttccgagaaggcccttcatctagataacgaagatgatgatggaatcgagaacccattatccggggaggctttcagagaaagtcccagattgggttcctataaattgggggattccacattttattcactcatccaaaactatgcgagtctgggcgattttaggtcgatggaaaaggttttggatcaggttaaacgcgaaaagcgggttttaactgagaaatgttttgttacagtttttagggcttatgggaaagctcattttcctgagaaggctgtcaagttgtttaatataatggttgatgagtaccaatgtaagcgaaccgttgtatctttcaattcggttcttaatgttattatacaagattgtgattactctcgtgcgttggcattctattcggatgttgttggtgctaagaatatgaatatttctccaaatgctttgacctttaatcttgttataaaggccatgtgtaagttggggctggttgatagagcagttcaagtgtttagagaaattccccttagggattgcaatcctgatgtgtttacatattctacgttaatggatggtttgtgcaaagagaataggatcgatgaagcagtttctttgttagatgagatgcaaattgaagggtgttttcccagtcctgtcacttataatgttttgattagtgcgttatgcaagagtggggatttgggacgtgcggcgaagctcgttgataacatgtttctcaaaggttgtgttccaagtgaggctacttacaacgcccttatccatggtttgtgtctcaagggtaagctggagaaggctgttagccttttagatcgcatggtgatgaataaatgcatgcctaatgatattacttacggaaccattatcaacgggctagttaagcatagaagagctgttgatggagttaagttattgatttctatagaggaaagagggcatcgtgcaaatgagcacatttattctactcttattagtggattgtttaaggaacgaaaatatgaagaggcaatggcattgtggaaggatatgttggaaaaagggcgcaagcccaacactgtcttatttagtgcactgatacacggtttgtgtcgacaaaggaagccagacaaagcagaggaagttcttgcagaaatggtagataatggtttcaagcctaattgctatatttatagctccttgatgaagggtttcttcgagacaggccaaacccataaggcaattcttttgtggaaagaaatgggacgtaataatttatcagttaatgaattttgttacagtgtactaattcatggtttatgtgagcatgggaaactcggagaggcgttgatggtgtggaaacacatgtttagcagagggttcaaacctgatgttgtggcttacagttcaatgattcatggcctctgcaacaatgggctggtggaacaaagcttcaagcttttcaatgaaatgctttgtgaagagcccaattctcaaccagatgtagtcacttataacatactcctcaatgcgttttgcaaaaccggaagcatttcccggatcattgatcttttaaatagtatgttggatcgaggatgtgatcctgacttaattacatgcaatattttattgagaaatttaagagaaaatctacaaccacctcaagatggaggggagttcttagatgagcttgttgttcgattgctgaagcaggaaaagattaaaggtgcttccacaattatacaaataatggtgagaaagtttttgcaaccaaaaccctccacttgggcaagagttctccaacaactttggaagcctcaaaagattcaaatagcaattggcagatgtcaaagcagcctgtatagctgaattatgcaagacatgctgtcctatgtaaaatgatggactagtattctactcacctattcaattaccagttgtacttaattctttctgagtaggctggtatgattatttacccataattctgttgtcttcagtggaaagaggaatgaattttgtttccctatagcacaaacttacatgttctcatagagtaacgatggtgatggagagagtgctcaacctccaatcactttagttgaaaaaaatatgattttacaaaatatatatatcatagaataatttcttgacatgaacaagttaactataatatttcattgaagttcccatatatttattagttattctcagtataaagggcaaatatatttttattttaatttatttggacaatactaatctttaaggttttattctttttttcaaaaccagctaaagataacagttaattaatcaatttattttagacaaaaaagttttctaaatttactagtatttaaattatattaattaattatcgaaataaaataaaaaataaagcaacatatatacatttatttaaaatacaatacaaaaatgaattatgcttcttagataaatactatattttatgtga

SEQ ID NO: 388148 - DNA, 1992 bp, Cannabis indica
tgccgtcttctcagtagtttcgtgagcccagagtacttgaggtagctcatcgacccacctgcctttggcagcgtctaacttcttcttgatagtatccttcaagattttattaacaacttccacttgtccattcgcctgaggcctgtatactaacgagaagctcatgataattttgttcctcttgcagaacttagtgaacaactcgccatcaaattgggttccattattagattctctctttatgggaatgccaaacctacagaaaatgttcttgataacaaagttgaggattttcttgcaggttatggaaatgagaggctcggcctctgtccattttgtgaataagtcgactgctactaccgcatacttagctcctcctcgctcagtgggtgatgcaccaactagatcaattctccatatagcaaatgggtagggcgaggtcatcattcttagttctgttggcagtacgtgagatatatgtgaaaacctctgacacgtatcatattttctgacaaactcatgggtgtccttattgatcgttggccagtaatatccttgtctaatgatctttttagatagacttttccaacctgcaaggtccccacaaaagccttcatgaatttctctgatgatttcgtttgcttctctagggagaacacaccaaagtacaggcataaagtaccctcttctatatagttggccttcaattattgtgtagcgaggcaccaaatacaatagttttcgcacctcgtttttgtcatttggaagttttccatcgagtaaataattgataataggagtcatccacgtcggagagctgtctatcatctctaagtcttccattttacatatacttggctcgcctatcatctctactggaactaagttcaattcatccaagtcgctctgcgaggccagttttgttaaggcatcggcgttggagttttgttctctcaaaatttgttcaattttaaagtaattgaatctttccatgttattcagaaccttatctaaatactttgccatttttaagcctttggcctggtattccccgaggacctggttcacaatcagctgcgaatcactatggtagacgagatttttgactttcaacgctttggctatctttaagcaaacaattaaggcttcatactcagcttcgttatttgatgtgtcaaattaaaatatcagagcatagtgaaactgaaagccatcttgtgatattaatattacccctgcacccgaaccttgctcgtttgacgcaccatccacgtataacttccaagtttttgcttctcggtgtacacgcaaaatatcttctggagttataccttctatgaagaagtctgccaaggcttcgaccatggtggatgttcaagggtggtatgttatatcgaactgccgcacttcgattgaccattctatcaaactcctagaagcatataaaacttgtctcaagggctgatcggttaacactttcatggggtgtgcctggaagtacgaccgtagcttacgaggtgcgtggactaggcacaaagcgagattttctaggggggatttctagactctacccctagtaaccttttacttacgtagtaaataggttgctggtccttaccctcttctcgtactatagctgcacttttcgcatcttctaagatagtaaaatagagaagcaacgtttctctaggtattggttttgccaaaactgaaggtgccgctagatgcctttttatgctctgaaaggcctcttcacactcttttgtcaactcgaacttcttgttgcctcgcaatacattgaagaacggcacacccttatcaattgacttcgaaatgaatctgttaagtgcagccatcctccttgttagggcttgtacttccttaggctttgtcggtgatgtcatgtctattaatgccttgattttctcgggattcgcttcgatacccctcgcgttgctatgaatcccaaaaaatttcctaaggagactccaa

SEQ ID NO: 388149 - DNA, 1209 bp, Cannabis indica
tttttttatctgaaagaaatattacgtactatcatcttaatcagtgaaggacacacatgcatgtttatgaaaaaataatatatttaaaattatatatattttaattaatttcttaaatatacccataaaattataaataagcccacaaatattttataacaattaattaataaaataaattttctataataaaatcaatattttcatgtacacatgtacatatatatatatctaaaattctatacagttttacataagtaattagtatataatagttttacatatcaaataattaatacaatcatacaaaaaaaaaaaataataatataaacacaaatgcaacaaattgacatgatctctctctcaaaaaaaaaaaaaaaaaacaaacatgaaaactaattaaaaattattaggtattaatcaacttatgattaagaggagcgtgtccaatgaacaaagccacatgtcccataagtttatccttcctagaaaaagttgtcccacaagaacattgccacttattaaggtccccacaatgcttctcatgagtcctcaaatcagacaacactgaaaattgcttgttactacatctcttacacacatacattttaggacaatggcttctcttgtaatgattcttaacacaaatcattgatttcaatggttggaatttgacatgtttcttgttccatctacacccttcttcaggacaagagtacttcttcttatggttactactactcattttccaatgctcattggtagtagtagtattaatacttttattgttgttgtaattactacacaaggcttcacttgtcttgtattggtctccatgtgctctcatgtgcatcctcaaatttgcatctcttttgaaccctttaccacaaatttgacaatagtgtgtgtattttgctaataaatccctagcttccaactcaattatatcaaaatcatcattatgatcctcatcatgatctttctttgatgattttgttatgatgatatttgttgtactattactagtttcaccctttacaactagaggagtagtagtagtagtagtaggaaataataaggtattattagtactcatcatgatttgatcatcatgattagtagtagtgttattattattgtaaatctcatgattagtattacccaaccaattattgagagtactatgatgatgatgatgatcattacttg

SEQ ID NO: 388150 - DNA, 1412 bp, Cannabis indica
taaacaatgttcaaaacaaaacagattaaaaggcattatatataaggtgcacaaaaaatttatattactaaaagttcaaggtacttaaatttgatcagctgcaaagaaatgaagaaaaaaaaatgccctttcacaaacaatgaatcctttgatcaaatgtggcctaaagtatgttttttttctttctttaatcgccagtgaaagtataatatcgattttttagtttttagtttctttcttctcctctggtgcagcagcagcaatgctcacgctaaccttttctgatctaatagtttttaaagaataagctatacactactaccattttgataagttccattattgaatgtgtctttctcagcttattcaatagtcttctttttttttagacctaacttttttggatacattactcaaaccaacaccttaagactcagcaagaacataagctatagtgacctcttcgtctcaaaggattcagtgatgaatgagcaaaaagaaaagcaattgttgctttatctgaagatgaaatagacacctcaagagcaataaagggtttcccacaaatagaacataaaatagtttggttaagattgctggaaaattttaatctgtatttagtcctaattaattcatgagaatcaaacaataaaattaaagattagtagaaacgagttcatagaatccactttagaatggtatgatcttctaattttacatcaaaactttctttagaaccttagtcttttagtgatagagatacaagagtgaaaagatatgatgcatattggggaccattacctgttattaataactggttaaagagcaactaatctttatttactatttctaatttagcccctcatcaaatcaggaattatctttatggtatccacatattaaaatcataaaagtccttaagtcataaattttattctgaaatagaccacataaatttaactcatttatatgatgacccaacacacatttatacatatacaactgtggccccaaataaataaatttttaacaatctcctactggaccacatatgtatgcatataaatgtgttaaccttattaagctcataacattgtcatcataaccataggcatgtgcaatctcatccattaattatattagcgtaggatcaaagcgattttgctgtatcaatcacaattaaacacatcaatggtcacatatgttgacataattaaatgacatagatcaatcatgataatgtggtatgaaaataacatgcatggtgatctattcatgttaattttcaattggtcttacttcactttatagagatcaaaactttaacttatgtacaaagttaaataaattgaataacatatattgacttagaaatttagactagacttctaagccacatccgcttgctagat

SEQ ID NO: 388151 - DNA, 1733 bp, Cannabis indica
gtatataattataaatatgtgagattttgattatttaattaaactaataataagtaataataagcctgattcatgaatatacctttttaagatttatgaatgttagcttcctcgactttgagcacaacaaagaacattgttttccttaattaatttattattgtttttgtttaacaaaattattatattaaaataattaaatatcattacccaataacacaactttatcttcttcttcttcatcatcatcatcatctataaaaaccccttgacctctcttctattcacaatcacaactcttttttcaacttctctctcttctatatatactcacaaagaaaaattaactttcatttccattcaattcaacaacaaaaatttaccactaaacaaaatatctcatacacaatttaatttacaaaaataccattttttggagctttctatagttatacacataaaattcatctccttcttcttctttaaattaaatattatatatatatatataaaactatacatatattcttatctatagatatataaatttttatatatatataatggagaagagtttgaaaaccatgacaactccatcaccaacatcaccagctccgaccaccttcgtccaagcagacccaaacaatttcaaagacttagtacaaaaactcactggcggcgactcgccggaaaaatctccggccgccgttccgaccaggctttcctcttcctccaaaccctcaattgagtacccaacggggccccgaagatccccttttaagctccaagaccggagacagactatgaggaagcttgagatcaagctcagcctcgccaccattaacggcggtggtggttgtggtccgagtcaaatgattcactgggttgactcaccgattccaagcccagtcactccactcgggtcagagtcattgttcgtacccagctcgtcgtccgggtcgccgtcgccgtcttcgcctgcaatttccgaggaggagaaagcgattgccgaaaagggtttttacttacatccttcgccgttgagtacgccgagattgtcagaaccgccggagctgttgaatctctttccgttgacttctccagtcaacgaccaaaggttatgaagaagaagaaaaaatatttatatataaataataaatatttatatatttaattatatatatatttctcattagttttgattttttatttaattgttaaatatttgttgcatggatttttttatttattttatgagatgtattaattatatatatatttatatgattagtgtaatgtttagtatttaatagatatttgtgacataattaattatatgagaatgagatttttttttttaatttaatttagatgttaaattataaaataatttaatatgtagctttttcatagcctttgcatggcaatattgtctattatttatgtagattttattttaaagtatatagtcaaattgtaggataatgaattttcaaaaatatatttgacattatgtaaaaaacatcaccaattttattttattttttgaaaattgttatttaattagatcaatgaaataattaaacaaatatttagctattttcaaccctaattatttaagggtatagttttagtaataaatgtttcgttcggaacgttgtattatgtcgtattgtattgtattgtattatattgaattggattaatatatatcatatttttatataatacta

SEQ ID NO: 388152 - DNA, 758 bp, Cannabis indica
tgtaaaggattttcattttgctcgtatcttatagataccaattttttaattttcttagtattagtttttgcaatcggatcaagcaatatgatattgccaaaaaaaaatgttagaagaatacaaaaatgaaaaatgaatgtattatgtaatttagatcaaaatttatatcaaatgaagaatgatataaacattggtataagtggcaaaaaaagaagagagagaataatataataataatgaaaaacgtgaaaaaaggcttgaaaaaagggtatgcagccaaatgaaaaagactatatatttctaaataaatatgtatttacgaagaaaaaaagttgaaaaaactttcgtaagtggatgtgttttattatgtgaaatagtggatactccatataagcatttaatttgaagaactatcacccttaaaacaaaataaaagttagttcattgtaatttaattaatacaaaagaaattaaagctttttaatttatttcaataatgttgttatattataatcaatgcatatagatatttttcctaataaagaaagaaaaagatatagagggcagaaaatagacccctctcaccaaacaagaatgacttgcattgcattatatatctaaaacaaataattataaaattagtgaaaaagagaccaaattaattgggtttggtgagtggtaacaaccaaaaataaaatacaataaattaaggacttttttcagttttaacaaaaaaaagtaacaatattacaaacata

SEQ ID NO: 388153 - DNA, 572 bp, Cannabis indica
aaacatatatcatttttctttttcaactatatatacatctaaaattccaatacggcaagtattataaaggtaaaaaaagttaaaatagatatatatacacaaaactttcaactctcaactttcaactgatacatggaagaaaaaaaataacagaactgaaaaccccatagaaaaccgaagctagagcaaaagtagggcctcatttcgcaaatttcaaaaaccctatggaacaatatcgtttattatgagaaggaacatagcataatcatacctgaaataagagagtgattcggtggtgaaccctagagggaagattctgtggtggttcttcaatacccagtagtggagctttcttttcttctcttgttcctcgtcaatacccagcaagaaaatccttgacatagccggattccatgaaatggatttcacttacactgaatcacactgtatttgaggaaggagactaggaaaagggcttctcgaatttgcaatttagggctttagggatttttgaactgaaaattaattttgtttttagttaataatgaattgccgaatcgggtcagccccga

SEQ ID NO: 388154 - DNA, 507 bp, Cannabis indica
tatatatatatattaataaataagaaaaatacgttcaatcattttcttttctttaatttgatgcgcggagacatatactaaataaaataattattttatgtgtgtgttagctcagaattttattaacattaatgagactcttgataattaatgatctgtaataaatattataaggaaattaataatatatctataaagacaataaatttttatgtgattttgtagttaaaatctacatacgcgacaagtcactcttatttttgagttttctgattacaagatacaacttaacatagattctcaatcgggaaagaactaatcatcccttttacaatgatttttgcccctatttatagggatttactatgacatttattctttctaaatatgcctgttagaactattattttctgtagtgacaaattatgtccagtagcattccagttgcgtctgggactcgtagtgttttgtctggggttcgtactgttagtgttagtccacgtcagc

SEQ ID NO: 388155 - DNA, 1091 bp, Cannabis indica
atattattttacaaattgatctagtacaaaataataaatatggtcaattttacaaactgaatttttgctcgtttgatttggatatgcaaaccttttcgtgtgggatgaaccattggtttgagcctagtgggatggtactcaaggttgcttcgaggcatattatgaaggagaaatatttgaaagatgaaaagttttcaattcacagtgatgaatacctatacacaaattatcgctgggtattcatcgaagaagtaaatatggagaatgcttgcttttttgtcccattacccaagatacattcataactgtaggtcaatctataaaaagttacgtagcatggtcgaaagagtttgttacacctgttggaaaaggcttggtatgttttaattttcttacttaacttattctgtttattaattaataaaatttctaactttaccgtggttttttcatacagacacaccacccaccaatcaacttcagaagaaacccgtgaagagaagtagacaagcctttgaagatttacttggtccttgaacacagtctctaaaagtttgagaggctggtaagctaacagaccatggtcgttatgtccaaccacgacaaactatctcaatcattaacttttagaactcggtgaaaaaatggccgcagtcgacaataatccaatttcgggttgcagaagatttatttgggggtcgaagatgactcagtttggcttctaaaaaatgacattcataaattgtgcaccatgcaatacttatgagtccaacctctagcggtttgctacaagtacaatttttaactcttaataacttgataattattttgacagtaatggttattgatcatgtatctttatcaaccacatgaaagaaaggttgctagacttcaatggattaaacaaaatatatgaatttctaaatcttggtgccattgccactgaagctagggttggtagtatctgtttttaagcactagtcacacgtatgaccaagatgaccaatctggataaatgggttattgctctctacaacaatcggtaagtagattttaaatgaataattttataatttataactcttcataat

SEQ ID NO: 388156 - DNA, 945 bp, Cannabis indica
atccatgaattcgaaaggaaccatttaaaaagccaactacctttgatcatagtgagtttgattcttctctctttttgccatgccacttggaagaaacaaaatttttgttctcctacttgcagcagcacttctaacactcctaaggtgaaacggtagcttataatgattatatctgcatagcttatttctcattctttgagcagattcagaaacccttttcacctcctcaagcaaattataatctacacccaaaaaaacaacccaattcaaatcaagaaaagaaaataaatttcaacaagtcaatagattaaaaaaaagtaccagagatgagttgattatcgtcgaactgagaaatagggacaaagtgagtccggctcctcttgccagtacaaccagttcgttgcttgtgagacttaacgcagggaaggctacaagagcgaaaagagcaaccagggcatttgtattttgaatccttgaatttgcactcttcacataaatgtgagtcttttcgttcttcctccatttttagtgtctggggtttaaccaaggtttatactttatacactgtacataaaaacaaatagtaataaactaattgtgatgaactttatttggtgaaaaaattgtatatatgacataaaaaaaaaaaaaaaagaaagacctagtgatgaagtgttgggattcctccagtgattattaattatggcagagatgaaggaaacgagagctgatgaatgatgatgaggacaaggaggaacagttgagcggcgtttcaaaatcttttcttttatgtactctcctgtaaagacagggcccattgaacccgaaaagcactgactcgggccgacccgaaaaattattctatttttcatttgataaagaagattgggaaattctagaatgtaccccttataatggatatattgatgcacccttatctgtttt

SEQ ID NO: 388157 - DNA, 2052 bp, Cannabis indica
caacttagatccatatcactagtttgctacagattttcaaaccagctgccaaaagtacgatgaagcaactgtgttgatcgaaatgttagagcaaaagccagcaggaatttgcaaaagtgcagtgtaaaagggcatggattgcagtctcagggtgtgcattacatatggagcattcgacagagataggcacatgttttgttacaaggtttacacatattggtagggaattagtaatagtacgccatataaaatttaacactttaggtgggatctttaaatgccagaattttcaccaaaaaccagagttattttgtgttggagttgctggtttttcacattgcagcaggttgtaggcgctttggacggtgaaaatgcctctgtggtcggctatccaagaccaaaaatcaggccatgtggtgtttgtcaatggaatctgagaatatatgagcttcatgagatggaaacaagttcgacaccacctcatatcccattcacgggcatcagttttcatcatagagctgactacattattttgcagtccaggatggtttgatgtgatgaatctatgtggggattctgcaaccaagggaagcccacaatgctagtgttagtgccatcaccaataacccgagtagctcctagacgaaccacttcttgagcaccccaaatactacgccaaacaaagcttggattattaccaagttcagctgaaagaaagtcaatatgcggaaagtatttggctttataaactttggcagcaagagaatcggggttgcataaaagatgccaaccttgtttcgcaagcatagcagtattgaagtcatgtaagtgtctaaaccccatacctccttcatccttgggaatggctagacgctcccaagacatccagataataccacgatctttgctagagtttgatttccaccaaaagctagccattagtctctctatttctttgcatgttccaagtggtaaaagaaatacactcatgacataggtgggtagtgattgaatgacggttttaaggagaatttctttcccaacacgagacaaaaattttccatcccaactattaattcgcgcaatcactttgtttttaataaagccaagcatggtttttttatttcgaccaatgatgttggggagaccgagatagaggctaccttcaagagcttcattcatattaagagtagaacagacttggatgcgggtagggccatctgtgttggggctgaaaaaatggatgattttgaggtattcactttttgaccagatgtatcttcaaatagctggagtaaattagagatgctagcagccgcacctcctgttgcttggcaaaataagtagctatagtctgcaaagaacatatgtgtaagtgagggagcacgatgagcaacgcgacacccttggaggagtctattctcttcaaacttttgaattaaagctgatagacctttagcacagataatgaatagataagttgaaagtggatcaccttggcggataccacgagacggacagctgggatccaagatgtagcttgagataacacttaaacgctctccagtaggaaaataattcttagccacacgccaaagaaaaagtttttgtcgttcaaccattggagcttgctaaataatcttttataaatctgagtaacactgaatcagttctattttaattataactgatttgcgttattttgtgttatttgttttgatttattatattacataaccggttatattttagttataacaagtttgagttatttgtttttatttatgttatataactgattctatttttatttatatttgagacatctatttctagtgattttttcaatgacttttccgacaacgatgacttttcgggtaacttttctagtgactttttgagtaccagcgacttttttggcaaaacttattattacaagttttatcaaattttatgtttaaaaattccaaaatttttacaaaaatatggcataaaaagcctatataaataataaaaaaataaaaaaaattcataaccctataatattattta

SEQ ID NO: 388158 - DNA, 554 bp, Cannabis indica
agagagagagagagagaataaatcaagtaggtgaaggcaatttattttaaaacgaagtagttgtaccccaaacaaatgttggacctaagatgcaattttagaacaataattggctttcttgaattaaatatagtcgttcatatagtgcctaactatttataagatacggtggtattaaacatcatggagcttaatagtaatattcatttttatattatgtggactttaatattttaataaaaattataaaattggttataataaaatataaaataatacacaattatgttaaaataaattttaatataatcacattttacattaattgtcatgttcaaattccaaaaatcatactaaaaaaaaagtgacgtatggaattttaaacttatggcctccttgttagacttttatttgggcttacattaaattttattggttttattaaaacttgagttgattggatagttctttgctgtgttagcccatgttgttggtgatcaattgttaatgggcttagcatctgtgagtaaagtctaggtgaagcagaagtgtgg

SEQ ID NO: 388159 - DNA, 1523 bp, Cannabis indica
tgcggagccgttccagatctcagacaagcaaatggcaatgattcagatggaatggctgccactcggagttctagggagttgggatcgtcatctgagggttcggataccaaacctacgttgcctaatgaaggaactacgaggaagaaagtgtttatagtaattggaatcaatactgctttcagcagtaggaagcgtcgtgattcggttagagagacatggatgcctcaaggtattgtacctcttaacttttactttcattctattctatttttcccaaatatttggattgaatcaaagaattattgttcttaagagaaaatattaacaaaaagaaaaagtctttatcaattttgttcttaaaatccaagtcctaacaaagacttaatgttaatgttgtcatggtcttttggctgaattttcatgctttccttttcttcttcaggggaaaagcttctccaattagagcgcgagaagggtattgttattcgcttcacaattggccacaggtaaaacatttctctggttattctttctgaaggcttactttgttgtatgtgttagtcagagacaatgaattgttataatatagtcatggaatggggttgcttcttttgccatttccatcagataatgagtttacaatgggttacttttatagacgtatattttattcatgggatcatagcagtactgtaccattttcggtctgtaatctattgtgctgccattctttttcaactaccttttctcatataacctattgccatacaagaatgtaaaacaatttcactacattcttcaactccctgctcttctgtgtatccagaaaataaaaatcaattagcttataaattatctgtattacctcctctgtcaacatcagttattctggagtaattaggacagactctcctttttaatatatagaggctaactatatgtttgttaagtgtatacatttagtgctctacttataaaccaggataaattcttttcctaagaaatggttgtgtaaatttttttggtttgccattatgtaattttatctgatgtttatgttgcaacaaaaaaacttctactattgcaacattagaatcatcaatcagagaaatcaaatgatggtggaacactaacacaacctgagatgacatactcatcaaagatgtactggaaaatttctgatttgacatgttgccatgtatttttatacatttatggaagttggtaaaaccaattattgtagtgctagtgtgcctccttttggaattgacctgatgtactatttgcttattcattcagtgcaacttccaatagcattttagatagagccattgattcagaagaagctcagcataaagatttccttagattggtaagaaatggagctctttttgtgcaaaagtgaaaatggttatgaaataaaagtggtattaatattgtgcattattttgcaggaacatattgaaggatatcatgaattatctgccaaagcaaaaatttacttctctactgcagttgcaaaa

SEQ ID NO: 388160 - DNA, 1787 bp, Cannabis indica
cgtgactacgatttattgattcatatattattttaaaatatttaaataaaaaatatatatttttattttttctttctcttctctcttctcttcactttcctatagagtttttttcattaattttcaacctccatctatttcccttcttctactctaaaaataaaaattaagttacacccaaatttatttttctttcttccaagctactatcactttcaatattgtcaataaatactaccaccattacaaccacgaactcgacaacccatttcaatttgaaatcaacgcatagtttatcctatattcaaacacaaacaataaaatccaaaaatcaatttcatctccaatttaatctaagatctaaaactcaaactcaaacctatcaaaccctaactcaaatccaattctaaacatgaaatttcaacaatataagatttcaaatgcattaataaatttaaatttgtgtatgaacaaatatgaagaatacaaagattgatctctatttgcacgaaataaagagacttcagatctacaactagaggaaaaaacttgagactttaaacaaaaggcccctactctcccttgttcttgttcgtcggctttaatggtagatcgggaacctttgcctcgtcgtcgatttggaaaaccaacatccatccatatcgaagctccgtccttgtcgctagaaggtagatctcacatggaggagttggagttgccgcctgtgtgttgtggggcttcggagttggtgaaggaggaggccggaggaggttgcctatcaacatgatggtcttttcaaagagtctttagatattacacacttggatgttgcacatttttttaatgaagattacactaataataacatgaatattgtaatgaagatgagaatgtctacaataaaagtcacttttctttgcaatatttcttattattatttattttttaattttatttaggatatttatgtaatataattttttatttaagtatttatattttaaacttatcatattttttttcattttttttgttggttaatgaagtaatggacatttgtcatcttatacataattccacgaataatggtgaagatatatgtttggcggatagtgcaaccactcatacaatacttagagacaataaatatttttcaatttatcaataatgtagacaaatgttaatacaatatcaagcatttcaagtttaggcttcgaaagagctcttatattgatgcctaaaaaatattatagaagatgccttattatccaccatatcaaaaaggaatatgttaaggtttaaagatatacgtcgtaatgaatatcatattgagacaataaaggaaaagaatactgagtatctttgcattacacctattgttttaagaaaaaagtgcatattacaaaaactgtctagtttgtctttaagttcgtacattacatgtataagtacaatagaaactcatgttattgtgaatgagaagttcaaaaactacacaaattcatttattatttggcatgactagttaggtcatcccggtttaatcatgatgtgtagtattatagagaactcacatggtcatttcttaaagaaccagaagattctattattctataatctggtctatgtttatgttatgattatacatttcttaagtctgtcgactcacaattactgtttacatgtgtaggttagggcaagtatctgcataaaagaacaaatagtattagtggccctagaatcaataatccacaaagatttatcatcttccactaagttaacttcaa

SEQ ID NO: 388161 - DNA, 2652 bp, Cannabis indica
aactagaaaattttgtgtcaagtgattcaaagtctatggttgtaaactaaagatccatctatgatctcaagaaagcttcccgtcaatggtatcacatttcatcaaatcattgtctcatatggatttaaagttaacgttgttgacaattgtgtatattacaagttcagtgggagtgaaataatctaactcctgttgcaaaaggagacacgtttagtctcaactattgccccaagaaaaaaatttaaagagtaaatatgcaagaagatcccttatgcttcgtttattggaagctttatgtatgcttaggtatgtgcgcatacaattttggcatacatagtaactatgttagacagatattgaagtgaccccagtatggatcatttgaaggcagccaaatgggtcatgaggtacttataaagaacaaataatcatatgctcacttgtcagatgtttgaaaatttggagatcatcaggtattctgactctgatgttgtgggttgccaagaaactaagagatccacttctggctatgtctacttattgtctggaggagttatatcatgagaaagtgctaagcagacactcatagcccatcctatcatgggaacagaattcatagcttgttatgaggcaaccaataatgcaatatgactgtgaaattttgtcacttggttgaaggttgtgtaaggaattcaaagactactaaaggtatattgtgacaactatcaacaattctatattcaaatgacaatagaagcttatcgaagtctacacacatagacattaaatttctagttgttaatagagagagttcagcgtaagatagtgtctattgagtataaaaggacaaacttattgctagcaggtctactaactaaaggtttgacacacaaggcctttcatgagcatactgctcatatgtgtattgttttatttgatgatgtgcagttttagtgggagtttattttcaatattaattactttgttgattgacactattaccctactttaagtaggttaacttttctgcagaataaagttgacggttttattatctttattgcactgaatgtgttatctctcaatcgtagtttgacataaagtttaaaagactaagaattgatctcactaagaaataaatgactaattggaaataagcatgattaagatcacattatatgtaatttttagttacacatccatacttgatctatgtcattaaatatatttgatatggtgatcattgatgggtccaattatgataaatgtaacgaatgccgctttggtctcgtattattataggagatggaccagaattgtctaaaggagatgttttgagaataattagtaagtttgtgcccacataaggttatcaaatgtaattgttgttggaattaatttgtagaccaagtggaagattaattattgggttatttttaataatctaataatgtgggcttacaaattaagataatttatttgagttaagattctaaattgggctaaataagtgatctaattaaatgaacttaataaacatcttatttggtatgagttttgtaatgtgtaatagccaatagtatacttaattagggtttctaattagtttgctatataaagaacataagggtttggttccatcaattgagtgagaacctatagggagaatattagtctatggaagactatataccaacaatctcatctcgtatataacatcatgaaatcaagtatgtcttctatcttattgattcacagaatactcttgatgatctaacatgagttaaaatttatttttcttttagatctattttctcacaatctgtacataaggtattgtctacgttaacataatgtacacgttatataatttaattgatacacgtaaataaatatttaaaaataaaataatatgtgtttgcagctgctgacactaatatgtgtttgctggaactgaaagttcacttaaagaagaaaagtgttgggattagcactactggttagaatattcacaattggataaattctctcctaacaaaagcaacattggcctagagaacaaagcaataataatcagagagagtgaaaatcaagagtttttgtttgccttaaagctaaaatgtgcttttctcgatcatatgaaagcccaaatgatggtaaggggccatgtgggccgaaggaaggaagatagatattagacaaggcccaaagtggtccattaagaagatatgtctgcatggttgaccaatcaatgcggcgagttattactattaggcactaataaatattgaagcaattcaagtacgatttcataatgctttcaggccataatgttacttcttcttcttcttcttcttcttcttcttcttctgttaggcatgtgataaatgtccaatccatcctacttgactttctagttgagttggtttggtactatcctaccctttgttaactaaatcacttttttttttcccactaaattattattatataaaagaatattacaatcaataaaatgtcactacaaaaaaactgttatttttaaaaataatttttcaatcacaacataatttttttgtgactaaatgtgacttttagtcacaacaaaatgttacttgtgattaaaatatagtatttagttacaagttgtac

SEQ ID NO: 388162 - DNA, 746 bp, Cannabis indica
ttacaaaaaaaaaaagaaaaagatgtcagggatggtgtgtaatatgggagaaaatccatgacataagcatgcatgggtattttgtaatcatcaaacttttgaaaatctaatattgaaaaaaaaaaatttattataaatgtttatataacggaataataataaaaatgtaaaaaaaaatggcaaaatgtggcaccaagtgtaaaaatccttttaatgggatttactcaccaaatatgtattggtcaaggctcttgttgacaaggaattcataaaaaagaaaactgtttgagtcagtgtaagtagcaaccaatccaagttgataacttgatagcaagataaaacaatccaagttgttaatgcagttaaaataaataatttttttgatatatatagttatagttagaataaacaatccaagttgttaaataaatgtcttgtttctctctctttccataattcaaaaaataacaaaaattttttatggtcgagagaatggtgttctgggtcacgcccatatagtcgtacactttattggcaacatatatttacttctatattattttttaaatgcattatagattctagtttgtatatatttaaaataaaaaatatgtataatagaggtgaagaatgatctgaatggccttgtaaagagttataatcttcccatcccattcattattattattattattattatttgtaataaaaaataatataaagtagatgagaagaaagaaaaagaa

SEQ ID NO: 388163 - DNA, 2075 bp, Cannabis indica
gaaaaatatcacattagggttcaactcaatacaacatgttctatatatacattggataagtaagaaatatccttatatatggatagaatggtacaccaacagagaataagctaaatctatacccaaacaagtaataaatctaacacgtcccctcaagatggaaggtagatatttgtaacattcatcttggacagtaactctttgaattgggagggaaaaagtggcttggttaggagatcgagaaggttgtacttggtgttgatgtgaagaggtttgagttgaccattttgaactcgtgctcgaacaatatgatagtcaatatcaacatatttagtgcgttcatctaacaccgagttctcagatatatgtatggccgccttgttgtcacaatacatgagagtgggtgccgtgttgttgaggctgaagtctttgaggagggtgagaagccaaatgagctcacaagttgtgctggccatggcacgatattctgcttcggcgaaggagcgagaaactgtgttttgtttctttgacttccaggagatgagagaatgtcccaaaaaatgcaataacctgtcacaagccttcgagtgttgggacaagtgccccaatctgcatcagaaaaaaccttaagttgaagatcattaacaacaaggttagttttagtataggccttcagttgaggtgaggagctactgtaaaaaaaaaagaggccttcgccgggtgtgcctttcaggtattggagaatgccttgggcagcttggaggtgaggttgccgaggtgctaagagaaattgactaagcctgttgacagaaaatgagatgtcaggtcgagtaatggtgagatagttgagcttaccaatcaaaattttataaggagtggggtcagtaaggagaggaccagtgtccttgctaggagagaccagtgtccttgctgagacaagtgttgggttccattggagtagagacgacctttgtacctaggtaacctgtatccgtcaagagttataatgtaaagggtctttgagaaacagaaatgccattagtagactggccaatttctagtccaaggaaaaaacatacaagaccaagatcttttaatttgaatttggagtcaagttgcctcttaaaggcatctgcatcagcgacattgttgctagcgatgataatgtcatccacgtaaataaacactgcaagaaaaatatcattagatgatcgaatgaataaagagtgaccagaaggtgattgtgtgaacccatcgtgaagtaatgttgagctaagcttggcatacaattttctcgaggcttgtttaaggccatagattcttttgttgagtttacaaactgcattgggagggagctctctattgtgtttgtacccttgggagagagacatgtaaacttcctcctctaaatttccatgaagaaaggaattattgatgtccatttgatataattgcaaattatagatggcagtttgagcaaggaggaattttaaagtattgaactttgcaataggggcaaaggtttctaggtaatcaatgcaaagctattgattgtagcctttggctactaaatgagctttgagtcgctcaatttcacccttggcattgtattttatcttataaaccaatttacaactaatgaagtggtgaccagggaaaagagatactacaatccaagtgggtttaaaaaccgagtgggcgctaagaatggcaacctgaaaaacttggaaaaaatttgtcatatgataaaaaagaagatatagggtgcgcagtggaatactcacatatatagtcttataaatggttggggggaacaatggggcgaccaactttaaatgttcaaggaggagggatactcgtcctagctagaattgtgacattgctttccctgggtggatatggtgcgacgttaggtacctgatgatactcactagaagaaacattagtgtagtagaaaaaagcatcaatggtcgcactagaacaagtattcttgattggaaagatgtgttcataaaaaataacatcacgagattgaaaaatcttgtgagactcaagatcaagtaatgtataagctt

SEQ ID NO: 388164 - DNA, 1920 bp, Cannabis indica
taaatccaacaatctcaatattcatggggcagaggttacatagagtcaaacatgtgctaaaggtgttcagtaggcaggaagtgggggatgttgctcttgattataagtcagctaaggagatgtattgtattgcccaagaggaagcagctaggaacccgaatgacaacttagttcaataatcggtcaaagagaaacaaaaggtgtatgtgattgcaaaggagagattagctcatgttctcagcaaagcaaggtcaattggatcaagtttagtgatgagaactcaagctattttcatgcagttatgaggaaaagaagattggaaaataggttaactactttcactaagggagatttgattgtggatgattttgaggaagtagttaatcactttgtcaaacattttgagaattttatgggaaataatagcactgcaagtagctctatagataggaagtgtatagagtatgggaatcgcttgaacttggaacaacaggtgaagttgattaggcctttcacaaaaggagatgtcaagaaggctctcttcagcattcatacaacaaagagccctggtcttgatgaattcggttctgggttttataagtctcttgaataacattggtgatgatgtttctagtgcggtgttggatttttttactagtggtcggctcccaaaggacctaaatgagacagtgatttctttgattccgaaagtgattaatccttcctctgctaaggattacagacctattgctttttgtaatacggtctataaatgcatctcgaagatgatcagcgccagactatcagaagtgcttcctgatattgtggatagtaatcaaggagcgttcatcaaacatagatcctgggctcacaacatcatgatttttcaggatttgttgaaagggtacactaggaagaacatctcagccagatgcatcatgaaaatagacctaagcaaggcttatgacatggttgactgggagtttgtggaggaccttctcagggtgctctgttttccttcttggttcattagttggatcatgacttgcctgaagggaacaaactatcatcctcgtctcaacgagagaattcaaggtagtttcaaagggaaaaaaggccttcgccaaggagatccgatgtccccattgttgtttgttctgattatggattatctcaccaggttgcttaggcaaagctcaaaggaaaaagggtttggctttcaccgtttatgtaagaatcttagattgatgaacttgtgttttgcagatcttgttatcttttgcaagggtaatctaaactcgattagacttactcaagatgcgtttgagagattctgtaatgatacaggtttatctgctaacaccttgaagtctcacatttactttgggggagttagagatgagataaagtctaagattctaaatattgtgaagattgaagaagggggattccccctgaagtatttaggcgtcaatctaagaccaactaaatggaaggctgaggactgtggtatcattttagacaaattaaataagaacctcaaatattgggtgagcagaaacctttcctttgcggggcgagctcaattgatccactcggttctgcttgcgataaggaacttttggatgaacattttcatcatcccttcgaagataacagctgctattgataagagttgtcgggattttctgtggggtctgtctgggaataggagcaaacttcaccgagcttcttaggagaaggtgtgtctcccaaaaaatcctggtggaattgggtttagagaggggaagaagtggaatagggccctgttagctaaaaacttgtgggctcttgcaagaaaacaagattgcttatgggttaactggatcaactcaatttatttgaggaactatgacatatggaactgttgggttttatgcc

SEQ ID NO: 388165 - DNA, 1639 bp, Cannabis indica
gtagcataattcaacatggttcccacgagcacgtgtatttctattgtgcgtggaagaccgctgggggttcgatacatctccaaccttctttcctagagggaaggattgcttgaagtctattgaatgcccactgtggttttcaccttcagtcttgaaagtgaaactgttgtttccttccttctcagaaaccaaagttcgtagcataattcgacacggttctcacgagcacttgtatttctactgtgcgtggtaagatcgctggggttttattacgtcttcaaccgtccttcccataggtaaagattgcttgaagaaaattgagcgccttctgtggttttcacctttgttcttgaaagtgaaactgttgcttgaattttagtgcgacgtcagccttatttcccaaatgccaaagtttgtagcataattcaacatggttctcatgagcacgtgcaattataccgtgcgtggaagactgctgggggtttgatacttcttcaaacctccttcctgaagggaaggattgcttaaaatctattgaacacccactgtggttttcacctttagtcttgaaagtgaaacaattgcttgaattttagtgcgactttagccttccttcccggaagccaaagtccgcagcataattcaacacagatcttacaagcacatgtatttttaccatgcgtggaagaccgttggggtcaatacgtcttcaactgtccttctcggaaggaaagattgcttgaagaaattgaatgcccactatggttttcacctttggtcttgaaagtgatattgttgcttgaattttagtgtgacttcaaccttccttcccaaaagccaaagtctgtagcaaaattcaacactgctctcacaagcacttgtatttttatcgtgcgtgaaagaacacctatcactgatgactctagatggaggggacgtgattaaggtgttagcaaaaatctagctatgcctccctaaaaggagcctgactaggactgtaatgcacggccgaatctccccttcattaatccaggtaatgcatcagctatgttataagcaagtgaccaagaatttagagacgaccaaacctctcagctcactttgggggtggtacacctagcagtatatgcccccaaaaatatacggtgcattatgtctgcctactataccaagtttttgctaacccttccgtgataggccaaattttagatgcattttcaaccaaatttcctaagggaaaaatacgcttgaatttcgtcttgaagaaaaaattaaatcaaagtaaaccttgaaataagatgggtgttcagtcaaattctatgagagggaaaaatttgcctgaattccttcttgatatttttgataggttttctaaggtttaattcatgggcatcgagaagctttgcctacacctctatacatttttgtccctgtatcgattgcaagacacaacctaaaatccataatgtgtagagctctcccttaggttcatgtgtggccttaagggctgaagactcttattgaaaagatatgggataagaaaatatgcgtgaatgttatcacaattttagcccagtttctggacaagggatgtaacgccctgtccaacagggacgccacgtgtgtgcaatttaataaa

SEQ ID NO: 388166 - DNA, 1179 bp, Cannabis indica
ttgtttgagttacttaaatcattgagaatctaatcatgatttcttcttcttcttctttttttaataacaaaatgtaatcatgacttttaaattcatttttgtttggaaattatgtatgcttgttgatttgtttgagaaaagatgtaaaattattgtagaacttatgtgcttactatttaatatgaaattctctagacaatgcaaagaaaatgattaatattttttgttgaaataattgagctctcaagccagtcttgataaatttgtcttcctagttatccctttttagcctaatttgaatcactttaatgtttgatacttattttgagcatatatatcccataagcatatagagtagttaagtttttttttttttttttttttttttttttttttttttttcatctatagagtatatacactacaaatagaggtgaatgggtagattgggaggggaattgatgaaaaactaaaccaacctgcaaagtgtgattaagtaaaaactctttatcacagtaaattttttatgccttaatcgtaaaccaatcgcacttatgtgcagtgtaaaattatacgattaaccataaataaattattaatttataaagtaaaagaaaaagaaattctaataaacaatactcataaaagttttaagttgagaaataagaatcaattggcaaaaattgttatcgtcattataaaggaaaagtagtaataaataataattatttgtacgcaaaaataaaaatatatatataaaatattaatattatatataatatagtgcgaatattgtaattttttaatatttattttacttaatcgcaacaccacgataataggaaattttttttaactataattgcgccacaaataaaattaactacaacataccgtgtggtgtggcacagataatgcaggtttttgtgcttaaatgaatattctactcactcataacttcaaatactaataaaacactataatatatataaatatatatctttatatattaaaagtgcttatctaacgacatttcttggtttaacagaatatacttcaaaataaaagaatattctgttaaatttaacgattaggtttgatctaccgttaataaataaacccaaaaaattaaacaatcttttaaatattaataatctctttattttttaaaaaagaaaa

SEQ ID NO: 388167 - DNA, 613 bp, Cannabis indica
tctctctctctctctcgtctgaaactgtctctcgcctgaacagcccacatgcgacggcacatacaggcaacatcctccaagactccatcgagtgcagccagattattttctcgaccaagacccgacgtcgacagctccaccgtgactgactggtattcttcttttcttattaattcttaagctttattttgcatttgggtaatgagttttcacttttatttctttataattactttttacttttgcttttttctatttcgatccataatgcaaaagtaaaaaaatagttggttttttgctctggctttgtttgtttgtttgtttccaacagagatatggtcctccactttacatcttttcttttgaaaaacatccgggttcaaaaggaatgcatgtaagatttgcatcgtttgtatttttttataccatttgatggtacctttccagagatataggtgaaactgtgatttttggacatcgtttgtcttttgttttcatgttagtttttgttagtgctcccaaaatctaatttggtatacaattttttaaatatacagtagaacctctattcaagaatacacttggaccaagtaaattatattctaattgggag

SEQ ID NO: 388168 - DNA, 2470 bp, Cannabis indica
catgttataaatcataatattcttgaatgccttggtaggaactcagtattcaataaccttgatagcgagctggagcttttcccatatctttccgaggttgataatactaatctcgtcgcttcttctctgaagacattacgctccatctgacaatcacagttcttggtgatgaagtgaacttcaacagccaatatgatttgaatgttagcttttatctgagaaaactgtctcgacggagctgtgaatctcattgaaagatgcgtggagttgactagtgaaggtaccgcgagcatgacttcctatggcgatggactgcctcgctatcacttgcttttgtttacgctgagcgccatcacagtcattatatctcatccacataacaaggttagtgcctggtcttgtacatctgaagttacatggtttctccttgatgcacaaggtaacagtttgtatatctttgtctcgcataagactattcagtcaaccgagttgtaaatatactttgtcaattatgcttttaacaagttattccacctcaaatgtaattataattacgtgcctgggttcgtatttttcccagcttgacatgtgtcttcctctgatgtgttagccgaatttcgagtaaaacacattctaaaatagaattccaaaatccagaagtttaaagtcacgtagaatatttggaaattttttattaacctatgaatgggtaatttagatcattttaagccaaagtggtaagaaattagagaatcaaaagacctgtgcgtatgtaagtcagagttaaaatccctaatatcttctactattggatcggtcaagaacagttcaagaacacaaaattttatagcaaaaaatttagaaaatcatgcatgtattcaaaagaaatttcataaaagagaagaaaagataacttactcactatttgcagctttccgaatgttctctttcagcaatggagagtccaagaagatttcttcgaaaatttgagaatgaaaagagaaaagtttcttgttgtggttttttgaaaaataaaatggctaaaagagtttcactgaagcttaaatccccttttctaagcatatagagggataactaatcgattcgaaattcaaatttttgggtttttctcctaaaagggaacgttagtacttattacaaacgtcacgcatgcagtgtcatacaaccgtcaatgcgtgatttgaggtacaactttagagataatattaaatgtctcgacatcaaaaagaagttcgattagtcacgtcagatcaaagataagaattggacatgcgtcacccattcgatcagctttgtggctgagtaagtccacttgcaaccaagaagatcccgagcggacttgtgggggcaaatgttatccaaatttctacagggtgacgtggcatccatctaggtgaaatgtagaacacattccataacatggatgagaaattctactcttgataagttgtacagggagatttgatacttgaagtcataaatagaagttgggatgtctggacaaagcatgtaaagacacccgactagcttccatcaagcaggtagttcgcatgcaccgaccaggggatgcaagttagacatttttagagatatatcatataaatcattatgcttgaaagacatggcactgtccctaaatttataggatagatttgtagtattgaagaagaaaaaaaacctgcctaagtttcctattctgccaaatgtaattataaaaagtagataggttttccattttattctttattgattttaggaaaccaatctaatgtaaataatggacttatctcacttttcagggataggaaattcactcagagagaacacacgagagaaatctagattcaagagtaaaatactcgaagatcattgtaagagctttcgagagagatcaaggcatttttgttcatcttctcacaagtcattacaactaaatgggagtacgctattatcatcaataggggttgaacctctatgaatctggtattttattactatatattttctatattcgttattttaattatccttaaatcgctttaatttgactcactgttgttgtctaaaagcgaggtcaacaatttctattaaagcaagttactaacttgttactgtaagtctttacagttacgattttataatttattgtagaagaaagaaattattttttgtaaaatactgaattttaatttttaacagcgtgtcttccaaagtctttctaaatcaatagaatgcatcatcatattaaaaaaattagattatactgaaaataaaaagggaacaacgacgtctctatttagagtatctctaatgaagtgctaaaatagtagtgtagtgttatattttagtatttttaagataatcaactcttgaatttgtgctaaatcttatattaaatttgacctttgttaaaaattgtactaaattttgcacaagatataatattatg

SEQ ID NO: 388169 - DNA, 1450 bp, Cannabis indica
aaaaaaatattagaatattgatgcttcaccacatattcctcaatgatagatgacttgcattaattaaacaaaaagccggtcgaatatatagtacaattttaacaaacatttttcattagtaaacctaataacgcatcataattaaacttaacttaatttcaatgcctgaattaataatgcaacgacttattgtttcatttaatttaatataattgcatatatatttgttttccaaacttttaggaaagcctaaacatgtaaatatatatatatatatatgtgtgggtgtgtgtatgtatgtatatgtctaaatgtgtaggaagaaactaattaataactgcataagttttatattttgtattgtattaaggttttaggattgttacggttatttgtttagttattctatggttgttttaattgtttgtttttctattttaaggttgttttataataagacaataattttataaaatttgtataacagtaaaattataaacttttgatttttgtttagaatctaatattttgtaaaaactccaaagatttttattttataacactaaacaaagaccttcaattcattggataatatatatgaacatgtgtacttttagtaatgagctgtattttaaaaataacttaaggtacactcatttatagtataaaatataaataacttattgtacttatctttgagggtcaatgaccacagtgtctctaattgagtgctttgtcgattctgtttttaccaaatatttatcaaacatattatatcttcaaagttaaatcatatttttacactttattgattcacttttttctggaaagattaattcatgcataccattataagtaacttatatgacttgaagaagcaaaattcctttttcatgattattacccttaatggagtaattaaattgtgagtttttttgcggctaaactctcttaattactactatttcactattatatttaaccttctaaagttaaattttggtggtaataattaaaatcctccaaactacaaaatcattaacatttttaaggtgtcatctgttataatgcgaattttttacctagaaactcgagaccaagctcccataagagtgatatgtggactcacattatttgaggattgttgagctgtcaagaagggactcctcaaaaataaatctcgcctaaactaaacttgtgagatgatgtgaccgtgacagagtatagtcgcattattacgccttgcgtaatataaaataaagcatgttagaatttaggataagatgaatgaggttccatctcaaaaccaattgacaatgggaggagtagctcattcatcttatatatgacaatttattttcacacattagcaatgtgagacaaactctaatacgccctcctcacgtttgggcctagaatttgtgggtataataaacgacctttaagagac

SEQ ID NO: 388170 - DNA, 504 bp, Cannabis indica
tatataactcttcttcctcgtttgaattcttcgcttgaattctttattgcttttgaaaattcttctcttcttgtgttctgccatggattgtactagtgaatactcagagaagcaaaagaagaagtggaaagaagagttaatggaagatgtgaagaaggcgcgtagtgagaggcagaagcagagacagaaaaaggtagttgaagagattcagatgaagtggaaagaagagctcgatgaagagcttgataaggcacgatcagcccaaacccaaagcaacacccatcactttcttctctgtcaatgatttctctctcattatttttttaaatttgtctttgaaatttgatgaggaaagggtctttgaatttgtttgttaattttctatttcattaattactctttgaaattgttaacagtttatataaagttgaaatcattttgggttatttcagcaaaattttttatgttttaattttttacatttatcttctatttttttttttt

SEQ ID NO: 388171 - DNA, 1116 bp, Cannabis indica
ttcctgcgcacaaataaagaaatttcaactctcagagcacaacagagtatcgtatcaaggttaatgaggaaactttctataatgaatattatgtaattaattcatagattaattgtccacaatcagtacacatgataccaaatcaatccaaatccgatctgcctagtcaacatattatcttctttatgggctggacttcatgagatagcctaagggtattatttactgtactccccaatagagggaaaagagaaatctaatgtaattctcaaactactataaatatctctcgaatgctatagattaagggttggattttcttgcaaactttgtccaggcaaactttagaacatacattctttaaagaactacgaaatcatactgactcgtgaactaaggctaattaacgggccaaccatgtaaaaaatcggttatctttttactctttctcttttcggtaagtattttagtgctttcattgagggctgaagaaagcagtgagaccatttgtagattacattcaagtaatcatggctctaacccgaaccaagtctggtcttcattttattggtcctggtgccaaagctggagactctagtgacccctaagaggtaactagtcattagaaaggtcgtcgggatgaagttttgaattgagatgatcctatcattaaggacacaaaatctggagaaagtagctctaaggacgatgaatttaatgtcgaagatgccccagaggatatgtaggaagacgaccctcaggacaaagtcgctgatgatgatgttggagagaagagccaacctgatgagtcagatctcgttgtaatcatggcaagacaacttcaactggcctaaagcaggttaactcgacaagatcaattcaatgagttattactcggcaagatgactagaatggaggctgtaatgactgccctgactaaactatatcccaacgtatacgctcctccaaaaagtgatgcacttaagaaagctgttgtgaaaattctattgctttataattgcgcaagtgtacacaatcacaaacaagtaatacaatgataagtaatcaaagttcgtctccacagggactttttactaaataatgttaaatcaacta

SEQ ID NO: 388172 - DNA, 1080 bp, Cannabis indica
agatcattacaaatacattaaaaggaggcaataattgttctatggctagaaagacatgtgtgaaattgagagaaaaatcaaagttaattaattgatgattacatggatgttatacaataagtattatcccaaagaacaagggtagtagaaactaacattgatgtgaaatagaaaaaccatatcatcaataacgtatttccaaaatgttagtcaattaaattttaatcatccaaatagatggaaacagagagaatgcaaatttttaaaataatgtctattgtgtcaagttttcttgacattgatcaatccagtctgaaatggaagttgcacatcttaaagttttcctctagttgagaaaaaaaaaatggataatatatttctcccaaacatgtgtatagaaagagagtaacaaataaagtttaaaacgggagctcaggaaagtacaaacatgtataatgaattattaaatctctgttttagtattttttctttctttctttcttcttcttagaaaccttcatcatcttttacaattctttcaccaaataattcatataatttcacatcaatgagtttctttgacaaaaataaaggcacaagaaagacttctaaaatcaaattatgtaatatcaactgggttcgtgtataagcaatataaaatttacaattttcgaatcagcccgtgactgcctatttcgaacaatcacagacaaataacctactatagaaagcaaccgatgtgatttattctccgttgaaagccatagctacctgttgagtcgatacagctgtagctgaagtgacattaagagtcctactggtgagaccgattgggaagcgggttgcaacaatactacttctacgtaccagaaacccatgacgttggactttggactttatgggcccgtttggcacaacttttggaaaagctaaaagctgcttttcaaaaaagctgtgacaaaaaggtgtttggtaagcagttaaaaaacagcttattgaagaaattatggaaaagctacagctaaaagctaaagctggtacaacccaacttttagaaaaagctgttttgattaaaagact

SEQ ID NO: 388173 - DNA, 529 bp, Cannabis indica
atatatatatttatgtgacactaagcaaattaaattattaagtactttgtttcgaagctgattaataatataatatatgtttaaattaaataataataataaaactggctattttgtcataactgtatatatggaaaattataattaatagatagtataatataataattctatttttgtttttacaatgaataatatagttacagtattaatttcccacaaattttgcgaaaataataattaatttggaatgtaaaaattaagattttaaacatttttttttacgcagtgatcaaaatcacacatgatgaacaaagtagcaattcacaatcggcggaggcaccttctcgaaccaggatactcgttgtctaaccgaagggcacgctttgccaaaccatgtgctgcagaattcttatcccaagccacatgggacaaaattgattgcccccgaaaatttagacaaccaagctataacgtcttcaaaataacaccacatctgtaaagcccgcttagtttaatttagaaatta

SEQ ID NO: 388174 - DNA, 793 bp, Cannabis indica
ttttttttttttgtatttatttagtgatacttagttatttagttattttatcttggtaaaagaaaagaatatatagaaattatttggtgaactatcatgctatgttaatagggagaaacttttctttatagaaaataattagttgattttatctattaggaatattataaattattcaaatagttaagttggtttcttaagacttttattttagaagaattagtactaaatattaagaggcagtgctgtttagacgatcaagttggctcaatagaaacaatcaagaaggaggagctttaacacctacaagaagtttaagaaggagacgaactacgaggctgagctagtcatggtagaggacaaggccaacgagttgcaccgttatggaagaggcactcgcgtaagtacataataatgcataagctaagttgagaggacgctcgttttcgcaagtagttggtgaaagagaacgccaagcttagggaacgactccaagctcaggatgaaaagttatgttgtaataagcagtaaagcacggggaattcaactcaacagccaacacattgctttgagccaccatatgaaagaattaaaaaatagaaaccaccaaaatttgaaggaggctctaatccattggaggggaaggaacgacaaaggattgtagcacccatattgggatatatggaactcaataatagataaccgacaaataacttgataaagctggaaatgaaggatgatgatgctgggctcgatatggatgttgggttttatgccctaaataaaactcttt

SEQ ID NO: 388175 - DNA, 1015 bp, Cannabis indica
aaaaaaaaaaaaaactggtatccaaaaaaggttattatagagttttcactagtattcgaagatgaatgactaccacaaagtttggttgttactaattaggtcgttcataaaattaatttgattatttggatgttttttaagttgttaaaaacatcacaaacgttcaaaaacacacaacttgaacatgctaaaaaataattagtaattggttactcgtattttcagcattaattaattcttttccaaagtctttcaaattatttctactctattttgatactcattttctgaataccactattttttagttagataaaaaaaagactatttgtacagtgaaaaagcaacaatagttgaagcatgtttaagagtattcctaacaaatgagatataatagatatattatatctaaaaacttttaaaaaaggtactttcaatattttttagtttaagaatagtgtattttcacatttagctattttatttttatttttattattattattattattattattattattattattattattgtagtcattttttttattttttcatgttatatatataaataaatttaaatgaatcaaatatatttaaaaatgtgtggaaaaaaattgatgtatagtataatgaaaagttttaaggtgaaataaaaagaaaataaagaaagatttagagcatgtttggtattgttttctgttttttgttttcaaaaaattgtttttagaaatgagaacaaaaaatagtttgtgaagtttttaaaaacaagtcatgtttggttagtgttttttaaaaactaatattgaccaaaagtgaattggtttttaaaactaaaaaacaaacaattttgttgttttctaaaattcttgtttttttgttaactttgtttttctgtaaaactgttttaaaaaaactaaaggccaaaaaagtcaaaattgttttctaaaaaacaaattttctgttttaaaattaaaaacaagtttttagttattgatgtcaacaatgcact

SEQ ID NO: 388176 - DNA, 586 bp, Cannabis indica
cctctagcgagatgctcctatccacattagcgtcgaccgcttagaagataggagtgataacgattatgcgattttctagaattatctacacgtgtttaaatggaacatgatcaaagcccatgtttcgtgaaaacagttatgtaattcaaatttaaatgtaaataattgccaacctatattcctataaatagggatagattctacagactaagagacggaaaatttttgagagaaaaagagatcacaacctgtaattctgtatccaaaaatatctttaataagatagactagtggactatgcagatttaactgcaaaactacgtaaaatacttggtgtcattcttattattctacttattaaatttcttgtatctgtgtttaattacgaaataggctcattaaccattaacaaaaattgagagcctacatgataaatgttggattatggtcttatcaagatctagatttactagtatgttatttaacaccctaaatatgaatttctaaaataatgtaatttaaacacatataaagttcaagaaaccttacattggttgcagcggaaatgactgcttccgctcagatc

SEQ ID NO: 388177 - DNA, 2907 bp, Cannabis indica
gtccaacagggacgccatgtgtgggcaatttattaaaattcttcttttatatactatataattacactaaaagtgtgggtaattaattttttataattaaaattcgacatataaaactattcgataaaagataagtgatattaactacggggtccctctgttttcaaaatattcataaactggtttaattgtgtttttacaacataaactttgtaatcccaaaatactttcaaaatagggcatcctgtttactaggccatgccactgcagctgatacgtacattactgctacgacctcgcactcatggctgctcaattttagcgttccctttacctgcaccataaagcacctgtgagtcacgttaacttagcaagaaaagtgaaataaacaataactgataataaccatcaatttaaatatcatattaacacgtttacacatttacgtaatcacacaattctggtactttataaagtacccctttttacccctatttcgagaaggcagactacaaatccttctaggagtgaattgatttgggagccagtttcttctaccaatcctcagcagacttggtgagggtcagggagaagcacaaataattaacatcttcactcactctagccacttgcatcatcttgttatatttttctagatgagtcttttgatctgtgtgcccatcatacaacacgattttggtcatcctaaggttttctaggagcaaagcttctgtgaaccttctgacgcatggcttcgggtcctcgtcctcagagtcggttaggaccctctttgttttcgaactaattttgtcaaagcagcaattttctcttctaatcttttggtgtcactattcaggagatctctttctcataccttgttatttagatggttcttgaggtcattaccatgtggcctcgccttttcactttttgctttttcatacttggcatccaaacgctttctgagatctgctgtggaccagttatcatcagaatattgttccctggtacgatcgtcatggttaatagaatcactaggccattttttccatcccttgggctttggtactttcgtactagtcccgtttggcacaacatggcctttctgagtagaaggatgcccgagcccagaggcatcagtggtcttctgcacctgagaattggccaaattcatactttttgaggaggctcgggagcagcagggttttaagggtcacctactttttctttccccttgtcctgagcaagaggagaggttccagcattagtggggttttcctattgtttcaacacattttccactgagggttctttgtctgaatctcccccgtctaggtctccaaacttacttcgaaggaaaaccatcattctttccattttctaagataaattatcttgatgggctagcttttactgagactcgaacaactctttggaaactcaatcacttcgtggtcctgctcattgtggtagtcatctttgtagtgtccatctttgacgtattctccatcgtcctcctcctcttcatcttcaacgtcctagtcttcatcgataatgttgtgctatttatcaaggttggcctctcggttgtttgggttggataaatccccttttcccacattgctcggctgggcgaggcctagagacaaagggtttacatcctccataacagcgtcaatgccataaggagggttcttcttggtaacagtttttctcgtaaacaccatggctacaacaacactatgggtttaggtctttctttaactctcaataaaagcactaaaatatttaccaaggttttcagaaactaaatatttaggagctaaagaaataataaaatgcaaaaattaataagatagagatttttacatagtttaggtgttaattaaccttgtccactagtcagtctattagcctctaaaggcgtatttgatcagtttacagtattttgtaggaaactctaactctatactcttagtttcttgaagaagaagaattagagcagtattggaagagcttcgaatatttagttggtgatccccccttcgtatggaaatagaagggtatacataggttgtgtggtgggtatggacattcccatgacctgcctaaggtttttgcagaaatcccactaatggggtaaattacatgcaaaaatagctaaccatagtgccccttagaaacaattgtgctcgtgcgtgcagcagctggacaattggggaccatcgtactgggtggacacgtgttgccaaaaagtttaacctttaaaagtataggcatggaataactgtctgccaaaagggtggatgaggtacgcgcactacaatgtctggacacaggggacaagattcgatcctgtgtcaaaaaaaaggtataactgtcactgggtgatccaggttattccaaaggtagacatctgcaaccctcttgggcgataagtgtcagtgattggcccttcaagtatccatccgggttttgattgggtatgttctaggggacctctctgggtcctagagagacaatatgtcttccgcatccgagaagcaaatatgaggcgaggtagacttttgattatgtcttggtcttgattgttctcaatttcgtgaagcttctctgtgagtagacaattatggggattttaattagggagattatctcttcctttttatgccacttgttacttgttgagaaacacgaataacatggtataaaaaaataaggaaaaaaaattggtaaaaaaaatataaaaaaattgagtttaacttaagtattttatatataaaaatatttttaatagtgcaaaaagaattatttttttgatatatttttttttaattaagtagctaaatgaaatatataaagaaatttttacactaaaaatacaaaaggctaactttattacatata

SEQ ID NO: 388178 - DNA, 995 bp, Cannabis indica
aatattcggcattgcacatatccatatacttgttggagatccgtttggatcttaaagtactttatgtgtgctaggtaatcttctttccccatgtacatcttccaagttggcattttgaacttgggtaagggcaatacattaatgtatgcagagaatggtgactcccttgattgtcaagttataggtcggacgactttgggctagacaggtctttaatcatgtttttgagttgatccaactatgcttctataaatgggcccactgtgacgtcttcttgcctagacaacattccttggccggccaaaacttcatggttggagaggtatgtttggtcgaccaactcttggttggacaactagtattgatcagccagtctttgggttgaaaatgtgtcttgaccgtcgatgagattctcctggttagccaggccgatttgtgggctaataggaggttgatcgtatcaacttcttgagtttgatttatccacacgcctgaaactattaatattacgtggaccactaaaaatttaccacgtgtacaagtgtgtacatatggacagtccaccgtggcacttaactgtgctttttggacggaggggttcaaagcaaaacggaatgggagtttaggtagttttgccccaaaaaattgatttttgtggttaaatgttaaaaaattcaaagttcaggtggtttaaccgttaatatccctaacaaaaatgagatttggatatttttgccactaaaattttaatttttgtaattaagtgttaaaaaatataaagttcaagtgagtttgctgccaatatccttttattttcatatacttatagaaagtgagaaatttagtatttttgtttttctttagggtgtgtttggaagtaactgtgtaattactaagtagggtaattactagggtggtaattacacagtgtagtaattgcactacattttaaaatgcaaggtgtgtttagatatgaggtggtaattacatatgaa

SEQ ID NO: 388179 - DNA, 866 bp, Cannabis indica
tttttttttaaagatcattcttatttgtgattagtggggttgtgatgttaatgtgaattatggccgtaatcccaattttgagaatactaattaatacgaggatttagcatgacaagaaagatacgagacagtagactagattcagtggctgtcttttgtacgataatgaaaggaataaagaatgtgaatgtagactggccagttatggttatgagcttatgatgataaagtagtttgttttactcagccttgttgtggttgtgagttgtcagtatggggtgagtgagagacagtgagtaggggggcgccgaaagaggattcaactttgtttccagtttttgtaagctttaattgaattgaacacaataacagcaaagcaaatcaaaacaaagagagagttgtaaagaggcggctgaagttgagagtgatgtatttgtaaagactcaagagttgtgcgggagttatgaagatgtccagttcagttgtcgagagtggagacagaaggagtaagaggcatcgatggaagtgcccactgctaggaaggctctttgtttgggtttttcgatacaatatatttattgaatagggtgaatatataggatgattggaaaagaaacttccaatccaacagccgtatctaatttcgtcacaaagctatggagacatgctttttcatttatgctaacaattgcttcggggtttgctctcctaaaagcattctctctcggttgttgaccaacccaaacccaattcctcgctttctattaccaattactactacaattttcctagttgaaaacaaagttgaaggaataacaagtattcaaagaaaaagcagggagaaaattgaaatgaaatgggtagga

SEQ ID NO: 388180 - DNA, 537 bp, Cannabis indica
tttttttttgtctaaatggcaaaatagggcgaggactaaaattattttttgtttccggacgggacaatgatgggatcacactcgtgttctatttatatttctaataatattttataatttgtaatttttgtttttatttttatctttttagtatattagtgtttttttttaatgatttttaaatcatattttagataataattagtttattaaataataaataatgtataatattttaattcttatgtagtttaatatttttattataaattttatttttcttattaaggaatttttagcgcctcgtcaccgcccctattaggggattccccactccatctcggataaaaaaaagtaaggaccaatttgaaggtgttatctatattctcgggcggaagacacgtggagcataactttatatatttgggatttggaagtattattggctccttggattcggaaacagccaaggattattatatacagtagaacctctattcaagaatactctattcaagaataacctctaatttgtta

SEQ ID NO: 388181 - DNA, 3841 bp, Cannabis indica
atgaaattagacaaaagtcattagattcgatcatctcaatagttcaggaggaatttttaacgttcagaaaagtttagggggcatgattcggtacatgtcaaaggttagggggaaaaaaatcataattaacatgagtgccgtcgcacttaactctacgtataaattactgtcttacctagtatcccaagtatgtggagattccaaacctccaggtgttcctgagcaagcgctggtgatcctagtcacaattcttgagatttcacatataggattaatctcaaaattcaattccatatagtcacataatttgaattccaattatagataagcacatagagctcgaaacaagatttccaacgatataaagaacgtctcaaatagagtcccaagtcaaaaattatggcgaaaacaaaactcaaaaaattcctgagaaaacagggcctcaccgcggcgagcatggccacggccacgacaagcaactgtaggttgctctcgccgcaaaaggcctagccgtggctgcgacgaggggccctgtaacccaaaaatttccattttcaaaaccattgaaaatcaataccaaccttgccaaaactcacccaaaactaaacataatctcatatttcaatacatgccaaacatattcatcaacaatcatgattagaaatttaaaacaaagttccacatcaaaattaacaacagctaactcatgatataccacaattgctatgggtacacataactcacaagcttaaaaaaaatccaagctcaaaactgccaaggaaacccaaaattttcatggccatacccagaaatcaaaccttctttttttagccctaaaaacaatcaaaacaacccacatgcataccttacaatcctacccacataatcatgcataaaacaacacaaattattcaattctcatatacatgcatttgaaaactaaaagaacatcaagacaagtttcatagttgctaaaattagaatttaatttatacaagagaaattggagagctttaccacaatctccacaagttcaagcaaaaattcacccaaaatccactccaaactcaaagctttctttcaattctgaagaattcaacaaaatgaagaggttaaggggagagagggggttcaaacaagagaggttcacaccagaaatgttttttctcactttccaaaaaatgattttcttgatgaataatacactaaatggtcaaaggaccgaaatatccccataagcaattatatccacatatataagtaatgacacatttgtcaaacaacacataatacataatttttaggttttcatatttatcaaataaggctataaacaaatctcgaaatgtattttgggccccaaacccggtttggcccaaaatacccaattatgactataccgcaccagtttgtcgaaaaatacctgcagaaaaatagaataaataaactatataataatatagtccacaagcacgatatatcataaaaattacaattttacccttctcgggtcaaaattacgaaaaaagcccatagtaataaggtcttaaaatgcaatttatcagcatagtttcacttattaaattatataataatataattccaaattaatacataattaaactagttagggttgctaatctaatttcataaaccttagggtattacaagaacccagtgcccaagttaacaatcaacctgatatgctggtttcaataatcattcaaataccaaatctaattcaaccattgaatccagaatggtccaaaatggggtaggagacctcgcacttaaattcgagaactttggaagtatgaaaatgaaaaattgggagcccgaaaatgaagtacataatgcccaggttgacaaatggcctggtgcgttgggttttgcttatgcgattttgattccaattcgattgtccgtctagtttttcataataactaaatccatgaagttagagaagttaaattcacaactttctatttcttattttcaacatgagaaactcactcggaaatgaagagttccaagtctctcatttccgcaaaacaacaacatcttcgagaactggtgaccagctctaccataacatagaaacaaactaagtgctgtcaaaatatcacttatgtatcataaagtacatccctcaaacgtttttccacttacctagcatccagattgacgtcatatgtcaacttgggtgtactgtggtgttagatgtcaacctgggcattgggttgtgaacaaccttcagtaaaacggtcataactcactcaattgatctgattgacgcgattcaacatgagtttcaaacctaattcaatgatctatcaagtcatgtctcaaataaattgagataaaaaaggagtgtaaatacagtactgttattaaaaaatatagaacaaagacccttacataaagaaaaataagacacaagaacaaaaaacaaatgaactaatcaccaaagggacctcgttaacgacccttgtctcattgcatacaccccaaacctctttaaacaaagctcgagagatccccaaaactaaaccgcgacccataaaatccaagccaaggaaccactaaaccaataaccaccaccattgactaaactgcaagaggccaactaaaaccacttagacaaaccagtcctgagttggaccatcatagaagaaaaacccttcaacgaatgatccatcccaaaaatgacatccaataaaatttcggcgatagttgacgaaaacccactgcccaagaatcaacacaaaccagccaaagaaaaatcagaaccaaacaagaacatcgcaagaaacgaagaagaaaaccttgacaatagccaacattgaacctaatatcaaagtgtgaacacaccatccccccaacctagccacaaaccaagcccaaaaagaggtcgacaaaccctggctggagagggaaagagaataaattaggtggcgatagaagcaatacctagagaaaaaaccataggtcaaatcgtaacaacatgatacccttatgattaattaacaatgcaaacttcctaattccacaatatcccattaattttgttttctccaaatgtacctagctctcccaaatttactcttttggctcatttttatccaattaagcacacttacaatagaataaatttgagttctgatgtgctaatgaaggtttgcccaataaaaattttcgtctaaacgtcattaagcctttactagtagtaatttctgctggtaaattgaccgataaaaattggccaatgaatacatttttttgacacctttaaactattatatgccttgtttggctaaaattttacttttatttatagctagaaatatatataagttttgactcatttttacctattggataactgttgtatgatgatttttttttaatgaaaaatactttataaagtgtttgaataccattaaaaaaggttttttgtgagtaaattaaaaataattatgtaaattattttaattttaaaaatagcttctcaaaaatccttttgaaaaaaactacgtacaaatcataactttttccaaaaagatttttaaatttaaaataaaaataaaaataaaaaagacttatttatttttttaatccaaagaacattaggatgcccttttagatgctaaaaaaacatagcagatcatatatatatggaatactagatgggtattacctattaatgagtaataaacaaatttaactataaatattaattttaaaaatattaaaccattagatttgggtccgataagagaaatttgaatttctgtgcttaatttagctacttaattaaagaaaatatcaaaaaatacctctt

SEQ ID NO: 388182 - DNA, 638 bp, Cannabis indica
ttaattggtcgacttatgattgacgagttttttgttacaccttgatgagagcagccattctcattggtttggtttttagctctctgactctgactcactgacattctcgctcttctcaattcgatttgacgcgtggcatcttcacgagacgccgtacttccacgtcaacaacttactcttccgactttccgaccgtttaatctgacatgatctgtcattcattttcagccgttggatttgattacgacgattctttcatttctgttcatacatgacgtggctttttgttagtggtgattggtgcatcgtcacggttagattgtaggttgcgtggcatgggattatagccaaccaatgcggtgcctgaacccggatttttgagaggagggccagaatgagagaaaagttcaacgcggttcgaatctttaatgctgtgttattagcttgcacgatctgtcatcctctctttaatttttagtattaatttagtctaataatattgttcacaaaatattatgcaaaataacaaacaaaatatcaaaaatatatcaaaattttgttatgttttaagaaaaatgtttttagaaaattacactatatatatatcttttaaattcatattttttatttttattttt

SEQ ID NO: 388183 - DNA, 1484 bp, Cannabis indica
aatctatcatgtacctcagacaagagttgtgtagcttcttcttacacatctaagtaatggcatgaagaaacctcttctatacatcacaccttaaactatgatatatcgtgcagcttttctcatcatcttctgagcttcatccctatcatttggaagttctctagtgttgaggtaagctgctatgggtgtcatcaagtttggtgtgtgtcttcttttgatttcttctgcacaagtaatgctgggctcttctaaaaattaaatcgggactaggttggccttatctgttatagtgctgctcacgagccatgctagggcatcatcagttgcatttctactcttggaatctgactgaggatgtaacccttgaattgtccaagcagattctgtatttcgcttagataggccatcattttctctcctcgtgccatgtattctcttgaaacatgatttactaccagttgtgaagcactacagatctcaatgtactcggtgtatacttcccgagcaagctttaatccaactctgagtgcttcatattctgtttcgttgttggaggccttgaacccaaatttaattactccgtgcaggtgttgcccccaggtatgatgagggtgattcctgtaccagaaagctggtctgtggctgatccgtccacatgcaatttccaggtaggtctgtcctcattcttttctggtaggggctcttttattggctccaggttgtcccttatgttgctttcttatttgcctgtgcactcaactacaaagtatgccaaggcctgtcctttaattgatgtacggggttgaaagattatttagtactcacccaactctattgcccatttaagtaaccgtccagaggcatcaggcttttgcaatacttggcgtaatggttggtcggtgtatacccgaacatggtgagcttagaaatagagccttaacttccttgttgctaatatcagacaataagtgagattttctattaaaggatattgtctttcaacttcaacgagtcttttattgatatagtagactagatgttcgatgttgttttctttacttatcagcacgatgcttacagcatattcggtgacaaccaagtatattcctaattcttctttgtctagggttttgagagtacaagaggtttcgcaagttgtctttttaattcttggaaagcgttctcgcattcgcctatctattcaaactttttgttacctcaaaggatgttgaagaaaggaacgcatttgtctattgattttgaaacgaacttgctgagtgcggctatccgaccagtcaagctttggacttcctttgtctttgttggcaatttcatatttgggatggcttgtattttctctggattagcctctattccctgagcattgacaataaaaccaagaaacttacccaagctgaccccaaaggaacactttaagggattgagtttcatgctttattttttgaggattttgaagcattcat

SEQ ID NO: 388184 - DNA, 813 bp, Cannabis indica
tttttttttttagattttcttttagtgttattttgcggttgttttgccatgatttatttatttgacgtagattttactgttcttactccatcttgccagaattaatgattattttctagattttctcatgttgctatggtgatcctgtccatgggtgtggaagattgaggttagaaatacatttcttcttccttctttatggatgtttttgtggttttttgattttgcttttcttataaatacatttatggagctcactggcaagagaattttgaggtgtatgattcttttatgtttttctaagtggttaaatctgctacatttattttacattatttttgtgttattttagtattttttttattctgattttccaagctgggcttgcaaatatagccactattgtatctaatgttgaggttgtgtagaagatggttagtttttttagtcttttctttgtttttttgttttgtttgatttgttttagtattattttacagttatttttccatgactatttatttgacgtcaatttcactatttttactcaatcttgctggaatgaataattattttgttaggattttatgccctaaataaaatccatttcaatacaatcttatttgttatcaatagaagattagaaatcatttatgtttacatgtagttttcatgtttatggtttaatgtatacaatttatgttaagtccagaacatatagttattcacaattacagtaatgtcaacacagtgaaaggtaattgtgattatatgcttcaaaagttaatgtcccatgattcatcagtgcactgg

SEQ ID NO: 388185 - DNA, 929 bp, Cannabis indica
ccttagaaaagaatagaaagattttctacaattggatcatcagaagattcaaatattaaaaaaatgtgtaagtataactttttttcagtctttttaagaaaatttgacttattagttacaatatttcgtttgaattttatatttagggagattaatatgtatgctatatctaaatactattagttgtccttaactatttcctttttcacactattgaaaattcaaacttttggtcctaatacctatcgtgccattagtagcttgtaaagttcttaatgtttgtgctcctttaataattgtatatatttagttaataatttagggccagcttgtttaatttgacatcaaacagaacaccaacactcactaatttacaaaactccatttcaaaataagaagaaagacaagaaaaagatgaagaaggaaatagaggaaaagaaaaagaggaagtaaaagctttaattcaattccaatactcgctatgcctttgtcgataaatttgtataaatatgtgggacatgattgcaagtcgcgagtctccattcccatcttgtcaagggtggactgcataataagttgaccccactcccattatcaacaagtatccttcttactcttttgttggtaatttgggtggttatcaccaagggatcattatatggcatctgtacatggtctatatcttcttcattaaaaataatgggattttttgtacgtggttgtttttgaggatgttgacgcggtggcacttgtgcattgttgctacctttcagttcattaatgtaacacttttgggccctgtacttgttatggcaaagtgtggacctctagcaattaataagacatcatctccctccaatggtggctccatgtttgcattttggccttgtggcggggtgttgagttttgtgccataaataaaacccatt

SEQ ID NO: 388186 - DNA, 1181 bp, Cannabis indica
aatggaggaagcacgctggctaatctgctgcttctcatcttcctaattatgatttacttctgtagttttatttttgtttgctttatgtttggatgctcttgctggttttttttgttgtcttttttcttgtagctttactttcggcagtttgtactggtttaaaccttgactattttgtttaattgatttgctttgagggtgttcacaccctctctttatacaaaaaaaaaaaaactttaacttgaaagttttgggtgcttctacatcgaagcattattactgttttggtatttagaaaattatttaagattttattattaaattttgataaatttaaaataatttataatataaaaagtaatattcaaacagattattttacgcatacataaaataaagcaattacgagtataatagattatttgaactttgcttttagtatattaaatttttttgaatttctcataaattttttacagtatgttttaaataactataacagatacgaccataaaaaaatttaaattaattttttttaaatatgtaaaaatatataagagtgcatatagaatttttcaaaagtttttatttaaattgtgtctttttttatcaattagagaaaattatgcaactagaaaagtacaattgtgaaatgtaactagtaaatggttaggaatttttttaattttatatttctttttttatatatatatttttacagaaatttacattgcaatttatataataacttaatcgcaatcaaaatttacataacaacttacatacaaactaccaaaacaagtatatagaataattcaaaaagtttaagaaaaatgtagagatcgatttttctttccgatgtgtttcttgtttttatataattcttaatgtgttggtgtattaaggtgcttttcaaatctagtgagacttatattgatagtgtttgggttaaaaaatttctattcctactcaatatcgaacaaaccacaaaacgatttattcacatcttccaaagcaatatgaagacatttggaaagtttaacatttcatacttacatctcatctaaaaaaaaaaaagctaaattagcaattttttttcctgaattttgacatataccaaatcatgtcccctgaacttttttagccgttaaaaattcagctgaactattgagattgttaga

SEQ ID NO: 388187 - DNA, 562 bp, Cannabis indica
ttcaaatgcatttatttgattttgggggtttggtcaaattaaaaataaaataataatgaaaaaaagttgatttatgggatttatgaataggtggctaattaatgtataatttccctgaattatcatgttctagaggatacttggtgactgtaagcagggaaatgacatcatattctgtaattgttgtaatagagaggtgaagttcttgattcagatagatgttatgtagtatgaaatctgaatttcgatgcatcttaattagttgttgacatcatttgcaccatagtgaacaggttagtccttcccagtttgaagctcatgccggaatgcacttatactttatttagatgagataatttttttgatttatgacgatgtaccttaaataaaactaatatttacgtggctcgacacgtaacatatagctagtactatgtataaatatgattatatgtaataatttttatttttaaatatatataataaaagtaaacattttttatattaaatatttatataatttttatttttaaatatacaataatattataaaattaataaa

SEQ ID NO: 388188 - DNA, 878 bp, Cannabis indica
agtacttttttaaaaaattaatttacatattagttattactaagagaatataaccgacttaaagagatataaccgcacttaaagcgcatttgtttcttagtttatcaagattatccgagttgatgatctaaacactcacattggaaagtttatttgctctttccacagggaaaaaaaattaacataaatatatattatatatcttagaccaaacaaacacaattgaaaagagttttcataatgttttatttaatctttgtcccatatcatgaaacatgttctaattaatgcatgtcatgtttttcttatttatttttttttttttgtaaataatgttttaaattgatataatggtacaaatgcgacataaatcctaagtgtttacatgtgtgctttacaacaactagccaaaagaagaacatgttagtaaacaaaacaaagattctatcaactatacatcataaataaataaaattataatgtatatatatatttttaatagagttcatgtatattgttagctagatatataaccatacaaaatattattaccccatgtgatagacacgtaatcttgtcccatcaaaatgaatggggtctgatgtttgtgtaatttataattcttttttttaggtattgcataatgtagttgtcacaagctgtataatacataatttattatcatcatattgattaaacaaactcttgtaagttgtacgttttcttatctcattaattattatgctcagccaaaataaaaagaaacttttgatttatattatttttctgtccaatatcatccagaaaatatatataaatatatatatatatctattctatataaagtgtgtaatttatgggtgacttttaatttttat

SEQ ID NO: 388189 - DNA, 1335 bp, Cannabis indica
atattcaggactattgctgtatttttaagtttagggaccacttagcaaaacagcgaatagttcagagagctatcatgctaaaagcccttctggaaaagagccaacacaaagctaaccaagatgctcagcttggcctcaccatagaattgacaaccaaaacacccaatataccctccttagaaatctctctctacatattccttcactcacacacaccgcctaacagaaactaaccaaaccccatgggaaatgcccttatacataaggcagctactatcaagcccactaatagatctccaatctgattattcgtaaaatatatataggtgaatacctcttccttgcccaaagttgtcagaaatattcgctataagatatttgtcaagaactatttctcgattaagaaattagtattcaacacaaaacctccaacttcaatccttattcttggaaaaaaaaatacgaacggtagtaggactagcactcaagcatgttatgcctactactaacatctcaactacaaattctcgactctttttcaaaaaagaaaaactacaaattctcttgactcttgctcttggggttgcaatagacataacatctcgtggtggagctccctcttcaagtgcagcggcatgtgaaaagtgacttgaaccattataaatcgttgtagctgcctacagtatccactaatgtagttgatttatttaatgtgaggttgcttaatttctagagcacgttgtgttcctcatgcttaaaggttgtcttgagacttgcacaactaagaataccttacagggttgtcaccacctcaccatgagtgattgtatacatcttccaacatacattaagaattccaaccactacattctaaatatggcatctaagctaaaaaggtgccaggatagaaatttgattaaggcaataacttcaacttcattgtatgtgggttagtcaaataaacacaattcatatttgactcttgtcacttttaaaatatttaacctatattactcattgtaaagaattaaccctttcattatttttgcaccagtgccccactgtgtattttttgttgcaaggataccaaaggcatttcccactgcgcaccaacaacttggaattctacttattaccgaaatatcaatgtattgacgcgctgcctaggtgattttgaattggaaagcctaagcatggaccaactataatataactattagaatttaggaagtgtatggttaaggtgcggggttccatctcaaaaccaattggcaatgagagtagttcattcatcttatatatgacattttatttccacgcattagtaatggagga

SEQ ID NO: 388190 - DNA, 1671 bp, Cannabis indica
gttgggatctactgccggcgtctccaccgctgccttgggtcgccggagcaacccctctccccggtggtcggctcctctgcctcgcctcatatctccaaatcccaccacccccaaccccaaaacaaaactcctacctaaagaaaaacctcggtttagacaccgatttactcgatcagagcctgattttcatggaaaatttaggaaatagaaaaccccaaaaagaaaacaaacaaaaaagttgaaattgttagctttgtgtggataaggaagacgatgatgaagaagagaagaagttagagagagaaagaagagagatgggtgggaggagaactggatggcacccaacaccaccttctcctcttacacaataaaaatattaagaattattattattattatttaaaaaataataataataataataataataatttctgggtttctttactttttttattaatttattttttatttttgtaattttgagtttttcgatatctctacctctcttcacttctaatctctctcgcccccacaaaccgactccaaactctcgattgttgctcctttatcattctttcttctttctctccctctctttatttatttattttattaatttattttggaaaatgatatgagggtggaaatgacattgtggtccttacttttttatttttatttattttttaaatggtcagctcataattatgtgttttagtaaaattgttcatattgatttcttttttatttctcttttctttctttttaggtgtggttagatctctttcactgctttgtgtatgcgtttcggtttgggtcatcagctgaaaggtacaattccatggcccctaattatgtctaatacaccaattattttgagtgcattagaatgtataatctttttttttctttcagaacatcattatatacgcaattttattttaattcttctttctagatcaaatctttgttgcattatcattttatagtatacacaactgtattgttatctcatactatacacaactgctgtattgtaatttccataaaccgaaattgtaatcaaatcagctacactatttatgctcacctagattaatgtgacattttgattcattgtcatataaacataattaattaatttctatgcctatatatgaaggtgcaaattactttattttattttttaaaaatgaaaattcattcatctaaaccaacttgatctaaacaatgataacaacattagaaagaggattagtctctgaaaaaatacgactagcatataaacgaaacgctttagttacaaagtaagcaatccgattagcagattgtttgacaaaaaataaagaaacattactaaaagaaaataaaaggtttttacaatcctccatgaaaccaccaaaaatggattgcaatacattcaaaattcgaacagcttgcaccaacaccatgttcgggttgtataccctaaataaaactcatttcaatattaatcttatttactgactaataaaaatcacaagtgattttatgttgcttgattggcatgattactttcatgattataagtttaatatatatattctatcaaatcctgaacatctagttattcatgattacagtgttgtctacatagtggaaaataatcatgattatgtgcttcaaact

SEQ ID NO: 388191 - DNA, 720 bp, Cannabis indica
gatttagattttgagatctaattagataagattagatgatgatttctaattaaattactatagattgaaatccaatcaaggagaaaaatattgaattgaatgtttgagtgatatatcatcatctaattattattatgtagatttgtcaaataatagaaatttatttgtgccaattcttttttttaaagtaaaaaaaagtaatttgttataatatttaagggtatttgcatgttttagtagactgcaatcaatttttcttgaagtaaaggagtcagtttttttcttacagtcctaccaaaatattacaatgcatagaatcagttttttaatgttatgttcataaatagattttacataatattaaaagacccatatatgttatgttatgtttataagtatatatgtattattggcagatttttgataaagagagttaaggagaaggagaagaactagttgtgtattagtgcaattaatatcaactcttttcagaaggctgaaattcgtggggagattggctttgacgtaaataacatgtatggttctttttagtgttttgcttgaattcttttagtttttagtggggagattggttccattatttaggccatttttggtttgttgatcttatggttaataatatgttattatgggtggtattgcgagtgtaatattttaatctacgagttttttttggttttggatgcagttgggcagaca

SEQ ID NO: 388192 - DNA, 1302 bp, Cannabis indica
ctggaagtgttttggggtgggcataatggggaacatagaagaaaagaggagagagagtgattggaagggttcggggaaggaagaaaagaaagtaaaaaataatggattattattattattattattatgaaaaaaaaaaatattaaagggtacttaaaataacataatttaatattattagatagtgatataattttttcaaaattcttatttttttattatactaaaataattaaattagtcagaccaattaaattgtttcgttattattatatgagagatgctttgtagtatttagcattattgtgatgcataatattcagtggcggacccagaatttaaagtgagggggggcgtaaataaatttaaaaagaaaatataaagtgtagttagtgggatttgaacctttaccctctaacctatttaccaactaccttaaccattacaccaaggttactattatgtctataaatatcatcttttaatacaaatatatgttgtaactaattaaaatacatatacatttttttctcgattttttttttcagggggggcgactgccccccctcgctacaatgtgggtccgcctatgataatattgttatagatgttatttaatatctctatttatttactttaataaaaattataaaaaacctaataactaattataaacacactttttaattaaaataaaaattgagacttaaaaaaataaattccactcatacaaaaaatagctgaacttctaacttttttgttaaatttttttaatagtattttaataaaaaaatattattttataaaattaatttatatttgataaattcaaatattataaagtatagttgaaacaatataacaataaaaataattttttattctgattttttttactattttaattaaaaataaaattcaatattcttaggattaggctcgttataatatcgtcaaagtggccacgtcagcaagagaagagatgatggtcatagtcatggtgggttggtgttggtcactgccatgtattgcattgcgtgactgagaatcttcattcccttatagttattgggctacacgaagcaaccttctaccttcccaagcccccacatcaatcatccatctcggcccacatacccttatttttgccaatttcatgattatcacgaaaatttacacaaattattatttttaaaaagatcatcacacttttatatttactagaagaaagttacgtttatgttaggtgctctataatttaattgagaaagattcaataaataatcatataatttaaaatgg

SEQ ID NO: 388193 - DNA, 827 bp, Cannabis indica
cgaaaagggactagaagatcttatgccgcatatgagtctcagagaactttgtttatctggctatggtggtagaaagtttccggaatggctttcgtctctacaaaatcttgtcaagctatcattatcgaaatgcaacaaatgccagttcttacccccactagaacacttttcaaaacttgaagtgttgatagtggatgagttgatgaagctgcaatacattgtggagaacaaatcaacaacaacattttcatccttgaaagagattcgccttactaatttgccagaagtaaagggatggtactggaatgatgctgcagaaaatgttgaacaagaagaagaagaagaagaagctacatttacttgtctttctaaattggttgttgaggattgcccaaatctcacttccatgcctctttttccttgtctagaagaactactattgttgaaaaacactagttggaagccattcaaacagactatggcattggcagcaacacaagaagcatcatcatcatcatcatcatcaagtttgtacctatttttctctcaatcttttttatgtgctaagtgtagttatcattgatcaatgaagttttacattaaaattattatttctttcaggtggatctagtttcaaacagactatagtatcaaataaagggaaagaaattcagcaaccaaatgaactcaaaaagccatcatcaacaacttgtagcacagttgctcctctctccaaattgaggacactacatatcattaacatgtcaaatggtgatccaaatatgtggcagtcccttcacagcctccgttctgtgacattggatcat

SEQ ID NO: 388194 - DNA, 1050 bp, Cannabis indica
aagttttgtttcttttcggtactctattacaaatatctacattacatgtattatttatttttgactatgaggaggtagatttctttatatatggagtatctcccaaccttcttttcttgttcattagagattatgtttataaattcatatatatcaacttaatcttataataaattattaggtacaagtgtaaaagaagtaaaactaactagagcgatttaccaatgttataaactatattatacttgaaatttgttgtcttatataacattttgtctaatcattattctttatgaatgttagagtggagagatgtgtgcgtaagaactatttatacaaatattaacaaaaaggtaattttttaatctatagttaaaaatggtccaaagtaatcatctaataaatttcttttcataatttatattaattatatttttcttaaagtgatatttttatttaataaaattatatacaacataacattatctattatactaataaaataataatatgttatttaattaaaaaattaaatatacaactaattatacgtgcaatcgcacgtaacttcaagctagtattatttggttcatgtgatcatctatttacttatttgatgaataaattcatccaaacccttatcacactagtattttatttattaagttgtcaacacagtgaaaagtaaacaagattgtgtgattaaatgtattcctagatttatcagtacacatggtttaactgatatgataatctacaacgtagtttacttgtacattggataagtgttatgccctttccagggcattggttaaagtaagcttgggttggatgtatggagtatgcatcggaaggaaccgatattgaacttgaactagatatgataatcttaccgtaatatctattcgattcaatatcacctagttgatcctagatcaaatgatctcaatcttgagatggttaggttcgatctcgagagtgttattttgtgttctttgatttgttacttaagcctaccttttggtccgggtgatatgtacattttgggaa

SEQ ID NO: 388195 - DNA, 2009 bp, Cannabis indica
ttttttgtgctgtttcttgaggtgaaaaatagtttctatagatttgtactactcatttaagcaaagttttttttaaataactattttttttttacatggtcaacgtttgtcaaggtacatatcttttaaaagccaagggacagtgaatttgtttccacttctctaccaagaaaccctaaaccctgatgagttcaaagtacctcgtctcttccaagttgtatctgtctcaatctatcatggagaatgttcttcccatgttgtcttctatagctgtcttgattcctccaccttctaagccccctgttgccctagaagtctcacctggaacctatgaggagtgtatttgtgagccttctccatgtctggccaggtatcatataagttgttcgtcgtcccatcaatgtcggcatctccttcgtcacctatagtcaatcaaaaactacgaatatttcaaggtaaggctcctcatctctctaaaaagtttggtaaggtccaatttctgtctctaagtcatcgccaaaacgtgtcaaccgttcttctaaaagtttggtgtcacctgtgtttgatgttgaaccactcagtcgacctaaatcaaacccatttggaccacgtcatccgtcctcaaaggtctcagttcaatccaaaggaaaagaaaaagttcagtcccattctcttaaagcaaatgttcctaaaaaaatccttaattgatcccaaccaaccctcttttaaaaaagccaaaactaaatccgtgtctagaacgtcagtctccttagatatctagttcataaatccaatcctataaattttaaaaagaaagctctgcctaaaacccctgtgtccacggttgagcgatcttctattcaatgctttgtagatgccttgaaagtatctagttatcaatgttggtttggcagtcgtgacctatggtttgaacaaataattgctttagaggatttttcctgagttccatgcttttttaaagattaagaaatgagttcacactgtctctaattggtctgcactgcatcccattttgattcgtgaattttatgcaaacttagatagatttgtgttagataaagggcattcaggttgtgttagtacatttgtcaagggttctcgtattctttttggtccctctaccattgcacacatattaaaagttaattcaataaaaaatctaacctacgggaagaaatttaattcaaatcaaactgtaataggtagagtactaattggactgaatgattatctttgagaaaagtaggagattttggccactcatttaaccccattttatagggttcttcatcagattgtattgtacaattagttcattaactcttatttgtcctaagtactcttgacattgggaaatttatctatgatgtgggaattcatgttaccattgatctgcctctcttatatttgacaaaattatggaagcctcagaaagcactggtacaaggaacaagcttccttttccaagtctcatccaataagtgcttatggcagcccagcctctaggccttccactgaccattcatgattatcaagttctaaatctagtgctcaacaagaatttttaacagcggttcacaaaatgtcttcctcgagtattccttcctctttaaaatcttcaaaaggaaaatcatttaagttcaaaggtttaatggattttagttgacatgtccaaatgtattcagaatttaaatcatttgtggaacaatataaaaaacatcaaaagcgtcagttggcttttgaggcctcaatgtacaaattggttcagatcatcaagtttgttgtccttgaaaatcattatggagaaccgctcactccatccattgatatatctttcccacttttttatcgagagttttttggtgcatcctcaaatgggtctggtactatcgcacaagttcagggggagcccacaaagtcaaccctttttgccaacacataagaagtaaatttcattttaccaatgcaataccaaacttttaccagca

SEQ ID NO: 388196 - DNA, 779 bp, Cannabis indica
gtgactaaaaacatattataatgactatttagttaagatgcacctatatattatatatacagtagaacatctatccaagaaattgagagtttataactaaatagagttacaactagaaaaaaaaaaattaaaaacaaaaaaatatcaatgtaacaattataacaataaataagcattaatactatatcataatagaaatattttagagtaaatataatattcgtacatgtattataatttaaaataaaattattaattttatataaataaatttacaaaatacatgtatatattttattaagatgtaattattcttatatacaggtgtactttggtaatacgggacttagaaaatgtataactaattacaatttagaggttattcttatttataactggcctaaattgggacttgttttttttataacaaattagagtttattcttgaataaagtattcttaaatagaggttctactgtatatacataggcgggtgactaaacaagtgttattgttactagaaacatatatatatcacgacaaattggttttttttggtgactattagatttttagttgactttttattttttaatgatcaataacataaatttaatgatattttttaattacaaattttttatttttagtgactgttaggacgttgaatactatgtagtatattttaaaaaggtcttatattaatagagataatatctacttttatataccataatttttttttatttttttttaacacttataaaaaatcttatttt

SEQ ID NO: 388197 - DNA, 2437 bp, Cannabis indica
attgggcttaggcgggaatcatatgctttagctcccgattatactggactatataattcagaagcaaaagaaaaaatatgataatattattaattgctgaatataacttgtagatgtatatatatagacaaatattgttgattgtacgtatgttctttgcataatctaagtacaaagctagcgtttttgtccttaattggtgctgaaagattcgacatttgattagtttatgtataagaattatctggtccataatatcaaaaactatcagccgataatttttattctcctaaaagtgaatgctcttagatgtcgatttaaattttatacacgcatctttctttatttgtaatttttcaaagttcaaaaggtcaagccagttatatagtagtactcatatattatggatagataactaatgtcatgtctaagtactatccaaatatacatattctttctgtactcattattttttattttattatattttttaaaaatatatatcttttaagagcttcatcaaaataatataaaaacaatctgaaaccaacaatgtttatttttgttgaaaaaatatatatagtaaattaatattaactgcaatgcgcatatagtaatttttattttggttatgtatatttttaattgcaaaattagtttcgggtgattctacaatacacccccttaaaagggatgtactgatatactcttgacttgtttcggcatctagaacaattttttagtctaattttttttcatattcatgtacgttatagatatttaagataacctacaaaattttgagaaattctaaataatttacaatataaaaaacaatgttcaaacagtctattttacacgcgtataaaataaaatagtcacgcgtgcaacatactgtttgaacgtagttttcagcgtgttaaacttttccaaattttttaaaattttgcaggatgtcttaaagaactataacgcacatgaccatgagaaaaaatttgactaaaaaattatttcgggtgcttaaacagacaatgatgtatcaatgtatccattttaagggggtgcattgtagaatttcctattagttttttatattatttaataaacaaaattattttttattaaaaaatttataatttaagtgttatttatataaaaaaaatattattgtatttaaaaattgttgttaattataatttaagtttaattaccgtgatacttttaattttataatacttttttattccttttagaaaaaacaaaaaaattttttattatttttttttaaattaataatataaattgtttgacctcccttttaaccaacgtacagtgagtcttaattaaatcgattagattaaataaataatagaaagtaaaaattagtaagtaaagaaaataccaaaatttatagaggttcggcctcgtgatagtagtaatagcctactcctctttcagttgtattaactcgtgagataaagaatgaagtattctttctcaaaagctcttacaaatatttctgagtaatttactcttagatcgtagtttcattcttgagtgttctctataattaatttcgtgtccctaaatagtgagataaactactatttacaagaactaattacatagaagtgatttctttaatcaataaaaaataaaataagaaattaaaaatatgtttaatttacaatgagaaaattaggcaaatttgtgttcattgtctttattctctaaggtacgaattaattccacaaaattaaggatagtttcgtgacatgaaagtttaaagatagtatcaatcatttctaaaattgccaagtcacatctcttggtcgatgcatttgagttgtccataaatatgaccttgctcggacatcctgttgtatatgtatgacttagatcttcacaatccttatgggaaatgcacaataaaataatataattagccaaatactattatgttttacaaaacaccataacaccatacaactaagttcttcaaccaattagaagcatagaaaaatgttctgttaaaaaaaactgtatatcagtacttttgtaaatatttttaccgctttggttaattaagaaacaaacatccagttaaatattggacgaatttctattttatatctttattaattacttattttatatattaataccggacaactacattcattctctaacattttgaaactatttatcaacaaacacatagataatgttttagggaaattttacaatgcaccccttaaaatagatatattgatgcaccctaatttgttttagcacccgaaataaatttttagtcacattttttctcatggtcatgtaagttatagttatttaagacatccggtaaaattttaagaaatttaaaaaagtttaacacactaaacaatacgttcaaatagtgtgttgcacgcgtgactat

SEQ ID NO: 388198 - DNA, 1722 bp, Cannabis indica
ctcataattgaacgatcttcaatgttgagtttgtgcctaaactcagcaaatctttgactggaaatcgctttagttaacccatcagctaactgatcataggaggagatgtgcttgatttgaatgaccttgctgagaaccttttctcgaatgaaatacaaatccaactcaatatgcttggttctttgatgcaaaaccggattctgtgttagcattatagtgctgagattgtcacaccatattgtagggggttgagagagttgaatcttgagttcagaaaacaaatattgtagccacgtaagttctgccgtaacactggcagcactcctgtattcggcttcagtgctagacctcgaaatagtttgttgctttttgcttttccaagcaatcagatttgtcccaaggaaaatggcaaaacctgtcgtggatcttcgatcatctggatcggatgcccagtcggcatcacagtaagcaaccagatccaagttctcaggtttttgcagatgcagaccgtgatccacagtgccactaatatacctaagtattcgcttaactgcagaccaatgtgtagacaagggcttttgcatgaattggcagaccttgtttacactaaatgagagttcaggtcttgtaatggtcaggtattgaagagccccaacaactgacctatacaactgaacatcttccaatggttccccttgatatgcagataatcgaataccactagtcataggtgttggagaaggtttagcattgctcatgtgagccttaagaagaaggtccttagcatatttagcttgagataagtggattccagcttctgtttgtgtcacttcaatcccaagaaaatatgcaagaggaccaaggtcttttagagcaaactgtttgttgagtgcagcaacaatggattcgatagtggcattgtcactccctgtaaccaatatatcatctacatacactaggataagtgtaacagaggtagatgtatgcaaaacaaagagggaatggtctgatttagatgatgtgaagcctagagacaagagacattgctgaagtttttcgaaccaagctcgaggagcttgtttaaggccataaatggccttgtgcaacttacacaccaaatcggttttgccaggcacttcaaaccctggaggttgtaacatgtacacctcctcttgtagatctccattaaggaaagcattattgacatccaattgtcgaatatgccaaccatttgacaaggctaaagtcaggacaacacgaattgtaaccggtttaactactggactaaaggtctcagtaaagtcaaatccatattcttgatgaaatcccttagccacaagccttgccttgtattttagaacagacccatctggattctccttctttttgtacacccacttacaaccaatagctttccttcctggtgggagtctaacaagagtatatgtcttgtttctaaccagggcaagaacttcatcactcattgccttgttccacactaactgattaagagcttcctgaagagatgtaggttctctagtcaccaaaagtgcctttggtttatgaatgccagacttagatcgtgtcctcatgttatgaacattttgaggacctggtgtttgtgttggaaattattttaccaggatcttagatctactcacaagtatgttgattaacaccctaaataagaactttctaaaacaataaattaaacacatataa

SEQ ID NO: 388199 - DNA, 728 bp, Cannabis indica
tttatttcaccttccattaatatatatttctctctctgtagctctctagttacatgcatctaactccagttggaaatattacgaggattcaaagaaaaatattataattaaatgttatgtgaagctcttgcctttatagaaatgctaattaatagtgggaatggtggtgacatgaaaatatttttgacattttttaataaatattacttaccattaaaataaaaaagaatgacaagtattaatgtctaacaatgacattcttgctatcttcttttttcttattttttttaataattattttatcataaaattaaaaaaattaatcatttaatatatattattaataatataatattattttaataatttttaaaagtatttacattagaaaatttaaaaaaaaataatgtggaagagaaaaaaaaaataaagtattgttatttttaaatgatgtagagatttttaacatgagatatgataatgtgttaaaaatgtcaaattattggtgcatttcaatatagagtccttcatattcggattaaaatctctaatgtgatctcatatgtatttgtatgcattgctacataaagtttgactcaaataattaagtaatcactttagtaattgtgggttattgtgtattatagtgtcataatctaaagggaaaaaaacaaaaaaatacaaaaaaggaaaaaaaattacaaaaatactttgggccggcccattaa

SEQ ID NO: 388200 - DNA, 795 bp, Cannabis indica
gcacatgatacacctaaatctatgattgtttgtacgctattcaagaatgactgaaaattttgaatgactgaaaaattcgcgtacaaaaaaaaaaaaagaaaagactgaaaattttgaataggacatggatttaaagatatcaatcttagcttaaagtgtcaatgtcccaatcaacatttcttcttttcatatagcagtttgtgcgacatatgagttattcattctgaccatttcaaaaaataaaataaaaaatttatgttgaataaaattttatattgattactaggtttaaacaactcgaatattacatcaattgatattttaaaaaaaaaaaaaattgtggaataagaggtgatattcaatattcaaatttcaatctatcatccagcccttaaaatagatatgatggatattgtatattccaaatagactaaaaaagcaaaagattcccaagattaagaaaaagttgaacgggctaaagctaaaataacaataaacaacttatcaactcttaccaaattctcagcaaaaaaaaaaaaaaaaaaaaattagattttatatacttaaaaaattaaaaaaatttattattaaaccaaaactctaaatcctaaaaaaaactatgacatttttttcaaaaccctaaaaatattcccctcacaattcaaatccattctctctgcatcatctctctctctctcatcccaaccgcccaccctcaccaccacctccgacctccgacctccgaccctcaccaccacctccgaccacccgcaccaacaccctcgacccagcccc

SEQ ID NO: 388201 - DNA, 593 bp, Cannabis indica
ccactatgtagttataaatagtagcagacaatctcaagaaaaggaggaaaaaactcttatacgagaggccctaaaaaaatatactcagaaatctgaataagattgacttgttgactatgcaaaattttaactgcaaaaccaggtaaaaacccaatgttcatattttattttcctatagtttttattatttctgtgttgaatcataatcgtgaggctcaaatttggttacaaaaatctacgttaacacttgcgtaagcaataagattggcaaactaaattgggatttttattcacaattgaaatattacatttggagagtacatttttgacaatccttttcagaaggatgttttaaacgattatgccacaattcatgctcatccataagatttttacatttgacacacatattagcattagatttctaaggtggtatagttgtagctgtgttggtactggccagattggtgtaatcaaaagtgctatagggcgttggggaggcagacacttggatttggcttgattcaaaagtatatagtgttggaaatattttaccaggatctagatttactaccaagtatgtttcattaaca

SEQ ID NO: 388202 - DNA, 1826 bp, Cannabis indica
aaaaaaaaaaccgacatccgttaaagtatgcttaagaaagcattgcctaacttgtaactaaatcaattagttaaaggatatattaggtactagtttatctatttattaaaattttattattaagtactaccggtagtgtccaatactaatgttacgaagtgatacgttataaatattttgtagtatttcaaaaatattattgtcattaattattgttagaattcattaacactcataaaatatgcaacaacaaggttcaattctatagataaaaatattacatataattataagtgtatatctaaagaatacatttgttgattcaaagagaagaactcaaatggcgaaagcgtaccttaatccatagatagtgataattttaattcattgtagtgatagtctttgtggtaattttaggtaatgataatcttgaaagaaaataagacttagggttttctaattttctctcttgatgggagaagatgataatagaaattggctttgtttcttggggaccactactaatttataacctcatagttaggttattaattttaagtatttctaatttagcccctcaataaattggaaatatcgcttaaggtatctacacgtttaacccatgacgctttaatacccaatgacccacaattactaaaatgatcactttatttaggtcaaactttatatatagcaatacacacatatacatatgagcccacattagaaattttaatccaacaatctcccacttgggctacatatgttttcttatagtgtctaaccttataagcacttaaactttgctatcataatatatttacaagttagaagactaaaggacctagagagagagagagtttggtgagtatgtttagggtttagctctgtgtttgtttgtcttggtttcactgttctagtctcgtgagtggttttctgttttggtttctctgttgttttctttccttggttgtctctttgtgtttgattcctgtgttggtgtgttaggtcccagggttctgagtctgtgggtgtttgttgagtgtttaagttttgtcctaggttggtgagggtgggttgtcgtttgttgtcggcatttatggagatggttaatgagtcttgtgtttctcttaaaggcaaaagattcagttgtgtggaagcatctatttcattatccccgtgtcccacttctctaaaagctttgtcgtctctttgtctggttggtaaagtgattgctcccatgcatgtggacgttgaggacattgctgatttggtaaccagagtgtggaagaagaatgtgtctattgtttctttgtctggtacatcttcgaagaataacttctttatgttcggctttatcaatgttgttgatagagaatgggcgttggagcatggcccttggacggttagaggatattctctggcgctcaaggattggagtccctctgttgaaggccctgcttcagtggagcgtttgagagtgtaggtgcaggtgcacaacctgcctcatgagtattactcggatgagaatgctactctgctgggtgggttagttggaaaagtggttaaggtagagttggtggcggctgacccgacgtcatggaagctgttttacaggattctagtggacatcaatattgaaaaacctttgatgtcgggttgttactttgatttggcctcgagtgctaaacgatggatccagtttaagttcgagaaaattggcattttctgctaccagtgtggccggctgggccaccaacgtcggggatgctccctgtcatctccagtcacggtggacaatggagatggtgttggaaattatttta

SEQ ID NO: 388203 - DNA, 2719 bp, Cannabis indica
atataaatataattaatgtagttattaatattatagaagttaatgaaaagggacaagaggggttctgttaccccaaaacagagtcctgtaatgtctgccaaccataactaaaactaaacaaaacacagtacttttgttttgtgttttcaatttcacactttcctattaattaattaattaaataattaaatatattataaaattataccaaaataatttgaatgactactcatgtttcctaggcaacaaaaaaacataacataaaattatatatatagctagctatgaccaatggtcacaccctgttaactgaagttaacactctgattatttatttatttatttattaatatttataatgcttttgataaaaatgagacagagaagacagaagtgtagattaatcaattcaatgacattttttttatctctctattcagatcactcgatcctataaatatatatagatgtatatagctatatagctagttaaaaaaatatatataggccgaaaaggcaaaaggaatgagagaaaaactttgaattgaaagaaaagaaagaatgagtagactgatttataatgtatacataatatatatcatcatcacctatatatatgtgtacatatatatataacatagatatctgtttctctgtttttaatgaagagtccaatatgacacaatcaccagtatacataacatttatattagttttagagagagaaagagaaagagaagtgtggtagtgtcagcatcatggggttcttagttggcacgtgggagtcagtgcataaagatatatttatatatatatattagggttatttgagaatggctaaaaatatttttgagtatttttctcgctattatactgataagtgtaattaagtattaaattttatataattgaaaaaaataattcttaagaacgtcactaataaaaaatattgtgacaatcaataatcctgtgatccgtaagaagaaatattgagtaagttgtgcaatctcacacgacttaagaaagatcaagtgggatgattctgagactgtgtaggtatgtgactatacagttaaataagacttaaatagattgattggttagtactatctatatcaacaatgtaaatcttgtttttcagtagcccattatgaaagaactccacggttaggcatgcttgacttaaggtaatttcaggatgggtgacctcctgagaaattttcttagaaagtgtgcgaatgatgacaaagcacgctagaaacactcgtgttggtctgtaggatcagtcatcagtccatgaagcagtcactcgtattaatctgtaggatcagttatcaatccatgaagcagccaaaatgacatactcatgtataagaatcatcattccgtgagtgtacaggacccaataaaaatttaaaacatggactttataaatactaaggactactagtgcttaatactaatgctaaagttatttgtagcaaaattctttatattattattgcatacacttaatttctcttatttttataaagtaaaaaagtgccaactataaatatcactattaaatattaattgaattattatcatattaatttaatttttttttaatgaaaaagtagaaaataaaattctaaagttaataaaataataatttagttttactttatataaatgtacacaatagttaattatctagttcgtatttactagtaatattttaactaacgaaaaataaatttaaaaagaattttatctataattattatatattattaaaatattattattaaatattagtaatgtctaatatttttattaaatagttgttataattaaatagtaacatgttttcaaattatataaaactccatatataatttacaatcataccttctaccaattctcacattgttattatgtgtgtatacaaatatatatggaatagatatatatgcacaaactttggtcttcacttcaaaaaaaaataataagggggactgggattgaggtgtattgggtttatgacacgtgtcatgtagagaagatggagatatatagtagtacgggcaattcttagccgttttttgggggtttaatagggtaggggactgaatgaagaagaagaagatgaagagagagaaagaatagtattaagtagtaagtactagtagtggtggtggttttagagagagaaagtaaaagaggagagagagagagattttgaatgaatgaatgaatgaagtaagtttgaaaggtcaggtcaggtcaggtctaaggtcaggtcaggtcagatgtcagtgtcatttaacccatcttcacatgcactctttcgtcttgtcaaatcatttggaatcattatatatattattatatttatatatgtatttgtatttcacacttgtcttaccaaatttcaacacttacactttgtcttcaaataataaattatatatattttcattattgttattaccatacaaaaactacgtacgtacgtatgaaatagtaataatactataacatgtatacgtgtgtaggccatgtaggttaaaaatggttaatatatataataacatgtaacacattatatactaagttttagagagttgaataatatttgttgaatgtagttataatttactaataatttaagagtattgtgtgttggaatctactaaccttagtgacttgttagagagttttttttttttttttt

SEQ ID NO: 388204 - DNA, 1361 bp, Cannabis indica
catttaccaaaatgggtcaaataaaaattacccaaacctatacaaacaattcatatttacaaaaaaacgttttgaaaatatgatctattatttcaaatttctttatttactagttaaaagtgaaaggtttgaatatttaacgatccattatttgtagtttttttgtttcatcttgcatttggttggatccaactcatacaagtttgaaatttttgtcttacgcacgtacttttatataatttttttttttatatgatggtaatatatttatactaggcatcttgcttattttaaaattttaaattttaaataatttatggtactgaaaatgtaattcaaataattagtcgtaggtaggtctattttattttacatgcatgtaattaattattttaaactttatattttgaaattgtaaaaatcttaagattttgttaaaggcaaatacctattataaatatacaatacacatcatataaatattttaaatgtaaattttttcaaatacaaaaaattagaaacgtccataaaataataaaaatgatgctctcatccgcatccaaatatatattcattatcaacaaaaatatatgaagcaatgtattcttcatttatttgttgattttataattataagagccctatcaaatgctcaaacatataattttatttttttaaaatatttaaagaactaaattaaaaatatagtatatcagatgttttaaattcattcctcattttaaagttactttaaaattcactattcatgttctatataatatagaataaacatactttattaattattttgggtttgaatgatttctttttatatggtaactaggtaactaagccgcgcttcgcgcggtgttgtttaacttttataatctttatttgtatatatatatttattatacttatattgagtgatatatctaaaatataatattttaatgtgtgtatttaattattatttataaaagtttttacattttattttatggtgccgttaaaataccttctctacaaaaatgaatgtaggatgacaactataaaagggattgtcgtaacattatctttttttaaaagttaaaaattgcgagatttatataaaactattagtgatagaatatttctatacaaaatgtttagataagagaattaattttaataaattatatggatgtaaaatttataccttaaattgtaatgatgaaaagaaaactcataatccatatgactaattatttccataataaaatatttatttatcttactattttgcgataattaaaataataaataccgtatgaagttggttatacaattgcgcgattgttataatcatatcgtgcttcgca

SEQ ID NO: 388205 - DNA, 520 bp, Cannabis indica
tagtattgtggttggaattaaaataaaatttagtattaaaataatagtttttaaatgttaatttaacactaaatttagatttttccattgaagatgccttagatgcgcaaaggcaagaactaaatgctcaaacaaaggcaagtagagtggccagtggagtgacacttctagcaaatgtgatcacgtgaacaaacaatgatatcacccactcttaaccaaccaatagaataatatataaatataatatatattaaccttttttttttcccttctttttcttccattaaaggatcgaattcctccttctattgattgattctatttggattctatataaccactcaatttcacattattataattgttatttatttaccgtggtacatctctctttccacgctatactactatcttcttgttctttatttttctttatcttttgaaatatataacatctctcctatgacattttcttacatgttaaacttttatcaaatcaataatagtttttttttttttt

SEQ ID NO: 388206 - DNA, 1111 bp, Cannabis indica
  modified_base (42)..(42): a, c, t, g, unknown or other
tcatcatcgaatggaattgaacggaacatcagcgaatggaanacgaaaggaatcatcatggaatagattcgaatggaatcattgaatggaatggaatggaatcatcaaaaaaggaatcgaagggaatcatcgaatggaatcaaacggaatcatcgaatggaatggaatggaatcatcatcgaatggactcaaatggaataatcttcgaaaggaatcgaatggaatcgaatggaacaatcaaatggactccaatggagtcatctaatggaatcgagtggaatcatcgaatggactcgaatggagtcatcatccaatgaaatcggatggaatcaatgaagggactcgaatgaaatcatcgaatggactctaatggaatcatcatcaaatgaaattgaatgggatcatcatcaaatgtaattgaatggtatcattatcaaaagaaatccagtggaatcaccaaatggactcgactgtaatgattaaatggactcgaatggaaccatcaaatggaatcgaatggaatcatcgaatggagtcgaatggaattgttgaatggactcgaatggagtcattgaatggactctagtacgaatcattttcaaatggaatcaaatggaatcatctaatggactcgaatcggaatcattggatgtactcgaatgaaatcatcgaatggactcgaatggaatcatcatcaaatggaatcaaatggaatcctcgaatagaatcagatggaatcatcaaatggaatcgaatgtaatcatcatcaaatggaatagaatggagtgatcgaatggaatcgatggcaatcatcatccactggaatcaaatggaatcattgaatggaatcgaatggaatcaatgtcaagtggaatcgagtggaatcatcgaaagaaatcgaatgaaatcattgtcgaatggaatggaatggaatcaaagaattgaattgaatagaatcaccaatgaattgaatcgaatggaatcctcatcgaatggaatcgaagggaatcattggatgggctcaaatagtatcatcatctaatggaatcatgtggaatcatctaagggacacaaatagaatcatcattgaatggaatcgaatggaatcatc

SEQ ID NO: 388207 - DNA, 1245 bp, Cannabis indica
attggtccattagttattggatggatttcggtaaaaatgtaaaaaagacaactttgaaatatataaatgaaaaaaattcttatttttcaaaatgacaaaaataagacactgagctcatcaatgcaaaaaatgtaaccaattttacaaaactcttatttatattattttgaaaaatttaatacaggttacaatcgataattttttcaaacacgggatccaaattagtatttactcataaataaataaatttatataattaaatgaaaaaaaaaaatgtgacctggttgaggtgatgattggacccctagttgggaggtcaagatggtggaatgagtagtgttgggaagctttgactcagatattgtcttgttgagaagaacagaaatgatatcagtgtatcctgctgatgagctacttaagccagccatgtttaaggtttgaacacatatggatgggtatctagttaggctgcaatcttcctcaacaatgtctcttatttggggattggtaacccctaatgcacatattcccattaatgcccaaaacaccaaaaaaatttctaccattctcatcatcatgatcatgatcatataaaatataaaagaaaaaataagttttttttatgtatactataactaaaagaaagctatcttagaagtgcatgtatatactatatagtgttgcaagaagagaatgagagggtcttagtatttatactattataaattgtaataatatatttttaggttttctttgaataataataatttgtagtggagaataggcgtggctgttctgatgtggctgtacgtattagctaaagagtcatatagcgttagtttggatgtcaattttcactattaatatcatgaataattgacatccctcaaaagtcaacatcttctcaattcgttaagcttattagtctattgatcctttattaatctacttaacttgctatttatctatagaaattttataatataactattttatatttttggctggagtttataaatttttgggtttgactatgatacgtcaagctctcatgtatgcctaacaagatatttgaatcatacttttctacgtacttagtgagaccatattttaatgttatatattttctaatttgatatataatttaggttgattttaccgtgcacccttttaaaaagagatgtactgatgcactctctatttgtttcggtatcttaaaaaaaaaatttcagtctaatttttttt

SEQ ID NO: 388208 - DNA, 1637 bp, Cannabis indica
aaaaaagccaaaagggaattagtatcccaattctaaagccatttcttcaagatgcagtttgctgaacctattaaaacctcagtaatcgaagtaggcaattcgactattctcatacctcctattgccaaatgggttgtaccaataatcaccatggattatccaaattcgaacctgcaaagttaatatataatcacatagttaatcataggggtgacctaggaaaaacaaatcaaacttccccaacattttgacaaaactcccattagcaattaaccccaaaacccaacaaaagacaataaataatataaaattaaaaaaaggtggaaatgttctcattgaagaagacaacaactaaagattccccaactgttttttcaaatcttacattttaatatcatatccaaccactttacacagtatgaaccacaagtcccaaacttcacaaactattaaagctactatcagatagaaaagttagtataaaactctcccattaactcattttactcggacattgataaccatagcactaatattttttgaaaccttaaaaaactttaaaaaatatgaatatggtacttattatagtcaggagaaggttcttcttgaccttgacgatgatacgccatttcaaaaaccttcggcttccacaaatttgttgggtttctttcgatttcccacgataatgatgaatctctcctttaatttgttgagtttcacgtctttctccctttgcactttctctatctctttttaggtttggatttttatagaataaaaattattgggttttgatttatatttatgcttttaattttatatcattaatgtattttatttatcactaattttattttaattaattcttccttttaatttattttgattctttaatttaatttataatttagtttttcaaaaaaattaagttttaatttcttcatatgccacgtcattaatttactagtgacatgatgtgcatcagtctacctgacattagctcaagtgagccacgttagcaaataataaagttagaggaacaaaagtgagcttttgctaataataattttaaagagttttgttgtcaaaattttaattttaagaattatgccaatttacttattattttttacatcttatttttcctaaaaatttgtaggaaacgtgttataattataaaaaatactatcattaaaaatattagtattatagtcaatttaataaaattgcatggatacaaaaaataataaataataaataaataaataaaaagataaagaagtatacttaaactcatcctttaattcttatttttttattattaatattcttactttcaaaataactttcactaaaaaaaaaattataatatttgtctaaacaaacaaaaataagctaacactttcatttataagcaaaaactaaggtaccgtttgataatacttttgttttctaattctttaatcacaaaatgaaagtaaaatttttatttttaaaaaattttgtttttgaaaaacaaaaatacgttttgtaatcacttttgtttttcaattttaaaaatagaaaacaaaagtatgttctgtaaagtttatttatttttttatttttttattttattatagtcgagtctaggtccg

SEQ ID NO: 388209 - DNA, 2005 bp, Cannabis indica
agattctcattataaactagcactcgactgtcacatccaaattaattgagactttgctagattgagacacttagcggtaatagaaattggactaaaacagaaccaaaacattattctttagccaatcaatctaactcagatcaactaaaacataaatcaagccaatttgcctcttaagtatgcacacagccaaaaagaaagacaacactccaattatttcttagtaaggggaattttcaagtatttcacaattaatttctactcattacaaagtgtaataaacgtacacctgagaaatagacaaactaaatgaaggataaccttttatattaaaaaacgtctaatagaactgaaatgcatcgaagaactcacacatataatactgttctcctgaatttgattttggtcatccacgactgcattgaatcaaacatagtaagtatattcttacaactaagagagaaaattgtaccatcaggcactgacctcaatggagggaacattgaagggacgaaacatcaagaggaacttacaaatagcaagcgaaggcaagaatgatcaaaggccaccaaaacaccatggttgtgatacaaggttcaaaagaaaacccttgcttagaagctctaatgtgaagcggtggagatggagaagggaaggagagaactacgtggggactgtgtttcgagccgccgatgggacttgagacgccaacgatacatgaatattagttgtgcgccttactctcgtagacagagggctgcgactgagcttcgaaagaataagaaaatctttcccttttgactttttttttctttcaaaaaagtttcatttggtgcgtatttatgttacaacttgcacttcaaaaaataaaaataagcttcatgtgtttctttaagcgcttaaaattaatatattatttaattacaaaaaatttattaattaattatacttcaaaaaatatatataacattaaaaacaataaataaaatacaactttggacattccaagccttatgagatactatcccgctcaagttgttaaggagattctgtccatcccccttcctctccacccctccaatgatgagctgatttgggagccttcaaaatcgagagtttactctgccaaaacaggttaccacctcagtctttcttctacgctccactttgatattccctcttcttcctcgccgtcgccttggtggaaaaacttatggcatcttaaaatccctcccaaggtgaaacactttgattttcgtgctaccaattctacccttcccacacgtaggaatctagctttttggaaaattattcagtcttcggcttgtgatagatgtggaatccaggaagaatctgtgtcacatgccttgttctactgtgagagcattcgaagagtctagaaaggtacgatttttatccttatatttttgctacttctactgtaattactttccatgatattgcacacaggatatatgtctctttaaccaaggaagatataaaatactttctttgtattgcttcgcttatttggtttaacaagaacagagctcttagaggacagacacaagatcagacccacgccatagtgaacttggcaaaaagctttctggaagactacaaattatcagcattggctccaacgccgcatgcccactccaacaagtcttccgcaatcataacatggtctcccccagaatctggtcgcctcaagctaaatgtggatgttgcagtttccaagggaagagcgaaatttggcttcggcggtgtcattcgaaacagtgaaggtctcgttgttgcggcagttgctttcccctacataggaggcggaaatgtagacactcttgaaacaaaatctctccttgtcgctctccgctggtgtatagaagagcatttccctatccacgcaatagaaacagattggaaagctattattgatgtgttggatcaccccaaagaggatgtaacgccctaattctaaggcacgctacagtgctttttcaat

SEQ ID NO: 388210 - DNA, 644 bp, Cannabis indica
aaaaacgttcataaataaataaaaacaattagatctcacgatcattataattaagttggccttttcttattcactgcctcaatgcgaaaaggagttcattcattcatgagtactacaatcgtgtgttggctttcataataattttgtttcaaattataatcgttatggttgctgaaaaattcaatgaagaatttctataattagaatatgaatccgcaccatagaagttaaacttaactgaatttatcttaactttaggaacccttttgaggattgttcatattggtacaacactcgggttacttatataaagattctctaatgctaaaatcagtgagaaattctcttatatatgcatactaattagcttctaaagagtaatgttgagtgatcacaaagattagtactcttgtttgtggaatattaagagtgttatcaaactgcttgcatcataccacattccataaaaatccaatttaaaataatttgtagtgtggttggtgtacaatttctgagaaaaaaagttcaaactgcaccacgctattttaattatttttagtttcatatgttgaaaaaccgtgtttctgcaaatgtcaattatatataaaaaaatataaaacagtatgcgtctgtagaagcagaaa

SEQ ID NO: 388211 - DNA, 827 bp, Cannabis indica
aaaaaacagtacatgggataattcctcaaaattttataaggtttattttgtaagaatattttctaatattagaattattaattatattaattttattaaaagcaaatatttagtttaattgataaaatattctaaatatgatcaacgttatttagttactaatttaatttgatttagttgtccaaattatatttcctcattaattgtcaaaatattctgataattaattgtgggcgaaaccttgatagaaagtctcacctatataaatataagatcttggtcccaagctcactactcattctaaaaatacagaattcatctaaaagagagtagagagcttggaagccaccctaagacagagtagtcttacttagtagcagcttagtagcagtaggattacctgattcccagattaccacactaattagttttctatttgttttgcagatccaaagatcgtgtgggactaaagttcaaagaatcaatgactggaaatattactatcctatagttatattgtgtatatatttattcaattccgcatttcatatacacattcatgtgtttcatataattcatataaaatatctaatagttagtatcatagcggttttatctctgtcttgttttatctaatagttagtatcatagaggtttcaatggttacatttttattgtaaccatcatggttacatttttttaagccattggattactatttaatggttgtgattaatttggaaattaaataaaaataaataaaaaataacttgtaacctgaaagtaacctaatcatttatttccttataaactttaattaagattaa

SEQ ID NO: 388212 - DNA, 948 bp, Cannabis indica
tctctaatttttctttaatcttagtagccttaggaatgaatgttaactttcgaaaaatcttatttctatttttataggaatttggaattcatgttgaaaggagaatagaaaagatagatttttatctttttcttatcatttaccttttcctataaggatttgaatatagaagactcccatttctctaggattaggagatcgaactcatctataattaagagaggctttaataaaattttaactcttcctctgtgaatctctcacgctcaagactttgaaaaggtccttgaaatttcatcttcatcaagccttcaattgctcttcacccttcaaggtagaattttttttttctttctttattcagcaccacttttttttccaaaattttttcttcttctcctcatttgatgagcatgcttcaaggattctaaaactcctaaacacccttgaattcttatttccatggcctccaaaattcaaatacaatattcttgtgagttaaaaaatttcttacttttcaaattgcttgaacttctccttttcaaaacttaataagacttttcttgagttctaagaaacatgaaattttagagttatcatggctaggatgaagagaagtagaagatttcctcatgaatttaatccgcatgtggcttagtttattaaatctaagttgattgtgcacaagtcaaaaaatttagacaaggcgagtggcaggaaggtaatggcaaatgaactccttaaagctgacgttgaaagtgatgacccgagagatcgagcttttaatttgagacctcttttgtttagcactcttactgaacacctagcacaattaatcaatgatgattattttcttcctgaaactattctctagaagccatcatctgagggtcctactagctctcaaaatccttgttgcagtgcttggtctgttggaaattattttac

SEQ ID NO: 388213 - DNA, 1139 bp, Cannabis indica
tgcttaacttgcatttttaataacttagtatttaagtgctttggtttgccctttaatttaaattttaaagtatttaacttaggattacaaatttcagccggttagattatattgtattgtattgtattaaattgaattatatttcatatttttatataattttaaattaaattttaatttatactaaaatattatatagttaagtgctcataaaaattaatactataaatagttttacataaaaatattgcacgaaatacaattcaatataatactacaatataatacgatataatataacgtatcaaatgaaccctgcatttgttaaaacctacttttaaatgccaacttttcgagtgcatgggatcctaagggagtggagaccttcaagatgccctcaatagaaataaatataatcgtggttcaagcctcatagctccacccgagtcaattcaaggaaatcaagttaataaaggaatgaatgttttttaaccccaagcagtcatagatccagtgatccaggctcggttggacgtgttaacacgattagtcagagacctcacctcaccaaagctaactgactttgggttggagagaaggagaggttttgccttctcgtaagctttcaatgaccttcccgtcccaccccctcacccatatggagaacttcaagatccaaatggatcttcaagggataaagaacgaccttaagtgtcgtattttccctgcaactttaacataaacaacacagtaatgattcactaagttacccccaggaaagatcacatcctgggatgagttcgaaaggttgttctatacccaattctattctgcgcgacatatactcacggatttgaaagacttagtggccatcaaacaaaggtcgaacaagccaataaaatactatatccaatgttttatgcatgaagccaccaaggtaaagaacctaagtgacgacggcaagcaagccaccataatgaggggcatcacgatgggaggtcgacaatggaaagatataaggaggaagtcaactcattctatgaaagacttcctcgatagatgtaataccttggaattaagaaatggattagcaaaaccctaaccagataattatgtataattgaggaattatattatta

SEQ ID NO: 388214 - DNA, 582 bp, Cannabis indica
gtatatatttgacactttttaatgtataattagaaaaattatttacttaaaaaacttgtagtaaaaaaatatatagttatacattatgaacttaatatttattgaaaatacttttagtttattaaatatcaaaccaatattatattaaaattaattatataaaacgtctcgttttagatttcttcctaagtttctcactggtttgagacagccttgcaaacaacatgaaaataactataaaacaataaaaagataacctcaaaaacaaaaaataataaaataaatacacatatatacaacaaaagaattgtgtggaataaattaaaaatataccccataaaaaatgtacataaactaaacaataattgtacaaaagaaatacataaaaataacagaaaaaacaaactataaaacacataaacatctaactataaaaaattataaaataacaaaaagacggctattgtaatacccggaattaagaaatggattagcaaaatcctaactagataattatgtataattgaggaaattatattattatataatttaatatatgtgattttatatgaattttaatat

SEQ ID NO: 388215 - DNA, 683 bp, Cannabis indica
ttattttttatatttttattaaagtcgggtctggggtcttgggagttgggttttgtgtttgaggtttgtcttcgggactggggccagggtccgagttcagattcaggtctgagtccaagtcagtgaatagagtttaggtgttaagatttaatgctcatataaaacctcatgtttcttatatgttattatttatcaataagacaaatagaaatatatttatttaattaaatgtattctttatatgtttattttcacgattatttacttaacatatacatctattcaatgtaaaacatataaatgaggatgtttattggttgtcacgaacttccccaacattagaagtaatcaaacgcttgggagccaacaacatttaagtcaactacaatctcgagttagcataagcttgagcactcgaccccgcattgtccgtctcctcctgagaggctgtgacgggagaagatggagggtcttcatggataataacaaccttctctttttccttgcgtaaatctctagatggagagaaaatcttggccgtgttggccttgctcctattcttagacattttcataggaggtgaaatagttgaagataggcccagtacaacttcacgagaaggtggcactcttattgtaaagcccgcttagttaatttggaaattagcagttatttatgttaat

SEQ ID NO: 388216 - DNA, 1160 bp, Cannabis indica
ctcagtggttgataatgcaactactaattgcagagtggccttccaacttattatgcagcctctcatctaaaatgtgtagcctgtttaagaccttcttaagtcaatgtcccctgcataatttgagtctacagatgtcattacatcagtgttgttgttgtctaatccataaaccataccaacatttgtagttcccttcaagtatttcacaatccattttactgatttccagtgctcaatccctagttctttcataaattagttgactatgataactccatagcataattcaggtctggtacagaccataggatacatgagattgcctactaagatggtataaggcactgagttcatgtattctatgtcttcatcagtggaaggactttgagaacatgacagtctgaactgttgactcattggagtgctgataggtttaaattcagcaaagccaaatcgatccatgattatgttgatgcatcattgctaagacaacttgagatttctttgctttctatctctaataatctcaatcgttgggattttttttgttgccctcaaatctttcatgtcaaattccttgcctaatgtcttcttaaccttttcaatcttttccattttttttgcttgcaataagcatatcatcaacatacataagcaaatacaccaggaactttgagttcctaacatataaacagctgtcatatgcactctttttgaaacatatcttgattacaaaatcatcaaacttcccgtaccactatcttggtgactacttcaggccatagagagatatctttaataagcagacacggttttcctattagttttgtggtactaaatcatgtacgcggtgaaagtatttatttagattatcatcgtaccacacccaatgttctctatatgtacatatattaaatttaaaataaaagatgaaaagatatatttacctcttgaagtgaatgagggtatccttgaatatttttgtaaatattatctaagagatggtgacgtcaaactcacaccttgatcttccagatcaactaccacacataagtattagtatgggctaataggatataactatgtgtgtgtgcatgttagacatttatatgtataaactgaaatatatatgtttaagtataaattgcggaattaaatca

SEQ ID NO: 388217 - DNA, 775 bp, Cannabis indica
gaggccaagtgacattatcaagatcattatactaactcgaccaattcatttatttttagagcaccacgtcgtttgctttatacacactcccatgcattctaacccttaagaacagcagtgtacttcttagtttttttttttggtaagtcatctcatcattaattaactttttttttttttttttgtggtgtcatcataaataacttttaaaatataaggttatatatgaaaactctaaaaaaaactatttgacgcccctcaatgaaggctcgtgagaagtaactatttgagtcaatattttgagtgtacatacatgttagtactcttaattaaatatcaaaaattgacattttttttaatttttttcttaaccaacgtcaaaacgatcgatatcgttcaaataggttgtcattatattttaacaactaacgaacgaataactcttatttgttaaatgaagtagaaacaatgggataatttatgtgacaaggatattatatattagtaccaaaattttataatttaatttgtagtactcattgttgcaagatgttgatattttattattccaataataaatatataagatcagtggcggacccagaatttaaagtgaggggggcgtaaataaattttaaaaaaaatataaagtgtagttagtagggtttgaacctttaccctctaacatatttaccaactaccttaaccattacaccaaggttactattatgtctataaatatcatttttttaatacaaatatatgttgtaactaa

SEQ ID NO: 388218 - DNA, 3858 bp, Cannabis indica
atgatctaactgatctttagctagttaaatcattgaacaattgtttttttctagattgtaatttagagatggtcatccgacctgagtgccagtcgtcttatccgagcccttgagcaaggtccactcagaaggccatctacttaagagtagttgttcaagcattgtacaccttaagggggtcatcagaccttgtacacttattagtagtactttcttaaatatttcccattacaataccttggtactagaacaagttccatgttttcattatactgaccaagtttatatgctcccaagtgagtgacatctgctacttgatatggtccttcctagttaggcccaagtacgccagccgcattatcttttctttttaagaacactcttctgaggaccatatccccacaaagaattttctcgccctcacttgcttgttgaagtaccgagccaccttttactgatgagctactagctttaggtttgccgaggctattatttctttaatttcatcaagtgattctacttggagggtgtgattggtttcttggttataagtcagtcttctttgggatggaggttctaactcaacgggcagtatagcttcgtaaccataagccatggtaaatggtgtctatccggttgatgtcctttcttttgttcgttacaaccacaatacttttggtagttcctccagccaattccctttaccttcttcaagctactttttcatggtgtctttgagtgttttgctgactgcctcgacttgcccatttgtttgatggtgtgctattgcggagaaactcttgatgattccatgtgtcgtatagaaatctatgaacattgggctatcaaactgcttgctattgtctaagacaatcttgtgcagaagtccaaaccaacatatgatattttttactacaaaatacaacactttcttagatgttatggttgctagagtctcggcttctatctactttgtgaagtaatccaccgcgactacaatatattgtaccctcccttgcctttgggcaactctccgatcaggtctattccccatatggcgaagggctatggacattgaatttgaattagctcattttgggtgcatagggagtatttgaaaatctttggtatttatcacatttctttacataggcctttgaatcttctaccatggtcggccagaaatatccttgccttagtattttctttgataatctttgtcctgttgatgattaccacataatctttcatgtactttagacaagagtcgtgcaacctcttcttctatcacacatctaagcaatggcatggataagcctcttctatacattacaccttcaactatgatgtaatgtgcaacttttctcatcattttccaagcctcgtttctattgtttggaagttctctagtattgaggtaacttgttattggtgtcatccagtttagcactatatctatcattttgacttcttctgcatagttgatgcttggtttttccaagatttggatcggtagtaagttggccttatctttcaccgtgctgctcacaagccgtgccaaagcatcattaataagttgtattttcatcccttgagagttacttgaggctgtaacccttgaattgtgcgagcaggtcttggatcttacttagacaagcaatcatcttttctccacgagccatgtactctctgaagacttgatttaccactagttgtgaatcactgcagacttcaatgtattcatcatgtacctctcgagcaacttttagcccaacaaggagtgcttcatactctacttcgttgttgaaggctttgtacccaaatttaattgctttgtgtaggggttgccccccaggtgtgatgagagcaattcctgcaccaaaggtcagtagctaatccgtccacatgtaatttccaagtaagtttgtctttgttttcttctggtagggactcctgtactagctcggggttgtcctttgtattatcttcctctttgcatgtacattccaccacaatgtctgctaaggcatgtcctttaactgctgtacgaggttgaaatattatttcatactgtgccaactctgattcattttctctttgatttatttctacaagatcctctagtcacgaacgtatttttcttgaagtagagaactgaatatagaactctcgagaaagctctttctaagaattaaatcttcctagggccagcttaaaataccattgttgggctatttcagctagagttgctgaaaaattcaccatcgcacatatccagatacttgttggatatctgtttggatctcaatgtacttcaggtgtactagaggatcttctttccccatgtacatcttctaagtcggcatcttgaatttggtcaagggcaaggcattggtatatgccaagaatggtgatcccttgacctgtctagctcatgttttgaaggttttggaccagttaggcccttgagcatgtctcgtatttgatccaactgtgcttgcatagaaggatctattgctttaggggccaggttgattggccttccttgattgtgctggagtcttggactggccagagcttggccagccacaccctaggagagggtaacttaaggttggccagcccttagtctagtatttgtacatggttggccagccctaagttgggcagggcctggctgcccacacttctctacctggctagtggagtttgtgtgatgacacggggtatatcacactaattgctggaattttctggatccaactatcagaagtgattaattccacttctcaaatttttgttttaggtgtttccacctgctctcgatccttgtcggttgaaaatttatctttgcgtgagttactccccttggggtgggagtgctcatctcttcctagctataaggactttttgaggtgtgtggctggccacggggacttctttaggaggctggccggccacagtgactcttgttggtggctggccgaccaaaggatggatagtgggggttgtagctaagcctgatatccttggctggccccccatgctgctatttactgagatttagttggtctcaccgttagacctttgaggcaaggtctgtcctccctctggaaagggaagatctaccgtagtccctaaggcgctaggtttgtcagcttgtcgatagacccttcctgatctatcaactaatcttccttaaagtagatctctaacgagattctgggctcttacaccagttcctgattgaagtgtcttatcaaattgctagcccctatgttgcggtgatctaacactgcttggctagatcgaaggatgtactcttggtcatccatccatctcacgaattcatctctgctgagcaaatacatcacaatcagtagtgtgtggttcttcaaggaattcgcatctctgctaagcgaatacatcacaattagcagcgcgtggttcttccattaggccgatctggcagacaacctctcaaagtctagctaactcgagattttctcccaagtccgcatgaggcttgccaatcgtaggtttgccaattcctggtcctgtctctccagtgcaatactggagataagatctggttgtttgtcctaggggctacgacccatgagtctttccttcagtgggaggagccaatggagggtcctcccttggaggaaggggcctgctattcagatccacttggatgtttgtatcagttgggccagccgtagttgccaggcttgtggaacttgttgtagtgataagattgaccatatctacgtattcataggaattctagttgtcgctggaacatggacatcaggatctgcattctgtgggtcttgagggagactcgaagatgca

SEQ ID NO: 388219 - DNA, 1177 bp, Cannabis indica
tcagggagacaacagtaggccctagttaaatgattagaaagcaaattcaatttctaattttattttttatttttgaggggcgataaaatacaatatacagcaagcacacaaaatttactctcaaatgttacaaaatttattcattttaactactcatttttctatatataaaaattaagcattatttgaaaatatataaataaaacttcaatttttaattttatattgaaaatcagtggctcaactgatccctgaagaggctccataataggtacccaaatatttaatttttttaataaaagtggtttactgttcattatgaacaagtaagaatatgcaaaaagaatctaaacaccgtaaacagtacagagtaaaagtgtataaagattaaagaatagtttgtataattttcaggccaaattcaaatcaaaggccattgcaacgatggtactcttcttctcactaaccacaccaactggaatcggaatcggaatgggcatatcaagtgtgtataatgaaaatgggcctactgctctaatggttgaaggcattttcaactctgcttcagctgggatcttaatttatatggcactcgttgaccttttagctgctgattttacaagcccacgaatgaaatgcaatattaggctacagcttggggcccatctttcactacttctgggctcaggttgcatgtctttattggccaaatgggcctaaattagtactcattaatgctgctgactttattatctctttagcttcttccttgggtctccatgttgatgttttctttgtctatttcttttggttcaatccctattgacttctcttacttctcttttttattcctttcttttaattacaagtgtaatttgtctttttgataataacatcaaccattaacttgagggaacagtggttttgaagacaaggatgtcaagttagtccaattaacctaaacacatcccaattatcatatttgtattatttatatttaaagtgctatttattattatatagaaagattattattaagtacttattattcgtgtttttgaaagaagaacatgggtaatttcaacatcaaacttcaatcatcacagacccagttgtaggccaaatgaagataatggtccgagtttattaaagaggtcagtgttgggttttatgccct

SEQ ID NO: 388220 - DNA, 2087 bp, Cannabis indica
ttgagacctccatgattacgggaagataagaaaagaatatgcttatcctggaaaggtctagacaagggtaaaggctccaagggttgttcccaaaaaaaccatcgaactgggacctaaaagaccttattgttgatcgaagacatagggaaagattaaccttatctactaagtgacaatgcctaaatctggaaagccatctaaagggcctattgtggatgctagtcgagtaaggagaaccaaaagccacttactaggtgaaagccagatggcatcatgtacagttatgcattttttgacacatgattagattttttatcccctgtgtcaagctatggttatgcacacaccccttttgtacactcttctttgtctgacggctactctgagcattttgtccaccaaaggtaggtccttgtccgatacgttctctgcaccaatatcggtcccccaatgtatggattattctccacacaaggaagaaccatcttcggcgtccaatagtcagttatttgcatgtattttaccctaatagtgggcgtttttgcaaaaaccctagacgggtcatgggtatgcctatgcccgtactttagcttaaaaattcccctttatttccatacaaaggggggatgaggaaaaaagagatagtcaaagctctaccaaatttccattaagttttcctcttcttcaagagaaatcaagacaacagagttagggttttcttgtaaacaccactgtaaaatatcatacacgcctttttaggccaatatactgactttgactcctcgactagggctcattaatgcctgaaccatgtaaaaatatttgtctttattactgcatttatttcttcctgagctcttatttaattagtttctaaaaatctcagtaaatattttgttcctttattgagagtcaaagaaatacctaagctaccaggttactacaaccatggtagatacttgaaagacaatcataaagaagactcctcaggcggatctagttgcggtcatggaaaatgcaaaccctctctctccaaagcacgctcagccgagcaacgggagggaattagatgcatccaaagctgaccagtgttgcaagagtcaaagagaaaacttagatgatgagagcggacaagaagacgatgatggcacttatgtcaaagatgggtattacaatgatgggtactattacgaacaagatccaaatctggttcgagtatctaatgagctgcaagagacctacaaaagttggcccatctgttattctaatttttattctcatgatgtggcatgtccacataggcaagattgatgccacatggagtacaacctgtaagtaataggactaagtcatcatgcacaacttactagttgacgaagagtctaaatgatcaagcaggacaaagatacaatgaaatggccaaccaggaggatttggccggaccacccttggttggccatagtggagcatgggccggccaacctccaataaagggtaggtcgaccagcttccattctgatagacacaagtcactactacgaaagtttgaattcgcaacggtcctaaaaatactttttttggaggaccgtcgctaaaaagttatgtaattgtttaaaaccgtaaaaaaaaattagtattctcgacggtttataatagtaattacaggaatgggcgacggttttaattggaattcaatttaatgggcccttataaaattgtcgggtataagggccgattaaaaaaattgtcacctacttctcgccacatttcccacatgtccacctacttcttttttatttcccacatgcccacctatttcttctccatttcccacaccctaaaaagaaaatcttaactctccaaaaccccacccacgcctccgcaccatcgccctcttctctcgttgtcttcctccctctcttgatctccctttcttcttgtctctctcgtccattaatctccacccacccctcctcccgtcggtctccctctcctctccgtcgcatacgtcgggccaccaccacctcccatcggtgtccctctcatctttatctcatacctcgaaccaccaccacctcccgtctgtc

SEQ ID NO: 388221 - DNA, 604 bp, Cannabis indica
agtgacatgtcatttaatgaaataaaatatgtacttttcaaaatagaaaaaagtttcttctctctctcttcgatttcagcactgtaagtgtttcttaaaaaagtgtcatttttacataagctataaatgttgtttttcattgaaacgacatatcgtttaaatatgaaataaatgtgtccctttcaaataaaggatattagcggtaatactactaatatcctttaaccacataaatcaactttttaataataaatttagagatgtacacagagcgagaaattggcggggagtactccccgttcccattcccgttaaaaatttaaatccttatccctgtttattctccattggggatggggcgaaaatcccctaatgggagtaaggatggagcggagaattttccaataaaaaactaaagtttataagaaaattttaagtttataaaaatattaatctacataaaaattgaaatattacacattatttattatttaataaactaattattatccaaaacacaacttaaaaaccataaaaaagaataataatatactaataaatgcaaacataattacaaattataaaaatattattagaaatataa

SEQ ID NO: 388222 - DNA, 2528 bp, Cannabis indica
aataatatacaaatataaaaaaatcaaaaactaaataattaacaagaatacaaaataaatatatataaagatagtattttatgtaaataaaatctaaaaaccgtaaaaatattaaaaatttcgtatatattgtattttttttaattgtttttatatttttttaaaattattccacatatccattgtaatctgaaaatttgatagaagttgaaaaagtttaaaaactgaaacttaatagattgccactaaaaattgctaataagtaatcaaaatgaattaaatgcataaagtaaatcaagaatactcacatttataagcttctttctagaaataaattccagtgcttaggttccttaaactagggtaaataacatttactaagaattaaagtcaaattacaaaaacaagttcaaaactcctcgaaaattaaagcatatagacaatgattcttaaaaacatttatcctaagatttagatcacaaaagcaagttattgatctaagtccctttacacgtatgaagccaggatctccttgcttcactcttgtcaaaattccttcagcattgaatctgaactccctttaaaatactcaagtctcactgtatcttcatccttgaagcttctatcaccatgaacaacctgcaacaaagaaagtaaaagaagaatttgccctagtagagtaagaatccataagacactactactataatgccctaagaattaggcacgctacgacaaccagtaatataacctaatcccgctaaatcgagactactagaaaataagagcgcgaaaaatagtgtaaactttgatgacaatgggataaaaacataacttgcaataatttaaactttacaatcaaatcaaaaaggcaacatgttttgggatctcataaaactttttgtaatattacaagttattttacatgccaacctaagcgacaacatccgagaatacaaaatatatctgctggtagaaccaacctgcttggtctagtatggcccaaacatgtacaatccatcgccaagctcaagcaatcatggttgattactaacagatttaccctttcctgcagtagagctcccatgagccaagcccagcaagacagtaaaaatatcaatatacacagtaaacatatatcacataattaatgatgttgccgcacttattgtctatttgacatagatctacgtgttacgatcagatacctatttatgtctatgtggcatagacccacgtgttacgctcacacgtctatttatgtctatgtagcatagacccacgtgttacgctcacacgtctatttatgtctatgtagcatagacccacgtgttacgctcacacgtctatttataatagccttagtatagggtttgtctcggtttatagttaccgagtctaacctgattataccttacctgcataaccctattcatatatacataatccatacattatgttctttcagtggtttatcctgatgatgtttactaggtctaacccagttatgtcttatacacataactcttgacatatatgcgtacattttataccttcaatatatactctaatatatgaagttttagggtaataaccctaacttgcatactaattgattactcatacaacacattaaagcatgctcaaaataatacctattgaggataataaccctaatgcatgctttcatttaattagcaatattatatattactatacatcattgcttttttatcttcatatattctaggataataactctagaccacatcattactaaacttagggctcgtttggtacgcaggattggactgaaaaggattggactagacaggacaagattgaattatgctgaaagtaatcctatgtttggtttaagaatagactggattattttatttatttccttttagaaaaaaacttaaattaaaataaaaatatataatattaaaattaaaatatataataataaacaaataaaaaatgaatgattcaaaaataaaaaaaacaataaaaaataattaaattataaaattaaataaaataatatatcctatataattaaatatatatcataaatatataataaaatagtttagcatattttttttatttaataaataattaaaatagtaaaataaaaatacttgaataatataaaattgtttatgttaaacactaatttaatataaatattaatttttaaaaatatttttataaattttctagtcatttaaaaataatatataattttactgtcatattgtttctcttagaatcaatttaagtaactattgtttaattaacaatattttaaattttgaaaacttatgtataataatttaaaattatacattttcactaattttaatgaataagtttttgataaaaaaatttataaataaatgtgtgataattctttcatttaaattcttataaaatttaaaatatattaataaaatcaaaattaaaaaaacgaataaaaaaaaatctcatctgcatgggattatttatcccaccctgctgga

SEQ ID NO: 388223 - DNA, 563 bp, Cannabis indica
tcagttgacagtgtactctatgtattgtcctaggcaaaataaagaggtgttcgtgaggactatcaccggcggtgaggggaaaatatttgttgacttggaagaactagtgttggatgacgatgggcaaccaactcaagatgctctgcgcagcaaagcgcagaagcttgcctcatcattagaagagcaggcagatgaagcccgaatatttagagacactacaccacctgcaccatctcctagatcaaaggatcgtcctcttttcccgtcaacatccattccaagcacctcaaaggctcgagaaccagtatactctgccattttggcaagattggagactgtagagagggagacgattgctttgaaggaaggcccgagtgctctattgaatgggcagaaaaggattataggttacttgaagaccctaacgtgaatgatggaagatcagagaaggtaaaatttagaggcggagccacaacatgagggtttaagagatgatttcattctccctaatgattatagacccgatgatgtaggtgatgttctctatgttggaaattatttta

SEQ ID NO: 388224 - DNA, 1164 bp, Cannabis indica
ctaaaaagttaccagtaacgtttttggtaataaaaattcactatacttgtagctaatattgaaacatatatgtatggtagggttaatatgtatatataatgtacttacttgcaggtgaagggaggtgagttggggtcagggagataaggaggggtactaggagtggtgggagaggttggagtgggaatatctggggatggagtgtaaggagtggttggagtgggagtgtagggagtggttggggtgggagtgtagggagtagttggagttggggttggagttggagtgtaaggaacggttggagttggagtgtttggatctgttggggtagaaggaggggaaggatagtatccgccgccgtggcccgaagaaggaggagattttgttgatggggttgggcagttggatggtgtcgttggtggggtaccgtagcttccgccgctgctgccgtgtgacggtgtcccatggtggctgtgatgtggtggtgtcgaatagtgaggagttgaaggagttgaaggagttgaaggagttgatggagttgaaggagtaggaatatgacctgcattttcatacataataacatcattaaacacatcaatattaattattaattaagtacatatatatatatatattaataagggttggagctatatttatgtgatagcgaaacactagtgttgatgacgacatatatatcaactattaattagtattatatatagtgaaagcttaagctatagctatcatgatgatatgtgtatatagtaattaccagtggatggggggtcatgagagtaatagttcttctggtcatcaaaggtaggggtggaggagatgacagtagtgatgaacaaactccacaacaaaagagaagggatcatcatcttgctcttgttctccatatctttgtatgaggaaagagacaagctagtagtatatagggtatatgatgatagtaatttgaagagaagaggttgaagaaagtggtaaatatatagaaggagagagtagctatagtgtgaagagtaaatagaagcaggtgaaggagtatgtggttagttgaactcttgcagacctcatttatgatcttattaatttactctcctgccttctctctacctcaataatgatcccttcaacattcaattctctctctctctc

SEQ ID NO: 388225 - DNA, 963 bp, Cannabis indica
gaggttgacggtagcactcctctgctaataatgatcaagtgactgacagaaaagaagttagatgagccataaatgctaaggaggaaatggttgtattttatattatatatgtggagcctaatatatagattgtaatcgagctctacaaatttgcatatagctggtatgaaaactcatttgtggtcataggaagcagactcaggctctaagtcatcgtgtcaaaatgtttaaaaattgcccaagacattggtttggtttgaaattaatcttgctagcgcaacaatccatgaataaggattttgggccgcgtaaagaagatagacgagtaaacatttcgagagagaaaatgaaaaataattgaccaacaaatactttttagccatgaatttgcagagttgtaactttcagagttcaaaacattcttcattaatatgaataggacttggtttgattagaaaaaagaaataaatatgaataggacgtgaagtcttcctcttgtggattgcttttatcaatccctcgttaacgctctagaaaaggaaatataaccaaatcccttcctttctaacataaatgatcaacctttcacaataatttaaatacaaatatgggatatatgtacactagtagaggatggtagatgttttttaagttttttatttttcattcttaaacatagttgtttgggtaattttagtgaaaatatcaaaaggactgacatgaaaattgtcaaagtttaagaattaagttagtaaatgtatttgttaaaaaaattatgaaaatcatcaaatataataaattagttaataaaaattataaaaatatatttactatatattatttttaaaaatatatatataataattaaattaagttatataattttttattagtattgtatagtattatattgtaacaaaaacaaagaaatatattaaattattaaatatatacaatagtatt

SEQ ID NO: 388226 - DNA, 2287 bp, Cannabis indica
gtagggcgttacaccttccttttggctaaaacctttggccactaatcttgccttgtatcttgttggatcacctggtttgatcccttccttgtgcttaaatagccatttacaatcaatcacattcttaccagcatgtcttttaactactttccaagtttggtcttcttttgagagctcatttcttcatctattgcttttgaccatttttcaaaattcttgtcttgcattgcctcttcataggaattaggttctattgttgtgatttccatggaacttaggaaagaatatgctagggcttcattccaatcattaaagattaatttatatttaggcttaaggactctcttacttttgtctcttgtaagttgataatttctcaggtcctgatcacaccatctgtatctgtgtcatcatgttcttctatctggtcaagtttaggttccaccagagctggtcttgctgaatttatctctgtctaaacttgttccacctgaacaagttccacttgattcacatcaagttctacataaggattttctagtgtgtttggttgaattttgaaatctgatatacatgcagggttagtttgtatacctacactaagagtgttcttcaataaacaaggaaggatattttctttgaaaattacttccctagttgtgatagttttcaacccccttgatctcatagccaaattctatatcttttaaccccttcagggtagcctagaaatactcctttaactgcccttggttctaattttcccatgttttggtgtgcatatgctgcacaatcgaaaactcttagattagtgaggtctagttccaaacaaaacttcctcaggtgttttcaagtttatggcactagatgggcaccagttaatcaaatatgcagctataacaactgcctcactccaaaatcctgtagacaagcttgcacttaaaaatattcacctagatttatttattggtgtcctattcaatctctcagccaccccattctgttgtggtgtgtgcctcactgatttgtgtctcataatacccttacctttacggtaatgattgaacaaatcattacagaattctaagccattatcatttcttaacaccttaacccttttatcagtgtggtttccattagggttttacaattcaaaattttttggaaagcatcgttttcattcttaagcaagtaaacccaaaattttcttcaaaaatcatcagcaattgataagaaataggagcagcctgttggttttatggtactaaatcaggtacgcagcggaagaatttgtattgtctgattatcatcatacaatatctcacatgatctctagatgtgtgtacattaaatcaaaataataaaaaaaatatgtttcgagtatacctctttaagcctattagggtatcctcgaaacttctcgtatgttatatcccttaatcctgatgatgaggaaattgcaattagactcacacaagtgtcttccaaatcattccaccacacacaaggaatagtgtgggctattattataaactgtataacattataaactgtataacctttgttcttgttgagttctcaacacatgagcaagaacaaatgagagaaaataatttcctttttctctctataaattttgaaaatttagttcaggaagagtgtaagtgtgttccaatttatcaaatcaggctcttatttatagtagttaaaatttaattaaatcatatttaattatttaaataataaatatctataactgaattcagttactgatatttatgagggaatctttcaaccacatgagagaatatcttaacaaccttgaaatatctataaccacatttcaaatttgatatttacctaattgaattaattaaacgattaattaacacaacaaaaaactacatagagatagcataaaactataggccctactattgtctttaggacaaggttagtatcttttgtcctaacaacttttgtcttgacaaattttgtccttaaaatcttaaattttttcctatttaattaattggaaaaatttaataattactatttttccaattcaaaatatatttttcaaacatctttatacaattaattatccctacctttgacaatgtttcaaggtggcgattcatggacctataattctaagctcaaataaactggattatttattgcgtctcatcaatcaaataattctctgtttattaacttcatgattattctactataaataaagaattgaactcttagaaattatagaattatatttgttgagttt

SEQ ID NO: 388227 - DNA, 1236 bp, Cannabis indica
atcaatatcataaattagtacaagagaagcaaacatagcatagcacaaatcaacaaagagagaatgaagccataacaattcagtagtacaactttgatactctcattcttacttgaggaccaataaactagattcggaccatatgaaatacacaaaatgcattggtgaaagcaaaacacgaatatgagttgacaatagacactactataatctggacttttgacgtcgatcaaagttcaaaattaacgttaacagcggactccaaatttgtccatcgattggtaattgacagtactttgcgtcaatttataactgatgcaagcttattttcgtcggttataaactgacgtaatattagaagaaaaagacctagaataaataaagtccatagcccaaattaaccctattaacatataaacaacacgataacaagacgcgaaacctgcacaagagtagttcgagtcgggggctggggtttgggtagggccaactaaacatgtcaaacacgataataagactcgaaacccgcacaagagttagcgagtttgagttgactcatctaacccgtttaataaacaggtcttgttcaggttgacatgactaacatgaaattgacccgttaatgacctatttaaagttattgggaaattaccctatatactattctttaacttttctttttttcaaatttacagtttggattgctccggtagtttttatgtaagttgctatatgaattttggttgcgatttaggttgctccgttaattgttatatgggtgctatgtggatttccgtaaaaatataaaaaaactgttttgaggtgtaaaaataaaaaaagtcccaacgttattttagtactttaataagtcataaatgagttataaacgtgttaaatatgtcataaacgtgttactagttgacatgtttaaacaaaatatgtttataaataggctacacgagtcgtgttgtgtcaacccgtttataaacagatcgtgttcaaattgagtatatacttataatacatgggtctcgacacaagactaatatgacctgcgaacacgaattgccagttgggacatagggtttgcgttggggctaggagccaaggtctgagtccaaagtctggttacaagtcaagtgccagggtccatgtccaggtcagtaagatcgggtccaaagtccaaagtccaatttagcttgtgatgctttagttaaagggctatttacaaaaata

SEQ ID NO: 388228 - DNA, 2203 bp, Cannabis indica
gagagagagagaggaaggaagaggcgctataagtttttttttgaaaggagggaggcgctgctgttagaaaggagaaatgagaagttagtattatggttttgttagtttgatatagatttgtgttagataataagagaaagaaaaatatatctagttttattaattaattaattaggttttaagagaaataaaaaacctgccttctcttagctagaaagtatttcttttaccctaattaattatgttacacggttttttattttttttttaagtatttcaacgtccctttatgtgttagtgggaaagttttcccacacgtgcatggtgacgctatagttcattatttttttgaataaaaagtaataaaaaaataatttaaaatttcagaatagttttagtgacacgcattgtgggttagcaatattaaatttttaaagtcctataatgcgggtctctaaaaattctctaaactatttagtgacacatactttttgtgcgggtcactatagagtgtcactaaaaattaattttgtagtagtaactcattaaacctcgtgattttccataccacaacagtaaacaacagatttagattcattcgagaaaatagatctaaaatctccatgaaaaaagagtaaaatatcatctgcaaagctcaagtgattaagttcaatgctaaagcagctatcatgaaattaagggctgccttttggccaacattctttattactcggaaaagatactccatacccagaacaaagagaaaaaacgataacggattaccctgtctaagccctcgttttgcctctaagtaactatgcattaatccattaaaaatttgattattttttggagttggataattaattttgacttttagtcatgttgatttctttttctagggcaagtaaaagcacattaaagtgtaaggtaaaaaaacaacataatcctctttaattatataccaacccaaatctttatatatagtgattatatataaatgtaatttttatttttaaatatatataataaatttaatttttatataaaatatttacatgatttttatttttaaatatatataataatattaaaaaattaataaaaaatattctgttaagttaatgtaaaaaatcaaaagataccattaaaccaagaatcctgttacatacctgcattatatatataagaaatattacttaatttttattttaattatatatttttagttatataaatgattttttttatattattctaataaacaaaatttttgctattaattacatacccacattaagtgctattaataaaaaaagataataatattcaaatatttgctattaattataattttagtataattgtaatatttttaattttatatacttttattttttaaaaaatcatcataccctttttctattcttttaaatgataattaaaagatatttttaaatatttgctgacacgaattggtttgggattgcttttgtggttcgcaatgcacaagggctattaattgaaggagttaccaagctttatcaagggtcggctacaccagaatttgtgaaagctttgggttttaaggaagctttaagttggatcaagcaaaatcaatcttgccatgcaagttattcttgaaaccgattgcttagtgtttattcaagccttgcgtagttcaattaattgatatgatttccatgtttattggtcaaatggttaatgattgtaagactttattgaaagaaagtcaacatgtttctatcttttttgttaggcgatcaactaataaggtggctcacaactttgctagagctttcttattctatcctgattgcagtttcaacttggtgtctgtcccagttgttttgctaccttcgttggtaactgcatttaatggttaataaaattataattttccattcaaaaaaaaagatatttttatatatgtgcgataggtttaaatttgaattacaatgttaaaaaagaaatatattaatataagataaaagatataaaatagatatgtgttactacaaaaaaaaaataactacctttaagtattttctgtgatttataaatgtaatttttaatcacaacaaaaaagttatttataactaaaacataatatttaaatataaaaagttaaactttttgtagtgtgaagtgagtttaaaattaaattataatattttttaaa

SEQ ID NO: 388229 - DNA, 713 bp, Cannabis indica
actccaatctaaaccttgtaacttagaccggaaccccaacccagaccctaacatagtcatgaacccggacccggaccatgccccaacctgacttaaataaaatcaacaaatgaaaataaaaataaaaataagatttatagaacacacttttattttttattttcaaaattaaaaacaaaagttgttatagaatacaattttttttttcaaaaacaaaattttaaaaagaaaaattttacttttacttttgcgattaaacatttaaaaataaaagtattaccaaacgttactatagcatttgtttaattttttttaaattgaacatatatactaattctgtaatgtatatacaaaatataattcctatttttgttggtgaagctgaagctgttataaagttaaggtgaaacttttttttttgttaaaccaaaaattttgttaagaaaaaaccaagaacaaattaaggtgacaccttttttttgggtgttaactggtagaacttttgacattgaaagatgtagtgtttattttcttttttatttagattaaagataataaatgcatagcattcctaaataatggtgttggttttttttttttaaaaggtgttggaatgtaatctaattgattccatgtagattccctctatatgcctcttaaaagctaataattgacattgttggtcatttgcaaaaaagaaaaaaaaaataaaa

SEQ ID NO: 388230 - DNA, 1870 bp, Cannabis indica
tttttttaaggtttgtttattaattcagagattttgataggtctaattaataaatagattaaatgacaattttatgttaaatagataaaaaataatatttacaaagttagagttaaaatatggtattttgagaaagaaatatatgttatttaataaagtatcaaaattgaaacacgtagggtccacaaggggttcaccacaaaagagtttaatttaaagccattttatcttttatctttttaatttatatttaaatcctaacttaaccttaataggtatagtatagatagataattataggctcttatttgtagagttgctgataactagaaatcacattgtcagacaaataagagagctcctataatttttgaaagtctcttctcttctccttcttgaatttcaaacctatagtgaagagagtacatgcccacaaatatcaagtcaatactaatcatagtgtggaagattgtgaagaattctatcactaaaggaaatccaggttcatatcttgacaatactttgcgacaaaaaggaacaaagattagagatctgaatggaaggagccataatattctgttgccaccaatataaggctttctacaactttatatatgtttatttcattgttttaggaaattcatgtttaggatgttagattatagaatataatcaaacatacatgttagtaaatctatattctagtaaaataatttttaacaactggtctttgagtcatgataatgatttatttttatgaaatatggatttaaactgattactgtatgatttgaagtgttcatgttgatctatgtgtttaattgatgattatttgtaaattgcaaaatttttatgaagaataatatcatttacgatttggaattattttattttgatagtttgggaaaaattaagaaaatttcttttttatagaacttaatttcgattaaaattgagagaattatgatttttgatatttatatataaactatttaatattaaatattagtaatttgatgcgtcaaaaaaaaatatattaataatttaacattcatgcatatatcaaaatgtttaactcttactaataattaaaaatgtctttacatgctttcagggcgtaaaacacacattctccattcgtactcctccaagactcattataccttagtgttaaaaacttgtcttgtaaagccctatttgcttaggcatgctacagtaattttctacttattgtgcatgcctttcctattcaaagagattctcgaaaattatgtcaaatttaaacttttaattaaacattaaaattatacatatatccgcacaaaaagttggaatctcatctttaaaatttataataatagccaaaatacattttataaacatgtcgctcaacgactacaaaataaaggcccaagtcaacctgagaccaaactcttcaggtctaaccatcttaatatgtacaatcatcctcaagctctagactcaatggtactcagcttttgccttttcttgacctacacatgcaaacatatctgtgagtcaatgaactcagtaagaaaagcacaaaacatataacataataccaacttgcatctaggcacccatatagctatttacaaggcttcagatgcattaagaacgttcttgtaacaccctaactaacataggcgtattacgtgatttttaaacatgctgtgcagctcgttgctaatcaacgaggtttatggaaaacgtgattaattaaaaatttttgctttttaattaaacttataaaacatttatacaaaagactcgggatcccgattacaaaatcatttacaaaagtttactgttcatacaaataattgtcgcctagcgactagttacaaaa

SEQ ID NO: 388231 - DNA, 608 bp, Cannabis indica
ataatttttaaattattggttttgatcaatgattttggctctctttgaggccatgattaattctttccaagatatattatacatattagtttttgcttttgtaaagataaaggtgttcatttgctaaaatttcaaaggcgttagttgtcatatagttaaatgggatagagaattgagtatatgatcaatgataactatacactgaaaataatttatatatatttaatgaaacatgatgacacatgtatgaaaattggaagaagtgtgtgtatacaaacgagtacacaaattcagttttttaagaggcaaatgattggtaagagtcaaacaaataataataatattatttgtaggctataaatattaattacaacaattaatatgagaaagagagtcaaacaaataaagtttgtaggttagaaattttaattacaacaattaataatcttcaactgtaactaggtagatgtataataattaataatatataaggcatagggtggtcctaaagttagacctatatacagggccggcctaactaatttgggggccttgggcgaaaaattaaaatggggccttttactaaaaataaaatcattaatcaatac

SEQ ID NO: 388232 - DNA, 1272 bp, Cannabis indica
tataaaaagttatcatacatacctcaaaaaaagtaaccaaacatgtgagaatatctattgtgttataactttagtctgtggtatggtataatttttaggtatgtcaaatttgatacaacgttttaattgggtggcaaatttgacccatatctaaaattggagttcaatttttaaagctaagctaaaaatgcatatacacatacctttatggtaccacttcattgagtgctataatcctactttttatatcactatttcaacacaaccacatcagtaacattatatatttgtgaaatgtagttattatattatatactataattttggcacaccttgggaatggactatttttgacagctttctgtccatattttcgccaacggtagccatcttcaagatggtcaacttcgcttttagtcataaacgcaaaccggggctgacgcattcgcttctgccctttctttttcactttgttgttactgcacatacatatttgcacataaacattttattatatatatacaaatatatctaatttaatatcacttaattagtgtaattgagaactagctatagatatatttcttagtcaaaagtattacatatctaattaaacatgatcgatcagtacaaattaaaactaattatttgaacaaaatatataaaatgcaagggacttatatattttcttgtatatacattacacatgagtgaaaaagaaaattacacagttaacaagtagtaatgctcaatgattagcttaattaacataatcaagtatataagagaatatattcgaaaacgtacaccaagaaaataaaacattatatatatatatatatgtatagctatgtattcaatgcaagttggaatgtggacgttattgagaactccaattaaaataacagcactgcatgcggtgaaactaaacggatgatatagtaaaaaggtactaagtaatggaaatttgaaatgtacgtatcatcactaaatttaactatgtttattaattaacagataaatatatatatatatatatatatagctttaaagcatcatcatatacactatattgatgaatgttcattgatgtatgccatgagtaaaatttttttgttttgatggagtaaattttaattatgtatataaattagtattaaatacacatatgaattgatatagcttctttcaatatatatagttcatagaaaagaaatatgtgattcctgtacatgcatatatacatagaacaaaaaccaaaaactaaaataa

SEQ ID NO: 388233 - DNA, 713 bp, Cannabis indica
atcatcttattgttgtcataatatggaaggaaaatataatgattataagaaatgtagctgagaataaaaaataatctctctctagtgatgattcattttataataaaatttttactcttgtattgttgttgatgaattcataatcttctcaattccaatgtactcaatttcgtgtgcatttcattttcatttcactttctttttcttttttctttttttttcctggaaaagttgagagatagaaagtgggaaaagaaaaaagaaagaaacttaagaagagagaaagagagagattggagaaaaatgagtgaaaagaaacgaaataatggtgtttaattaaagatgtgtaatcgtttatttcgtcaatctaatggccatgcttagttttttttttttttcttaggaatgaaggaaaaccatgaattcctatctataaaaggcagtgtcaaaacaaaaaggtatataggcaaatatgtactaattaataataataatactctaaatatagaacagctttaacgagtcattttatgaggttattattataataataattatgttaatgtttataaaaaaaaaatggtgttaattttgtttgtagatggttataattgatatacccttaatattctttgtaccacatatttttaagggctttttttcataaatgtacaacaaaaataaaataattacaaaaaatgtgcaaaaaaaaa

SEQ ID NO: 388234 - DNA, 1662 bp, Cannabis indica
ttccaagtttaaagaatggtgctataccatttcctagacaactgacccgaggagagtcctcccatgatagtgaagaacctgaccatcacaacaattctccaaatagtaatcacatcactgatacaggccatattttctccaatgcttctgcccgaggaccacttttgcccaatgctatttcaactcaagccttttctgttgctaatttcaccaatgctgcaaatgttcctgtcactcctttgctcgatcctacaccagcaaagtctccagcactgaatcgtccaccagcaaagtctccaacaaagcctcagcctcaaatcagtaagcctcaaaccagtgagatcatcactgatctgtcaggggtctttactccattttctgtcattcataatgctcctattgcttttgcaacttaccccccaaataccaactcataccatacagttaaacttaaccaaatacataccccaataccttctaaaatgctaaacagtacgcaaccaattgtgacttctggtactgatcagccagggaatgaggagaatatgtcaccaaatcgttttaccagaaggcaatcggatggtcaaaatctgaggcaaactctcaaaagatgcagaggcaaccaaactcaattattcatttcttctttgtcagaggaaaataaatctcaccttgatgtttctattgacgaaatggattctattagtgcaagtgacaacattgcggagtctgaatttcagctccgcaagcaaccatgaaaatcatcagcttgaactctcatggtttggggaacccgagtgcgttccgtcatctcaaattgcttgtcaaagagcaatccccaagtgtgttattcattatggaaactaagttaggtcctaattgtatttcccgctttcgtaatgttttacattttaataatggacttgaagtccctcgtgttggtcttagtggtggtctaatgttactttggaatgatgatgtaaatgtaactcttttaaattataattcaaatgtctttgattgttacatggcttgtggaaatggttcttcttggcattttactggtttttatggtgccccggctgttcaaaatcgacaccttacctggacccttttggaaagattaaaagatgtggcacctttgctaccatggatagtaattggagactttaatgaaatcctttccaatcacaataaatcgggtggtgcgttgcgtaatgaggctcaaatggatatgtttcgacatgtgcttgatcgctgcaatctaaatgagcaagattttgtaggagaccagttcacgtggattaaagggagacattctaccgatgctatcaaagaacgtttggactggtgttttgttaacacttgctggtgtgagacttttcaaccaattgttactactcaccttgattactatcgttcggatcaccgtgcacttgctgtccaaattttgccaattaattctccaaaccagcagcagtccaaacgcaccaggttttgtttcgagaagctgtggttgcaagaagatgaagctactgaattgattaaacagaactggcatcaagactcacatgaaaatgttgctatggtcttcctcaacaatctcacaaggtgtgccaactcccttcaaatttggcaccagcaaaagtttggaagctttaa

SEQ ID NO: 388235 - DNA, 629 bp, Cannabis indica
aaagtaacgagtatttttgtcactgagtttgagtcaggtgattcgagagcgctgttgccaatattcttcttctttatagagaagcctatcaaggttcccttgaagttggcgatagagaaaaatatgggaattggaaggttggaagtgcctttgagcagcctgaagttgagatttaactttttaatttgttgagggaggggaggcccaatcgatttttgccattgtgagagagtaagagcgcaaacttccaattccctgaataatatgagaggtattccttattagtgttctataaaaattttctattaaattatagaagcattaattcacaattattaatattgacatcggtcaaagcatattatttggaattattggtcaaagtttgaataataattgattttgttaaaagaatgatcatcgttttatctacttttgtattactagctagttttgaattttcagtggttctctaataataataataataataataataataataataataataagtggtcggtgtgtttgtgaataggatcaatgttactattcattcaaacctaattaattattgatcttaccatatgttatagctagaaatattatgaataagttcattttttttt

SEQ ID NO: 388236 - DNA, 2125 bp, Cannabis indica
gttggtgcactctctttctctatttctgcagatttgattgagaaaatctacatgatctgttggtctatttggtgtgcgaggaatgagcttgtttggaataataaaagctctgattgtgataggttcgaaggaaataacatcaaggttaattgtgacgctgctttatttggttcagaacctcggtttgggctggggtgagtggctcaggactcgcaaggtcagctggtggaggctttggctgaggtttgaatggggaaggtggatcctcacatggcagaagcggttgggttgaaggaagtattgatctagatcaaagagagagatgcagctgggctgatctcaggacggatttaagctcattctctaactgtgaaggggtgattcacactactaattttgtttctatttcttccccttatagtcttgtcattgatgattgtaggagaattcttcaaaatctcactattgtttcaattcttttgttaaaggatccgagaactaagcgggttagctcgctattcgggttcttatcttggtcgtatctttagtgggggattgtccttgttggtttacaagctatttcgatagctgattctatataatgaagtatgcatattttgatttttttttaaaaaaaagttgtatttttgcgcctaaaaataaaaatcttgtcgttttgatggaatctttccaaagcaaggagagaatactgtcagctatcatgtcgtttctatcttaaatttgtcttgcatgtaaatggtattatttagtttgtccttttacctatttgaatgatttataattcctcctttttggatcttttatataaagttctcaaacatataaaatacaagtagacggaaaagtagaaaaactttcagaaaagcacacacacagacaccagtgcaatgcaattatatactaacagaatgaaacaacacttgtttagattatctattttaaagcaaaagaataatgaagaaaacaaagagaagaagagggttggtttagcatttaggaattgaagagttaacatattaataaaaaaaataaaaacttgaataaacaattccaagttgttaactcaaaatactagattaatgttaatggaatgacagtgagcgagtaattttggagagagagagagagaaggaatcatatctagaaattgggtttgtcatgtctcaaatggaaggttgttaaatggccgttggggagtttaggaatatttgtgtgtaaaaattgggcctcacttctcacaaattcacttttgtctctgtaagtgtgaggtctctttcacgcggcctatgccactcactcacactcacattcacctcagcagcatgctctgctgcagcatgcacccacacttgaccctcctaccctctcacttataataatatatacaaattgtacaaactcactaaccctttttcttaatacatactatatatataatattacatttagacagtacatatgtgtgtgtatatatacatagacatatacacacgcatatataaacaaacatataggcaaaaaagtatggtgctttgggcaatgcctatcaacacaaagcttgttaataataaaagtaatgtaacaaccggtgcaggatggggcatgtggcatgtgcactccacaatattataatactatctctttggccttggccttgacctttctatttcttaggcttattgctaggtggatgttatatttatttttttttaatttttttagaaaactagaaaagaaaaagcacctcttttggtgtaaaggtccgcatggggaaagaagagaaagacattgataacatattctttgaaaggtgattttgactctaattccctttctgtgggtatcactcaactcaactcaactcctgcatatatatgacctcaattgaaactattagaaccatgattatgccctcctcctgtactatacaaatttcttatcactggcaagcatattaaatcaaaagaccttgagaaagaaagatatatatttcaaattatatgatatgataagatattcaaaggaggattaccccttgttccatttaggcacttaaaccctttttatctcactctctttcttttttggggtcctcatttgtaat

SEQ ID NO: 388237 - DNA, 818 bp, Cannabis indica
gatcggcttttgtaacaagaagattctagagagaaggtgagcttcatttggccccatttgaaggtgaggtttctgtggtatcccgttgattaggcttgaggttactttaaacattaataatcagggagggtgtttgttcaagccgaagggaaaaaagcaaaggaagtgataatcttacttcagcaaaggaagtgataatcttacttctttatgagaatcttccaccttcaagattgctattctgtaattcaaggtgagccactcttcggcttcgggctattcccctaaacctctcaaagtttatgttcgtaggattaataaacatccccctgcgtccataactgggcccaacatcgctgcccactctgcccactgaagcacccgataaagatccccatgtttccataactgcagtccaagagtcatctgcaatggatattcttgtcaatgccgccatggaggttcttcgtgatgaaacttatgttcccagaaaccctactcggcagtacaacttacgctcgataaacgttccatcttatttttttctttattttcatcttcgtgttgttttcatttttcgattcttaaagaatcttgggttataatattgtgatcaagtgaatattttcatcattttcatcatttttttgtcaatattaatttcagcttttcatcattctcttaatttaatttcatttcaattaaatttgttgagatataataaattatgggtaaataccattttggaccctctattttacaaaagttactaaccttgtattttctaaaatagtacaaataggaccctgaattgattt

SEQ ID NO: 388238 - DNA, 532 bp, Cannabis indica
aaacaaatgaaaaataagttcaaaatacagacatgaaaggcagttaaaataacaaagcaagactcaaagtcacttgaagtataacaaagttcaccgctattacaggccaccacccaaccgaggaagtttcaattggagctgagttgtatattcattgataagcaagcataagcgaaaaacaaaggtgaagaattgtatgtgagtggagaagctgaattttgtggcgcggataaagatagtggagtggagggagagtggggatgaagcggtgaaaagaagagagcagagtgagtaacaacagtgggtggtttctgtaaaaggtcgttcgttgtgtctcgactctcgttaagaagaactggacacacttaagaacactccacacatatccaattgcaatgagatgggctgcctccaccaggttgggtctggaccactgaggaatgggttcgtttcttaggcagtttttcaaaaaaaaatctttttttttgagtttttcaaaaaaatttggattatatttactgttttttataaa

SEQ ID NO: 388239 - DNA, 952 bp, Cannabis indica
tgttgttagtttaaaattatattggaaaagtataagaataagaatatgaatcaagaaaatacatgcaaggaaaactagttagaaatcatcacatttaaacaaatatgccccaaataaatataaaaaattaatgaaggaagaaaatgttgtactggttttaatcattaactataattgtttatctgtgctatatggtatcttatagtacctcctatgttataaaaaatgaatacttttgtataaggtaaaaataatataaggcaaacaagcatgttttcctgccacatattgaaatttgattccatactggtatatatatcaaatttgtccgaagcaaaatacagtagaagagataattacagtttacgcatggagagactttgccttcttaaaatcgattaaaacatttctgaaaaaatgacccaattctgtaatatactaggttattacttaggcaaccttcaatgcatatgaaaaaacctagttaagtattcagagcacatattatttcagatgcactcttggtacattcattttgagccaatgaaggcagaacatttatgacacaacacaacatatccatatagatatagtatatcactatcagaaaatgctaataaattaaaccaagcaaaatgggcaatctattgtttctctcattaaaaactcaattcagaacacctacaaaagtatttaatatgtatataaggaaaagaaaaaaaaaataagggtggtatagagaaaatacattgcattaaagaaatgtataagcataaaaagctgatttctctttgtcaaagaaggtctcaaactcacaggcacagcaagctatatgtgcataaggaaaaaaattgtgacccgacaattgtctttgcaagtgtccttgcttgccccattttaggaaaccataactggaactcaataaacaacaatacgagagagagagagagag

SEQ ID NO: 388240 - DNA, 1596 bp, Cannabis indica
actacttatatggtgaacggtgtaaagtttacattgaccataaaagtctaaagtactttttcactcgaaaagatctaaacatgaaataaaggcagaggttagaattagttaaagaccaagattatgaaatcctgtatcatttcgagaaagcaaatgttgtagtggatgccttgagtcggaagggggggctgaccaaacttgcagtgtggtaatgatttattctcagttggcttcaaatatttctaaggcgaacattgaatttgaaattgggaaattgcacaatttgacgcttcaacaagacttactgaggagggttagaatagcacaactagacgaccctaaattggttaaagcttgagaaaatgtcttagcaggcaaagttaagaacttctcattttcgaataatggaatattactgtttaaggttcgagtatgtgaaccgagtaatcctaagcttcagaaggaagttctggatgaagcacactaccccttacccattgcacccagaaaccactaagatgtattaagatctgaagccttattattagtgatacgagataaaagggatgtagtggattatgtgaccagatgcttaacctgtcagtaaattaaagcagaatatcagggactggcaagactacttcaaccattagcacttccagaatggaagtgggaagacgctgcaatggactttgtggttagattgcccagaaccacaggaatgtacgatttactttggatcgttttacaaattagcacatttcttgcttgtggaagtaacatacttagaggatcagtatgctgacttgtacgtgaaagaaattgttcgccttcatagaatcccgatgtctatcatttctaatagagatccaaagttcacatcgaagttctcggtaagtctagagaaggccatgggtactagtttgaagtttagtacggcctttcatccttaacggatgggcagtccgaataaactatttagatacttgaggatttattgcgagcttctctcgtagactttagaagttcatggagtaagtatttgcctctgattgaattctcctataataacagttattaaagtaccataggaatggctccctacgagctgctctatggcagaagatgtcgctccccaattcattggggaaaaactagagaacgaaaaatatttggccctgaattagtccagaagacaaatgaggcaacggacaagattaaagctcatatgctttcttcgcagagcaaacaaaaaagttatacagatccttagcgccaggacattatatttcagacaggagatcatgttttcctgcaaatgtcatcaataaagggaatcaggcgctttgggaagaaaggcaagctaagtccaaagtttattgaacctttcgaaatacttgagaaggttagacaagttgcctatcagttagccttgcctccaatattgtcagttgtgcgcaatgtttttcatgtctcaatgttgagaaagtgtgtatctaatccaacacatatcttggactatgaagcattggtgctgcaactaaatctgtcttatgatgagcaaccagttcaaattctggatagaaaggagaaagt

SEQ ID NO: 388241 - DNA, 1325 bp, Cannabis indica
ttctttgtttttttttttttgtatgctaaaattcaatattggttgcaggttagcactagcttcaaatattcaacctcatgttcaaagattcgtgctgataattatctaatggaagacttaactgtgaagtttcacgtctcctctcctcttgagattgatgcttatgctctcctccatgcgatggctctttgtcagtcaaagacttggtcgagtgttttctttttcacaaatcgccaaatccttcagtttgcactgcagagaaagatctcatattgcgaagtttgttctatttctccctctccctctagcttgttggatgccaattctttttgtttgttgaatccctaaattttctaatattatttctcatagggttgcaaccttaactttttttttcttttatttagtgttggggagttagtatcccttgttgctactacgcttgctttctttctattttataaatttttttttttttatatataaaaaatagatttattgtaaaataaaataaaaaaaaattaatgagtctttttccttatttcattgtctttctttgtgtgtgtttatgtggcgcaacaaaaaaaaattagaaaaaataaaataatttgactaaaattttgcaaaccagctcatactcttatactttttgataaaagcatcttaatatcacatttcttgagttacataactaggattcaataccttctatatgaccactttatgagttaaggtctataaattatagagagaaatgatatatatataaaattatgtaaggtgtttatgttattaacaaaaagtagtgggctaatttgagcatttatattaattaaagtaaagtaagggttaataaaagaagaattagagtaaaagtaaggggtattttagcaaaaatgtaggtgtgattagctataaaagaatagtaattaatataatgatattgtaactaactaccttaggacattatttggtcagttcttcagtgtaacgttgtcaaagattctaactaataaccaggggaacctcatgaaagggataattgtacaataatttatttattatttatatttatatatatacccacaaacacaagttctcacaatattacatcattatacttgtataattgttttcataaatatatatatattatttaattttagtggttaaactatattaattactccgtctataattttcagtttgagaagttaaaatatattattggtgctcagcacttttcatggtatcatactgctattagtgtaattaagtattaagtctcatataacttaagtgtaacaccctaactaccttaggcg

SEQ ID NO: 388242 - DNA, 1394 bp, Cannabis indica
aaaaaaaaaaaaaaactaagctgtccctaaattggtgtgccctccctgtcctcaccaattgttttaggacacatcatttaaagcttaaccatctcaggattgagatcaattgatctaaaattaactaagtgatattgacttagaaaaaatataatagtaagtttataatatcttttctactgtcaatattggtccagtctagtgtaatcgatacatttaatacaagtttactttgctaatgtcctagaaaagatattcaacttatccaagtgtatacgtcagtataaatctagtacattgattaattatttgactaaatactttgaagcaaataattatgattattttccactatgtagagaataatataatcatgagtacctatatgttcagtatttaatagaatttatatatattaaacatatagtcatgaatgtaacatgtgaaccaagcaacataaaattatttatgatctttgattgatagtaaataagattatattgaaattaagttttatttagggcataaaatctcaacaacggatatacctgtactatttcatcaagttaagcaatgcagcgacaagctgaaaagataaaacttatttggaattgaatccatgatggcatgcagttatatgtgtgtattgttaatgagatagttgaagcaaatattcctgatcttagcgagtccattttgattgaggcccatagatccactttgttgtacatcttggaagtataaagttgtgccaagactagaagagacaatattggtgagactgtattaagagatatatggctagtttcgtagccaaatatatagtttgtcagcaagttaatatttattttgtggtactaaatcagatgtacagtaagcattgaatatagattatcgttgtgccatatcatatgatcctccaaatgtataaatattaaattagagagcattgttattaggcaccagtggtgcctagcactttctcgacatgtcacgttacgattggctagcgatactccctaaaagttattatattaaactatatgggacccgatacttagttggaccaacaacgatactgacacataggagggtgatagtgcaccactggtgccctttagcatttctctaaattagaaaaacaaaagaatgaatgggaaagttacctcttgatgatcaatcaattattcttgcaatcttttcgtaagttgtatccaataacaataatgacacttacactagatcttctaaatttaataacagtttgagtcagtgtccagtattcgagttagggtctaggtcccgggttaggtcttggtctatgtttgggtttaaagtgatggaaatattttaccatgatctagatttactaacaagtatgtttcattaacatc

SEQ ID NO: 388243 - DNA, 830 bp, Cannabis indica
tttacttgaacaactcaggatactggtgtcgcatctgcaactctaactcccaagttgcttctttaacaattgctatttctcctcagcactttaattagtgggactgtcttgttctaaagtaccttctcttttcgatccagaacatggataggttgtttcccatataataaattttcctgaagctcaatatcgtcatagctgagaatatgtgtcggatccaatacttattttctcagcatagagatatgaaatacattatgcactctaaacaacgcaggatttaaagctaccaatagactactttacctacttacttcagtatcaaaaagatctaattaatccatggcttaacttccttttctacgtatcccttttataggcaatcctcagagtaatacaaaatttgccacctaaaactaaatatctgtatttactatataaattgtctgcactggtagataacatattggctcggcatatccaactgctattactcagtcaaaatcatataatcccatagtcttccaaaatcttaatacacaatccataattatgtctttctattcttcatgtggaatcttcaaagctgatatataattttgctagttgttgatgtactgatttaacttatcaacaacctgaatgtttgctctcgatacatctccaattatagtatttctcatttccagccatcaatatacttgaaaagtctagcattgttgtattcttaatgtataataaaatgcttttatactgaatgtaaaatgcatgaaactaaccagaaaacactcaaatttacaagcttcgtcggaccctgaaaactcatttca

SEQ ID NO: 388244 - DNA, 474 bp, Cannabis indica
tctctctctctctctcctatctccctctctctctcacatctccatctctctctttgttaaaaaaaattgaaagggagatttcgactgcccactttcggccaccgctgtctgagtcgatccacatcaccgcctctcccgctctcagtcaagataagatctaattttatttttattttaattttaattttgattcgtgtatatttttatttgggtataatttgtatcgatatatttatattgctttaatttttataattttttatattaaatttgtatatatttgtgtatagactacgtataaataatatatatatatgtatttttatgattgtgtgtataaaaaaattgtatccattatatatgtatcatagtatatgtatttaatatatgttatacatatatgtattctttatataatttgattagtgtatatataattttattttatgtacatatttgtgtgtatatatatta

SEQ ID NO: 388245 - DNA, 1015 bp, Cannabis indica
ccctagacgggtcatgggcatgttcatacttgccacttggcctataaatactctcttatttccatacggatgggggatcacgtctaatatagctgaaactctaccaatatcacgcttcgtcttcattttctctaagagaaacatagagtgtaaagttagagtttcctacaaaaacattataaacacatcaaaaatattctgagaggctaatagactaactcttggactaaggttaattaacacccgaaccacgtaaaaaatctctatctctttatttctacgtttcattatttctttagttctaaaatatttagtttccaaaaaactcggtaaacattttggtgctttcattgagagctgaagaaagacgtaaagcctacggtgttactgctgccatggttttcacacaaaacatggttcctaagaagactcttcaaggttgactcgagacaatcatggagaaggtaaaccccctctcgccgaagcacgcccagttgagcaatgcaagaggtggggacacgtttaacgtgaacaatcgaaaggatgaccaaaacaaccagcatgaccacatcaatgatgacagagatgttgagattgatgaagaggaggaaggcgatggagagtactgttgggattttatgccctaaataaaactcatttcaatgtaatttgatttgttatcaataaaagattagaagtcatttatgtttacatgtacttttcatgtttatggtttaatgtatacaatttctgataaatccagaacatatgattattcacaattacagtgatgtcaacgcagtggaaggtaattgtgattataatcttcaaaagataatgtctcttgattcatcagtgcactggatttacactgatgtgatagtcagcgataaaacttacttacaccttggataagtgttatgttctttccagaacattggcaaagtatgctagtatcagatgtatggagtatacattagactgggaccaatattgatcttggtaaagatattat

SEQ ID NO: 388246 - DNA, 1415 bp, Cannabis indica
tttttttttaatttatcaaataaataataaaaattgaacaaacatacttttcttatttttttttaaatacatttaggcatagtaaacatataagtttaaaattctaaatttgatgtgaagttcagattatttgctattctttttctttctttcctattttaataggatgagattcattgacaatatccttatcttattaattatgaccgtgaaaatacatgaatatggatgaatataatgtttatatttattacaatacaataaaattggagacagattaagattagagctaccaaaagtcttacttggacttacatttaaggcatgacaagtctcaatctattagaaaaggaaaaaaccccacatacccttgatatttatacaaaatcccaatgaataatatagcatagcatagatacattattgtaaatgatttcaaaaaaaaaaaaaatacattattgtaatttatttaatttatggttttttttaaatgtttaaatttatggattgaaactttaaagaatccatttttcttttataataattagtattttttgaataataaataaagacggcaaggactagactaggagtttgcatactattatgtttcaattttttaaacttgtttgttattattatttgtttattagtaaactcaaggactaattttggtgttgtttgctaatatttttgtttttcaatttttaatcataaaaataaaattggtattatgtttttgaaaaacaaaaatgtattttgtaaccattttttttttaattttaaagacagaaaataaaagtgtgatctgtaaaatttattttttttattttatttaagtcgggtctgaattcggggccgagttcgggttcgggttgggtgctaggttttgcaccagggccaaaggccgagtttgagtatgggtcccagtttgatcggagtttaaaatattgattaaaaaactatttaaaaataataaaagtgtaccttttttttttgtttttaaaaattttaattttacaattaaaacattgaaaagtcataacaggtttataaaacatgtttttaaaaaatattttttattttttaattttaaaaacagaaagttaattaaaaaagtattactaaacaacacatttattaatgaagtatcaactaccatcatatatttggcgatgcatcaacattaaaaaattgtaaaattttagtacataatagattttatattatttcaacaacacaatacctaaaattatattagggattagattttatttatatgaaatagaatattaatttcattatattataacacatgtaatatatacactagtagcaaaaaaaaaaggtttatgttgtcaacaatacccttgtagaaccacatcattaatgatgatatatatatataaatatat

SEQ ID NO: 388247 - DNA, 792 bp, Cannabis indica
tttttttaaatatattattcacaaataatgatgtgtccatacggacaatttgaaatatgtgtaggtgaaacctagcaaataaaaaactattttaggtgatagatgaagacaaacacgaattgttaacttgaaggacaaaacatgcacatgcaatagatttcaaaaagataaaatgccatgtggccatgcagttgccgtgatgaaagactttaacatagacacatacaactaacactactacacatcaaaagcatggatcgatgcaaacatatcaagatataatagtatacccaggtagaaacctacgagaatggcatctactagaatttttctaagacatcatagtgttgcctcttagagaaagaatcaaatttagaaggctgagaaaaagaagactggttgcaacttgggaaacaaaaaaacagaactagtgcgacaagtgttgacaaaagggacacaataaaaaaaatgtgcaagagcattacaatagacaactaaaaaattactcttcatcaattataaaactattatactgaaatatttagataatcatacatattttttcattggttatttttacattttttatatggaacatttttattttctacaattttcttaaacaaattgttgagaaaaattgaatattatgatcattaatatagaaatgacttaaatgtcattgttatcaccaaaatttggctatcagccaaaaactaacacgtgtatgtccatctcgggataaacagaatatacaataaaagtgttcaagacgagataacaaagagcttg

SEQ ID NO: 388248 - DNA, 1069 bp, Cannabis indica
tttcttgaatgggatgttcaagagaggcttcttgtctcatggtttatctcatccatgacagaaaagatcctaactcgcatagttggatgcaacagtgcaactcaaatttggtccactctcaaacagtactactctgctcaaaatcgtgccaaggttagccagtttcacactcaactttgttgcaccaagctcactagaaatctaaataattacctcctcaagattaagcacattatttactcgcatgatccattggttatgttctctcaactcaagatcatattgaagcgatcttttatggtcttgcgtgagattaattactctatttttgtaacatctttatctacttgaaaagatgaatattccgtagctgaagttaaatcactgttcatggctcaagaatttcaaaatgaaactagtgaatttgatcttgatatttctaaacaagaggtgaatcttgtagctcaacaaaagtctcatatgtcttgtggtgatcactaaggcttctctccgatacaatttggtaccttcacaggtggtcgtggatcttttcgaggagcatacccaagctactcttctgtatatggtggatttccacattcttctactggctatagtaatttttattcacctctttttgctaactctcctcgaggttcttaaggtagtttttgttgcggtttcttaggttcttaacgaggatcctcaaattctaaaactcaatgccaactgtgtcacaaacaaggtcacacagtcacacaatgattcttttgctttgacaaatcattcatatgacctgagtcctttcaatcatttactggatctgctgccacaactgagatgcaagccatggttgctacacctgaaactgctaatgatcaaagctggtatccagattcagaagcaactaaccacttaactccagatttaaacaatctaatggctcctcaggagtttccaggatctgaccaaatccatatgggcaatggttcaggtttgtaaatacatcacaatggtcatcatacatttatttccctttcacatcacaatctttaacattacacaattt

SEQ ID NO: 388249 - DNA, 2224 bp, Cannabis indica
gatgaggcatatcgaacctctgtctatcttatcaatagaatgcccaccaaagtgctcaataatttcactcctcatgaaaccttatttcttaccaaacctgattactcagcacttaaaacctttgggtgtctatgtttccccaacctaagaccctataacaaaaataaaatgcatcataggtccactccttgcattttcttaggttatagtctcacacaaaaaggttataagtgtctagccaaggatggtcgaatctatatgtctagggatgttttattcaatgaaacaacatttccatatcaaaaacctgctgctgtcccacaaaatccctctctgtctgcagtgtctacacctgtagctccaccaatatcatcctcaccacctgtcctatcctcacacatacatccctctgactcatctcctcattcaccatcccattctctatcatcttttccatccaccaacatcccagtgcccacatctgcaccatcagagtcatctcccaactcccttgttcagtgtcaacctgaacccttacaggtctcacaaaccagagccaacatacctgatcaccatgtccctgttgtgaaccagcatcctatgcaaactagagccaaagctgggattcgaaaacccaaagttctcactgcctcctttgttcctgccacagtaaaaactgctctccaagatcccaagtggaacaaggcaatgaacacagaatactatgccctcaaaaagaacaatacctggattctagtaagattacctccaggcagtcaatgcataggctgcaaatgggtttttcgagtcaaggaaaatgaagatggcagccaaactcaatacaaagcaagacttgtggctaaagggtttcatcaacaaagtggatttgactttaatgaaacctttagtcctgttgtaaagcctgaaacaattcgagttctcctcactgtggctgtcactaaagggtggacacttagacaacttgatttcaacaatgcttttctcaatggtgatttggaagaagaagtttacatgtgtcaacctcctggtttcattgattctgaccatccagagtttgtgtgtaaacttcaaaaagctttatatggcttaaaacaagctccaagagcttggtttgccaaattgtcatctgctctacttagtttgggattcactcatgcaaaatctgacacctctctctttatcagaaatcagtcacaacatacaacatacctacttgtctatgttgatgacattattgtcattggaagtcatgctaaagaggtatctactctcatctctaatctcagctctctatttgccctaaaggatcttggaaaccttcattattttcttggtgttcagattacaaaaacagataatggtctgcatttatgccaaactaagtacatccaagatttattaaacagaaccaaaatgcagggagctaagtctagcaatacacctatgactagtggccttaaactctctcattttggaagtgatcatgtccttgattccactctataccgatcagttgtaggagccttgcagtatgccacaattaccaggcccgatattgccttttcagtaaataaagtctctcaattcatgcaaaatcccttggagtcccactggatagcagttaaaagaattctacgatatctggctggtactttagattatggtcttcacctacaacgatctaccacctacgacatcactgccttctgtgatgcggattgggcatccgatcctgatgaccggcgctctaccacgggttactgtgttctctttggcaacaatcttgttgcttggaaatctaaaaagcaacagacaatatcacggtcctctacagaggcagaatttcgtagcttagctgctgttgtaacagaaataacatggcttcagtcccttctcactgaacttcgcatctctttgtctacacctcctactgtgtggtgtgacaacttgagcacagtcatgttagctgccaatcctattcttcatgcgcgtaccaagcatatcgaaatagatctctatttcgtaagagacaaagtcatgcaacaacaacttcaagttaatcatgtccctgctcaggatcaacttgcagattcactcaccaaggccatctctagcaatcggtttccctttcttcgagacaaacttagtgtggtttctcaatccacactcagtttgaggggggctgttgaagaataggattagt

SEQ ID NO: 388250 - DNA, 1242 bp, Cannabis indica
tctcttggaggtttaggccacaatctctactagtggcataccgataagccaatggaaacatatctacaaacctctggcagcattcttagacgtactaccaggtcggcctgatattgtccatgagcattccaactcatggagacatatcagtcccatcgttgtcctcatatgcccaccctactagtcccactgtctagtagtgtaatatcccagagaataatatggtatttaattgggcatattttattaaatatgtaattattctagtaatgaagtaagattatgatcttactacgttaattagtgtgagtttaataaatgattaaataaaacgtaatttattaattacgtagattttattggaatatgtgggtatcgtgtataccatttttggaataaaatgtttttgggctcggcgactgtgggaactcgacggagtggtcgatgatgtcacgacaatatcaaatggattgaattgggtattttctagactagtttagaattgtaagttattgatttggtgggattagctagaattaccaaactaccatttggtgtgatttaggtttaatggttacttaaggggtaaaatggtcgtttgaggaaattagatttttttttttttgttcttatgtgtattagtggtggatctttattaacattattaagttaaaaaataataatagatagtagtatattgaagttggaaatggttagaaaagataagaactttgcactcatcttctccctttctccttcaagcagctaagaaccagccaagaactagagaatttttcaccaaattctctttgatttctagcacatcttcatccaaaatttggcctagaagctttagggtaagtttcttgcttcatggacttaagtttttctagttgttaggttggttttaggctagggttttatgactttgtgactgtaggattaaaatgaattaaggttaagtttataggtctgaattagagtaagttggtgttgggattaggtgatttttgtaacgtccccgcttcaagcctccattgggtccttacacccacggaatgaatggcttttatacacgagtacgtcactctggctgcttcatggactaacgactgaccctacaaaccaacacgagtgtttccagcgtgctttgtcctcactcgcacgcttcctaggaaaacttcccaggaggtcacccatcttaaaattgccccagcctaagcatgcttaactatggagttc

SEQ ID NO: 388251 - DNA, 2874 bp, Cannabis indica
ttattattataaactaatttatagagcacacacgtgtcgttcctatgagttagagctttacaaaccgtctagggaacaattgctttatataggtaatatcgtctcagacactccaagttccagtaccttggtactggcaccggagtcaaatgacattcatagcgagccaacttgtacgtcttgggttctaatgctttcgtgacgacattagggcccctctctctcattgggagtcttcagtgtcgatttcttgctcaacatcttcagaagactcatatgacagatcttcattacttgtaacgtcctgactcatagggacggtacgtgtgtgcttttataaacttattattaactaatctattagtttaggtaaaagtgtggtttaatttaaaacctttttaaatttaaataaatttgattaaattaaataaaactttcatacaaactactgtcacaatacagggatcccctaattataaaattcttttatgactagttacaaaaccgatattacgaaagtaaggttacactctcaaacatagaaaaaggatcgatcctacttcccagaagccaagacaccacagctgattatctacattactgggagacctctgactaacggctgaacatagctcctatcctccttaccagcaccacgaagcacccgtgagtcacaatgactcagcaagaaaatctataggatcaaaggtattgaaaacgtaagtaatcacatcacaacataatatacatactcctgattcaaaatatattcagcatgcatatataatttagcgtctatacaaacacatataccacacgttataagaaagtcgtaacaactcatagtcaacaacttcatcattacaataaactgatattcacataatcttagtgccttataaagcattctaatcatatatctctatattcacaaaatttcagtgcttcataaagcgctcttaccactcattatccacgagctgtgtatgttactatcgttgcctgataaagcgaacgataagtaagaaaacctaactgtttcaacgagtaattactaataacgttaatgactgtatctttattcattcacaataacagtaatgaatgtatctttctctcgatcataatcgagtaaaaaacaataattatttctcatcattacctcgattataatcgagtcacaaacgataataatcgtccctcatcatctcgatcacaatcgagtcacaataattcatattattaaactcgatcttaatcgaggtacactaacgattataaacgcttcttatttaactacttagcggcgcataaatatttcttacctcagtccagaaatcaagcgtacaagccaacttgaatggaaacaaagcttgacgatcccgggtcctatgtcacaacaacaaaattcaataaataccttaaataaaaaatctcaggaataaccctaattcccaaaatcgaacaaaccttaacttccaatagctctaaaataggttttacaacttctaaacaatctatattagacacaagaaatcaccccgagccctaaaaccgaccttgaaaaaaactaaaaaatttcccctacaggcaaatcggtcgaccggttctggcagggctgcattcttgagttttcctcctccaaactcgaaccaaaactcaaccacaccttcccaactgccccagttcaaaataatatcacaaatacaacatatcccaagcatcaattaacaacaattcatttatttaatcaaaattgcataattaaatgaaattaagcttaataaacttcacctaaaccaatacaactcaaacaaccactagctctaagcaaatcaagcttaaacaaactttaaatccaacctaaaagcatcttctaaacttagcttaacatcacagccccaaaattaaactaaaccccaagcaaaactcatttcaaaccatagaaatttcaaggaaaagagtattaaacttacctccaagctttgaacattccctaaaccttaattgttttttctaaaaattgtaagattgctgaatgaattctcctagcctaggtggttcttagggttgtcgtgagagatggaaagagagaagaggttgatgccaatatcactcaattaggttttttacatctaatttctactttatcatttaattcaaataaagaaaataacccaaattaatttctatttcagctagatgttacatgcataaaagacaaaactttaaattccacaaaaactattttgcccctcaaaaacacaatagcctaaaataggtcctaggagtattttggtcattctaactaatcttgccaaaccgataatttaaaattctatactagttcggtataattaattccaattctaattaatccatcttatatcgtcgtgacatcttgatcactccatcgtagttttcacggtcgtcgaacccgacaatattttattttggaaatggtatccacgacacccccgtagtccaaaaatctccgtaattaataaattacgctttatttgtttctttaatcatatttcactaattaactcgtaattagcttaagtaggattataatcctactctaatactcacttaatcacatatttaataaaatatactcaattaaatatcattatattttctgagatattacattactgttgccctcttcctgttttatgaaatctacaatggttcaacactaaatattaaatgattcaacaatggttcaaagctcttaaagattcagtactaaatatccaatatatatgtttactcattgaaaatgttaatgttataaaattaagagattattttaaaaatacacaaaaataataaaaaaaaaattacaaaaatacggttgtacggaat

SEQ ID NO: 388252 - DNA, 573 bp, Cannabis indica
ttataatacaactattatactgtcatgatcgattgttttcgaataatcataaatttgttagtcataacgtgattgtgatgatctttgcactcagaaataatttttttctcttgttaattaaatgtagtattagtgataagctgtctacaaatgcagtacatattcttggctttgagcattacaaggaaaatgattattctcttgctcacgctcctttctcaggctaaaatgtttatagttctaaacaaaattttatgtgactgtaggtatcacctatatactagagagcagtgggctacaggtgatgaacgacagaagtatattatattgtatccccacagaatatagacatttcaaaaccaaggtcagttttgactctcttcttttctttgtattgcatttacaatatatgttctcttttaatttatgtttaagtattttaagaattgattctcttttattttttttaattgtataaccaatttcttagttatttacttgttatttgtttttacccattttgtcgtggagctagttccgttttaatttatgtattagtatttttggaaatga

SEQ ID NO: 388253 - DNA, 651 bp, Cannabis indica
aaaaaattatttaaacttttattagaaaaaaaagtatagatgatttttgaaaaaaatatgaaaataaaattaaaataattattgatattatgagaaaataatgtgaattttacttgaaaaatatttaaaataatttttttttaatattagaatgtaaatcaaacttctctattaagaaaggagttattgtcaaaatgactcatctaaaattgggttggcttattaccctacaccatatttttattattattattgcttttttaaaatggccaccttttattattttgatgcaacaggtaggtttagtgttaatttttagttaatatttaatgttatgtaccaaaagttagtggtaatgtcgtaattattctataattagaaaacattatataaattttaaaatatacataaaaatattaattaaataataaatttagaataattagtatttttgccacttaaacttttgacactacttgattttgccttctaaaatgtacagtttgttaaaaatttcctataaaatataatagttacataattatgtcccttttattagattctaatttttcaaccgttaaaaattaacatttttatcctctaaactttgaccaatacaaaattttggccctttttattaaaaaaattaat

SEQ ID NO: 388254 - DNA, 1997 bp, Cannabis indica
taccaattctaatagcaagagaaatggtagatccaaacagaaacattgatttaaacacaattcaaaactatagacacatctataattttttaccctcacaaatcaacatctcaagcacataaacatacaaaaattccattcaagaacacaaattcagaattcaacaagagattagagtttaaagaaactaccttaacacttccctaagctcaagcaaggatccacacaagaaattctcttccaatttcactccaaaaacaagttttctttttcattcaaatatcacgtgaaaaaaatgagaggtttgagagaagggaagaggggtcggtggtgaggctccaaaacaaaaaaaaatgagcttctcatttatcacttagtcaagtaatagtttatattccaattttataaaattagtcaaatgaccattttgcccctaggctaataaaaatcacttaaatagcatacatgggcaatttagttatttcacctcacacacaaatttcataatttcaaaaatatctcaaatatttagcttaaccacataattaaataattttagactccaaacccggtttgagcccaaaatatctgattgtgactataccgtgctaatttgtcaaaaaattacatgcaatcaaacaaaatgaacatactatataataatatagtctattagctaaataaataaaaattatgattttaccattcgtgggtcatgtttactgagttttgaaaactaaatattttgagagattgaagaaataacaactaataaataacgaataagtagatttttacgtggttcaggcattaataatccttagtccacgagtctatattattagcctctttggacaaatgttttgagattacacagcattacagtatgaaataccccatggaagagagtattgctagggatttaagcagggtgacagtagtgaaaaattcttctctcttccttttagaagaataaggctatttataggcacacatgggataaatggcatatcctttacctacctaggggtttcgtcttccacacgctgctaagggtctgtacggtaaaaggacgatttgaccattggctggtgagaaccttcttcatcatgtggtgtacagcagctggcgaggacttttgcacgaccttggccacgtgtcatgcaaaggtctctcctttacaaagcagtctctgctgacctcgctttagccaacgacaatgagtctaataataagcgataaagaaatatgacttaggtataatataagcaaataagtaaagaacacaagttttttaaagaggttcgatcccgtgtagtttagtaatagcctactccccttgatttgtatcaactcaagaacaaagaacacagtgtttcctctcttaaagctcttacagtgaaatctctgagtatgctctcttagatctctccaaagtaattctctcgatccctttaccagtgagaatggatcactatttatagggctacatgcttaatggaaggtttcccttttgcttacaatatctaataattggtaagaacatatattacatatttagaatacacatattgtgggatttggacagcttgccatatctctgtgatacggtcccagatttatagggattgctcttgtgcttcatgatgcgaagtctggaatggctaagtgttgattttctgctcgacttatccatggctcggttggaaagacattgtccgtttaggtgtatgctatgtcctgctcggtgcttttctctcggctagatatggggaatcaggtccacgtgtcaccagcatgtgatgccacatcatagtgaaaaaattgagataacattcgccccccaagtctgtacgggacttccaaagttgcgtgcagacttcattcgagctgactttacacttgaatgggtgacacatgttgaaggtgtatgttcgtgattcgatgtgaaactgactaggcgttgttgggttttgtgccctaaataaaacccatta

SEQ ID NO: 388255 - DNA, 860 bp, Cannabis indica
gaaactaagcaatttgaatcgtacgagagaaaaaaaaacatcttgtatggctggagagagtgtgatcttattttgaaaaattaattatcttttttaatgttttttattagcattttctatttaaatacttatatatttaattagtttggtcataaaatgtcatggcattaattttacatgtcatatatatcagaacttctatttattttctcatatttttgtaaatatcctatataaaaaataaatcaaatataattttatgatatattttaagtcaaatttaaccaaaatatatactatttatatgtattccattggagatgatcctatatcaatactctatttcatagccttgttgttctaaattgaggactaaatataaaagaaagtagctactggtcattagtaagtgtgattataacagtgtaatgtaaatgtcctaataaatgatggatgcaccacatatcatttatttatttttaatggtaaatcacatcattatgcatttatctaaactcatcattaatatatgagcctgaaaccctccctcaatcatatcttctactttttattatttattaacttattaaattaaattaaatgaatacacttttcttctatattttttcgaaatgaattctcctactatttattaagatatgttattattattggttttatgcaaaagtggcgcatgcaaaattacaaggaaaaccaaagtgaaatgaaacatatcattattacaatttttctcacatgcataaaaatcgtaggaaaagaatctgtgttgctatgtgaaagtgagctgattgggtaatgggtgggacaccgtacaaaattaataatattaatatattatt

SEQ ID NO: 388256 - DNA, 716 bp, Cannabis indica
aaagttccagtaacataatttagtaaatatcaaaatatagaaacataatttacataaataataattagacaaaattcttaaatctaaaaatcaatatgcttttttttttttaggaaaacaattaatatacttgagagccatacaaatcatgattagtgaaaaaaataatatttatgggaaaatcttagtaaaaaaaatcttaattagcatagtatttatgggaaaaaaaaataatatttaagtatttaaaacaggctgtgatttttttttaagaaaaaaaatgttaagataggaaataaaaatacaaaataaataaataaagaattctctttttttttttttgataaacaataaataaataattcccatataaataaataaaaaaaacataattctcaaatgaataataataaaacaaataaagtgatttttttgtttttacaatttaaaatatatattttttttttggtatttttataaaatttcacataaaaattttatagtaactaatagaataaaatctatataacaactggtataaaaatctcaaagcaacttaaaacataaatttaaaaaaaaaaaattaaaaaataatatataaaataatttgaaaaagacatattttttcagctaaaaaagagactaagcttgatcgaaaatgacgccccttttttcttttccttttatttttcattaaattaattaattaaaaaaaa

SEQ ID NO: 388257 - DNA, 1835 bp, Cannabis indica
aacgtgtctatgggttccgagcatcttagtatattatgtctatctcattatggtccaatgataataccatgtattactaattatatagttatcattatacattaatactaatatgaattgagcaattaataatgttaattcacatcaaatattctaacaatccaggagagtaactataaggggaagaagtgtgaaattttaataataaaaggggatatgaaaaacaataatacaccatgttgagagtcaagcaccactattatggatgatgataataaatacatagggtaatttttactgtaggactgttagtttatacctcatgaccatgtcatgaggtagttttttcggccaataagattaaagttaaataaatagaggttacataatatggtagtatacatgtatatatgtgattttttttagttaaaaaaagtagctgctttatgaaaataaaataaaatagcagaaaagaggaatgctttatatatgtggtatgtatgtatacattagtagacttgttttttttcttttgtcaaaaaaaaaaaactatagtttcaattttaggctatattacattatattgttgtttaagatacatttaggttactattaaacctatttaggttgagcaatgctatggagcactaaggtgcctagcatcactacaaggtggtgtccaaatattagttagcaattattaataattaataatctttaataaagtaaactaagtgagacttgatatagaattgcatcattagcgatattatatctcataagaatatatgaacaatgaatgccctttagcaattctcatttaggttatattgtgttttcttaatctttaagatacatttttattaccacataaagattatttaaaaaactaataaataataataaaaaactttgaagttaccatataaattctttggcgcgccctcacaaatatgtgtatcgatgttttccttaatattttttgacttttagaataatttaactcgacaaaaatgagggtcaaatattctattgtaagtgtgtctcttttattttaaatgcatgtgaaatagattatgaggtgtgttgtttatcacaacaaatttaataatattatttcaatattactagttactccaatataacagtaaatacaaaccgaacaaactagaactataattaatttattattcaatatgaaacataaaataaaatgagagattttgaattcgcaaataaaaaggaaaacaaataataaatgacaattacaattataattattaaagcagataagaattattctctactttcaataatcaatcaagaacaacaacaataagtattatttcttatttttaatttgaactattaatcctacagataattacttatcttagtctcccaattaaaattaattacggtaaaatgttcaataattaaactttttactaagcaatagatccatgaagcatgcaatttatttacttagaaaaaaatattagattttatgaagacaagttaatctaggtaacaaattaatgaagcatataattcatttaacataggttgtattcttcatcacaattaacaatacgtgtcacaatactatttaaagtaattgggatagtggcagaaaactacctgatgttgcggattaatagacctgatcaagatcaccataacaacaaatttaaggacaacaatgatagtgacacaaacattaatgcagaaccaaaacttaataaaccatttgaactaaagactaaagatgaacaaaaaatcatagaattgaattttaatatctgagaaaaggaaagaatacaactttgatcacc

SEQ ID NO: 388258 - DNA, 2144 bp, Cannabis indica
ttagattactaaaaaaataaaaaaaaaaataaaaaaaaaaaaaaccatctctagtttgttcggaaataacttcttattcatgcttctttacaactcaacccatcttcattattttacaaataatcatataaaaaaattattagcattgttacaatttgaatatataaatactcaaattttcatatcacattttataaatagattataatattcagtattatatttaaattttattattattttaatttatttataattgataaattcatatcttattattattattattaataaatataagttttttaatatgtcgtgttgtactttttagacttgtcgtgtgtcgtgcttttcagattagtctattcgtgcttaagtgtcgtgtctttcatgcttcttgtgtcgtattgtgtttaaagacatattttcgtgtcgtatcgtatcaatttgtagcatcttatcgtgttcaagcctgtattttttttttttgcctaatcatacttgtgccttccaagcttgtatgtcgtgtcgtgtcaatttgaagcatcgtatcgtgttcaaaccggtattttttttgcctagtcgtacttgtgctttccaagcttgtaccaatttcgtgttgtgtcaaaaaaactgattggtatttacaacactagttctatgtaaggtaccggattgtttgtgttggttatctagtgaaaataacaccaaatatgagattttatcaaaaaagtttcataaatatggcattcttaactttaccacccttatatggcatttgttcaaatttaaagttgtttatagtatttcatttaccacctttttgtttatttaattttcaaatcccatattttaagtttgtgtattcagtccaaagggtcagcccaatctttaaaatgtaacttagtaattttaaatctttttttcaatctgattcttatgttttttttaaatactttttaaaagtaaaataggagttgtctttttatattctgcctataatgagtacttctatttctctttcaccatttttaattttattgttctcttagttgatataactttaagtataatgtttgcatccccattttagggtttttttttatctcttgttttttttctctgcattcctcttttatatacgcctccctcatcttctttttcttcttcttgcccgacgtcgacactgttctgaggtcattgacggcaacccattccattttgggttgtgttctgattttgaggtgctctaaggtgcgtgtctctttattattttttttgtattattcttttttttaatagctaaggtggatagttggttttgtagtatttatagtcgattgagggttagttaattgatgatttttttaacctttttgttttttttagtgttggtgttcatgagaaagatacttttgttgtatataaatttatatatatatattagagtaatttgcagcgaaattctcttatgctttaatttttatacacttaacccctttttttaggagtaagtttatttttctttgtaaatttgacatgacaattaaatattaccgttaaatgtcaactggatgactactatatatacctgtgtatatgtaacagtaaaacctcaaaatcgatacagtagtaatccaattagaatttaacggtaatgtataagtataactgacaccttaaatttacaaagaaaagtaatcttaaggaggttttgctaccaaaaaaaaaaaagggattatatgtataaaaattaaaatataaaagagtttcacagtaaattcttaccaaaaaaaaaaatcagtgttataagagagagaggaatcatgtaatggaaggagggcttacactattttttttattgctttgaatttgatctttatctgtaacataatccatatgaatatataatttgattgttttgtgggcttagaaagttttttagtgtttcaataagtttgagaatgggtatagctaagtagtaagattgaaaagtaatataaatgtgtgaagggtggtgatgttggggacagcatcgatctagaatatactattacaatgaatctcaagcttgtttggccaaataaataaaaaaaaaaactaaatagttagagttaaaggataagaagatagtgacagaaatt

SEQ ID NO: 388259 - DNA, 811 bp, Cannabis indica
atgctattccatccacagtcaccactgacatgaattctgggctattaaaaccctttttctcagctgaactagaatcagctgtcagccatatttttccaataaaattggcacattgttgatgatttggttactaaagtggtattgagtgttctcaggtgctgatcctatggatttacaccgaactataatcactctattccaaaaattaaaaatccccagcgtatgagcgactaccgcccatcagctcccgcaatgttatttccaaactcataataaaggtgttggttttaaggtttaaactaggggtgttcatcaaaccgctcacatcacaccgcactgtaaaaaaaatacagttttaaattttttaccgtgcgatcgcggtttgaagtttttctaaaccgtgcggtgcggtttgcggttttgaatttttaatatgcggttcaaactgcactgcaccgcacattataaaaataccaatttttctatatatttaggtcatatatgtgaatgtccaacccaaaatttacttattattgtattgttaaaacttaatttttttttcatatttattttcaagccttataatatttttgacaagtgttgctcaagctttgttgtttttgtagtagtttaattatttggtgataatccaaactgtagaatctgcaaaaatcgcaccgcattgcaccattttttgtggtgcgatttttgcggttttttagtttcgcggtgcgggtgcgggtgcggtttgggaaattagaaaaactgcatatgcgggttggtatgaaaaaatgatcaaaaatcgcaccac

SEQ ID NO: 388260 - DNA, 666 bp, Cannabis indica
ctatgtgtatttttttttcatatcatttttctttttctatatttcattgtttaaatttttgaaagtaaataaaacaatcataattttaaagtttttataatattttctctatctataataaattctctcatattttaagttttctttttaaaaaaatgtcataatcggtatattaagtttgcatgccatttaatgtttgcagtgcggatggtgtgatttttagtaattttttaaacgaaattggacattagggttgtccatctgatccaatttacacttttttggtcaaataaaatctaatccgcactcagtacgaatttcatatgttggatccaatccaatctacgtaataatttaaattcaacccaatccaatctacaatgatgcgaattggatcaattattttattgttgattgcattttaatatttcatgaaaataaaaaaaaaataccagtaacacaactaaaattgaagatggagtttccatctattttaatacttgaacaatcgtctcaattgtattgtaggagagaaacacaatttaatttagaaattacagttaaaagtttgttttctttaatattactaaaaatcgataatatattatatatatttttaaatatatatatatatattagtaggggtgttcatccgatttaattcgc

SEQ ID NO: 388261 - DNA, 893 bp, Cannabis indica
aaaagaataaaacaatgcagaaacataaaaaacatcaagaaatatgttgattgaagactaataaatcgatgtaatttatggatttattctagttgtgcaatattgccgaatctctttattgattgagcaaaaaattaagtacaatacactctaacttatacaactcacttgattcctcacaaagtgtttccctcctcttaaacactcagttcccaacaagcatattcatctagatatgtagctccatagaaaaaccaaagtagtcccaatctcactcttttctctatattctctccctctctaatcttgctttgcatcatttaccttaatgaattgagaatgaaaatatttattggcagttagaatttgaaggagtctaccttgagctgccaaccaaattagtaaagttagttacaactaactatcataacagaaattagcttttatttataggaactaatttccacaaattctacttaatttctttaaatcataagccacaaggattctcaatatggccatcaatgatagtgttatctgcgtttctggacaggcgacacgtgtgtcttcgatgtcccttagtcgatttgcggcccattctcaaggcccaaacggatagcggtttggctcaatagtagatagttaagacttgattgaaaacaaacacggaccgatgaatctgaagagttaacttaattgaattgccaagtgtatgaaaagatgcaaacagatgccccacgaatatcccagaagggtattccaaaaggggttgcagaagtccacctcctagggctgtcgtgaaaaccaaccttctgttgggttttgtgccctaaataaaatccatttcaataatcagatttagttaataaagatcagaaataacattttatgtt

SEQ ID NO: 388262 - DNA, 1185 bp, Cannabis indica
gaataagactaaactattgattgggaatttgggatgtcaaaactaaaatgaataagactaaactattgggatgccaaaactatagagcaggccctttaatcgataatagtcacatttaattagtcataatgcatagagaaatcatgaattctttaatggtagaaatagaattcaagatggattatttagtttgataatagagaatacattatgaagccagcccatcaaaatattaatttatttgtgaattattatgtaaatgcctctcatattaatataatatttattggatgatgtattattgatataatttggatgagtacatatacataaataacattattctagtcttttttacattgtttgtgacaatatctctaactttaaattgttttagacatgagtatatataaatgtatatatatacattttatttatttttttgactacagagtggtgattaaaaattatttcaaaagaaattcagtggatccatctttagaaagaaaaaatggaaataataaaaaacgaagaaaagatgaaatcaactttgaagatcttcccactgatccaggattaagaattcccattttaaattacaatccaaacatttgaggccaaattagaagatatttatgcaaatgggtccttgtcaacttcaaagtcatgattttcctccgagaaaatgtctaggagtgagtagaaaattcaatccttgattagttgaagattatagttggttggaatatagcatagaaggagattctgtatattgtttatggtgttatctttttaattcaattattggtaagcaatcaggtagtggaacttttgttgttgaaggattctcaaattggagaaagatagaaagattgagcacccatgttggaaaagtttgtagtattcacaaccaagctcgcagaatggcagatgctttgatgaaccaaaagcaacatattgaaaccgttatttctaagcaatcaagtcaagtcaaaaaagaatatcgaactcgattggatgcatcaataactgttgggttttatgcccttaataaaatctttacaatctgattagttatcaatataaggaatttgaagtgattaatgtttgcatgaattttacatgctaaaggtttaaatatgtttattacatttacacacagaatcagttaaatccagatcatat

SEQ ID NO: 388263 - DNA, 919 bp, Cannabis indica
gagggatatccctttcttggatgggctttgcaagagttaggtgatagtgtgcttgaaaggttgtactctaccgaactttagggcctttatctggtgacttatgctttcaactttgttcatctttatggcattgtataagctagtcggccatagtgttgcttgtatgtggttggccagccttgatcatctatataggtgtctggctggccatggcaatccaaagaggggactgggtggcaagaattgactttttgatactaacaatgttttgatttatttttaggccttgatgaagttgagttcagctcatgacagctctagagggtcttcaaacgctttttaggagcgcatgaaggtcttggaggcatctattgcctcaaaagacaaagccaatcccaagctagaggtccttcaagcagagaagcagagaatggtctctggatcggagattatgctgagtgtcaggatgaccgagaacaccaaccaagctgctcttatctttgggttgtagactgatcttgaggaacataagaagaagttatagtaggctcttgatggccagtaggccattaaggaaaattaccttgtgtaatgccctaatgttaaggcaggctacagtgctaaccaatgattttttttcgaaaaacctgtcaaattaaaaattttataataaatattaaactttataatttacataataatttacaaacaccgggatcttgattctaaacttttatacaaaatacgtcaaaatatgataaccaagtcacacaacgactacaaaataaaatccccagatgtcccgagatcgaacactctaggtcccactgctttgacatgtacaacttcatctcagctcaggctcactcatgttcagcttttgcctttcctttacctacacatggaagcagaactgtga

SEQ ID NO: 388264 - DNA, 705 bp, Cannabis indica
aagttaatctttcacaattatcatttcacttcctctaaactactaacttagtaagtttaaagtattatctagtttttataattaactgacaacatgaattgtttatgtgtactcttgtacatgtgacacatttatattggtacctaatattattatttaaaaattataaaaaattatttcaaaatttataatattttatttttttaaaatattttgttttttatttttataatttatttaattttaaaataattttgaactaataatattaggtgtaccaatataaacgttgcatgtatataaaagtatacacataagtagttaactgtacaacactttaaatttactaacagttcagtaatttagaaatttttattgtcaaaatttgagtttaaaaattaaatgcaagtgaaacgattattgaaagggttaatatttgttatttgtcataacaattgcataattgcatggataattacaattttctaaagttgagtatcctttctttttcaaaatatatatgatgtgtataaaaaactattctctagaattcttacacactactgcactatgaacattatttatagggtaaatactattttggactctgtgttttgcaaaagttacagattggaccatgtgttttgttaaatgacaaaatggaccctgtatttctaaaatagtaaaataggaccttgagcttaa

SEQ ID NO: 388265 - DNA, 729 bp, Cannabis indica
ttcaagaagaacgaataagaacataatttgatttttagtaaaagtatgaggttgaaattaacaagtgtttcatttgatcatttcttatgtatatataaagatatataaaaattaaatattgatacatatagggtcctaggatacctaataagtaatttatatgtgatgcggttaatgagagaattaactatagttaaaaaatttaaaaaaatatctttcgaaacacgtaattagttaatatattctttaaaatttgatcaattttcaattcaagaactaacataaagtttataattaatttatacatatactataatatgatggtaaggtccagtatacaacaaataatactaacactgtgagtggagaattggtcgactaatatacatgagtatttttagcatagttttactattttttttttttggtagcaagttaatcttaagtagatttatagttagtactaattttaattgtcatatttaaaatcatttacaaaaccaatataaagtgaatattatgaattttattagataatattttactacaacgtatccagggacggagggactttaacccatgtgtgggctaaagccctcactcaaatatatacgtcaaattttttatatgtagatatatacatatattaattcactttgttcaatttattaaagtccaattaacaaaagccctcactcaatatcttaatcatgattcatgagcctactc

SEQ ID NO: 388266 - DNA, 1229 bp, Cannabis indica
atctttctcaattcaacatttatgtttactgtttagtgtaaaaacaatgataagatactaaaagtattgtactaaattgtgaaaattttggagcatcaagctctgaaattgaaagatctcttagcaattctacattaaaaaaaaggcaccttgggggagagaagaccttaaatagtttggattagaaggatttaagtctggcaatttaaatatatagtatggggttgactccatacggaatggggttgactcctgattgtgatttcagctaacttattttttcattgttaaattgatgggctaaattacttcttgttctttcctggccaaatgaaagtgtagtccatttttccgggtggacaattcgccacatgaaaatattagctccttggtagaaaagcctttgttactctgttttgtttacatactaaatcaacgaagtctttccattttccaaaggctactctagtgacaagcttaaacaaaaattatcattttgtgcagcttctggcgagccaccattgtttctatcggcttccattcactcagctgcaagagctgccatcagagcagcaagaaaacaaatcaattcatggggaagcccgggcggatctgactccatattccaattggatgttcctgctactatgccagttgtgaaggaattatgtggactggacattgtggagaggtacttggaatggaaaaaaggcggagactgaagacgctacagacgcaacttaagcattgtttatcgttcatgcctcgtctctaaaataaaacctcattatgatatgaataagatctgttagatcagtataaattatttttctttcattcttggttacaaataatttcacattaaatatagatttagtgtactctgtacacaaataagcattatgcaaaagggaaaagtatttgtgctttatatatgatggtgttttgtctcagtaaaatcttgttatagatttcctaaatattattgtgttatcgtggtgtttctaaaaagactattatcaccaaattttatagctaatatctcaatagtattatatcataatttttaatgaaaattacacctgcatcttaattatagacatttcatactatttttattcattaacacaggccaaattagaagaaaaagcaaaaacgataaaagtagacatttcaaaatgattcaaaagcgtgttggctggtatcctttttgtaccattcatctgtaa

SEQ ID NO: 388267 - DNA, 2930 bp, Cannabis indica
agagaaaacacctagagagaatccaaccaaaaattgctcttaactgtattgtaacagtgttcttgctaaatcaataaaggaagttttagtgatggttccaaaataggagtagagtcgtagattacactgatctatcagacatggatcagtataattcttggtattgttttttacaattttcctgcattttttatttgtggttctattagtttctgctatactattgttattccttccgatttcgttggtatttttgtttgattgtattttgtaattgctaattgtttgttgattcatttgaagttagtttgatcctacacaataattaaaatttcccacaaatcaaagctaggttatcgatcaagattgcagaatcaagattctttccattgcaacagtcaatgtcatcaacagcaagattcggattggagaagtttgatggaacgagagactccacactatggagagaaagtcagaaagggatcctatagtgcatcagaaaagtctccaaagtcatctaagatgagaagttactggctgagaaactaggagagaaagctgaaatggaagagatggcttattgcacaatcattatgtatctttccaacagttttagaagaaatcttgtcacagagaagacgacgaaaatagtctagaataagctgaaagaactccacatgaaaccatcgattgctagcaagatcaattttctagaaaggttatatggtttaagaatgatttctttcctttgtttagataataacattgacatgtttaatgagattattgtataagattgactaacattaatcataaatttgatgaagcaatctaagccatcatttattgagatctctcctgcatatcaagaagtcaaagcactgccgtcatgtatggatgagaagtgattttattgaaagatgttcttaccgcactcaagtccaaagattttgaatttcaattggagaacgaatacaagaaggacaaagtgtaactatcaagtgggagatcaccaaagagagtaaattcgaagagtaaacaccacatctctaaatcaagatcgaagtctggggggaaggaattacaaaagtgtaatttttgtggaaggcctagacacttgcaaagataatgcaagaagtacaaggaccaacaagacttcaaaaaatcttataagtgaggtaggaagggactgcaagcataatcacaagaagaaaaattcagctgcaattgtagaggacaattttgactactcacagatggagaattattttccatctcagaatcctcaatgaagagggagtggattcttaattttgggtgcacttatcacatttgcctggttttaaattcattttttgattataaatcaattcatggaagtaaatttctaatgggtaatgaattttgttgcaaggtaattagaatcaaaaagatcaccatctgatagtatgatgtctgttaggctatttttaacctattgtttgagtcatttatagagttaattttcttttttattgtcacttattggaacataattatgcttgttttctttagtttcaagttttaactcttggaatgtataaattggtcaaatatcagaaatacgacaatctataaactagaaaaagaaaattcaagaaaataaagttgaaacttcaagcctaaattcgactatgttttgttcaaattttgaaaaaatgtcaaaagaaagaagttttagctctctttttagctttctaatgcatcctgaatcacctcatttggagtttttatgtaaaagttatgtacatttgattgagaaaggtcgaagtagaaaaatgaattgttgttgcggcgaggctcatggtagccgcgacaaattgtcgccgcagcgaggctcatggtggccgcggcatgggtaaagtactaaactgttgtttcttgcatgtaaaaagtcgtaaaacaatagttttgtacttcacactgccgcagccaccatgagctttgccgtggcgacaattcaccgcggccacctacatgttcatgacaaatatgaactatattcgctggctaccatggaagcgttcaagaaagcattatggctaagaaagcattatggcttcaagggattttgcatgaaatgaaatagataaaaggagcagtaaatgtgtacttagatagcgactcatctatccattttttcaagaacccaatatatcattaaaagagcaaaaatatagacatatataaggctctattgtattagagaaagatagaagaatgactggttgaattagagaaggtcagataagaagataatccatcgatgttgggactaaggtcctaacaattaacaagtttcggcactgcctgaacttgatcaatctcataaattagcatagtaagatacctggaacactaaccatgatggatgcatacttttttcatcaccattgcttttaatttaaaggaactaggtgaaatttgtagtatagttcctccaaataaaaaggtctcaagtcgagtctttaggaaagctagtcattgtttgaaaaggagttctgaaaggctagcttgtccatttggatgaagtcttgtggaaagccagttgtcatccagaaaggatttctaggaggctaactattccctccaagttggggttctggatagtctgttcctttcagattgcacttcatcagtttgggacgtccgtcaaggaagcgtgatacttgtttggagccaagagctgacttggagatatcattgtaaggagccatttaagtcgattaagtcttaaccaaattgactatttagttatttgaagccgcaaccttttggaattcatatcctagatctataaatacaactatccttttcctttgtaaagaaaaacacgaaacactggaagcagagtaaacaagttctttgagagttcatatatatatatatat

SEQ ID NO: 388268 - DNA, 976 bp, Cannabis indica
aggtatgtttgtaaaagaattggaagataatctttatctatttcagttttatcatcaaatagatgtagacaaagtggtggaggggagtccatggacttttgatagggtgccactgatcttttcaaaactgaatatgggggagaatccgcgatcagtattgcttaataaactggatttttggattcaactccatggactatctactggctttatgtctgcaaaggtggtcaaggatatcgggaactacatcggcactttcatagaagccgacaagaacaacttcgtgggaatatggcgtgattatcttcgggtacgtgtctctgttcgtactgatctgcctttaaaaagaagaatgaaactagagaaaaaaggaggtgagttatgttatgctaatttcaaatatgaggatcttccaacattttgctttatatgtggaatccttggacattcagaaaagttctgtccaactttgtttgatacaccacaacatctgattaagaaaccatacaaccttgagttgaaggccatgccaagaagaagacaacatacaatcggctccaaatggcttcgacaaggcttattggctcgaggggagaactccggtgaaggaatgggaggagtctcggccgagaaagaaccagcaccagggagagctattgggggcgaaaatcatgggaagaatcaacctcttgcacgatcaatgggattggatggaggaattagaggctttgatttgggaattaatgttgatcaaccccagagtactatttcgggaaagtcagcaataagaagcaccttgattgatggcatgagagaggatacttttgaggatattgatggagatttgttgatccttgaatcaaaaaggaaacgtgtggctggtatgaagattaatgggccgaatgaggagaatggtgacaacatgagtattttggaagggacaaaaaacgttattggggcgggttctgtgtcacag

SEQ ID NO: 388269 - DNA, 824 bp, Cannabis indica
ttttatttaaaaaaaattgaaaatggaaatttcttcaattgagtgagtaccacgcgcgggcgcgtgcatataaaaaaggtttggtgtttttggtaagtgtagttgggttcgagcaattctttctttgggcctactattatttttctaatcatttttaattgaaatgtacgatttttctaaatgagttattgagatgtaccttaagaagaaaaaattagttacaaatgtcttcaaaattgataggtgaaaaaatttataagaaaataaaaatatgaaatcttatacttactaatttattctttaattaatttataaatacaaaataataaatataatgcaacaattattgtgtagctagggaacatgactctgtaactgtagaacagaaaaaccagcaaaaaataaaaactcacaaggtttttatacgtggtattaacaatctttgcatattgttattagttcacagggtcatgctcacagataaaattcattagataaataaataaattctttcttattatatgtcgcaaatttgatgtatttcaccttctaaaatgaataacttcaagtgttcaaatttgatgtattccaccttcttatttttttaatcattaaagtaaaaagggtgaaatgtatttattttgcatctatttatcaatttttgtccactatgtctcgtttcatgataaaattaaatagaatatgatagaatgatcacgttactgtaaaatttatattttgatgagtaatattaacgagtcgtatactataaagggtacaatttaatagtgtaaaaaattcaggaaacgaaaatactaattatt

SEQ ID NO: 388270 - DNA, 1571 bp, Cannabis indica
aagtaatttaaatttgaaaactcatggttacgggagcccatgtgtaagcaactggtgaggggtgtttgggatggtagtatgaagcagatctctttgagaaaatttctaagtgtggggcagttttaggtgattggggtaacaatgttgctggttattttaaagagaggttgatgcagtgtaagagacagttgagacatctccatcaaaaaactagtgtcgattcacaaaagttgtatgaggaagagcaacataaggtttatgggattctgactcaaaaataagttttttggaagcaaaggacgaagcagttttgttgaaagagggtgataagaatagtcgttattttcatgtagtggcgaatactcgtaaaaagaaaaatcatatttctaagctacacgattataatagcgcctgatttacttgggatgatgggcttccacagttagtaaaagattatttccagggtccttttagtgccttggatgcccaatggggtaacttgcttgattatattcattcttcgatttcaacttttcaaaataatgatctactgcgacctattttggaagaggaagtttgtagggccttgtttcaaatgcatctgaataaggctccaggtccttatgggatgagttcggggttttatcaaaaattatgacatattgtgggggcatgtgtggtgaagttggttcaacagattttgtctttgggcaagttttcaataggcattaaagacgccaatattgttcttattccaaaaaataaaaaatctcatgaagatgggtgatttaaggtcaatttctttgtgcaatgtgtctacaagattgtttcgaaggttatggccaatcgatttaaagtggtgctaccacatgcaatttttaacacacaaagtgcatttataccaggttagttgatttttgataatatcatggcgtcgtttaaaatttatgcactatttgaagcgtaaggtttcagggaaggagggggctatggcactaaaacttgatatgagtaaaatatatgatagggtggagtagaattatctcagatttatgcttaagaaacttgggtttttacaatattgggtgcaactggttttggattgtttttccacggtgagattaggggggttcattggatcacatgcaatatttttaggcctacctatatccgacccaattatatattggatgatagatttatcatctgatctgatctaattaatttcagtcatctaatcaatcaaacatccaatgaatattggattgaatcaattatatcaattgaatatatttcatgtatatctattagtttaattttggtttatccaatattttagacctagtatttattagaccggatcagatccatacaatattttagatccagtatctataggattgaattggatccatccaatctaataaaaaataaaatttgaatgttaatttttatatatacatatatttttttacatataacaatataaaatttaattacttattcaaattgaatgaaaatattaattagttcgattgaatgttggatgtattgaatttttggacacccca

SEQ ID NO: 388271 - DNA, 802 bp, Cannabis indica
caagaattgaagaactagaatggctgagtcaaacaatgacataaaccaaaaataaatgcaaaataaactaaatgaaatacagacgaggtttacgaggttcatcaccctttttatggtgactaatccctgagaggaactgttctttggccaagctttattcgatcttcaataatagaggaatacaaaaaagaatacaagagttgagctcaactatggtgtcttgcaccttacaaattaactcacttgagagagatgtgatcaaacacgaatcttttttaacaaccctcatcactcattagaaatgcaataatcatctaaatttctctctagaccatcacttaaagaagtaatacacaaagcattatataggcaactcaatatgaggggtgcccgaactatatctgaaataactaactcggaagttgactagataaacttgcgccatctgacaggttactagataagactaacagtaacagtacaccaagttactaaagtctcccacactttaatctattacttttctcaccaatttagtgacacggtgttggtcaactattagtatcaacaatcacataataatgtgatccccaaacacacattaaattaaataattaatcacacataattaaataatgggtgtctacatatttggtaccctgtgttttatctaaatacaagttatgtatcctgtatttttaataatgtgtatttggtactctatattttaaaatcatacatatttgataccctaaatttaatttttttttccataaaactttatcaatacaatcaaactgtc

SEQ ID NO: 388272 - DNA, 555 bp, Cannabis indica
aactagcgctgtaacttaaattataacaaaaaatagtacataaattcctattacaactagcactgcaaccactttagaaacttaaattgtaatttaaaagaaaaagttaaaaaaaaatagtatatggggtaattaaaaaaataaattctatatttataattagattaatttaatataaaaaaaaaatgaaaaaacgctcagcactagcaccaacctataaaatgtattttttaacttatcattatcatccttgcccactatgaaatgagtcatgtttgcgtgttttgtttctccaaagaaagcaatgtgacaaaatgcagagtcatccattattaaaactatattacttataataattatatacatcgtacaactacataaacagagaataggaagagaagagacttgttttattcatttgctattctcttcttccaacacgtgttaccaagcaatttaatggtgacccgataagtatcaattagaatattatactttaggaaaaaaaaattagaatattttaatatattttgaacaaaaaggtcttccttgaaa

SEQ ID NO: 388273 - DNA, 588 bp, Cannabis indica
ctagaagatatcaagtatagaggcagctattttacgtggaacaataaaaggcaaggaagtgaaagaatttattcgaagatagatcgtgtcttagccaatcctctttggttacataatttttctactgctgaagctattttgcagcagaggaattattagaccataccccggctatagtcactttgtttcatggaatcataaaagggaagaagccttttaaatatttttaaatgttgacctcccatcaaagatacaaagagattgtaaatggggtttccgaagcagcaggttgtcggttctaagatgttccaagacacttccaaattgaagaaatttaaagtggcatttaaggagttgaataggaggagcttctcaaacattcaagaggcgacggatgaagccaaaaaagggttgctagaggcccaagtgaaattggaagatgacccatcaaaccatgagttgattgaagaagaaatggcagcaagacaaaaatatgtgcaattgctcaaaggtttgaactccttcctacaccacaaatccaagcttagttgaattaaggaaggagatgaaaactgttggaaattattt

SEQ ID NO: 388274 - DNA, 1447 bp, Cannabis indica
aaaaaagtaacctgaattggctgaaaaagggcgatattaactctggttttttccattcttaccttcaggctagaagaactcagaaaggggtgctatccattacaaacatggaaggagttagagttgaaaatccggattaggtgattaatgcctttatgattttttttatcaaagtctattaggcaacaaagttgattacaggaaacaagtccaaaactgtgtgttaatgcagggtccggttgtctccagggaacaagctgatgcactcttagctgagtatacgactgatgaagtgaagaaggctatttttgatatcccggggaacaaagccccaagccccgatgggtatgggagtttcttttttcaagataattgggagataataggcaaagagacagctgaagccattatctatttccttcatcctggccagttattaaaggaattaaactccactattttgacccttattcccaaaagcaagtgtccaaacaatgtgggggattataggcctattgcatgctgcaatgttctgtataaggctgctaccaaactcatttgcacccgacttaagatgatcttaccagagttggtggcattgaatttgtaaagtcctttttttttggcaagttagatgcataaatattttttatttatggttagtttgctttgtgtttccaatccgattttcttacctttattattcgctttaattgattttttctatgataggaaagatgtcttttcagctgaacttttcttgtatggaaacttcttgtaagagaagaaattctcttatggaaagttggtttttaaaggaaactttgactattgcctttttccttattaaattcgattgtgtcttgatacaatcagaatatacaaactgtttatggtaggtatcaagacccaatacaagatcgtactcgtttatgaaaaatttcattttccggtttgatttgttgcgtcagaatttgtttctgatgctccagatcatgtttatcttaggaaagttttgtacagctgtagattcgaccttgtggatgtctctagggtttccattttcaataaatagaacctagagagcagccattcgaataaactcttctagtattcattttttttttttgcattttttcttatttgtgagaagagagtttatttttgtgagaacctagttgttcatctaggtttcagcgtttttcaaatctgttcttactctgtcttagagtttgagtttgttagaacgacttgatttaacaagagagtggtcttcgtgagaagacttgttcaagccttaatttgggaggaagtaagcacgcacacttcaaagatgaagggagttcgctctttggaggtgtttcagaagtcagattcataaagtgcattacaaaggattacgacaaaaatttagagagagtctaaacttgtttaagtcaattgtctt

SEQ ID NO: 388275 - DNA, 718 bp, Cannabis indica
aaattagtactcattgagattaaatttagggttagtggcttagttgacacttagccatttaattatccttctcatagccttatattattttcaataccatttaattaattaatcaattaagtcaaaagtcaaaactcacatcctctcttctagcaaccctacaccaccgccatcatttattttcattttcatctattaaagataaagttggacttggattcttgaaggtttagaagggatttctcttttattagagtagaactcagagttgaattggattgaattatgctaaaagtaataatatgtttagttttagaatagattaaattattttctttcgagaacagttttaagttcagtctcaataaaaaaataaaacagagcacgtacctaacaatatatcttcacataccaagaattacgagatcaccccttttattctgaggtaacggaaggattgtaccattcgaacttttacttttatgatttttctaaaaagttagagaaaattgcaaatcaataagaaaaaacttcacaagcttttaattaaaattaaattagaaaataaaataatattatttttataaacagattatatttttataaataatatatcatatataattaaatataactaaattcgtaataaaataatttattatatttttatttaataaataattaaaatactaaataaaaatacttgaataatataaaa

SEQ ID NO: 388276 - DNA, 1979 bp, Cannabis indica
ttatgcgttataaatttgattctattcctattcctattcccattttcatatctcatttctatgttttcattccttctaaccaaaacgctatctaagtatcattgaaaaataatctttatataactgtgagttattccttagcttgtgctgataaaacttgctattgtcaaaattagtttttttggttaatgaataatgtgttgctctcaagaagaaaccaatattgagcaaacaactgcatattaggctttttttttgctgaataactgcatattagcttttgggctgtgtttgataacaaaagtgaggaatgagagttgtttgttaaaagtatgagagaatccatttaattatggaagattataactctctcctgaaactgaggattaaaagtgtgaaattaaagtttccatccccaagttagggaaatattctgtgttttggttggttttggagtcgtgaatttgggatatatattttatgatttggttggtttggctggataagatcatagaagatagtatagtaccaatgtctgtggctactatatactattggctatgtacaaaatcaatcactctagcaaagatcgaagctttgctacttcaaaactcaaaaacacagagctagtggaagctgtaggtgcccctcagtcagtttgtctcccctctcttggagagagaaattttccctttaatataattattttactccactagttatagatttgtgatttgtcatcttctcttttcgttttgcattatattttagttggccatttagaagtcgacagaggaaagctatatccacattggtttggttattttggggaagcatatttggtttggttagttttgggggcagcttttgatgtttgagacagtgagagagattgacactagtccaccttcacctcagatgtttccaagtatagaacgtgtcactaggaacgtgtaacctgttatgttttaatttttatgggtttgtttggtacgctgtataaatgtcatatgtttggataaaacaatttattgtattaattattacgaccaaattttttatacaatataagttgtattatttaatacataacaaatggtccatattatagtttgtattatgtaatatttacaaagaattcagggtcaattccaatctccgatccggactcgggacatggtcttgaacatggacccgaacccgaactcggaacctgaacctggtcctaaacccaaactcgaatctaggaccggacttggacccaaacccgagacccaaacccggacccagactcggacctagactcgggacccagatctggacgtggacccaaactcggatccgagcccagaccgggacctgaacccagacccaaacccaggataccgactcgaactttgaaccagacccaagactcggacccgaactcgaacctcggacctcaaactctggactctgactcgtgtgccggacccggactgagtgccggacctggacccgggtgtcggacccagaccttgaccccaaaccggacttggaccctggaccccgaacccgggactgggaccctaggacctgggacttggactgggaccctaggacttgggactcaaacctggacccaaactcgggacctggacccgaacccggactcgaacctagacccaaacctagaccttcaccttgaacccagaccccgaacccgatcccgaaccaggacccggacttggacatgggacttggacccaaacccagacccggacttaaacctggacccggacccagacctgaacccgaacttgagaccggaccgagactcgggacccgaacctagaccccggaccctggacctagaacttgaccctggaccctaagcaggactcggacccagacccaaactgtgacagtcagtagtcccgtgatccgtaaggggaaacaccgggtaagctgtacaatcccacaccgcctggggaaggtca

SEQ ID NO: 388277 - DNA, 1305 bp, Cannabis indica
ttttttttttaaaaaaagtagagattggaaattaatccctaaatctcgtacttaaaataagactttcttccactaaacactattttttccttttaaaaaaagtattattttgtatcttttcttattattatttaatattttatttatatacgtagtgttaacagaagaatttgtgcaagagaaattctctgttactcatcaaaatttaaaaagcagggatcaagatgaactcggaggaggacgaagagtctcggggaccacgaggaggactctgcgaggagggacctgcggggatccctccctatgaggacctcctgcggggtctcctcctacacgaactcttcgtgttggggacacaccgacggcgaccctttgttgggacctcgatcgtttgataattcatagttctttccattatctccctagtcccgctgacgctcaaacgatctgactaccatagacatggtttacttagtccatgataaggaaatatatcaggcgagatgtctgactcacataaatatgacagtacaaggatcccaggactcacataaatatttaaattcactgatgaatttttagctcaacaccacacctctcgtgattacatcgttcacggaacaagcttggaaaatgtaaaataacgaaagaaataaagtttgaaaaattacatgcaacgcttcaacacaaaagccgccaaggtgggcaagctgaccaaagatgagcataagattaccaaagttacaggggtccaccccaagagaaaaatatggaataacatggagttgtatgacttagaaaacttctatgagcgagcccaaaaatacatccatgtggaggatgggcatgggaactttgatgtaggaaaggatagtcaacccgagaaaattgttagggtttatgtcctgaaaagcctgtaaagatatttctatttataagtaagttgaatatttttatatatgcttgaatgttaaattattaatatttaaatattgaataatttatatataaatatcaaaaaatctttattcatacatgagactgtgacttgtattgtatggagaattaagatcacttagccatgaataaaacaaccatcatcatattaaagtttaagaatctttaatcaatggttgctagtgtgattcactaatgcccgttattcggtaaaagcaatctaaatttagattgttgatgtagtatgacatctaagtgaaggtactgcatataatagagattatatatgatatggaccgatatgtaattaagctgtttttattaaacatatcgtttactataaagacc

SEQ ID NO: 388278 - DNA, 642 bp, Cannabis indica
tctctaattaatgaacaattattgtaacacattaattttcatgagctttgtggaaaactatactactataattttacatcttatttaatgtaaaaacaaataaaatggaaaaaattgttaaaatgtattattggtgtctagtatttttctcagtattatattattatttgtataattaattattaaatttaatataaactagaagataacttttaagaaatatactaaccaatcgtatagcaccacctataaaaaagtgctgaatactacatgtgcccaataataatcctctgagatatatgctctcacaacttttgacaagtgaaagctattagtaaaaaagggtcctaccaaaatgagaaaattataataagaacgttctagctaaatttcaatagagaccaacaagaggaggcctatcaataaattaagttggatgactgactccacacatagaaaaaggtaaagatccacttcttatgccacttaattaataatgttgtcggtttgctatgttatattagtacaaaagtctaactcccaatattgatatgtcatacatatatttcttagtgaaaacttagaaagttaggtctaacaaatcaattgaaggcttttattacatataaatgaggagggtgt

SEQ ID NO: 388279 - DNA, 2186 bp, Cannabis indica
cgaatgttcaacttaagactgaacattttgtctaacttgttacacttgagacttgtagtttgctgatacccagcttgtacgctgacatggtctggcaagtacccttaggtacgattgtctacagttttgtctatggcttggaacttggaaggaactctgcctttttgcttggaacctaccaggaactttgctttctggcttagaacctaccaagaactcttccttagcctttgctcggtgcatggttcctataggaactctgtctggtacttctctcgctatactgttcttgtagggccttggcttttttcgtgtgaactgattttttattcagatggttttacttcgtcggatattgtatttctatgatagtatctgaagcacggactatatgaaatatcttactaaagtattacaactatgattcattcttaacttaatattcagacctcgtgaccggactcccttttttgcttattttgatcaaagttcaagactttcatgttcttgcttttggcccatatgtgctctgttttcaaacactactatcatttatccttaaagccttttatcattgacatatgatcatcctggctatctttttatgaccttgacatgtaagtatccagatttacttttctttatgccaaaccgaagtatgcttacacttgacttagaggcaggtttagtagcttattctaagtgttaaaatttctctgcataagttctacatgttagttcgatgcattgtgcgatgtaggtgcccccaaagtaagcacatctcttggtcacttacaattcatcaagtttcacaaaccttgcctgggcattttctcaaggtgctaccgggtgtatgcacgtggaactagcaaagaataactttaagaagttatatttgttagcaagtggtatagagacagttggtcaaacgtgtaacgaaagcttacaacttagtgttctcttttgaaatcatacgatggctacccctgtgtggcttgccgcgcaacgaccatcactaaagagtgagggtaggccatgctaaaaagcaatgggtactagctcttttgtgggttcttacacggtgaaacattagaggaactaacatacaaaatttctagtgagagcacatacaaagatgttctctattacaacattttggtagaagagtcacctccaagttctcattgtactcaccacgcttctatcacctttattgttatcttataacactgtgcggaccttttagtttggtccaaacatgcttgctgcagaatcttcattgtctaggagtattcttcagagagtatgtctactacgaagaatttctcttttcgatcattttattgaaggacttggtaactctttgtgggtagacatgctgcttttagttggcttggtctcttcttctttcccttttatcaagggatcctgctagcaagatgtggtttacttcttaatcacagtagactagaagtgtaaggctatggtcgtccaagttgtggaggtgatggccagctaggttgatagttctatggccggctagcctgctgtggtcatggtttgctagccttctaaaggctaagttgatgctagagtttgatcccttttacactcagttggctttacccctggcatgattgtcgtatagcctttgtgaacccttgtcaatagctattcaacttttttcttagtactgattcttagaggtggtgttgggatacaacatctgtgcgttatgctgtgcaggattggacaccctatagccatcccctaatccttgctttctagcaaggtttttatttggagatattctattgtaagtgtatccattttggttttccagtaagtctatttcttttgaaatatagcaacttagttttttgaagaacttagcatgtaccaagttttgtcgtggttgccatggcgcagctggctagtggagcaagtgcattgattgttgtgtcatctttggggacttgccttttagtagagcctttgagttgacttaacaagtcttgatattaggtcaattaagcatcatctttttgaatgagctgtaaattcacctagggcatgacctgttgggttttgtgccctaaataatacccattacaatctgattagttatcaatttagaattttgaagtgaattatgattaaatatatgttacatgtttatggtttaa

SEQ ID NO: 388280 - DNA, 822 bp, Cannabis indica
ggcaaactacttgagaattatacccttgaaagaacacaactttagattccttataatttaaaaagcacccaactttctaaagctaaaacaacccatcaaaaaaaaaaacttaaaaatcgaaattttattacttttacgagcaaccaacgcaattcaatgtgtaaaagttaattgaaaaaaaaaatgttcttgacaaactcaatatcattttcagaatttcacttctcagcgagcaaatggatttattctaattaaaaaaaaaaaaaaaagaaacgagcaacgagaattttagaaggtaccattgaataagggtgaatgagcacagaaggtgctgttgttccgccattgaagagaagtgtatagagcttcggagattcgaacattaggagcgatgaagcgatcagagttgagaataatcggagatttgaaaaacctagagagtctacgagcaatcagcacggatttcatggctttccgaggaccgagtccagtgtgagtgtagtgtatgagttaactcgggttggggtgtctgtgtatgagggagggacttaaagcccaagtacggactgtgaaatcagggtttagggagaagaagaagaaagatggaaagtattcagtggaacggcacactacggttatttttgtggtctcacacttcactctacacctgaatcagctccttatgtgggtcttatttagcaaagaaggcccatctcagcatcaacgggagggaagaggaaattacactctataccctttttatattgtcatttttttttaagtatatcatttttacttcttttttaaaacattgtactaatt

SEQ ID NO: 388281 - DNA, 1926 bp, Cannabis indica
tttcatgtatttattgatgaaatatttgtgggaaattttcttaattatccaacttttatccttggagagaaaaatcctaatttttgttgtcaataaaaaaaggaaaaagaaaaagaaagaaagaatagactattgcaaaacaaacaaatgattattctagtgctgattggaggggtcggtggtgtgtcgacaaataatgcacatttcaatattaattcgttaaaataaaaaagaaaacattaatttcatcatacaacacaaaaaaaagtcccactacaaataccccatttcttcactcattttcaacacaaccacaactttcccaaaacccaaactaatactcatattctctaaaaaccacccttattattctacttcaactatcttagttttaattttggtgacaaaatattactataatatcatggaagggaaagaagaagatgttagacttggagccaatatgtacagagagagacagcctttaggaacggctgctcagagtcaagactcgaaggactactcggagccaccgcctgcgccgcttttcgagccgggggagctgtcttcgtggtcgttttaccgtgccggcatagcggagttcgtggccacattcttgttcctttacataacggttttgactgttatgggcgtagtgaaatctccaaccaaatgctcaactgtgggaatccaaggcattgcttgggcctttggtggaatgatctttgctcttgtttattgcactgctggtatttcaaggtaaaaaaaaaaaaagaacttaaaccaagctcactagtacacttgttttttgttttttgtttttgattggagaataaaaaaaaatagcattaattattatgagatcatatataaaaaatccatatgtttatctttataattttaatgtctttttatatatcatagagtaatacggcctatgtaaaaatattaattattggaacttgtttttaagttatataatattttttaaaattaatgatttttatttttttgtgtatttttgaaaagaatatttttctggttctttgactgtgctctaagggcgggtctggcttgttttatcttaagattagttatatatattttttaagaaaatttacacaacacacttaaaaatagattattttttattcacatttttacaattttatgttgtttcaacattgttttcaagttcttgcaacgttatactatgtttctatattttcccaatgtgaaaataatgtgtaagaacagttttctttaaaacaacgtgtaaataactggaagaatttttttttatataaaaatttagaattccatcatgatgatatatatatatattttttttttgtttgttttgggtatttctgaaataatctatttttctatactgtattttctcaaatttgtaacaaatattttaaaaaatggttaaagaaagaaaaaaacaaaaagtatttgaaagagttattacttacttttattatgacataaaaaataagttgagtaattgtgatattgggcagggggtcacattaacccggcggtgacattcgggctgttgttggcaaggaagttgtcattgacaagagcagtgttttacatcattatgcaatgtttgggagccatatgcggtgccgctgtggtgaggggcttcgagaaaaatcagtatgtcccgctcggcggcggtgccaacaccgtcgcagccggatacaccaaaggcgatggccttggtgctgagattattggcacctttgtgcttgtctacactgtcttctcagctactgatgccaagcgcaatgcccgtgactcccatgttcctgtaagccaaactaaaaacccaattccaactcaatttttatacattttaggataattatcccatatactatttttttatttttttttcaaattttcggtttg

SEQ ID NO: 388282 - DNA, 1603 bp, Cannabis indica
ttaatatgagacttaaaaaatatgtgactaattacaatatagaggttgagatttaatttttttataacaaattagaagttattcttgaatagagtattcttaaatagaagttctactgtatttctattatgtgtattagagactttaattttaataagttatgtgagattatattctgtactttaattatacatgagggtaattatcaattaaaattattttgtaattatatttaattaatgtgttataaaaaaaaaatatttctcaacttattgagtggcataaaaaaaatttcttttaaaataattagtattaataatttaagagtaacataaaaaatttaggatgcaaaaatttatattatttttttttacctgcaaacaaaagagatacacttcatttctctcttaattttctttctttttttttttctcttttttaataccaaacatagtatgaaagataaaatttacttcaactttccaagcttgtcctttattcattattaattgttacttttttttttcatgaaaatacataaaagtaactttcgaagtaacacatcaagtccactttgcttgctttatttaattgtttttacttcctctaggtaaataacacatcagcctttattaatttggatgtttttctttatcttttcctagtgtaaataataataataataataaggattaatactattttatatttagtaaaaattattaataaaattatttattttgttaaatgacaaaataaatattgtattttctaaaatagcaatctgagttcaattttgtatttttttttaatatgaccaacttgaagattattctttaccacgaaaagatgttaaaaatgtaaccattttttttaacaccttagattgagttattgttaagtttaatttgacaaaaaattagtacaaggtactatttttgtaccatttaaaaaaaataaaaggtctaatttatcatttaacaaaacagaaagtataatcgttaatttttgcaaaacataaagtccaaaataatatttatcctaataatactaactttcaaactatgatgccgaagttagttgattatcttaagaagttataatagaaagttgtaattaacactcctcttataataatttatcaggtacatatacttgggtaattctatagtttacctctcaaaatgagcatttcaatatatcctttatttgtttcgacattaagaagaatattttagtctatattttttatgatcacgatcacgtaagttgtagttattaaggacaacttgtaaattttaaaaatttcaaatagtttacattgacaaaattaatgctcaaatatttataatgtacatgtaacgttcccgcttcaagctttcattgggccattataaattatgactcttatacacgagtacgtcactctagctgcttcttggattgatgactgaccctacaaaccaacacgagtgtttccagcgtgctttgtcctcacttgcacgcttcatgggaaatttttttaggaggtcacccatcttgaaattactccagtttaagcacgcttaaccgtggagttcttttgtgatgagctaccgaaaaa

SEQ ID NO: 388283 - DNA, 1182 bp, Cannabis indica
aacctcttccaccagtcctccgtagacttgcttaacatcattaaaaaacatagactttttgcattgtcactggcctgggcgacttgcatgatgcggttgtatttggacaaatggtccctagggtccgttcggccttcatacaactctatctggggcattctgaaattctccaacaatggtgcatcaatgattctcttcacacaaggctctgtatcttcttcctcaaagttagatacaacaacactttgttttccagaaatcttttccatgatcttcatcaactcctcaaccttaagttccaggcactgagtcttatcacttgaggattctcttacatgaacgcgatcgttaatgtggtttcttatattgttccccagggtctttcttttgtagccttggctctttccttcttggtgttgaatcttcttcagagattgttcatggaaaggcttatgccactgacatctaataccggatgtacttcgtcaacatcctcattgtggttactagaatcattgggaggaggctttttccttcgagactctggctttcaaactctagcatctgtcttgtttttcttcttgactctacctctagaattggtctaatcaccgtaccttaaggcttggtttcctttcctcttctgttgaggttggtcagtagttttagactttttaggctattttgtggaagaagtcttctttggttcttcaacgacaattcctttgcctttgtctttgtgaatgcctaaagctctaggatcttttgaatctgctttctcaggtgcgtcagttatgggaggagcttgtacttcaagagatagtttagttagggcagtcattacagcctccattcttgtcatcttgccaagtagtaactcagtgaattgatcttgtcgagttaacctgcttttggccagtgaagttgtcttgccatgatgaccacaagatatgactcatcaagttggttgttctctcctatgtcaccatcaacgactttgtcctgagggtcatcttccggcatatcctcttctacatctttggtattaactttagcatcctcagagctaccttttacagattttgtgtcctcaatgataggatcatctcaattctgatctttgtcccgatggcctttctgacaactagtcacctcttgggggtcattagagtctccaacttt

SEQ ID NO: 388284 - DNA, 1114 bp, Cannabis indica
aaaaaatatatatttaaaacggaccggattagatccgatccgtaaaaaatttaagcggggcgggtcggatctgatccaagatccaataactatccgaatgtttcggatcaataatgatccgtcggatcggatcactgatcccatccgaatgaatggatctttttgtcatgcctatttattatgccaagtgtatctatctcgctcaaaatgaagctcatgcaaaccacaataatcaacagcatttctgaatgcatcaatctgattttcacagcgcaacggttcgccaagtttatcattttgtgaaagaacttcattaaaatctcccatgaaaagccaaggaaaagaaggagctgaatcttttaattttaagcaaatcccaagtgaactgcctatgagaaaaagaaggagccccataaaaaccagaaaagtgccaagaaggaccatgcacaaaacccatatatcagtcaacaaagtttataccataattaaaaattgatacattaacattagttttctaaagaaataaaagacccccactaagaccaactctaggaacttcaataccattaggaaactttagtacattacgaaacttagtaatagaccctaatctaagcttagactccataataaaaacaacatcaggacaatgatgagagatgagcaaacgaagttgacggaatgctctcagattgctcaagccccgagcattccaacaaacaattttcaaggcgattggcgatgctgagattcagccttcgccaaaggaccatcactgccagcatccatcaatgagttacttgataattcaaaagatgaatctggtttctggtgcgaggaagcgttagtgcagtctgttaaaggtggagctttggtgcggcatctcttcaaaacattcctgacattacccccagtagttgtaagttgtcttttattgaagattgaggaaagtcagttgtcaacaggtgaattggactagggcaggacagtagaagatgcggcagcaacattgatgtgaggagtaggggatagaaaattgttaatgtaatttatctatttatatatatatgtgtaatccatacattacgttttgtcgatggtttatcctggtgat

SEQ ID NO: 388285 - DNA, 639 bp, Cannabis indica
aaaagttctttgaatctagagagctcccagatgatagagattcagtatcaagcctcgaggtatgtgctcatcaactggaaactatacagaagaggagtatcaatgtcatatctgaaatgcatagatggaactaagataagtgttgttattcatgagatacatgagggattttgtggagatcatacattcagactaagtttgtccaaaaagatcatccgtcaagtatattttttgccaattatgaagaaagattgcatcgactatgtctagaagtgtgaacaatttcaacgttattccaaagttctcatagctctgcaaatagagataaacttgacgagcagtctatggccttttgctgtatggggaattgattttgtaggatcacttccaattggaaaaaggagtcaaatttgctattattgatgttgaatacttcactaattgagtggaagctgaacctatgaacaccgttgtaatacccggaattaagaaaatgattagcaaagccctaattagataattatgagttaattgaggaattatattattatatagttcaatatatgtgaaattatatgaaatttaaaatgttaaagaccccgttggtgagccaggggcattttggtaattatgacccga

SEQ ID NO: 388286 - DNA, 632 bp, Cannabis indica
ggtgccaccgtctcacaagagaatgacctatgaccaagaagtaaacagcgccttgatggcggaatcccttgatgaaatagaatagagaagagaccaagccaacctaaagctacaggcctaccagcaaaaggttgcaaggcacttcaacaaacaagtcaatgagaggaaattcttcataggagacctattgctctaaagagtgttcttgaacaccaaagatcccgcaacaggagtgctaaaacctaactggaaaggcccttaccaagttatagaaataacaagggcacctacaagcttggcaggtacaatgagaataggagttagttcccctaccaagatattggaatacaaaacatctctaaaagtactacaagtgaccagcttgtacgaacgctactcttcagtagtagttctgacaactcatttataagagttaatgtagaaagagctaagtctccacctacccacattaatgcacaacacacaaaaagcctattttaatgcacactaatccctaattatgtggtatatgaaaagatttataataattaaattgtgtatttgtttgataaaaaccaattaattagttggctcctagtaaaaaaaaattaaattgttggcatatgaaaaga

SEQ ID NO: 388287 - DNA, 937 bp, Cannabis indica
aaccctcacttatggcagaagaagaccatggttacaaaaagctccaaagctgaacaaacaacagcagactacataaacaagcataatgttattacaataaagatttccactctctgcataaatctaagaaagacaattcctcaaagtgtttggttttgtataccaagttgcggtccaaaatttcactttttcccatatatctgatgtcgaactttcaatcccttcaaagatcctatcattactttccaaccaaacagcccgaacaatcgccaagatcgctgttctccacaattttgtgcttggtttgccactgcatagttcgctaactatcaatagtgttatgaagcctgaaataacccattttaactcaaattccttcagaaaattcaaccatagctgcctaacgaaggaacattccaaaaaaagatgtctcacatcctccccactgcctttacaacaaatgcaccagccaggtgaaatataaagaaaaggtttccttttctgtagcttgtcatggacgttcactttgccaagtgaaaccagccacccaaaagctttgactttcgacggaacggaacgcaacttttccataagctcttcgtccagaacaaccctccaagagacgggttcgacataaaccagcagaaggctgatttacaagggaataaccctgatagatcaggcttcgaaattcgactatcatctgcagtgttaagtactcttatatgttccaacttttgcatatgcaaagtgatacttggaacttcccactcaagcaaattccttctaaatttcaagtcccagctttctacccaaccacctggcaaaccctcatcgactataagctcccttatgcttccattcctagccttggaatcagtgctaattcaggaaactcaatactcagagaagaatcacctatccacacatcttccca

SEQ ID NO: 388288 - DNA, 1089 bp, Cannabis indica
cccaatattggcctagttttcacagtaaccctaacagatcacacgtgtgctaggatctaaatcttggcccacaaatatccctctatacgtttcaggtaagggggggggggggggaggagaactctgagtatattttctttagactttgttctttacaacgtaaggaaaaacttagagggaaatctccatagctataaaatagggctcttcaacttataagaccctattataatacattcaacctttaggctaataaattaactagtggaataggacttattaacacccaaaccacgtaaaaatattcatctctattacttaactacttaattaattaatatagaaattaattactcatttgtcatacaaattttaaaaataaataacaaaaaattaatactcatttttaatttgacacacattctaaaagtttgatcgaatttggcacaaaataataacattataccaaatttgacacacaaaaaatatacatttttatttaaattattgctactacactttttaactataatattgtcattatttttaaaaatatatatttaatttattaatggtaattaatttgcatattttaatttgatattatgtacattgaagcacatttacaaagtgtgtcaaacatagcatttattagttttttatgaaaaagttaatatattttaggaaactttacaccactgaaatttttcaattttttttacggtggcgtagaatttttttattgtatattatgttaagttttatctattgttccactgttgtttttaagtatactgtttagtattttatggttgttttataaaaagacagtattttatttttgtaaaaatttctatgtggcagtgaaattgtaattttttgtccaaaatcctttttttttttgtaaaaacccttatattttaccccgtagagatgttctaaggtgctatttatacactactagaattttgccttttagtaacactctttagtgactcgcagtaaagtgcgtgtcactaaagagttaggagtgatttttagtgacacgcataatgaaaactctaaatttttagtgttagtctcatgtaa

SEQ ID NO: 388289 - DNA, 751 bp, Cannabis indica
tttttttttcatatttctgatcacgatctcaacattatctcaatatctcatctcagatctcagtcctccgcgtacgacggtcgtgtcctcacctccgtgacatcggtatgatcttttttttttccttatggattcaatgttgtgtgcttggatcatatcttctgatgttttgaatgagtctgttaatttacagatatttgtttggtaatacatatatctataagaacttagaaattggtaaagaatgtactaaacccccaaaatgtcaaaaagtagcactgtaagtcaacaatttcattcaaacttttcatcctcttttgagtgttagatctactgtaagcgtattgtacctttattagaatgaactacaatggccctttcatttgtgctttctgtttattacaacaagattttctattgtgatttgagtgtttaatcatgggatcttgagtttccacttataataataataattatatatgagaatatgatataataatcaatgctaaggtaagaatgaaaactagggctcttcataaaatatttgatctgatccaatctgtacgatccaatccaatccaatccgcaaaatacggatatccgtacttgtgcggatggaattgaattaaaaaatttgaaatccgcacttgtgcggattggatgtcgtttaacctcagaaactaatcgatccaatccaatccccacttaattatatatatatatttaaaaaattataaaatataaaatatta

SEQ ID NO: 388290 - DNA, 1566 bp, Cannabis indica
tttgagaggcttgttatacaaaccatttgtatttgtacacataattaagtgaaaacagtttataatagtgttagtaatttagtagaaactgtacctaactttaatttttgttagccaatcatattgcagaagaaattcaatggcatttctttaatgtgtattataaattactagtagagtcatcactacattccaaattaattacaacccataagcactaatacaactttttctgttaaataatataaacaaagagttcaataacataaaaaggagcattaaacacttgcttttaaccaaatacagtttgtcctttattgaaaactgaggccggccattacactttcttccattattgctttgctttctggatttgattccttccacttgaggttttgatcatggcagccgaattggtagctggtgctttgctttctgcttcacttcaggttttgtttgaaagattggcctgtgaggagataccccagctgtttcagggaaagaaagtgatcttggatcagctagatgagttgaacactgtgttgttatcagctaatgtacttctcaatgatgctgaggagaagcaacttcgaaacgaggaggttagaaagtggttgttcaagcttcaagatgtgatctatcaagctgatgacttgcttgataggattgactatgaagctctgcaatccaagcttgaagatgatcaatctagtagcagtggaagcaaggtatttcgccaactgaaatctttttcgctatttatgtctgaattcgatagatctgttaagcttgatgcgatggagatccttcgtaagctgaaaattcttgttgatcaaaaagattctcttggcctaagagaaggtgctcagaacaaaccttcaccaagaccaccagctcctttggtagaacatggtgatgtttatgggagagatattgagaagaaagccatcattgatatgttgctaaaagatgatgttgaaggtggtaataagatttctgtgatcccaattgttgggatgggtggtattggcaaaactactcttgctcaagttgtttatgatgatgatagagttcagaaacattttgagttaaaagtatggattactgtatcagatgagtttgatatttttaagataacaaaagagattgttaagggtgtcacctctagaagatgtgatgttgagaatttcgaagaacttcgaaggaggttgaaggaagaattgaaggggaagaaatttctctttgttcatgatgatgtttggaatgaatcttattctctatgggacactttgaagagctctttcgagtctggagcaactggaagtaaaattcttgtgactactcgaagcacaattgtggcttctactatggccacggggaaggttcatgatctaaaaactttgttgaatgaagatggttggaaactctttgttaaacatgcctttggtaatggcattgatctcaatgagtaccgtgagctagaagtaattggtaggaaaatagttgaaatgtgtaatggtttgcccttagcaataaaatctttaggtggattgctacgttctgaac

SEQ ID NO: 388291 - DNA, 2003 bp, Cannabis indica
agtgtcccactgcatatccaaacagcaagaatgacaattagcaattgcaacagaaaaatgcatcacaaatttataaaagaatattgggatgaaggaatgtgattatataacacaaaagtaacagatatattattcattaaaacatttgtcaagtttttaaacatcaggcaaatacagtgagatagataatagcatcatgatcataaaaacaacacgcaaagaggaaattcgtttacttataatttgaagtttaatggtcttcccatcctgttccatagttctgattttctaggaaaggaaaaagaaatagagatgttatagatgcctaaataaaagatattagtattagatatgtaacatagaactgtacagaaataacaccttacaaaatcaaccccaaaaatagaagaacaaagaagaaaaacacattaaagtagtgtacctgggagtgctttcctttctttgttgtcattttgtccaatgtcaaaattctattcttgaattaagcaagatggaagctatgtacaaaataacatgaaacatgagaagaactcaaatagttgaagcaaccatggggctctaattatcactctgcttatatttttttatatatatataaaaatatttagtactgtcagaagttcaaataaaaattaggtcctacataaagtgagaattttatttctatgacagacaagtatggatgaaacccacaaaactctcccaacttgcaattgccacagcgattttaatcaaaagtttttaaaggaagagaataagtgagaagaatcatttgagctaagatctatatgtaaatatatagatagatatatatactttaattaacttcatacatagacatattaccttcatattataaagattttgttggagaaacagcaaaacagaacgaatatctattaaagatacatgaaattgaaaactaattaatcgaactcaaaaccaggttctaaattctcttgtcaaagtaatattcatgaattcacaatatatcagatagagcaaacacaactaaaattccacattcaaccagagaaatttaagagaaactttgcaaacccacaaaattcttcagccaataagtacaattcaatcacagagaaatatttattattaaaacaacactaactgagaaagaaatagataaatgggagtggaatggaatttcaatcaacctgagagtgagattgtgaattagtagcatcatccgaaataggtaaagctccaaccccgttcaaccatgttgaaacggttaaagcctttcgagtttcagggaaagaatcttgagtttagaatccaatctctttctccgaaaattgaaaatccattcgaatatattcttcgtatttccatggatgcgagtatgcgactctgaaacaagttgtacgactccagccaattttttttaggttttctcttcgcagagaaagtatatattcttaagaatatttaaaagccaaaaaagtcaccaaataatttaaatgcctcctcgtcaatcggagccattgaaatatagaatagattatttttgaataaaaaactttaaaaataaaattacccatgaatttctcatacaaccaagaaatctgttatataggcacactttatatagaatagatatatatatatatcatatgtgataattttttctcataaccctttgagattcacctaggcccaattacaaaataaagaacaaagattagcccaccttctatttgtcttttctttttatttattaaaccctcatcacactaaaaacataacaacccattaataaatatttatggacttttgaaaaaaagatatttgggccttaattggactttggtaaattaatcaagaggaaattacacttagtatgggattttaaaagttcttatgataaatatggcacatttaagtttggccaatttatatggtatttttttgtttttaggtttttgtatggtatttgatatgccatatatatgtaattaggt

SEQ ID NO: 388292 - DNA, 866 bp, Cannabis indica
tatacagaagacatatctctaatcctttccaagaaaatggaatagagacaacacacttaagaactttcttcagtttgatcaataattttccagtactttagaaaacaacaaagttatttagcttcactgatggagcttaaattattacagataggtttttacacccttctataataattcctgcacccccagagtaaccaccatctctaatattctgagttggtgtagatataaggattctaatatacacccctatcatctaacatataggtcacttttataaatactttcttgattgtctcctagtgttccttgtttgattacatcttagatggctcccactcaacagtaggagtctggttaaagcaatacacaagtgtacacttaacctcttactattggttctcatggacatcttgtcgtgacatatttgtcttagtctgaaactgtaagttccttctagactaagtcatcaacataacattctagtattaacattaatgtaaaatacttgcttaagattaagtaatcattagaaataccaaaaaacatttcataaggattatgtattttgcctaggtcatttgaatagacctggcaaaactacctatcttatcctcataattttgataagttatttctatccatatgaatggttagatttactttttttgttttattctaaagttcctatcatgatcataacatagtaatctatcactagtgtcatccaaataatgatgggtagaattttaaaatcctcccactaaaataaggtactgtgatattatgtttaagaacttcgttggtattaatttctattactatagtaacaagttaattggaacaattacaagatcaagaat

SEQ ID NO: 388293 - DNA, 1299 bp, Cannabis indica
taatttagaccaattaaaaattaccactgaccatttaattaacaattataactgctaaaaattattaagatatttatttgcaaattacttaaaaataaaaaaaaaacaataatttctattggcattcaatacacacggttacatcatattaatatgtatcttacttcatcatccaataaaatatcaagaaaaaataatcccacttaaaataaattcctataaatatattataatataatatttaaaatttcctctacatcatttaataattcatcttttataaaaaataaagaaagaaagaaattatgcgtgcgtgcgtcagccgttggcagaccgtcgacgacacagtcagtttcacacgcttcagattccaactagcattctagcactatatattcattcattttttatttttttttgaaaaaaaaaaaacaaaacaaaaaattattcgaaaattaacctaaaaaataaagtatggttacccgagaaattagcaccacaataattatcttataattaattaacgatttttataatatttattaaaataaaataaataataatgatattaaattacaccaattgatattatacttcataagagtgttaggcactataaatatcttttaacatttctctaaaaaaaatataattatttttttctcttagcatttatcctcatcagctactctaaaatagttaatatgtgaaaaattatattaagggttcgtttgttatgtaaaatagttaaattttaatttacactaaaatattatatatttaggtgtctaaaaaatttaatatcacatataattttacataataatattgcatgaaatacaattcaatgtaatattatattatacaatatgatgtaatacaactcaccaaacgaacactaaaagattttaaaatatcactttattagctctgttataaagtttcattttaaagatgcttcagactagggatgtacacgggactacttctcccgtccctattctcgttaaagattttaattcctatccctacttaacggagaatctcctaatggaggcggggacaaggacaaggaagaaaatcccctaataaaaaaataaagtttataataaaaatttagggatatgattttgtcccgttattgtactttcacgaattgtaatccgtgatgtacggcagccatcagatgagagagttatttgatctgacggctaagattgatctaggagtaattagagttaaaaagtagaatcgtactctgacactcatttaatgtaccctgaaacacatctaatgtac

SEQ ID NO: 388294 - DNA, 2573 bp, Cannabis indica
aaaaagtcttatacaaaaaactaacataaaagactaaaacaaaataaatgactaaaaaaatcttaaataactatttaacactctttcttaaactcacgatgctgctgcaagaagcaccgagagtttgcctaaaaaaaaaaggaaaacgagaaatcgtatgcgacttagtaaaaaggtcaccaagctacaacgaagaaagaataaaaggcaaagtaataatggtgcccaacttaagatagtgatgagtaaaatggcaatcaatctcaatatgcttggtgcgttcatgaaaaattaagttgtgagcaatctgaatggcactttaattgtcacaatacataagagtaggataagagtgagtaacacccatatctgtaagtaacaatctcaatcgaacaatctctttagtggtagacgccatggtacgatactcagctttcgtagaagattgagaaataacaaactgcttcttgctcttccatgaaataagggaatctcctaaaaagatacaaaaaccaatgacaaatttttggtctgtgcgatcacgatcatgatctgcatcacataagcttgcaactccagagaggaggtggaaggcagtagtaggctctgaaagatggtacccgaaagatatcgtagatgggtagaacagcctagtgaacagtagtaggagaagcaacaaactgactaacaatatgaacaatatatgtaatatacagatgggtaatagtgagataaaccaaactatcaacaatggtgcgatacaaatcttccaaaggagagccatcagaaggagaatactaaacattcaactcagagggagtgtcaacaactctagcatcaataaggtgagcacgctcaataatatcagtagtgtactttgactgagaaagaagataattttttggagaaaaagcaacttcaatacccagaaaatagcgcaaaaaatccaaatccttcatcttaaagtgagaagctaattttgactttgacatttcaattctcggtaaatcatcccctgtaataatcatatcatcaacatacaaggaaagcagaatacaacctgcagatgtgaagttgaaaaataaagataaatcatgatcacttgaaaaaaaccaaaagacaaaataatagtagagaacttctaaaatcatgttcggagagcttgtttaagaccatataaggcctattttagcttgcaaactttgcattgcttatgatgaacaccaggaggaagaaccatatagaattcttcatgtaagtcaccattcagaaagacatcttaacatctatttgagatatagcccattgaaaaattgatgccactgctataagaatacaaacagtagtcatttttgcaaaaagaggaaaagtctcctcatagtccacaccatactgttgtgaaaaacccttagccactaatcgagccttgtaccgttcaatagacccatcagacttagtcttgattttatacatccaacgagaaccaatagcatgtttacgaggaggcaaaagtaccaaatcccaagtatgagtcttttgcaaagcaaagaattcctcattcatagcacgctggcaaagggagtcaataacttcctctttataggatagaggctcaaaaagataatgaatagatgctaaaaacaaagtaaaagaagcagatttaaaagagtatgtaaaatttggttggcgagtagacttacgaatgcattaaggatagcgaggaggagggtccacaatctcatgaggatctggaacagaagcaggaggagggggaggagtgatttcaggtttcgaagtaccagtatctaatggaggagcaattttaggttacaaagtaccagtatctgattcttgagacctttcaacacgatgcatgcgagagtaatgaataggaaaagcaactgaagagtagtggatgattctagttcagactcaaagaatgggtcaatgtgaaaaagatctaattttgttaaattatgaggagtgtcaggaatagtaaaggaaggtatatgctaaataaaaaaatcatgacaagatacatacaatttttgagaaactggatcaaaacaacgataaccttttttcccttccccataaccaagaaattaacacacaaagagtagagactgacgataactctgtacactctacactaggatgcaacacaaaataagtagaactaaagactcttaaagaagaatagtcagtaatacaaccatatagtttatcaaaaagagacaaacataaaatgacagaagacaaaatcatattaattaggtgaactgcagttagaactacctcctcccaaaactgattcagaatagaagataacaacaaaagagaatgagcggtttcaacaatgtgcctatgctttctttcagccacaccattttgttcgagtgtattagtacaaaaagtttgatagacagtgccatctaaggcaagtgaattaataaatttatttaaagtatactcaccaccttgatcacatctaatatatttaataacaacaccatattgagtttttacataagcttgaaaacgatcataaatactataaaagtcagaacgat

SEQ ID NO: 388295 - DNA, 2079 bp, Cannabis indica
agccgccaatatcccttaagaaaataatagagtttgtattgacaaaattagagaaaaattacagttttacaaacattaggtacttatgccactaaaaataaacattaggattatgccacttacaaacttaaaactttgggtatttataccgctatttaccctataaataacacatagttaggatttaaaaataatttttaattatctaactaaagacaatatatatgtgcatttaagttagttaaaataatatttaatttaaatttgaaaaataagttataacctacctataacaactttttagaaaaataattaatttaatcataaataatatttataaaataactatcatatttattcaaaattataattaacaaatatagttataattttataactacttttcaaacaaatattattttaatcatatttttaaaatatcaggtagcaatttttcaaaaaaaaaaaaaacgttattttatacaatatatataatttgaagaaaaaaaaaatatctatatatttttattatttaaaaataatatatatataacaaaataataacctacttttcaaaattattttaacttattaacataaaagattaatgcacattttcaacttagttatctcaaatatctcaaatcttatttttaaaattaataatcaaattaattaattcataaaaataatttataatatatatacacgatggaggagcttcgaccaagaagaggcagaggtgtggctaaggaggatggacgacctcgaccggcaaccctaaggccaccattattgatcggatcaagaggtggcttgaggagctccaataggagaacaggtctatacgacccgagttgagtccaaacagaacaaaaaatccatgacaaaaatgtcctccccaccagccattcacgtcgaccagtggactaaggaagttcagtcgaccaccataaagtggccatgggactgatcgatcctcttgttagactttgaagagtcgggtctaagccatgtctccacctcctccttcaacttctacgtgcatgatgcacacgtgaattaataattgacgtgtctcagtttcgagccttacgacttgtagccgcacccttcggggtttgtggctcattgttttgacgttcaaaacatcgtctcaatgagctcgaaatttactccttaaacctgagctcactcatcaatggaagatatgtagaatttttaatttacattattcaacaaaaaattacaaataaatttaacgtaaattacaaggaaaattcttataccgtaaatatggtgtacaaatttttctaataaaaaaatataattcctaacataattttaccatataattaacgattcacattcatgcacaaaatatccatccattcataatatatcaacataaatatatatatgaatgagtaattacccaacacagtatttaatttatatgattatgaagatagctttgataccacttgttaatttttatggtccatatcagagttagaaaagtggaagcaaattaaattaaaattaatttgatccaatatgaaccaaaatcccaaggatctcaacataatatatatagattaaatctaaactacatgaaaagagaaacaatacctcttatcagggtttcttcgctatcttttcatattaatttatcgaacatccaatccaagaacttgttaaagagttcacaccacaatcttccaagtcagtatcaacacttaggaatacagtaggctattagatctaatcagatgagtataattttataatcacggtatattctcaactcatgagaactatgataagatagaaaaaaacacaaaactcacacacatgtggcgtgagagaatgaataaagagagagagagagagtgatagagagagagagagagagagagagagagagagagagagtcgtgcgtgagtgaggagagagagtgaaaaacaaagtcgtatttttcaaccctaattcttctatgaaaagtcacgcttaattcacttgttttcacttttttaattccttagttgatatcctgatatatatcatatatatatata

SEQ ID NO: 388296 - DNA, 826 bp, Cannabis indica
gccgtctcaactagtgttatccccttcatatcgttcaagacattcttgccattcctctccctctcttggccactgatgacaaccttatttagagattcacgaaatctgaaacctactcgttaaaaaatgaatactacttaatctattcaatcacctcccctcctgataccccttcctcctattttccctctccttggttgaaatctagttaacacctcaatctcccctctaagctaaaacacactatgtatagagcttccacatcaaccttaccaatacacaagaaccttgcccataagaaaatcaaccaatccaccttgtgtgcctgctgtggtcaagatgcaaaatcagtttctcacgccgtgttcttttgcaagagagttagaagtgtatggaaatgtataattttatacccttatatatctctttcaaacactgtttcttttcatgacattatttttaatatttttactaatatgagcaaagaagaggtagagatttttctttgaattgattagtttgtttggtataacagaacaaggagattaaaatttagacaacggatcaagctcatgctatccttaacctcgcgaaaagctacttggccgagtataaagcaatagttgctgcacataatgcaccacatcctgttgccaagtctgctgccatgaccatttggacacctaccccacaaggcctcctcaagcttaatacaaatacaacatcctcgaagaaccaccttacaactagcattggtggaatcatctgttatattattttataatataataagtgtagattaaaatgtagtaatatatattattat

SEQ ID NO: 388297 - DNA, 1012 bp, Cannabis indica
ggattagaattagatatttgtaacccaacatttatattaagttagataaaaaactcactaaaccaactattaataatggagtctaattaattgagttaaacacttagattggttttatagattatgaagagtcatttttaacaagacaaatgatgttaattcctgacttagatacgtaccttaactccgatgggtagagaggccagcgattgaaccactcaacgactcggtcgtccgtgggatcagtggaaacagggaccaccgtgggctcctgtactgccacgtcaaacacctccttccagtccctgacgttcttggtgttttctgcatcaaagtaacccaaaacactcgtctcgttcctcctcaccttcctcttctcctccacatcctgaccaaaaaacttcctcgctgccgactccagtttctgtcgacactccagtggtaccccgtgattgatcacctgaaagaatccccactcgctacacgcgccaccgatctctctcgcgagtttctcggaggtgcttattgctggtgaaaggtcaatgagtggtatgccctccgcttcgattaccaccagcctaggcctgtgctcgggatcttggatgaaagctggatcaacctctcccatggctgcgtctacgaaattagtaattgtgagctgaatttaagtcttcgcaattattgatgaatgatgacacagttcaatctagctatttataaactagttaattacccttcgcacgtgtatgattaattgtaggttaatattttcaaactaggttaggtgatcggttgttgtaataatttatttaatataaaatagtttaactatgattatttaaatttgaaatatttaataatattagtggaaataagtatggcatatagttgtattaattttatgaatgtatgttatgatataaatgttggaaatttataggtgcttcaatagaaaagactaaagtcaaaatacaactcaaaataaaaagtacaagaacaataatattgataa

SEQ ID NO: 388298 - DNA, 1232 bp, Cannabis indica
gggtgcccaggctcgagggcactggtggcttaccgcgctcctagtgaggcaaccggccaaatctaaacttttccaaatatgcatgggtactgtgataactaaaagaccgtttgcatccactttctccattctttttacttggataggggtgtaggccgtcattcttgacgacgcccttagccagcaagcctttaacttttggccagatcttggtgggtagtgaacttgtgtcttttttcattttcttgtatgggctctcctttatgggaaatgagattcatggtgatgaacatcatgcatgttctatctatccttagctctcaattaaatcaccaaaatatttactgagatttttagaaaccaatatttagagcttaagaaagaaataaagtaataaaaaatagatttgacatttttacgtggttcagatattaactatccttagtccacgagtctattttattagtcatatcggcaggtggtgaacatcactagtagttacactatggactggaactctatattcctctcattcctcttgaagaagaacaagcttaataggaatttttttcgagtttttataagtaaaatacattgtttttaatttcaaagagttgcccctaattcctagaatgcaggggtatttataggccatttttcccttcacatgcttattgagaacatcttgctaaggcgaatctgaccgtttatttagtaggtggccaattcataacatgatgtttaaagatgtcagcttgtattgtacgatcatcttataagtgtctccacaagttcttccctttttgaattgcccttattgatggtcgttggatcattgggcaggtacaactaggtgcgcatgctctatactatggcataatgtgggggacaaagcctggcatcatacctaaaacaataaatgtcatgtctacaatctagcatgtacaggtgggcctttattgtaacactgaacatattacagctcatcttgacttctttcgtgacctgcattggcacgctctaggaagcccttaaccttcacaaggcatttgcctttagttcccgggattgagacagatatcatagattgcggatgttccccatatcttcaccttatgtgggagtatccttcccggaagcccttcctaagagctagggctccccccttctaggtagggccagcccaagcattggccagcttgggccattgcacaaggccctcatttttttaa

SEQ ID NO: 388299 - DNA, 864 bp, Cannabis indica
tttatggttttaggggcgattattgtcgcccctaataatcatatttgttgtagtgatagagcaaaataattatattattattaaaagaatgattagtatttttgtttgacccgacgttgctaaatgatgatactctaaaatttactataatgtggtcttaaaaaattaggaaaaaaagatatagaatagtttgaactcttgtgattatgtatagaatgtgtgtaatcatgtttttgtattaggttgtaaaatgattttgaagtaatacaaatgagctgatatttgtagtaatataatcattttgcagtaatgtaatgtggtcattttgctcttgtgtctcttgaaatataacataatgtgcttattttgttaaatttttctgtaaaaaaatgtggcaatgcatctaatatgtatagtgaaatgaaatgtcacattactttattactaaatataacaaaaataacataagggacacatttctataaccgtattcaattgagaagtttttttttttttaacaaattacatatggtaggatatattatttaaaagtgtcataagtttacgaaacgagtttatatatatcaatgcaaaatgttaaaggatattaatgttagacatatataaattaatagaaatatatatatatatatatatatatatatataaaacatgtggaacaaacgaatacatacactatataattataggatcgaaatacctttattagctattaatttttgagcttcaaaccatacaagctttgatctgcaaagaaaattggattgatgtgggtagtcgagcttcctcgctctctcaactctctttagataaaattttgctgttatgaacagaatgagtgag

SEQ ID NO: 388300 - DNA, 1156 bp, Cannabis indica
aattaaaatccaaggaatataatcgatgaaacatgaggaaaatgaaagagtcaataactaaaattaaaatgtataatgtaaaacagaaagatagtaccgagatttctacctcctccttcttctcctcaatgacttgttctcacggtccaccctgagcataggcgtgctaggcctgtgcctagggcccacctagtgcaggggcccaaaaaaaaatttccccttttaaaattatacaattactccagttgctataacagcagcttcaatttctccatgcttgcttgcaggttgaaccagagagcacctcatcacctgttctcttggtgactggtagagactctccagtaaaagctgactgtacagaacaatattggacattcatatattgataccaatcatcgtaaagtactcttctaaagtaagtctaataataaaaagaatatgctaggccttaaaaggattacttaacaaaaggcaataatatcacaatctgtaatcaatgattgatttacaaatcatcatgttctaaatgcttgccattagccatccctgagaacctgcagtaagaattgctaattgacctgattacgtaacaaagaagttgatatacccttagaccaaggaattaatcaaagaagagcctactcttgtttttggagctaaacgggccatgagggctgaagcagcatttccagcattattgtggagttgattattagtaggcagataatccctacaagatcttgccaatctggaccttgcccctgaaatgtgggataaatgtgaggaaattaagtcttaaaaaacaaaaaaaaaaaataaaaaataaaaaaccatggaataaacagaaagtaaatgtcagcatcaaatctaatcactccaccattagcaagggcaattgccatcactgcagcagcttccatgacccatgataatggattccacataaaaccaagaagtaaaatacatgatttatcattttacaaaacgaatttttctacaaatgttatgaatttaaatacaagaaaagaattctttgaacttattgatacctgtttttcgaggaacgacaattggggatatggattctacaattgccatcactgcagctattatcttggtttttgatttattggatacaaaaaaaaaaaaagaa

SEQ ID NO: 388301 - DNA, 915 bp, Cannabis indica
tctctcataccacatagagtgtgcatttccttgtataatgtgcaaaacgataccaatggctgggaacaatggaattcaaatgaggaaggcccagagtgacacgcgccaaagcaccgtcagtcttgccagacgatctcacatcggtaaagaccacatggaaaatatgcaacctacctatccgacggtgggggttcatccttgtgaagatccatcaacaacaatccttgcaagagaaacggcctataaatacccccaaagacacaccaggcgagggatcgggtatgaactttgaccacttctcctttagtccattcgtctctctaccgaaggcgaattctttataaacacattactatagttctattattaactccagaatatttctgctaagctccctctttttcaagagagagactagggatcggagtaaagtccattcctattgtatttgtatctgcattctacgactaaagagtctaataaaatggactcatggattaaggataattaacacctaaaccacgtaaaaatttattatgtatattcctgccacttacacttctaatactttcttaagctctataattattatgtttccaaaaaactcagtaaatattttggtgctttcattgagagctgaagaaagaggtatgcacggcggctaccggtgtgaggtcgcttggaagaaggttcgtgctagaaaagaaggtagacctccagatgacttgttgaggttcggccgaaggccaaaaaggtgtagatctaaggtgttgctcagtaagagatttgacgcctcagtctacttaagaataatggcgaaagcgaatgcacgtagtcttgaaatacctgttgcactaatgtctgtcttcaaaagcttagatctggccagccaacactactacaaggaaaggcctt

SEQ ID NO: 388302 - DNA, 838 bp, Cannabis indica
ttttttatttaaacagttaaattaaatacagaaatttaaatttatcttttatcatttgctattatattaaaatataatggcttaatatttttagttaaatttatttagtcaacatcaattaataagtaaaacaatatatggtacttttacaatttactgttacacccattatctgtttcgttatccaaaagaattttttagtccaatttttttttatactcatgtacgactacgttataattatttaaagtatcctacataattttgagaaattcgaaataatttaaactctgttttcggcatgttaaatttttcgaattttttaaaattttacaggatgtcttaaataactataatatacatgatcatgagaagaaatatgactaaaaaatcatttcggataccaaaataaatagagatacatcggtacatacattttaagggaatacattataaaattttccataaatatatatataaaagaaaaagaaaagaagaatttgtcaataaagaaagaaaaagtaaaccttactaatttttttcttttattattattattattcttagaaaaagcattgaaatgtatgtacaatgtattaaagcatgcagtaggcaaacagtatcggctcaaatcataaacgcaaattatgtttttaaagtttgtgcctttgttgactgctgctaggtcagagtcgatatttcaaagaacacataccagtgagtacggcaatggcggattcaataaatgttaataaaatcacgtaagcgttgaagtgtggtgggtggagttggatcagtttatgacagtgcaataataaagtgtgaaagacatagaaaa

SEQ ID NO: 388303 - DNA, 523 bp, Cannabis indica
tatatttaaattatgcttcaaaactgcgcgaagtgcggttttgtttcctagttacaaaataatgaataataaatgtaaataaataaaaaactaggaaaagattccacatttataagaaaatatcccacaatcattgaaattgttgttaaatttggtaattttcttttctctattgaaatgtcttattaatgtaatcaataaaaacctaaagtataaatttattataattgtaataagattttaaaattttaatatttacatatattatattgggacgtgtttcgggagagtatttattccctcgccccgttccgaacccaactcggatatgaacatttaaactcatacacatttttgcttctgaagttcgaccccgccccgccccgccccattaggggcaagtatctgcaggtacctgaacccacaagtttaattaccatacttagtaaaatttaaaacgatctctcttgcatgccaccaaaatgaaccttttacaattttcttataaaagcaaaaaaaaaaa

SEQ ID NO: 388304 - DNA, 675 bp, Cannabis indica
gacaatcttaatactaagtacaaaaatatagggaaaaaagttttgatatatataacatgtaaacttaattgtacaaatataatatatttttttcaaatgaaaaaacttaaaaatgtaagataaatcatcataaataagaatgaataccacaaaaaacttaaaaattcatatataaattttacttctacataaacaaaactaatttcttattgaaaaaatcaatttcttgaatactatatatttgatttctctttttatgcttcaaacaaagagagaacaaagagagagaagctttaaaacattaaatatggaatttagaaagacatttataataatatgacaaacctaaacccataaaaagctcaagaaaaaagtcatacaaaatagataatgttaaacctgtcttaagtaatttctttaaatctcatattaagtgtaattttatcttctgatataccacatgatgtgttgggattcattcaatcatcaattagcgtttctcgaattgaaaattaaggtccattcaatttagtattatgagttagaagttgaggtaaagattatgaagatttgatatccttattttacttctctagctctaactttgaaatagaaacaactcattccaccaaagtgaaaactgttagactttttatttgggcttacattaaattt

SEQ ID NO: 388305 - DNA, 917 bp, Cannabis indica
tttagacatgatctcctagtcgcttcttcctctccatatttcttaatattctccttccatgcctttttcgcgtccgctctccaatcatgtagccgttttgacatttatttaagaccgtagttctcaaatataggattgtcagttaggagctcaaaattggtctaataaaataaacattaaagtcataagtaatttttcttcttttttttttttgtagaatagttttgtttgatctattacaatagaaatttcaaagttactgccagtctgtcccagatagtcttaatgtccccttcgtcaacatcctcaaagttcaacttgttcataggaatggtattgcaaaaaaccaacttgacataattgttaaacttgttgcatagtcatttatcgaggccccaatccccttgtgatatttaaatttcaacttctatcccacaggctgcttagccagttcttcttcaatatttttccctttgtacttttccctaactcacttttcttactgttgcttgcacttgcgttagccatgctgcacatacaagctatgtttattaatataaaaataattaattaatcaacttactaacaaaaggaacatgtatttgatttaattaatattgagtttaaatattacaatactctgaagtctacaagtcatcataataatcatcttcatcattaacagttatataattttcattatcactatcgctatggcgtcttcatcatcactataaataatgaaatcatctaaatctcgacaatcaggctgctcacggcccctgctggtcacttcagttgggtcgacatcatcacggacatatttgacattgtccaatagtggaagttgtacaactaactgttggaaatttattttaccaggatcttagatctacccacaagtatgttgattaaca

SEQ ID NO: 388306 - DNA, 2325 bp, Cannabis indica
aatgtatactccatacatccgaaactagcatactttgccaatgttctggaaagaacataacacttatccaaggtgtaagtatactttatcgctgactatcacatcagtgtaaatccagtgcactgatgaatcaagggacattatcttttgaagcatataatcacaattacattccactgtgttgacatcactgtaattgtgaataactatatgttctggatttaacagattttgtacacattaaaccataaacatgaaaactacatgtaaacataaatgacttctaatcttctattgataacaaatcagattatattgaaatgggttttatttagggcataaaatcccaacaaaaagttgattagggaggcaaacgcaagaaagaagcagacctcgatcggcgttatgctgatcaagatattacgagaaatatgaggagttatcaatctgagagttagttagatacgaggtccgtgagcaactatgaatgaagacaaccagatgtttgtgaagatttgaatcaaaggcaacccaacttgcgcgagcgcctaaatcaaaatgcactcaacttacgccaacaacttaatgctaaccgacagtaagaaaatccattcgaattgcgaagcattgagttggactgtagttcaggtgataccaagatgggaaatacgggaaggtacctggttatcactcggacgaggagcccgagccattccatccttatattattaacattgaattcccttagggattcataaaccctcacgtctcgcagtatgatgggaattcagacccaatcgctcaccttaaaaaattctataccataatgcgatccaacaatgtctcgaataatctacattgtattttatttcccacctcgctgactgggatagtgagtagctggttcgataaagtcactcatcattcaataacttcttgggaacaactgtccaaggattttaagaaataatttcaggcaacaaaagacatgtgacttgaagcatcctccctaactaacataaagcagcaactaggcgagtcccttaaggcttacctaagtcgcttcagtatggtcgctactaaagtgagaaacttgaatgacaatattcaagttactgctcttcaagtagggatcacgactgacctctcaacagctggaggtaagctgtgggatgaattacaaggtcgcctagtaagaaatataaatgaattcaacgaaagagcgcaagtatttttgcgcaaagaggaagtaagaaatgagataaagctgctgaagattggctcgagaaacaaacccaacactgccatagcaagtaccgtctcgacaaaggctgacaatccaagtagtttgaacaccaaaagaaaagatgattccagggaatcatctaaaaataagaagaaacagaaaaagaacggtaaatatgagccaatttacaccgtatacaccgagcttaatgaaactcgagaaaacatctttctcgcaaatgagcacaagattgcattttgcaaacctaaaccaatgagacatgcgagacacaaacgtgacccgaatatattttgtcaatttcataaagatatagggcatacaactaaagagtgttggaaactaaaagatgagatagaatgcttcattgctcgtggatattttggacaatatgtgaagcaccaaggaagtgaacaaaatcgggctattcagcccaacagcttagataacgaaagaatgcagcctccccctgttgagggcgaggatatattggttatctcgagagggatgcatctcgctagagagagtagtaattcccagaagcgatatgtcaatgaagtcaaaaataatcaatcggtgtttgctccgaaaccactaaagagagccaaaacagaagaacctccaattgtattctcagaggaagatacaaaacacgtgaggtatgcacacgtcgatcctctagtgattacagttcaactcgccaacaagaggataaaagaagtgttggtggataatggaagcttggtaaagatcctttacaggaatatgttgaagaaaatgggactacaaaaagttaaaacattgcatggtgaacttatgttgatctactggagatagtgtttccagtcaaggcatcattaaactcccattaactataggcgagccgccattatctacaacaataatcaagatttcctagctttaaatctaccattagtttacaacatattgatgagtcgccctgcattgactcgactaggggcagtcagttcaatcaaacatctatccttgaaattccaaacacgttaggagtaggtgtagtgcgaggtgaccagctgttg

SEQ ID NO: 388307 - DNA, 733 bp, Cannabis indica
gatccctaataagttcatgcacatattgaacttattaagagtcgcaatcttagtacccatatgtaatatcctgaaaattttaatataaggaatataaagtaacgacatattttattaagtatggggaattattttaagactatattataatatagttgagtatttgataattaattatgtgtgattaattatttatttaattaattatgtgtgcttttgatatcacattattatgtgatatatttattaattacaaaaaatatagaattgttcaagcggtttagtagaaagtcacagtgggtaaaatactgaggtgtggtgtttggaatttagttaattgagattatgtcggtgtaagtgggaattattaatttggtagccatttttgttataggaattttgaatttagttttaaaagaaaaggaaaaagatataattatatcttttacttgtccgttacctcttcctttaaagctttaaatttaaaagactcccattagctttaggattaggagattgaactcacttataaataagagagttgtcaatcaaatttcccacacttctcattcctatcccacacgcccaagtctcttgaaatttcatcttcatcaagcctcaaatgttcttcatctcaaggcagaataaacattttttttttcttttcctattttcggcaccatttttttttggagaaatttcttcttcttgtcctttgttgatcttactccaa

SEQ ID NO: 388308 - DNA, 1056 bp, Cannabis indica
tttaaaaaaaaaaaatttgtaagcaattagggatcgacgacaaaagtcccctctaatacttttagggcgatattcgcccctaaaggtattaaaggcgacatttaataatttgaaaagtgcctattgtattttggtgggatttttcccgcttataactttagggacgacatttatcgactctaaaagtgtcatctgacatagtcaaattatttggagccattagtttgtattttttttcagaaaggattattgttaaaagccttaagattattaaagtattttagttattttttcacttttttatttgtagaataattattttgtattatgtatgttaaccaaaaaataagaatatgttgtgaatgagtagtaaagctctcatacactaatatttgttttttctttttcgagttttgtgatgtagttgtttttgttgtttactgatatgatgatattggtgatttattttattcagatatcatgatattgattattgatgatgaattttctttaatctcaatggttctcttacttttgttcgtaaccataaaaattatttacgatgacattgattattgaaaatgatgaaattttttaactttactaatcattatatgaatcaattctatttataatgtacgattataatatttactatgccattcttattttattttattatttttgaatgcattgttttaggttataatgatgcatggatatcttaaacaagaaatgatttagagagagggtgcttatgatttagtgagatttgttgattgacttgtaaaagcatttgaattatgcagattgcaaaacgaaattaagagattgaaaaacttcttttgaagaaataaaaaaaaattggttatatagatgtatatttagttttactccatttttattattaattaatgtcattaatgacaattaatcatattttaattattaattagttgtaatagttgatgtctatattttagtatataccattgtaattgttatttataaaaaattatattaatatttatgatattataaattttttattttttt

SEQ ID NO: 388309 - DNA, 1551 bp, Cannabis indica
gtttaaaatgagaatatcgaaaacatgaaagaatgcattgatatatagtaattttagccggtacctaaccgtaaattttctatatatttttaataagtcacaacactacataattaaaatgatatatatatatatatgagtgcactcttcacaggtattatccattcatgggtaatattataaaatttaagtttttataattagtttttctagctaattaaaaaaatctctcatttttatataatatgagttgggggtggtccaatacggtaaaaaaaaaataagaaaaaaagtttttctataaaaagaaagattaagtttagcttaagtattttgtatataaatatatttttgatatagtgtaaaaactgatattttttgatatttttttttaattaagtagctaaattaagtatagaaattcaaatttcttttttattattcgtcattgaatcaaaacttaataatttaatattttaaaaattaatatttataattaaattgtttagtaaccatcaatgggtaatacccattgagaagtattccatattgtaaagaccgcttatgattaacaccttggattattaaataattaggatttatttatgagatttaattattatttataatatacatattgtggaggtttatttaaattactacatgtttattatattatttatgaaaattcctcgatttccacgattgtgctcgtgctcggtagcggtggaacgcgatgttgtgccggtagacagtcactctttcttgggaataaaaatgttttggttagcagggtatcattgttaggtattaaaaatacttgaatttgatagggtttgggaattgattaatttgccctttattggtaagcttgtatttgttagtcaaggggtatattagtcttttcttagacttttgtctcttagacttcagaaaccctaattttccccaaattgttgattttagggtatggtcatgtttttcatcgatagggttattcctagtttgatttttaagtccgtgagaattgttttggtgtgtctctcaccaaaattacaaatgatgtgatttagggccctgtgaaacgtcgagctgtaattccactcaggctgaccggcacacctgagcgcgaaaatgaggtaagatagcataagtaatatatatgtgaatgtatgcttatattaaatgtttacactactaacaccaacggttatgtgattgtaagggtgttagtacagtgtaggatatcagggtagttacagtgttaccaacatgagtaccaaggggtacgtcgagtatgtggtacaatagtaactcgtgggagtacaataatggctctaccaacacaagtacaaagttggtactttagtgcatatggtatagtggtcgtacttcccttaagaacattcttaactatttggagctcggttttggggctcaggacggcttgagcataaagccggtatatgagtattgtttatatatgttatatatgcatatcttactgagtttgttgactcattagtttgctaccttgtgtaggtaaaggaa

SEQ ID NO: 388310 - DNA, 992 bp, Cannabis indica
aatgtttagcatgaaattaatttgcctcccttttcagcaaggaataaggatgtctcattagtactagatcgaagtttcaaaagccaagaagactccacacactatgctcctttgggtaaatagaatttatccacttcacccaaaggctatcttgcttactagcaatggcccaaaggaacttggccatcaaagatttatttcactttttaccctcacgaaacccaactcccccgaactttttagggagacacaccttctcccaaaaagcaaggtggaatttggtctggttccctgaggtcccccataaaaattctctataactcctatcaatggcagtggtaattttacttggaagagtaaagatactcatccaataattccaaacttcaaggagaaccgaatgaatcaactaagcacgacccccaaacaagagattcctgctagcccaataatttagattcttgttaatcttatctagaatcactccacaatcttcagtcttctatttagttggtcgaagcttgacccctaggtatttgagagggaaggagccctcctccatcttgacaagatccaagatctaagctttaatttcatctttgattccacaaaagtaaatgcgggacttagctttgttggcaaagagacccgttgcttggcaaaatctcaaaaaggcttaatttaagtggctgatcgagtttaggttccccttgcaaaatatgataaggtcatctacaaaacactggttagtaagcttaagttgtttgcataaagggtgaaacccaaacccttttctcccggagaactgagctataagtcttgacgaagatgagaggggacatatgatccccttgacaaagactagggatgcacatttcccccatggggatgggccccgcggggacccgcccttaatggggcgggaattccctatctaaatggggaatggggcggggacggggattactttttatccccgaatgttaaacggg

SEQ ID NO: 388311 - DNA, 1203 bp, Cannabis indica
tatcagtatacagtagagttgtactgggatactgatagatgtatggtttggccacaagtacgagatcgatgatatcacatcggtacgtactagagtatgactagagtaccgagtataggttgatattatggtcaatattactgtagtaagaatgtctagactcagtacaatgttggacatagggatagggattttggttgggtggtatgggcgcctgattataatctgggttattgatatgatattatttatgcttttttttttactgattctgttgactcgcagacattgttgcatgtgtaggtaagggcaaggctaagattgagtagccgtgagggcaagcagatggagattgtacatgtcggggtagttaggcctggagcgtacggtctttgggacagctaggcatattttgtatagtcgatgggcaacaaacttttgtattttgcactataaaacttttgtaaatattttttaacgggatcacagtttaataatagtatttttagtatttataattaggaaaataaagttttaaactattcacgatttttaataaattcgttgattagcaacgagctgcacaattaagctaaaaatcacgttaacatgcctaacctagtagggtgttatagtggtggagggtgccttggtgacgatgggacctccttcctttgtgtcacactttcaccttcagttgtgatggaggcggttactccatcgcactacttgatcactgagatctcttcacgatgattgtcttcttgccttatttgagatacccgcctgcttgtgccctctcctccttcttgaggcttcataacattcacattttctcctcttgcttgaggtctgtgaccattagcacctaagcaatcaactggttgttgtcaaggaaaatctccaagtcttgaaagcgacgagagcgtctaggaattttgtattgattgtgtgtaaagaaacaacttggcttaagcttgtcattcccacagacggtgccaaattgttgaaggtgagaactcgtcaactaatttgttggctagaaaatcaaacaatgctttaagctcagatctaagacgaaaagaaagatgaaatataaattcaaattgttatctaaaaatagagagaaaataataaactttctattgctctcaaagtcaagttacaagaataattttccaaccccttctcacatctaagaaa

SEQ ID NO: 388312 - DNA, 2002 bp, Cannabis indica
tgtttaaagtggcattaaaaaaaagcctgaaaatagaagggtttatgagtaattttacaggaacaagcgatccactatcactaccgactagtagtaacatgggtagtttggttagttgcagcaagcggggcccattcaaatagtgaaagtcggcgattcatgagaatgagatcagtctcttttaatttcataccaaaccaaaaataagtaaaagttgcaatcttttgaatttgataagagatagagcacaaccccacttgaacaacacccacatgcagcgtctcactctctatcaaaaagatattgaaaaaagcttctcacgattttaacttgtacattctttatgaggagaaaaatgtatcttctaaatattcataaccgtttgattaatttaactattgatttgataatctatgagtattctctaggatgtaatgctaaccaaaactttttatttagtttcgtgatttcttttaaatatatctaggcctttgaaaaggagttatagagactggtagctttgatagagaaaagctttaaacctaaacccataagtctttttaattttaggtttcataattttgtacaattttgcactaaaaatatggagttttgatgctaatattcattcatttatttatttataaatttatgaaaatactaaataacgtggatgctgtcatcaacaccatatactgatatagtattagatgagttgtggctaagcatcaatataatgctctatttatattcgatgaggtactcaaattgttaaaggttgaacaatttgagatgagacaatgatgagtttgatttgagaagtaggggaaaataaaaatagaaaatgataggatactgtgatttcaattaatgggtgagcaaggccatgtgcgagtactcctcagcatgtgctccaaaaaaaggaccatttacgttacatccgcagcttcctctgtgcctgtgacccccctttgtctatcatctgtttttaattatccaataataatggtggtgaatttatttcacataataaaaagttactataaaaaattgtctaatcataatgtttcaatcctttcgtttctaaaagtgttagctgctcatacaaagtataggttttacacttgggagggatgataataatgttggcttcttctacttctacaaatgattggttgccacaacttatggaaaaacatttattattgttattatcttttaaagtttatatgagtgaccaacccaaatgtacagcactaaaaaaaaatggaaaatttacaagtacatcaattataatttattttcaaaaatacggtgggtccattataatactaaaaatgtaccgttttataccgttttaatttaattggtttttattttatgtttctgacatcaacccatcatatccatcagcccatcatgtccattatgtccatcatgtccaaaaggaatcacgtgtcgcaattctgtaggctttttttaaaaaaagacttagttgtttagtttcgtatgagtaaggaatggtttataatcaaattttttatttaaagtaggagtgagtagagtatttataggagttaatatcaatcattgtgttttttattttctctattttttttagtttttttctttttcttctacatttcttattatttgttggaggaataatattttatttttttcaatacagagtaaactataatcaaacataatgatatacgccaagaaacacattagtctaattttcgtgtatattagaacaacaattcattttttatttcaaacacaatgtgtgaatataaaataacaaactaattagtctattttttttcaagttgagacatcaaatctgtttgtatacaaagtacattactgtaacatgtcttatatagtaaacttgaataacaatatatgcacttgtcaaagatttgaatatgatgaaattccttgctcataagtttatttggcatatatgcctatactcatatatgcctaataaact

SEQ ID NO: 388313 - DNA, 904 bp, Cannabis indica
tggcccgatgggggtctgatgctggtccgatgggggactcaatgccgtgtcaaaatggctgacaggggtgaaggcccgatgggtccccgatggcacccccagaaatttttttgtttggttttttggggtcgggtccgatgggcccaatcaaggttcgattgtaatatctcgaaaaatatattgatattttaattagacatattttattaaatatgtgattatatgggtattagagtaggattataatcctacttaaactaattatgagttgattatagagataagaataaataaagcgtaatttattaattacggagattatattggaatatgtggatatcgtagataccataatttgaataaaatattttcggacctagcaaatgtggaacttgacggggaggtcagagatgtcacgacaataaaagatgaattgaattagattttataccagactagattagaatattaagttgtccatttggcgggattggttaaaaattactaaaatatccctaggatttgatcttaagcttaagggttataaaaagggtaaaatggtcatttggtgagataagtaaatattatgttttatttgatttggatggctgaaataaaattaagtggattaagttatttaattaagtgtttaactacttatgttattaaaggaaagagataagttaaataagacaaattttaaaggaaaagtcaacagcatcactttttctcttcttctctctttcagctccaaggaaaaaccagtagagatttgagggaaactcaactctcttcaataaattcttggaaaaaccttatgcccggggagttggataagttgaggtaagttttggtaccattttcctttgatttccttaagttttagtgtaacgccctgtccaac

SEQ ID NO: 388314 - DNA, 687 bp, Cannabis indica
acaacaaaaaatgcatttgttcaaagaaaaaaaaaggcatgcaagtagaattaaatagtttttggtttatataagatatgggtgctagatacctacatttataatattaaaacatctgctgctagttttgtcaataatttatgatattaaaacatctgctccttttataagttttaaaaaatttggtgtgcccgtgtggggtctgtggaagttatggaattttaactattttttctccttaactgctttcctcttttcttttttttcaaatccttttaagataactgctcccgcctaccttgctcctccacccttcatcggtgtttcaccttctctttcacaatcctatctctcctttccttcaatgcattctgtgatggacaatctcaactctgctctttcactcactgatgaggaaagatctactcttacattgcctgacattgctgctctggacgcaccatcatcacagccagtttttgctcttttagcaagagttttaactactcaaaatgtctacaaaccaggtttcatagatcaaatgtcggggcactggcagggacgataccccgtcatgatcactgaatataaaaaatgaggagggtctctttcatatccgctttggctgtgagggcgataaacgacgggttcttaacaagaaccatggcactttcaaaaccatttgat

SEQ ID NO: 388315 - DNA, 756 bp, Cannabis indica
tttggacatgttctattcctggttaatttctatacacttcatttaaacatacaataattaatatgtgaaatgttaaaaagtatcaggtctcatacagttttatatagtttattataataatttttaaaaaatatcactaaccaatcgcaaagtaacacgtctagaaagtgctaggcaccaatatgcctaatagcaatgcttaagtaccagtgaaacataatacttaattgcaatattacatcttggaggtctttttgcatttttcttatttttttaatcaaattttagctaaaatggctaaaaagatagttattttttattattcttacttcaaccatgcttcctattttagttagtattagattattttaataatatttaataatttaaatttgttaatataaattaatttaataaaataataatgcttttgattaaaatattattaaaaatatattaacaaaaaaatagggagctctatacatctagggctagtttggtaaggtccatgggtccgggtctcgggtctgggtcctggtttgggtttggggttcggggtccgagtccgggtccaaggtttggggtcggtccaggttcaggtccggagcatgctcttgatttaaggtttgggtccgagtccgagtccaggccatagtcgaggttgggatcgaggtcgaatttattgtaaagaatttataattttacataatctattagtacacctcaatatcaaacataatattgtactaaataata

SEQ ID NO: 388316 - DNA, 1220 bp, Cannabis indica
aaaataattttgtttttaaatatatataataatattataaaattaataaaaaatattttattatgtaactgaaatattttgttaagtaattaggatattctattaaaattaaaacaaaaaaactaaaaaaatctgtttaactaagaatttcattacataaacacattttatatagaataaatttatatagcatcttaaaaaatctaagcacatttactcattcaccaccctttcaagctctttctgctattgttatttcagattagaaattttatatatataatatttcggatgggctgtgaggttggtgggtggtagcggtttggtttccttggcagcaaattagaagaagaagaatcaagagggaaaaaagaaaatataaaggaaagaaagaaaaaaaaaaatagaaagaaagggggaatttcctatctttttcgattttaaatcatgtttttaaatattttaatttatcttttttaattattaatatattaggcggtccaataaaattttaccacgtgtacacttctacgtacaaagtgacacgtctatttggtacttaacaactaaaaattaactgaaagaaaactgaacaaaattaaacgattgtgaaagttagaaattagcaataatttttccaatataaaaattaaattgtgacaaacttaaatgtctaaagagtttagccgctaccctattttctctggtgctaattagatccatcaaatgctagctagaataagtggcaatatattattaggcaatgtgttaaatagttaattattaataaaaatcacattaaattaatcaatataattctgaatgattatagtatttctttaatataatatgtaaccaaacaaatttaatatataaacaaaaacacattctcttatatacctgggttaaaattcatacacatcttgaaataaaaacctaaatcagaagcaaatttataccaaatatataaactaaagaaatcaacaacccaactaatgaaagagtgaaaaaaacccaaattcataataacaacgaaaaagtttataaccaaatatataaaaattaaacattataattattttctaatatttaattaactataaataaaaattactaaaataattttattattatattataactaagaagatagtaataattacacttatcacacatttactatacagtattcagaatcggaataaattaatagagaaatg

SEQ ID NO: 388317 - DNA, 1104 bp, Cannabis indica
cttgattttataatgttacttgattaatacactttcatgaaagtgtactttgtttcaacaattcattttttgtctatttgtttttttgtttttttgtcatttagatttttagttgatgattcagtacttagtgctttcttattttactttgatatataaatgggttaattattctctgtatttgatttttcttgtaaagtttttaaaattatgacctattgtattattttgtatcttaattctaattatttagtgcagctttcattatggttatgatttttaattagttagttagtttattaattgttttaagtttgtgattactaaattggttaacttgagttaatcaattgataaaagaatagttaatttagctaaatttcttaactttagttaatcaattgttgaatagatatataattgatttaattaaattgattaacaggtaattcatagcagtgtccccatcatgagcaggtttagtgatagtggttttagtggttactattgttgcaatatagaacattaaaattaaattttttttcaactctcaatgaaaataccaaaatatttattaaatttttcaaaagctgctttatataaaatctaataaagctaaagaaaataaatcaatacaaatattaagatgatgatttttaaatataataaagctaaagaaaataaatcaatacaaatattaagatgatgatttttatgtgattggtgtattaacaaattctagttcatgagttaatgttatttagctgtaaaagtctttgaatattacaaaagtgtttatgcagtgtttatgaaccctatttttagtcttagttggtaagaaacgaattttaaactttttgcatgaagatgttatgttatatttataagatagggatttcatgtaaacttgcctcattgatgaggtagatacaagtaatatatttgtattgaactgatttgatgaggcttaacccatgaggctacgattaattatgagaaatttaaatttatatatatacatttggggtatattaaatttttgaacacaagcttactaaatttaaaaaaaaaaaaaaataaggacacattttatgttcataccca

SEQ ID NO: 388318 - DNA, 2217 bp, Cannabis indica
agcctatggattccccatccttctctagagcagtcctagtagaggtaacttctctatcatcccaatcgaagaacataaagattctctctgaatagtttgtgtcatttcaaatagaagtcacttctttcgttacagtttgagacaaaataatatagcactatgagcatcttcctcaatttgctcgagtggcatggtacaagattcatcggtgaagctagtatcagcgtacactctctggaatgacatgataaatccaaccttctgaagattttcaatactaaagagggttcaaccatctctctcacatacatcaatttcaagcaacatggcaccaactctcctcttcatgtcaataagaggagcaaaacttttgaaagggatgactttttggaaggtaatgtgtctcaatagaagagcaggattatagaagtactcctggtagtaaaggccacagttactcttggctatgtgttctatgaatgagccaaattgatggaagtgataaaatcctttatttatgtgggtcacacttcttttcaagccgtagagaaagtttatctcatgaggagttggaataggccaattcctaaggcggtaaaacatgaagaaggtggctagaatcctatagtcatttgggtttatcttgtaagggaagataccaaagaagtcagctatggatatgaatcgtggatgcaagggcaagtaagcactcacattcatgtgaaatctcaaccaagcactgcaacaggtattctgggatcccttgggagcaccatgtcgaggcttttggacaataattttaggaagatagtaatcatcctaaattatctgagcttgaagctcagtgagggtactagacacaagaggccttagcttaaaggctcaatgccttggatcatcactctcaatgaaaactttgagaagctcagttgccatcacttttccaccacacgccttgtcaaagttcttagacttaggcagtgtcaacttagctccaatgaactaagccacatgggggtcatactcattgttgaactcaaatttggccaaccgacaacggagttgtatttatgatcaaaattaccacgtgtaaacaatgagaacaagtaaatagaaaggacacaataattttatagaggtttggcccccttagttaaagggtaacaacctactccccatttagttgtattgatataagagataataccactcagatcacaagtattgtaagttctagagtggctctcttaagattacaataatgagaatgtgaggcagttctcaggtagatgagatgaagaagacttagtctctactacaatgctaatggcgtgtagaagagagagtgagctagggtttcaatagttttagaatgagaacttaggcttcaaaacttagagcttttaggtttagcttagtgctctttatataggagagagcttacatgagatatgaggttgacatctttaaaatgagaagatatcacctatttgttacacaataaataaataagaaaagaacttgataattatccctaagtaataggtgaacaactgaagttaaacccctatttttgtgggttgtttcaggacaattcaaggttgaaagttacagaggcaccaaaagtgcctgctagaagatagattagccgacctaccctttgctggaggctggctggcctacattggcactaagtctggctaggggaggtccggctagacccccctggttggccagtttgctgtctatttgtcatgcttaagtatttggactcttcatcaactagtacgttgtgcatggtgacttggtcttcttactgacaagctgtactccatgtggcatcaatcctacatatgtggacatgccacgtcacgtgagtaaaaattgggataatatttgcccccagtccttgtttgaacatttgtaaggatagggcctttccaatttcagttacgacatatgtgggccctacaggttttaattttgccatttatttagcaacttatcttcatttttttacaaatgccatattttaattttaatcctataaatgtcaaatctatttatttaataattataattaattatcaataaaattatcatttaacttatttattaattagaccttacaaagtctcttaattaacaaatatatcctaaaacatcttttcttctcaatttagcccttgtttagtgaaaattcataaataagacata

SEQ ID NO: 388319 - DNA, 3370 bp, Cannabis indica
aatcaagtgacacgaatcaagagcacaaccataatgaagatacaaatcataacaaacatcaatagccatgtcaagcatgatgttgcagagctctttgagtatatttccgatgcccgggaagtcgcgtgaccggtgcttgccaagctacgttcgatggcctcttctgtcgaatcgagtatctgcgctcacacacaaactggagaatatcagcaactcaatgcttggaaattaaaatgatatcttcaaagtgaaaaacagatggtttgtggcgattgcaagaacttgtacataacatcgaattctcagggaaccggtttctgtaacttattactcaaagccatgcatcaggcatttcctgttttattgattatcaaagataattgcttgatgtattacaataaatatattcctcttttttcaacctctaaaacacgatttcaagccatgctgccccgtcgttaagttaggccttaactcagtaatcttaaagccaaattataatacagcatttaatttaagaactgttacataaagaattgaaaactatgatatgataatctgaccttttcactgttttgcactgactggctcaccaaaatgctactctctttgagttgcctagctaacccaaccatttcatcagttaagtcctcttgaagtttcctattatacatagcagaacaagaaaaaccagtaattatgatttcttaaataaatagatacaagtgtaaccaaaacatatattgatatggagccatttttctatagagatttactttctcatacaaaagtaacaatgtcaaaacctaagcatagccattacacaaaattaataaggttatgtaactgtttacatgaccaaaaacactattcgtgtcaataaattttcgatcctgcagcgatcggttagaccccaggatattagtagaagagggttaatctaactgagattagcaaaattgattcacagcgtcatggagagtcccaggctctcgaattcccgtgaaacttaactcttgatattttctaccaatcaataatatctcttcaatacttctgttactgctctatagctttactattctataattcagttactgttctattgggtttgcttagctacctgcctcgggtcttctttcatctatacaactctacaagaacaaactaccaaagaatagcatgttcaaaagccaaaaacaaagccgaagcaattggtttcgattcatgacctgcactcccctaacttggttctaacaaagttttttgttctcattggagccaatggagctagtattttttccattaaatgaactcaactaaccataactttattagattacttcagagttattattataaaaagtttcatgagaacagccacgctatgaaccgaatgcaactgtagtcaagaaaaagtgtaagtgatgagaaccgagtactccaaactcaagaaaaccaaccagcaaaacagactcacaatagcatcaagaacaatgaaacagtagcaaatagtagccaaacagtaagtagagtattatattgactatatgagaaaactgattacaaattgatgggagcccttaggcccctttgatgcaaagagttttactcaattcattgcataacttttctatttaccactcaactctcctcaatacacttagtcacatctcttttatttgctatactcaacctcaccatactaataatggggtctatcagaaagcagaacaaaatgcaagaaatgagtacaaatataagaagagtaaatacctttgcttttcgatatgtgcctgtgccatggcatccaatttgataggtgctgaagaattagcatcattagcctcaactttatcttcaaaatttgagccaggcctgcataaatcaataaattaataaacacgaaacaacgtgaaaacgatcatctataggagccaagcaaaatctacagtatcaacaacaaaaaatcaacttacacagatctccttctcagtcctggagatggggaaatgcgagtttcttcttctaattcaacggagcttcctttaacagaagtacttgctaaggactcttggggaacttccaaatcaggctggacataatataatagtccaacaaagcaataattattttatttcatccttaagttgaatgcatagacaaagcaaaggaatgaactcaatttgaaaaatcccttaaaaagattgaaagcaagaaagttaaactatgttgatcctaaagaaatctaatgaccccataatagaataaaattacatatacatgtgtacataccatcatggaacttaattttgaagcaatggcttcaatcttttctgaatagtcactcaccatagcttttgaaactctagaaagaaagaaaacaacaattaaataggcctacctgaaaattataaagttaacagaagaaaacattagcattgaaaatgaaaggagcaactgagtcttggtggaactaacaatggaaaataagggtggaaagaaaaaacgcagggaagaggggcggaacagaaaatgatgggagtagagaattgatctcaacaatgcagttctaatttttttttctcccagacaacattaataatttgaatccatagtatcagataaaaagttggatcttccatgtatcatcaaatattccttcccagaaagagctaactcaaagtgcctaaattactggcttattatacccatgggcctatcacatcacacacacaagatatttcttggtaggcaatgaacttgttccagactgtttcattcacccaataaactctcttaagagtcaacaatgtaaatttctcacagtttagaacagaacttttgaaacagtaagctttaattgaatataagttccaatgatttaaacccatgttaacattgttgtgcagcatcccaatagtcaatcaaatcagtaagctcactccaatctcaaaccataaaaaaaatactacattgaaattttcatttcaatttcaaatatggaaatcaataattcaaatggttaactggaagtgtgtgtatatatataaagagtaagaagaataataggtgaacaaaccttggtaagccttctgctgttctttcttcagctaattgttctaactgttctcttaaagtagcaacatactgtaaaacaatgagaggacaaaaaatgaagctaattcaaaacttaaacaaaagctagagaagttaagagttgaagaagtatatatacatgaataagctttgcttggttctgctgtttaggggcagtagcaagtaatcttcttagatttacttccgttttgctagttcccatttttcagaaacctaccaaaaaacaatcaaaaactcatttttaggcccc

SEQ ID NO: 388320 - DNA, 1155 bp, Cannabis indica
ctctgacaataacaggtggtggaggttggaattggagacatcatatacttccaaaaatatttaatgtaattcatatttatgttaacaatgaaatctatatatgttaacaattaaatctatatacatttaataagaggtggaggttggaattgtttattggtgccaaatcttaagattatttgctcataattttttagattgatgtcattttcgcacatgtttcacatttcttttttattgtaatttgtgagttgtcaccttgttcttatctcaaagcaaaaattaacacataaaaaacaaaatattagttaaagtagaatggattagatagtataatttaatctgatgattttttcgctttactggaattattattgaaatatatatataataaaatgaaactgaatgtccactacacaatcccattttgcccacacgagtctaggttttgtcccaatgaagaaaatctgacaaatcataagcaatacatttttgtgaatgcaaaatagttcaaatacttttcttcctcgtttaaagccctgtaaaaggtgtgaaagtctgaacataaactctagtttggacttataaaacaaaacaaaatatagcacagcatatttataaaactgacaatgacatgaccaaatattgtagttgaataatagcacaactacacaatgttagaaaaattaataactcatatacaaattttgtatataatttaattagaatacaataataaatataattattaggtatattgcatgtttgattgatctatacagcaattataatatttgatagtacaatattgtcaactaagtttttctccctagatatctaaatcagaagtaaatttatttatcttattatcaaaatggtatacaattatgatgagatagtatgtatttataaagttagagatatgacttagctacataacttaagttagattgggcctcctcgtcaacagtttcagttaactagaaaagtctacatttttgcttcaactaaactttatacacacagatgctaagtccattaaatattgatcattaataatatgacctaatacaacaaataactatccaatcaaatcaagaaaaataaaaaaggttcttgaaattatttcagtcaaatgagtatatatatatatat

SEQ ID NO: 388321 - DNA, 1496 bp, Cannabis indica
agagaagggaaaatgggtggtggtgaggaagtgttgtgagttcaacatttgatttgagtttagagagagaaattaagagagagagagatgaagctctttcttcttcttcttcttcttcacttcactctgctcttttcaccattcattcattaccagaaagaaagaaagaaagatatcatttttctttatctaataacggtattaaccgttacttgataatttaattattttattttattttgtaataatatttgtttttattgtttaatataattgaaaacatgtgattttatttttcaaaaattattaatttttttttaagatgcaattttattaactcaaatcagttaaaagtgtaaattattcagaattgtagaatctgaataagtataactagcatttaatcatgaaattttagctaaatggtgagtagcacgattagcgaattgcttgataaaaattaaaaagacattattcaaattagaaagaatctctctgcattcagaaatgcagaacacgaaaataaaagtcatatttgacgaattttgaatagcttagatcgtgaccaaattgtccgattctaccactacattatgtcgccttgtttctttcaaccaactcaacacctcattaatcccgataactttagctagaataagattaaccaccctcattcgacatactgtccgaacaaatattgtgggaatattggtacacctggtacaaaatactgagagagagtgaatttgaaacgacgtattagaatctgaacacacattgtagagttctcagagtcaacttggacgcaaggttagggactcctctcaagtcgaccactattactcggaactactcaactctgaaatgttatctttcttgtcatgtatcagacattaatattcacattaccaaaaaaaaagtttgagttaaaccataactctcaattattagcatgatcattttatttagatcaaactttaattagcaatacacttttaaaaaaaaaaaattattgtttttctctttttatattctcaacaaaatatatgagcagtaataattagttttctttttatttatttaatttgtgtttcgtatattcgaatataattataaatagcaaaccaaatatcactaattttataccaaatttaactcaaattttgattttgcatgggagatggtttaaatatagtgaggtgctatcaagacaataaacatatctaaagattctaaacaaaagaaaagataaataaaataaataaacaatatagtacaatgtttcataatttcattcaaaggttacaatcaatcttttttatgattaatattattattatttattgtctgtccaagatattattttaaggttactactccttttgcaattcttacaatagtttcttatttcatggctacacacacccatagaaacgcaaaaaaactgaaaaatgaaaagcaaagaattacaaaaaattaaataaaacaaaaaaaaa

SEQ ID NO: 388322 - DNA, 1010 bp, Cannabis indica
tgtgagaatttgtgtcaattatcctttctacatcaattataataacaattaatttagttatgataatcattatactttttattatactgttgctataaattatattaaaaatagggccgaacccgcgcttcgcgcggcttagtctcctagttacatcataaaaccaatgtagtgatgattacattgttagaaatatctcttttgccatctttattactttttttttaaaaaaaattaaacattaaaaataataaaactaaaaatatttttgtcaatatataacttatttatttgattacgaaatatcataatactactcctattataattctcatttcattatattactattcacatcacaattacaattacgattcccattacattataattcccattacattatattatatgaaagcaaacacacatattagcctctaaaggaaaggaaaacatagtaacctaataatcacatgcggacaagtacacggcttcaaatattgacggcagtatccaaatcctctctatctctagtttggtttaaggagaaaatataaaaaggtaatagaaaagatatattattatttgtaactgaaaatatagttttgggtatataacacctcggaaagaaaatttcaaaaatctcaaatagaaagagaaaaggaaaaaacgaagatctagttgtggtaggtcaaaccgatttctactctgcgtgtccgatctagcttttccttcttcctcaaaaaggatagggttttcctgaattttaggttttttaatcttccatttatcttctctaccttctcgcctttattctccctctcaaaggttttgcctctatctttctctgaactagggtttgaagcatttttattgcgtatcttccaaacgccgattatacatgtatatctccattctagtttatgggctttgagtacttatatttttttttataatgttttttttgagtgcttgatttttctttttttttttactttcttgattttttt

SEQ ID NO: 388323 - DNA, 748 bp, Cannabis indica
tgacacatcaagaaactcaagtcattcttctctcaacttgggctccctgaattcattattagaattgatgattggctataaactgttgataactctattgtttaattttatttgtatatttttaatataatttatgttatattctgttactttttttattacatttatgtgtgtttagctatgattgtcattgtgttattaactgtttcatttgaatcattaaatccaatatcttagcaactaacacttattcggccaaagaaacagaaggaaactaaggcaaaggagatctatgtgtactcatattttgatcacttagataaagttgtgggttatattttaacatttttatggcattactatcatatatggagttctagttttcacttttctttagcagatgactactagatttatgaatcaattaatttttacattcatgagcatgatttactgcaggaacttgaatttattaaaaatggaagatttgagtgcaaaaatagagcttgatgcatttgtatatgagaaagtccatagaaaaaaattcaagggaaaagaaaaaaagaacacaaatgccataactttaaatgaatgcctgttttttagggatgtacacaaaaattcgtaaactgctcaaaccgaataacccgcttaaaccaaactgaaaaaatcgataaaaattacaaaccgaaataacctgaaaaaattacaaactgctcaatttgttaattgggcgggttgaaaatag

SEQ ID NO: 388324 - DNA, 1642 bp, Cannabis indica
taatgagataaatatactcatgtgagataacagttgaaagagaaatcaatgtaagaagattcaaaaaaaaaagaggtttatattagcacccaaaaaatagaattaaacttaatttatttaatataaattacagcaaaaatacttaatatttttgtattaaattcttttagtagtcataatactaccatgccgtcaaaatgctgcactttcatacgaaattttcttatggtaaatatacattttcatacctattttttttttaaaaaaaaaatttaacatattttaaagttgtatatttaatcattatcatctaacattcagtatatttaccaaaaaaaaaaaaaaattagtaacattttaatatttaattatttttttgaagagtttaatattaaatttttgtaggtacaaatattcctcctcaaagctgtattgagtgttggtactactagtttgtgtgttattttttgaagagagttgtatggagaccgttttgagtgaattattaacatgaattaatacacgtgtctatcgacagttaaagtgatcataaattggtgtctgatccatgaaaaggacaagtctcaataaaatgtatttgtattggcagttaagtcatacatagctctaccagtaccacattaattcatccattgatttacaaccacaactttcatggtccgttagtttgcaaatgacaaacacatcaactgtttgttttgtatgaaatatgtatcaccacactcctattttcttttcccctcctccatacttgtacttatgggtttttttatttttatatttcataacagttttttttactagaattctatattgaaattcttattataactagcgctgcaacttaaatcgtaacaaaaaatcgtataacaacccacataaaaaccaccaaagaaaccactttagaaactcaaaccgtaaattaaaaaaacagtataccctatatactatttttataatttttttttcaaatttacggtttgggtttctaaagtggttgcaattagcgttgcaataggggttactatacgattttttgttgcgatttaagttgcagcgctagttgcaataggagtttctatgtagaattcagtaaaaatgacaaaaaaaaaaaaaaaaattattttaaagtataaaaataaaaaaaccctaaataaattataataatatcttcttaaaataattataataataataataatcttatagtatctttttgtcacaaaaatcgtaactatatatgtaagaatctttttctttattatgaaaaaaataattaaatataggagattaattgccatgtataattatactagtaaaaagttacgtgcgaggcacgtacactaaattttatgctaggtattttttattatatttaaaggtaatacacgtaaaaatgtttatctcatcttggttcaacctaattttatgttgtccccataggattgtgtgttagatatgagcttagaataatagtattcgttagaatgggtgccagcaatggcggtgctgatgtcagggccggcccaagcattgggcagcttgggccattgcacaaggccccccattttttttaaggcctaattttatttttattttatttttttttttttaagaaaag

SEQ ID NO: 388325 - DNA, 1768 bp, Cannabis indica
tgggtatattttcatacttaaaagtgatctgtatccagtcatctccagttttacgaatccgcatacgccttttcaaaggcttagagaggtcgatggtgactctaattctcatgtaatcacgccatacacctaaaaagttcttgggacaagattccacaaacacacccacataattactagcaacctttaacacagttgaagtcataaaaccagtttttaaatcatgtagttgaacccatacgtctaaagtatttagagttaggcaccgtggattcaactcttctttcatgcgagagatgatcaaagtcttcatattgaaataccagggactaccagtcacaacacgtttgatatcgatttcatggtaaaattgaaataggaaacgattaacatcaagctccttaatgtaaactcccttacccggtttccataatgccgccagagtttgctgcatagaggggaaatcgatcgcaccagttgagatgaatcggcccaccaaacacagtctccaatcatacacaaactcctcctctcccccttcaccaagatcctgtaacacaagtccttcctctaactcttcttcaataactagttcctccataatatgagatgcattactcgatgaagccatcagaagcaaaagacaaaaatatactttttagaaaataccaaagaaacagagagaaaacaaacaaaccatgatagatgtcaagactatattgagacctaatacttaattatactaatagcgatataataccgaaaaatatgctagacactaataatacgttttagcatttttatttaattaatgttattgtaacatacattaaaaatattctaaaaatttatttttaaaataaattagcaaattatatacatatatttaaaatttaaagtaataagtatcctacaaatatatataagtttaataatatattatgcacaataaaaaaaatttaagtctaggcaatatatgaattaatataatataattataccaaaaattcagtaacataatataactgaatatttcccaaaaactttaaacctacaaataacaacgagaaaaaaatcaagaacagtaccaaaaaaaaaatcacagtattacttaagaatacaaaatttatattatcattacatattataaaaattattaaaaaaataatcttaaaaatacacataacaattagtagacataaaaattaattacatagatatattatacatacaataaacacattacttaatcctacactaaataataagttttcatcaataaaatctctttaacaaatattttggaattaaaattaataatttttattccacatataactagcatctaattatatatgaaagaaaatttatgctatgttagtattataatattaggctttagcttaaaaaaatttcaataagaaaaaaggtaagttgtcaaagccttcaagtagcgtctgtcattgcaaaatgaaaaaaaaatatatattttggcaccctatgacttcggttacaccttatggctttggttatttttccataaggtacatcaattccttttggctttggttatttttaaataactgaagcctaaagtattccaaacttctaaatgtgtttcgaccgataataaaatcctaaagaaatcccaggtaaaccctaatatactcaacaacctctctcattatcatacctcactccctctatctcttttacttggtaaaaaacaatctctctccttctctttctctttctctttcttttttct

SEQ ID NO: 388326 - DNA, 853 bp, Cannabis indica
agcaaagcccctaactaatttcagcttatgatagcagctttgataatatttgagaggatcatttacctgaaagagaggaattcaaaagaaatatgataactcattgcttctgcaactcaaacaatataaacaacaatctccaaaatttaaatgtgaacaaatcacaacctctagattgttaagaataatatataaatatatataaatttaaaaaagaaatttcttagacttacagagagattagtggagagaaaacaatagggaaagagagagacttacagaggtaggggagatcgagaccacgagagcgtgagcagaagagcttacgcgggcagagcaaaaatctgagagagggagaaagagggttcatcttcggagctgatggaggcacgacatagcaaaacattgagagagggacggagatgattcaaaatcgtctagggttcacactagcagagagagtcgacgaatgatttgctcagtctaagaaatttggggtgagaaatttttggtcagtgaacataagaggatttgcatcgtttggtccactcgcaacttctttaccatcagtttgaaaatgaaagagaaaatgtttgtgatgctttcaaaatgacgctaatcttgtatatttttttttccaagtttttccttttaccgtccgttgtataattagtgaacgatatggaatcgacacaaataatctattatttgtgccattttaaaaatgacaattctatttaatatggcactattcacgtcggtcaatgcgatgaacagtcgcattgaccgacgtgaatagtaaattttgtagtagtggttagtaaatctagatcctggtaaaataacttccaac

SEQ ID NO: 388327 - DNA, 927 bp, Cannabis indica
gagagattctcacccctgttatcattgaaaattgcaacatttgtggaaaaaataactaatattgaactattttgtagtattaaaatatctactagttattgctccatgatacgcactttaaatacaaattctataattgggtagtgaatgcgttcattaaatttaaaatattaaatatttccctttaattaagaaatttgtaaaatcacattctattaactttttttgtactgtaaaaacctcccttgaattatagcaactatagtaaatatgtctttttattatatttcgtttattttttaaactatttattaatgtagtgctaatgtgccgttaatatggtgtgattcaagagtcttggcaaaaaatataagcatagattgtactctagaaaaaaaatttaagaatattttaagagttaattgtatatgtttagcatcaataaattaagtttcagttaatgtcagccagctaaatagattattgtaatgtttagtaaaatatgaaaaatgagtgaaatttgtgaaaagaaaaagaaagaaaatttgtgatattgataaattttgtagaacaatgtaaaaaaaatagtgtgaaaaatgaatgaaatttagtgagaacttatataagaaaaattatgaattattttttttaaaataatttaatatttaaaattaaaattttatatcacaacaattattgttttcattaaaatagttacaacgaagcataatcaataaaaaaaaaaactaaccaggtcatttatattaaataggaaaaaatttactaacaacatctttaactaaatgacctataagtcggcagctatgaagcatcaaaacaatgtgaaggtgatgagtgcatattcgtacacttattcttagtcaattattagatggattactatttatttttgtataaatttgatgt

SEQ ID NO: 388328 - DNA, 1207 bp, Cannabis indica
gtcaatagaatatcgatgcaatgccgataatatgcgaaggaaggtaagagatgaccattatcgacatgatatcgacagtttgttgatatcaggtcgataactaaagtaatttaaataaaataattgttattgatagtatatcgacatattgtcgattaaatttgaaaatatgttttggccaattgtttttggcaatttatcagtattttatcgacatgttatcgacaatacacttaattaatttaaatcgttgtcgatatttaggaatatttcctggtatttatgtttttcaacaatttatcgggagaatgttgatagattatcaacgttaagataaaaagattgagaacttttaaacagtaaacaggaaacaagtgaaattttttaaacataattaaagactaaaaaaatattaaaactaaccactaaacaatcataacaaaacaatttaaaagtctttactgtatcggtgagacttgtaatacgggcataaagatccaggtttgaccgatttgtcatcaaaataaactaatctgtaatgacgacaccctttggggaacctaggtggtggatatggatatttcagccactcatcattcattgactgcgtaggaacctccattcgttcactagcctttcattttcaaaacgtttaaaagcttctatatattcttacatttctgaagtaattttgtcactagtttcctgtttgatctcttcactagacagaagtttctgtttggtctttttactagacatttcgaacttataagagaagaacactctatggttaaagaataagaaaatatgtaacttatgaagtagaaatttatttttatagagcagaatagttgttaggaaggtaggaaaaattaattagcatgaaatatctaattgtacacgtgtatggcatacaatgtgtatttattgatataatgtcgatacattatcgataagttgtcaataatttgtggatatgagaaagttgaggccacactttatcgatattatgtcgatgatttgtcgacagcttgttaattgcctcgacaaatagaacagaagttgaaaatgtgagaaaaactaattagcattaaatgtcccattgtacacgtgtatgtcatacaatgtgcgtttattaatattatgtcgatagttttatttagaactatgataaaatctatcaagaactatgatattttatttagca

SEQ ID NO: 388329 - DNA, 717 bp, Cannabis indica
aaaaaaaaatattaatcgaattaatgaataaatatatagggtcatcatttcaaaaaggaaaaaaaggtcatcgatccaaacattatttcttgttcatatatattatttcaaaatagtaccaaattgattaagttagatcttgaaaacacatataactaactaactaacaaagtaccaccttttttctgggttgaaaaggaaaagcatttcctcctttagcattgttatttgacacgtaattacggttgtgcaataccacaccctataattgattatatcaaattatatatatgatacttcattattaaaaatgtactactactactaataataataataataataataataataataataatatcagctaattaaaaatttttacctctaaactttaatgtgtattaaattatacttttaaacttttcagataactaaaaatttcccacaaactattaaattattagattcaagagcttttgtctaatttaattaacaggcacttgacgtggataaaagttaagatgacacgatttggtacgtgtcaaagttcggatacatatcaaagtttggatgacacaattaatctgtatatagacaatcatcgtgttaataaaattaaaccactacaaaaaactgctacttttagtgacaactttttagtcataacataatttttttgtgactaaatgtaacttttagtcacaacaaaatgtt

SEQ ID NO: 388330 - DNA, 923 bp, Cannabis indica
gaaatccagagccctgttctctccctctattgtattttattctaacggtgtagccaataccccagccacaccaacataataatcaaacaattaagtctataataatcaaacaataaatgaatgggctgagatgcaaaatgcaaaatttgaacttcacattaatctcagaatgatttccttgcagccatgtacctccatatttacaatcccagtggaactcttcacatacattcttctccacccactgactgcatgtaaaaagttcaaaaatactacttgtaatctttatccaagtgaatgcagaacaaagaaacatacaatacaagggacattaatgaacgagacttgtgcagttcgagtgaatacaggtttggtcccaaccttccttggtagccgcggaacaagcttcacgaattgcctgaattctagtgaacttcaccacatcttcaaacacttttctcgaaacacaggccaagtaaaaagccctgtttccaaagaataattgatttctagcttgcaaaactgccaccaaatccttggggtggacaaaggaaagatcctgcaacttaacttcccatcttgagccgaaccgcacagcattctcaaaggggcactaaacatatgcatctctgattcttacttggcaaaccggtcgttttggtcgagccaatatgcagacttgatgcattatgcaagaagcgacaatatgaggaaatgattcacaaatctttcccacatttcattccattcccttgacccacctttctgccatacaagcttttaacagctcacccaatcattttcatcacaggtacagtactgtcatttagaacacctcaccaaatgattggttgtgtgttcatccattttgtaagctgttaattgtacatttaaaaataataagaatatgaacaaaaatacag

SEQ ID NO: 388331 - DNA, 1172 bp, Cannabis indica
gaattcaacattaaaacctttatagtaattaatgaagcaactttaatcataattaaaatctacatagcaacccacgtaaaaattattaaagcaactcaaattgtaattttatttaaaaaaaaaaatattatatagagtaatttctctattaataacatgacttaacatttcaaaatatagtaaaatactaataatagataccttgtggaaaatgttcccaggaaaaaaaatttatcattggaaaattttatgtcgacctcttacaaaaaattaaaatgggtgcattaatgcattattatagttatatttgatgcatcttataaaatttttgaaaatttaaaatatttataatatattaattttattatttaaaaagtatttttaaaggttgtaaataattaaattttaaaaaatttatgtgtgaaaaaaaatattgagtaaccctgtaattatataaagaactttataaaaaaaattataatacaatttctttaaatgttattatagttaaaaattatttaaaattaaagaatgttattactatgtcattgtttatacagtgttacaatttatttagatcactttatatacaatctattcaagttgtatatagattttctgcctcatcgaagaaagaaatcacgatcaaaatttttattttaactaaaaaagaaaaaccgtatacacatttaagttgattaaaatttatggaactataatttaaaaatcactataaaaatctattacaatttacatttagtcacaatattttaattataatataattttttttactaaatgtgacttttaatcataacaaaaatttacctgtgactaaaacatgcatagtatttaaatataagttgtcactaatttaattttagtcctaacaagtattgtgactaaaaacacatttactcacaataaattataatttttgtgactaatacttttaattacggaccttttagtcacaatataaaactgataatttataattagttacaattttttatttttaatcacaaattttgttgtgactaaatgtaaaataatttataataaatatatttaaatggatatataaatatatacatgcgaatattataaaattaacctagtaaaccattatatatctattttatataaagtgtgcctatataactgaaatt

SEQ ID NO: 388332 - DNA, 361 bp, Cannabis indica
aagctttacatggtatcaatcactattgacctctgtcactgatggcattaacagcaaacaattctagaattcatcacggtcctactcaacccacagctcccgctgctacgccggtcttggctccaccaccaccaccaaatcactttccccattctctgactgcctctctcacgatcaaactcgatcgcacaaattttcttgcttgaaaatcacaagttgttcccaccatcataggacaagatcttgatgagatctcgtccactggtgttcctcctccccaaattcttgttaccggtgaacctaatcttcaatttcatcaatggaaacgccaagatcagctgcttgttggaaattattttac

SEQ ID NO: 388333 - DNA, 760 bp, Cannabis indica
ttgacacaaacatattgtggtcagatagtgatttagcaagagccttgagtattaatgttgcaattcaaatggaaacacatgatccaatcggtatgagtgtggtgtgggtgtaagtaatttagtatggcggttgggaagataggggattaaattattgggtaaatattatttttttttaaaccaatccacacatgcggtttttccaatttctcaaactgcactcgcaccgtgaaactaaaaaatcgcagaaattgcaccgcaaaaaatggtgcgatgcggtacaattgttgcggtttggattattaccaataatttaactaccacaaatacaacaaaacttgagcaacacttgtcaaaaataccataagacttgaaaataaatataaaaaaaataaatttcaataattgtaaattaaaaaatataaaatttactaatataatttattggatttaacaaatatttagtattaaaatattctttttatattaataaaataatagaataataaagaatataatatttggtgtaatttttagtgttgtggttggaattgaaaaaaaatttggtgttgaaatagtagatttttggtgttaatttaacatcaaatttgggtttctccattggagatgccctaaggaatccattttcaaatttaagaggggagtggctgctactattaaggtttgtttattatttaagattaaaatgttaaataaattaacaattaacccaagatctatttgtatataacatagaaca

SEQ ID NO: 388334 - DNA, 1643 bp, Cannabis indica
tctagttcttcttcttcttcttccactaaagtactaaccctttatttgggacccatagatttgttgagaattaatctcaaccgttgattttgataccatttgatttggcttgaaccaaattttaatatttttaacctttagagagcttttttaggggcacgttgtgttttttcttttttatactttgaccatttaatctatctattccaatgttatagctataaaccaggtgcattttattattattattatttatttatttgtttttaactttaaattcggagaatattaactatgttattaatcatattattaagattcaaatctggttttggtcaattgtttcatgtttttttaattaatataataatattggttttttttttattttttattttattttatttttgatactaaagtttccaacttttaattgtcgacaagttctttataaaaaaataaaaacaataaagtgaggagattttaaattttaatggcaaaaaattcttctcatgagtcatgttgatgggtggcagaagaattatttggaaggctaaaagccaaagcattgtataattaacaacacaaaagtgtttgggtatcaaaaaagaaaagaaaaaaaaaaacaaaagtgttaccttgtcatcatattttgacattgttgatcgaataaatttacccttccccgcgagaatgacgtcgtgtgactattgtaatcaaataaaactagtattgtataacaaaaaaggtgtgaacacacacaccaaaccaaacgatgaagtattaaaacaccattaaagcagacgttacatttaatttataactattgtagttaattattatgtgtaacggtctatcataatgatcgaacttttgtaacattcacctactactatcttataagtagttgaacttacttcgttttgaattgaaccactataatttttgtgtctatttactataattttggtgttcaaaaaagacctttaaatacttgagtagattcaatgttgtcaatattcctcaacaaacaccttctataaaaaagaggtaagttattctattgcaataaacaaataaataaaagctaagtttttaggtaagtacacatataatccagcttgtacaatgcctcaataggaatgtttaaggtttggattttgctttgatgagaattaaagatttttttggtataatagcatatatatatatatataatattaatgcacttgggggttttcacatttcaattaattgttaagtattttgatttttgcttaataaggtaagagataggaatatttaatttgcaattagaatttaggaggagttttactagaaatttattgctattagctgtagagcataataggatagaaatatatttttaaataaaaataacctttgtttttttacctaaaataagtttatctcattactcaatatagataaaaaaaaaacagaatatagttatagaaatacattggtattatatgtaagatatgatatgtagggatgcacattttctccacggggatggtgtcctgcggggacccgcccctaatggggcggggatttcccgtctaaacgggaaacggagtggggacggggattaaattttatccccgaatgttaaacgggac

SEQ ID NO: 388335 - DNA, 793 bp, Cannabis indica
cttcaaaaaataccctacctcacagacaacaactcgaaatttgtacttatggcggacgatactcagcgtaatgaagagaatccactagagagccaacctgtcaccctggaaaggaacctcaggatttgtagagaaccaacacaactgaaactcctagttctggaaggaatgatggagatttcaacccaactggtgaataaattctagaaaggtgaagcgaagatgcctatgatccaacaagatatgtcccactggtggaactagaaaataagaaacttcgataatgcctggctaagttaaaccggaggaatgtccagttaaaacgataagcagcgacagccaaggttgcatagggagccactcctcaaactcaacctgatccatctgtaagacgatcatggggaaggccccaaggtgctaggaccagaagacaagaaaacaatcaagggaaccccacaaacacttcggaagaacaacctaaaaatgtgagggatatcccaatggatagagaaaacccgtaaacactagaaatacgagaaattaagaggctcgacgtgacattctgagaacttcccgtgaattcgcaaaccaagaaaatgaacaacttgatataccggagtcatctcgcatgaatgtgaatgccaggtaggcgcgacctaaaaaaccaagaaattctgcagcatgacatgagaaatgctagaaatcaacttggaacaggtcaaccccaaggcatttgcaaaggcctgctcgcaacgatagagacagtgcacacacttgttggaaattattttac

SEQ ID NO: 388336 - DNA, 1885 bp, Cannabis indica
tcacttctgtgatcttatcaactaaattcatcaatcaagtttgtaaattaatcagctaagttcttttgtttctagtcttcaatcgattggtttaattcccttagtttcatttctgtgatttgttaatgtcatgttcatttagtttgttcgttgaattcttgtctcagcattcttttctctggtttattgctggtattaatctcgattcttgcacaataataactgtaagattattcttctgtcaatatcagtccagtccgatataaatttataaatctgatgcaagtctattttgtcaacaccttggaaaagacgtaccacatttccttagtgtaaatagaccacattgccaattatcatgtcagtgtaaattcagttcactgataaatctcaggatcaaaaaatttgaatcatataatcataaatattttcctaattgtgaataattatatattttgggtttaataaaatttaaatattaaacatctaatcacctgaaacaagacttgtcaactaagcaattgactacgtcataaatgattttctattttttttatggaattattaaatgtaaattacatagaaaagatttaatttagggcataaaaaccaacacttatcaaaacaaggaactagtggaacccaaaaatacaagccaaagaaacacatgtatctgcatgcatccttgtagaaaaatagaaccaaacttattcagattaaccaacttacccaaagcattttcataaagcaagaaaatttctttgaaatggaaacaatattccaccgaagcttcaaaaaagaagaaattgtcatcagcaaagagataatcaaaaatcacaggcccttctcttccacaaacaagtcagacccaaaatattacccaaaccaatctaatgcttgataatagatgttaagccctcagcacaaatcatgaataaaaaaggagagagaggatccccttgtctaagcacctgagaaggctcagtaactctgtcataagctttttatcaaccttataaccaagaaaccccttcatacccttcttatgccttttaattgcataaagatactcgaagccaaaatcatagcattatcagatatcaaatgcctagggataaaagtatttgactcctcagagataatattcgttatagctacaatatcattcttgtaatttttttaaaattttaaatagtttatagttccaatttaccattcgtgttcaaaagacttcaaacttatttccgatactgtaaactatttgaaaattttccaaaatttacaaagatgatgttgtaactaaaacgaacactactatgaatttttttttttgaaaaaaaaactattctgacatatatttttgagcacggagatggattaagagattttaataagaagttgacggtagcactcatatttttataaaataagagtaaattatagtcaaatcccctaaagtttcattacaatgcaactaacctccaaaactgattttttgataggaaaatctccaaaatttgttttttattagcaatttactatttccatgcatttgttttctgtaacaagtgttgtgaaactttaggggatttgtggctgcaatttactcataaaatagttgttatgtgtccaataactgcgactagatatatgtccaattgtgtattactctatatatgtgatgtaagatcaattctaatggagtactaaaaagagaaaagagagtgtattgttatttttagtactttccaatgtaagatttatgtgctacaaattgtgttaagtttaatacatgttaaaaatcgtgttaaatttagtacacaataaatattttttttattacaattttgtaaagtccttttttggcaagttaggtgacaaaata

SEQ ID NO: 388337 - DNA, 608 bp, Cannabis indica
ttactcaatgttgaagcatcattgttagatataaatcgagtatcataatgaaaatgaaaggggagtttcagcgttatggagaggatggaagcatgcagaaggtggcggttagaagatttgtcattcccttagtgtagaagagagaggagcaacagagagtaaaccagagaaaaatatgaaatgaacaaaaaccttactcaatgagaaaaatacaataaaaagctaataaatctcaagaaaaaaatgagagaagaaatatttgggaacaacctaatgtgaatctcaaacctaatatagactcaataagtgacaacccaggtatgaagaaggtgaaaagttggtgagaattttttttaattggtaaattattatacaattactattttgttttaaatactaattaatattaagtgataaaaaaaataacagaaagatagaataataattcgtttaaaaagaatttaaaaagatagattaataatgaaaatttaagagaggaatataaaacaaaactattaatattattatgtaaattgtgtctaagagattattagagcagttacatattttacatattttttattgtaactgtagaggagttacatatt

SEQ ID NO: 388338 - DNA, 911 bp, Cannabis indica
aacgcttggcttaaagaacctttgtgctttgagattgttcgggattgctgggacagtgttggcgattatgaattctcaagtaaatgatcccattgtgctgaaaagttaagtgtgtggggcaaagaggtgactggcaattttaaagtgcgaatcaagcgctgcaaaaaggaaatacaacgactgcttaataaaagagacttggtctccattcaaagacataaagaagttaaagaggaattgtttcggattcttgaccaacgtgaagcgttttggaagcaacgggctaagcaactttggttaaaggaaggggatcaaaatagcaattactttcacaaggcggcatcaactaggaagaggaataatcaaattgtgagcttgaaaaatgagaatggggttcgggtggattgggagcatggcctgtctcaggtaatgtttgattattttacatccctttttcaagcttctaactcatcatgtcctgaagttattgaatgtgtacacaagtcagttccggactatgtccatactgagcttcggcttcctatcactgaggaagaggttaaaaaagcgatcttccaaatgcatcccgacaaaagtccagggcctgacggtatgaccccggctttttaccaaaagtgctggagcattgtgggccgtgatgtggtaagggtggttcagaatttcttttcaactagggaccttctgacggagtgtagcgaggctaatatagtgttgataccgaaaaagaagaatccggaagacatgacccaacttcgccctattgctctttgtaacgtgatctataaaacaattacaaaggttatggtaaatcgattgaagccctttatgaatgctattgtagccgacacacaaagtgctttcataccgggtaggctcatctcagataatat

SEQ ID NO: 388339 - DNA, 1018 bp, Cannabis indica
ttttttttttatttttattacgcccactaatattagctagtggcagactatactctctgttgctaatgtccctccattatttgtggaatattgagcgttgctaatacttccgcgactattgattaaatttattgtagtgtcggtcaaagaaatcctaattgagagaggaaacaaaaagcaaaagaatgtgctaaaaacctcgggcgagagaaagtcggggtacatgttaagtgatcatgtggtttgttcgtaaatttgcttattcaaaattaattttatctagtgtattaattaaaattaattggatatatgcatcttatgaatagtcatttatatttcaatttcgttgtttcaattaactaatttatataacaaagtcttcgttaagaaaaaaaaagccttccaaataatcaaagtcgatcaccatacgaattttaaattatcaaccactgactttgcaaaaataaaattatcaaccacactgaaattaatgtaaattgaaacgtacgggataaggaatgagaaatgtgtgccaatactttttttaatgtattttaatatcgagcattattattaagtaccagtagtgtctaatagcatctagacgtatcgtcttctgattggttagatactctttaaaagttcttatattaatttatatgagattcgatatctaattggaccaatagctatattgacatgtatgagagtgttaaggtactacttaacatttttctttattatcgagcctcatacattttaatttaataaataatatgagaaaccattaaccaattataagtcgttatattagtgtggtgttaggcaccttaagatgttaaatatcaattctcataagcataagtagctcacgagctggacgtccttctattatattaatggtcccgattaagggattttttctataataaactgaaaatggaaaaaatttacatttatgacctacatagagaaaataaacaaaaaaaagaaactaaaagttgttatttacaaaaat

SEQ ID NO: 388340 - DNA, 1400 bp, Cannabis indica
taagttttatttcaataaaaaattaatctagtgtcttatttatactattttagaagatacatgatttattttgttatttaataaaacaacgggttcaattagtaacttttgtaagatacaaggttcaaaataatatttatccattattcattacttaaaaaaacttgaatcctaattttgttttcaaaaaataacaagaaaagaatgaacataaaattaaatattttctatggattattctcgtaaataagcaagtgttacaataattaaaaaaaaaaaagacaaaagttaaaacacaaaatttaggactctaaatgaaattgagttaaaacatttgaccaattttcctttagcgatttatttgctcttagtaaaatgtaaggaaatataagtttgttattttttttataaaatattatttaattttattattatagtataaatcaattatatctatgttatcatattaaaaacctttttttttttcttttattttaattcaaaaccatagtcactagtagtatcatgatagctttttgttttttttgagaaaaacatttataaataaaagatagaattagacctcatggtcgttacaaataatgttctccgatattatagatatttcaactatacaagataagttttgagcatgagttcatttagtcacattataagtcgcaaaattataaaatcttaaaataaaagagaaattaacactcaaaaataaattagaaagtctattacattgatatgtgtaagtaccaatacccaagtggaataggttcctttcagagttttgataactgtctcagagtcgctctcaatcaaaacaaaagaactgttgtctacatagctaacagacaagttgtcgctttgccaataagggaatccaagaagtcaagtatgttggtggccacccacaaaaccattcccaagtggtctctagctaacgccatcacacatatcgtctcactccccaccttaacatcacaaataattttgatccaatcttctaggggtagggaccaaaggagggaaacaacaactcgaggggaggggaacaaacaagagtcataatcttcattgcagtgagtgatagaatcaatatattgtttaatgctactaagattgttattgtgtactttgccattacgggctcaccatattgtatccatcattaatgaagcatgttgtacccaaaagtgttttaatatttatactcgcaagtgtacaaatcgtttcggaatatagtgtttatgtaagtgcaaggttgaacccatgggagttgactaacatcaaaataaacttttttaaacaaagcaaggatattttaacctagttccaaatatttaatgggattttggttttaaaaaataaaataaaagacaagtaactaa

SEQ ID NO: 388341 - DNA, 500 bp, Cannabis indica
ttataaaaagttgagtatgacgttagaagagctcacctcccaacttagcatcttatttgtacatgaattgttattgagtatggtaatacctagcacactaattagaggtgatacttgtaattgaagaataatattatttaaaagttatttaattgatttatataggatatttaattttaggataagttgaatttttttttatttattaataaaaaatactcttacattatatttcattaaaatatacttacttctatgagtgagttacttaatatactatcaccttccacttaactctagcatgtaatttatattaacgtaagagatataatagagacattatttataaaagtgggtatatcttaatgaatataaacataaaagtaaaaattaaaataagtgaaagaaagtgagtatacaatatagttttctccctaatttcactattagtatattacttaagtgtaacaccctaactaacataggcgtattacgtgatt

SEQ ID NO: 388342 - DNA, 1987 bp, Cannabis indica
cgttcaattatagtcgttatgttgctgaaatttcggtagaattaggaatagttactagttattaatttagtatactatacttagttataagttattaattttgtaaatctcgaggcatttgatgcgtaagccacacaaattatattgaaataatattgggcttttttctataatagatatcttagatctaaattttacatttttagtcttggtaaaggaaattaagtaaaaaagaaaatctgaagttttttttttttaaaaatacggattgaacggttcgcatcttcattcccagccataccagagcattctatcgtccattttccttttcaatcgaggcacaatttcaactccaaaaaaaaaaaaaaatccaggctgtgttataacaaggccacaaagtagatctcaacaaccaaatgattaaccctgacaaatccaaaaatcaaaaagtaaactagtaaaaaagaaggaaaacatatatttctacctcaattaacttgaaaatacataaaaataactcaaaaataataattagaattgtattgtacagataatttgatagcaacacagatagagggaaattgacgcttacccagaaataacttggaagaatctaacaaaaaaatacaaagtactaatatttttagcatttttcttcataattaggttgttatttagtgtttgtcaatcaaatgaagcataattcaagggtaaattggttgatttgaagaagttaatgcaattaatttgcaattagacaactacaactacatttgaggtcatttgttatttatattcagaaaagttatttatgtgttgtttttatggattaaatagttgtttagaaatactgatactcataacaaatataaaaatttcaggatatatatggaaacctcttcaagtatttgtacagggaaatagtcattgggatgaaaacatgccatacgttgattatgaatcaagtacagaattaatatcaagagattatatttatgctgaattagtccagataaagttgtaggaactaaactacaatcttgaaacaactcaaatacaagtgaaatactaactgaaggaaggttgccaaccactctaaatcaatgatgatatgcgttttcagtcttacataaagttattaacaaagaaaattgatttcacacgatattcattatgtgtgaacacattcaactacatagatataacagaataacaatcctttttggtagctacccaagcaatgatgtgcaacaatatgacagtggctggaagtgaacatcactcaacacactcaattgtactgcaacctgacaacaacacaataacaacaactaaacaacttttatctgctccaaggaggggatcggtttcaaaagttggtattttagttgatactgacattttgaaatagaataacccgtaaaacaacaagaaaataaccaaaagcaaacccccaacaaagctgaatattgacactactacaaactgtacttttagggtcggttttaaaatgacacgtatacttttagtgtcggttcataaaactgacacatattctacagtgacaaaaagtcaatttttttgtgtcagttctaaactaccactattaagttttagtgtcattttacaaccgacacttaaagtatacatatatgttttttcttttagtgtcagtttaaaactgacaccattgagttttaacatcgtcttataaccgagtcttaaagttttttagtgtcatgttataaactgacacttaaagggggttaacaaataaaaaagatactaaaaccaataaaactaaaaaaactttagaaacatgataaaaatattatttacaataaattaacataaatttatttattacatttatgttttgttattgagcaaatttcatcatcattcaattgtgcaatgtcttacagcaacaatattggctaaactatccaacgaacataaagaatttaaacttgcagaacttgtgaac

SEQ ID NO: 388343 - DNA, 866 bp, Cannabis indica
actaaacactgcttcttcaattttcttaggagaaaaaggctttaccaacgtttcatttatctcatctgtaactacttgtcccactgattgcaccaaatcttcaatattctcaactgtaggcacaattgatgtaaagagggaagtatagtatcttactaaatactgaatatttgttattgaatcaagagagagaatatagcattaaatgtaagatgaaagttaattgtgcgtgttaaccttacttaaggttacataatttcattaaaatacctaataaatgaggttgatatcattgctttttgaacacaataatatctatttatctagtcacaacacataatacattttgtatatatatgtaatgagattgatatgattgctttttgaagagcaattcaatctgatgaacacattaatcaaatcaaaaacaatatattctcaatatttttgcagctaacatgtgttgtgagatcaaaatcaaaactagtgaaaaatcataatcaatttttttgaatcaaacgagaatattattaatttgatcaaaataagtggcaaacaagataaatttaaaagcaagtcatatgaaaatgtatcaaaaatcaataccaaaacaaaattggcttaccctgctaaagcattccaaaataaccaaaaccaaaaccaaaccatcttactacacttctttacttcactaactctgcaacaacaacaaacaattcacatatataaatatatatacatatatacaaacagggccggctttggaaatatataggcccaagacaaattaaattttggggcccttaaaatatataaaaaaaaatatatcaaaaaaagagtgttatgggatttgaacccataacctt

SEQ ID NO: 388344 - DNA, 1905 bp, Cannabis indica
atattgttgagagaaaatagatactatgataattattatacaaatgacattatacaaatcggctgggggattaggttttcgaaatatccaacaatggaacattgcagccttggggagatatgtttgggacatagccagcaagaaggattgtctctttgtcaaatggatccacatggtgtatctgaaagatcaagactggtggagttatattgttccactggattgtagttgggcatggaagaaaatagtagctgtcaagaacatgtttcagcaaaaaaggggcatgaacagctttgtgatgcagagatataaaattaaacaagggtatcaagtgctcttctctgaatatgctaaattgccttggtgtaatcttgtttaagatagactcattatccttaaacatagatttatactttggctagtgttttggaaaaggctaaacacaaaggagatagtaagcaaatacaatcacaacatagattggacatgtttgttgtgtgaaaaggaagatgaatccattgagcacttgttttttcagtgcgaatacagtaggaaatgcctgcaagagatcaagttgttcctgcaatggaacacaccagtagtagagattactaaactgctgcaatcctgccatcaaacgaaaagattttctgcaggaagaaaaagtatggtgaacacagtcattgcaagttttgtgtatcacatatggaaggctagaaatgaagtattgtggaatcaacaagtgtggctcatcaacactacagtgcagaaaactcagcagctaagcaagctgagaatcaaagggctgctgcctaagaaagtcaagcaagaggacacggaatggattttgaggatgtgaagttgtacattgttatacattgttgatagttgattgtaatcaatagtaaattataaagattagtgatgtaaaagtttggtttagagcagtaaaatttcttattcatcaaaaaaaatattacaattaagtgattaaatgtttgcttgatcaattaaaaacaagttgtaattaagctgatattgagatatttttaacccagaaaatgtatattaacattattaatattaaaataacacaaatattacagaaaagtatttaaatgctaggttcgttcattaaaagcaggttgtaattaggttgaaattgagatgttttcttaggttaaaatgaatatatcaactaaaaaacaaaaagaaaattataaaataaaaacaataaccatataaaaacacttgctagaaacaacaatttgtctatgattttcaacataatttgattataaaaataaaaacaactaaacaattagtcctttagctaaaaacaacaaagacataactaaaacaaattctttcatgcgagcatacttgaaaaacaacacaatcagccgatcgcattgtttctcaacatcatatatggaagggattggtttcttatcaatgacgtattcagcaaacgatgccacaaaaaaatcacagtcactggaaaacaacaaaaaaacatcgaaaaacaaaaaaaaaaggaaaatacctagaaaaaaaacaaaacaacacttgaaaataaaaactttaaacaacttacttcaagttttgttgaggtaaaccatcaaccttaaccacatcaaaagggtctaaagaaaccggtttgttatcctttatgaactcatcaaacaaagcaaaaaagtacggcaataacaccaaaaaaggctgacaagctttcatagcgatactatctttcataacagtcgagaaagagttgtacatgtacattcgcatttcctcaacattcaaacgagcaagaatctaatgtgattcagactccatatggatgattaacaaaacatgatcgcacaaatgtcaatgtgcaccacacaaaatctttttacctct

SEQ ID NO: 388345 - DNA, 1639 bp, Cannabis indica
ccaaagaaaagcaaaaaaagtaatgatgaaagatcagagtggtgttggagatggtctgtttgtcaaaggcataaatgaatcaagagattccaagggtggacatttacaagtcaaacaactaagagtaaatcaaaacaaagggcccaactaggggtacaaatcaaagacaaagtccaagcctaaaataatgttactattgtaaaaaggaaggacactataaagatgaatgtatggcactcaaagcaaaattaaacaaagaaaagggaaaagagagaggtgatgcaggtattgccttcgatggttatgagtctcatgaggctttggttgtgacaagtcaagaatctagaaatgattggattcttgacttagggtgttctttccacatgacatcaagaaaggaattgtttagtggatcaattttgttaggggacaacaaagcttgcaaaatctcaagaatgggaaatgtgatgatcagaatgcatgatggtcatgtcagattcatacaagaagtcaggtatgttcctgaactcaagagaaatttactttcagttagtgaacttatatctagagactgcactataaagatagatagttcaataaaattaatgaaagggactaggatagtaatgaagggagatataaagaatggtacttactatctgcaaggtaaaatagttgttggaaaaactaatctggttgttaagaatattgatagggacaatacaagactatggcatttgaggttaggccatgtttgtgagagaggtctctatgaattggagaaacaaggtattctcaaaggaaaacttggaaataaactaggcttatgagaggattatgtgtatggaaagtgcaacaaagcaaaattcactccaggtttacacataacaagggtacattggattatgtacactcacatctttggggtgcttcaaggaataagactataaggggtgcaagctactttatgagtataattgatgattataccagaagagtttgggtttttctactcaagacaaaggatgaagctttcaagatctttgtcacttggaaaaagctaatagaaaaccaaactggtaggaagataaagaagcttagaactggcaatggtttggagtactattcagatcagtttactaagttttgccaagacaatggcatagaaagacacaagacagtgtttaagaccctataatagaatgacattgctgagataatgaatagaactttgcttgaaagagtgtgatgcatgctaacaggtcctggtttagaaaagaagttttggggagaagcactacaaactgcaagctagcccatcaagagatgtccctcaacaactctaaaatttaaaacaccacaagagttttggacatgagaagtaccaaggtatgatcatttgaaattttttggctacacagcatatgctcacattagactagataaactagaaccaagagccatcaaatgcttgattcttggatatctagatggtgttaaggggtacagactatggtatgtagaagatgatacaagaaatgcattattagcagggatactgagttatcaattctcgtggaaacaatacttgttgaaacattgctgggtttgcttcccgaacttgttttcaacaaattca

SEQ ID NO: 388346 - DNA, 2336 bp, Cannabis indica
gccatccagtgaatgcctttgttatcatcttgtgaagttttccaccaaaacttacacattgctctttcaatatcattgctaatctcaagaggaagtaaaaatacattcatagcgtaactagggagcgcttgaacgaccgattttataagaacctcttttcctcctttagacagaaactttccttcccaactctgtaatcttttcttcaccttatctcgtaagaaacccaacactgaagttttgtttctactcattgtactaggtaatcccaagtaaaaactaccttcatcggccacgaccatatggagataattgtaaatctgcatttggataggatgatcggtgttgagactgaagaagatagaggattttgcaaagttgacttgttgacccgaagcactctcgaacttatgaagtaattcttgaattcgttgagcttcctgaagtgttgctttacaataaaggtagctgtcgtcggcaaagagcatatgagatattcttggtgcaccattagcaactttacaaccatgtatccacccatttctttcatacttataaagtagggatgataaaccctctgcacagataatgaacagataaggagacagaggatccccttgccttatgcctctagaagggcatatcagaccaacctcatatgcatcatgaattactttgtacttggctgtcgaaacacaagtcatgattagacgaatccaattttccacaaatcccatctttctcaacattgcttcgagaaaaggccattcaatcctatcatatgccttactcatgtcaagtttaagtgccatgaaacccgtcttcccttttctttttcgtttcaggtagtgaaggacttcaaaagacaccaacacattatcagatattaaacggcccggcacaaaggcactttgagaatcagctattatctcgctcataaacggcttcatccggttggtcatgactttagtgatcactttgtataagacattgcacagagctatcggacgaagatctttcatatgttgcgggtttttcttctttggaattaatataatattggcttccccacatccatcttcaaggacaccatgctcaaaaaaatgctgcaccgttcgagtaacatcccttttgacaatttgccaacatttttgatagaaggcaggggtcatgccatcagggcctggacttttgtctggatgcatttgaaaaacagccttcctcacctcctcttccgaaacaggcttggataactcttcattcgcatgactcggaacaatagccgaaacactatcaattacctcctggcagtgtgtgttagcagtggcaaaaagagaggtataataagaattgatcacattagctagcccattattccaatcaacccaggtaccatgatcatccttaagttgtaagatagtattgtgctgtttacggctactagctgttttatgaaaatacttactatttttgtctccaccttttaaccaaaattgcttagccctttgcttccaaaatgtctcttgctgctcaaggacttcaaacaaccggtttctagcttcagcatattgcttgaccgactcagcatccatcttaggctttaaaatagacatggttgttttgcattgtttgattcgagacttgaaatctccagttatttctttcccccaccgagctagaacctccacacacatgctaatcttacccaaagtactatcattagattgagtatcccaacaatcttgaacaagctgataacacatgggctcagtaagccaagcattctcaaaacgaaagcgacgaggagtacgaaaagagacccttacaatcagctctagaaaaattgggcagtgatccgatgttgaagcttccaaattcgttaaacaagcttctggaaacagagtacgccaagaattagtgaccaaagctcgatcaagacgcacctcgatccattctctagtacctctagctctttcccaagtgaaagggtagcccaagagctccaaatcttccaaaccgcattcatctaaacaactttgaaagccttgtagtaaccattggggatacggacgacccccttttttgtcttcttgactaaggacattgttcaagtctccgattacacaccatggaagagtcgagttccttgttaatgtcttcaaaagagtccatgtttgctctctttcgtttcggttgggctctccataaactcctgttagtctccaccaacttccatcaagtgtagcaacttttatgtcaatatggttctgggaaaaacccaataaagatccctcatctttatttttccaaagaaaagccaagcctccactaagccc

SEQ ID NO: 388347 - DNA, 838 bp, Cannabis indica
ttacactaaaattagaatatatattttacatacatattcatgcatatatatatttgtgtgttcaatgttttggcttagtgctaagacaaaaaaaatatatgagggcttgtttggtaattcgtataatgattgtattgcattaaataataaataacactatgtttggatataacgatttattgtattaattattacgacaattttttaatacaatgtaagttgtattatttaatacataacaaagggttagtattatcttgtattataatatttacaaaggatctagggtcaactccaatctcttcgatctgggacccaaaccagactagaacctggctgcggacttgaatgcggacctagacccaaacgtagatgcaagcttgggacagagacccgacccaaactttgatccagacccaaacccgacttgaagtcggtgttggggtctagtttattaaaaatatattataattttacagaatttattaatacaagtcaatatcaagcatattattgtgttaaataatactaatacaatacaaaataatacaatacaatctaacatagtacagtatatcaaatgaggcttgagagaaaagaaaatgccaataagaaaaaaataacgatatactagaattggattagagcctttaaataagcattagttagaattattaaaataaataaaataagaaaataatcaaaatggttttgatatttttagttcagagatatcttttaaaataaattgatgtagggttagatatttagtttatatactaggtgattgttacgtgccaagccacgtagtgttagttttatttaatattttagtttt

SEQ ID NO: 388348 - DNA, 1248 bp, Cannabis indica
ataagcagtaacatcaagagatcattggttaagcatctgtatcgaccttttggcttcaaaaattcttggagcatatctttcttgcagattttcccaaatttctattacattttttgtacataaaactatcagcaacatcaccagaaatagagtgtaagagccaagaaattaccagatcattgcatcgattccaaatatcatgatcttcatctggttgttgcagctttccattaacaaattgtatcttgttttgagctgaccggacaacaaccatcgatcttctccacgcattgtagttgtcgctgccagtcaaaatcttaggaaccagacttgctgttggatgatctccatttgcaatgtagtatggatttctactctgatcgaaatgtcgaggtgcaagatcagtatcgagcatagagaaaggatttgcattatcagtagagctgtctcgagttgcttgactacgagtactagctccttaatttcctcgccatgaacacaaacaatcaaagaagaagagcatcacacaaatatggtttctctgataccatattacaaaatgaatagaaaaatagagagagagaattggagaggaagagtgtttttctcattagtttgaaaatgaagggattacaactatttatatcaactgggctgatatgatgaagtaacagaaattagttacaacaaactgtacaaacagacacatttaactaactaactaacatagcacatgatcctaactaactcatctattcttattttgatactttctatacacaaacatctatagtttgtatattttgatttcaatatcaattatttttattgacccaaatttgataaataaaacccaccattattgtcgaaaacacttaatttcgaaacctagtcaatttagcactagatatccatcttaacaacttgtacaaagatttactttctacctttcgatttagctaatatagatgttctattatttctggttcaacaccatagaagaggcatgaataactgtgcaaatgccgaatgtgactaacttgcttctcgtttgtagtctatcttgcacagccaaccatgaaataaaactatgctttggcgtgttgtatctgctacatatctctcgacttcatgtcaccttacaatcctcacatagtgctttgtaaccttggttgagacaataattttttgttacaagttgttgaaaatattttgtaagatatcttaaataattaaattataaatatt

SEQ ID NO: 388349 - DNA, 1882 bp, Cannabis indica
atcatgagccaatctaatgaatagtgtaacaaaaaaactatactaaattgcaacaaaatataaatggaatgtattattactgaaatttcttcagattcaccattgtaaaaatttaaatcttgtagactgtaagttcaaatttcattaccatttcaccacatatttatcctgtgtgttttttatttcatcttcattcactcttatttttaatcaaatttctaaattaacaaaaaatacggtcaacaatgttcaactatttttttttttttattattatttaggagacttatgaagtccctcacctcattttgaggtgtgtaacacctctaatgagacaaataagattttaccattataaaattattttgacttcttagactcggttttttaactggatagtacaaatacatttgtcaaataaataattttttattaagtctttccatttacaaaataaaatatataattttatgggtgtattattgtaaatatattttttggtgagatgtattttcactaaagtgatatgtttttagatagatagagaatgtattagtatgttttttttaacgcgatattagtatgttttatataacaacacaattgcatttggttatgtatttcctcattagtcattgtaaggttttttttttttttttttgtagcaagtcattatatggttcttgatgactaataacaatgtaatttcgtttgaataatattaagttgttcttggattgctatataatttaaatgcccataatgaaagtatattacatacatatatttatgcttgtaatatattatcattacatgttaacataatttattgtaatacaccattaatcttttttcttgaaaaaaaaattaaaataaaatgataagcaatgttttattattgtactctcattaaaattctttgacgttaacttgaaatcagaagatgaggaaaaattacaactattatgtacaaaatcaaatcaatttaaacgtaatccacaaacaattagcaatgacaagattagcaattcataaacaagaattagagataaaatatggaagaacagagtaattgcaaccagaaagttaaagcaataaaataataaaatcaacaccaagatatacattggttcaagtcttctagattgatgtgatctatggctctattccagttttggaataccaccgaaattgtctttattgattgagcaagaacatggtacaattacagttgagattgattctctgtttggaatctctcaaagtgtttatctcttatactcttacccaagaatcattttcatctacagaagactcttcatacaaatctcaaacccaatctttatcttttctttgtacctctcaatctcgatcttcaacttcgaagtcaccttgaaaattatgtacgcaagtatacgtagtcatacaagtaataaaatgataagtaagatcgtctccacagggattgcaaacaaaaatatgttgtaaaaccaactaattacaacttaaaagtaaaaagaaataacatgaaaatgagtgagcaatgattcaaaattaaaatgacagtaattaaacttgctaaaattaatgctattgttgctagaaaaatactttcaaaaaagaaagaaaatataatatggtaaaagtggcgtgaatagctaattcatcctatgctggtttttcccagttgctacagcattactttagcattcctgccagtgataacaaaatttttatgcgtttatgagaattttccaaaactcacaatttaagttcaaccatctagatttacatattcctatatcaaaccagattagagaatactaattatgcatcaattcttaagttatgcaaggtaaatgaaatattcctattccactta

SEQ ID NO: 388350 - DNA, 1222 bp, Cannabis indica
tcagccattttcaattccaatattgcggcaaaaatacatatttcatataactttcgattatatttaaatatctaatgaacattcctagatacttgactattaccaagtgacctatccacgtgttgctcttttattggttccactcatttagttttatttaattattttaaaaaaataaaaaatatattttaaaaatcaaacacacactccctctcacccgctcagccttcgtcttcctcttgagcgacacctctgcccaacgtcgatgagtcgtcaaggaaataatcgacggaggagctatcaaggcaccaaaattgcaagcttccgagaatcttaaaggttaaagctggttctccctctcaattctcctctccctccctttctttcccaatattatctctttgtcgcctctactcatatcaactccagtcattatcccctaaacagaaattaattgcatgttcaatataaattcatacacaagattaaaaaaatttgtatacatataaaaagtaatgaagatatggataaaaatataaaacaacatatctcaaatatttttaaggttttcaaccaaatgataccagtgtcccggtaggtgagagtcaaagatattaccagttgtcaattcttttaaaatagacaccattttagtaaccttttattaaattaaaataagaatctaacaatgtaccgataggcgagagtcaaagttattcttattttatgagctccatatcattgtttaggaatttataaatctagccctagtagtcattgtagagtgaatttattggaatttgatttataaatatttatcttttgagatctaacagtacagtgttaagttattcctttgaaagaccatccgtaggggacgaagtcaaagcgtctcgatgttccattagagaaccatgtttggtcaacaatgaagatcgaatgtccttaattaaagctcattgtttaagttaaagtgtatttttattactttattttaatctatttatttaaattactaatttagataaactaaatataaatataaattttgatttaacatttataaaattactaatttaggttgttttgaaaattaataaattatttttcatcattagtatacattttaaataaatattatgaaaattatttaatttaaattggtccaaaattaataaaaaaattaatttttaatttaattttaattttctataattatatt

SEQ ID NO: 388351 - DNA, 720 bp, Cannabis indica
aagatattctcaaaactctcaggagaggcaagctgagggaactgaggagagtctggggaagcagcctgggatatgtggaacatcagacggagatcgcaaaccctctctccaagttcaaaagaaaggaaacccctatggggaacgaggtgaatcaaaccttaataggaatagtagaatgagaagaggagagggataccacgaggcgtacattatctcataatcaatccatgcgaggaggagagaacactcatcgcagcaataatgaaaaaggtataatgcagcatataggaagagtaaggttcgacagcagccacgactgttgtgacctacgggaatatttgaacttgagaaaacctgatcttcatcaacgacttggtccaaaacaaaggaatttactccatttgcgaatggacgagttggagaataagttcgaaagacaacaagtcaaggaacctgaaaggaaatcgggatatgattccgttaaagagtttgaatcagaagcctcaagatcaaaaagaaaagttgattccaaaaggctacccaatgataagaaacagaagaaacacaacaaatatatccctctttatgctgaatataccgagctcaatgaaacttcgaaaaatatctacctcgcacatgtacatgaagtcgtttttagcgagcaaatgttgggttttatgccctaaataaactcatttcaatataatcaaatttacatat

SEQ ID NO: 388352 - DNA, 1546 bp, Cannabis indica
ttcaattggggaagcttcccatgatgtccaggacctcaaaacgattgaaaataacccaagaaaagcgccccaaatagacggatcaaagtcgtctccatccttcgttggccgtgtaccgtcattaatgaagccaaaaatggaaatttttgttcagggccttaaagcttccattcttcacgtcaaaaatgatcctttaggtctcataagcttaaatacaaccttttgtaaacccaaaaataattcaaacacgtttaaattcctgatcgctcaagaacgtgtatgaacatgcatgaaaatggtgaatctcgttttgggtattttcgaactgttttaatatgctcaaactctttcttagaatctcaaaagcccaatgaaaactctcaaagtaaccagaacacgcccaacccgaagacggaaaaaaagataaaaaaattagttctacggtagttcgttacggtcccgccccacacactctctgcctctcactctgtcgcacgacttctgaaccctagaagtcgatctccagcacgttaaaatgagaataaagaggatcgtttgaaccaaatatttgaacgattcatttccacaattttagctattgtaaccgtacgtataaaaaataataaaaataatacgtttacaactataccatataataccattatataataatatttttctattactgtactaaaaataataataataacaaatattattattctatattgtattataaaattaacacataatatcattactattatacccataacaataacattattattgcaaatattaagcattatacacatgccaaaaaaaaattaattagtatatcgtcataaaaaaataatctcatacatatttaaacatataaatatgtaaaatgacaaaaatatgttttcaagttagcggatataacatgataacctttcagtcacaacataaattttttattactaattgtgacttttagtcacaataaaaaattacttgtgattaaaacatagtatttagatacaaattgtcactaatttagttttagtcacaatatgtattgtgactaaaaatatatttagtcataacagattgtggtttttgtaattaatacttttagcctcaaactttttagtcacaatataagaataataattcataaaatttgtgactaaaaataacttttttgtaagtgcaactaagtagaaggtcttcaagtcaagaaagatgttaagtggatccttgtgaaacctctccaaaatgctttcactgtcaatgcaggagatgtactggaggtaataatctcataactactaattagtatttatcatacattatgataggatattttggtaattgaatatatattatgtttggtgcaatcattacaaaaaatttcaatttgagtcacaataaaatttgtgactaaaaataaaaaagtaataactaattataaatcatcattcttatgttgtgactaaaaagtccgtagttaaatgtattagtcaaaaaaaattacaatttattatgactaaatgtgttttta

SEQ ID NO: 388353 - DNA, 1862 bp, Cannabis indica
actatactactaaaatagacggtactctccacacaaacaatgaacatggaaaacctataacataacaaacacaaacaaaaaagtaaaacaaaaaataattatttaaagagtaatttgtgacgtaaatactaaagtttaactctcggttatagattaatacttaaatttaatttttgacggtaataatacttatgatatatttctagatatgcctaagtaactgactgttaagtgtcaagtcattatccatatattatttatctgcaattgatagttaaattttagggcaattactccatatactattttttttctcttcaaatttacagtttgtgttgctccagtagtttttatgtagattttcataaatgtaaaaagactttttaaagtgtaaaaataatgaaaaaaaaaacccataaattttatgctttaaattactcttatagccctgtcttattttgttttttctttaaatagcacatgtagagaatgcaaccaataatgaaacaatcttcatagttcatcattgtgtggtcaaaaaaaataagtgtccaaattctttcactgtttcactctcttcactcaaactagtcacgtaactctacaacacacaccaaacaaaatgtgagcttttgatcattcatatttttcattttgttgatttttttggggttgttttctttctaattttcatgtttggatgagtagggaaaatggttgttgaaggaaaatggattgaagccaatggactctgagcaactcagagaaatatggacacaagatggtagatttcattgctgattactacaaatccattgagaatttcccagttctcagccaagttcaggttttaattcactctctctctctctctctcattttctcatgctaaaaatctcaacttgttcttactagttttttcttttctgtaataatggcagcctgggtatttacatgaactaataccagattctgctccaatacaccctgattctatacaacatgtttttgatggtgaaattctccatttgggtttttccaattttagttttttttttttactttttattatctaaaacatagcagaaatttatgttcaagaatcaatttttattctgacattgcagacatacagaataaaatattacctggggtgactcattggcagagccctaatttctttgcatactatcctgcaaatagcagcattgctggatttattggggagatgcttagttctggtctcagcattgtggggtttagttggattgcttctcctgcagccactgaacttgaatcaattgtccttgattggcttgcaaaaatgttgaaacttcctaaggagtttctttcatcaggtaaaacttaaaagaattaggttgcgtttggttgagggttatgaaatggaacagaatggaaatgttattctatttctttgttcggttacattttaaagtattagaatatcaatattcagatgaaatgacttttccaccattccaatttaagaagaagaagggtaaatatcattttagacattgtgttttgcaaaagttaccgattggaccctctgttttgttaaatgataaaatgtacctgtattttctaaaatggtacaaataggatcctgaactgattttttatcaaaataaaacttaataataatccgatctaaaggagttatgacaaaattgtttaaattttctgtatctgttcgtgttaagaattgtcttcaagttggttataattaaaaaaaaagttgtacaaaaattaaactgagagttctatttttaccattttaaaaatacaggtccattttgtcatttaaaaaatagagagtctaatttgtaacttttgcaaaa

SEQ ID NO: 388354 - DNA, 1563 bp, Cannabis indica
tgacataagtgtggtttagaaaacagactgaagtggagtgtatggtatgagatataattaattgtcaatgagaagaaataatcatacatcttatatatatgttattaaatttctacattatccactctctaccaatttttatattgatttttaagtgaactctattacgagactgttgtaaagtagttcaagattttgttaaagttttttattaaatctatcacttgggaaagagtgaggaaccgcgtacttattttaggataaatatgtgtatgtatatattggaattttttaatataagcttgtcaaaaagatctacatataggagtgccattcaatgaataaaagagtgtcatgtacgtggggttgttttttgttttgagaaatatgtaattattttatacgttatcatttttctctctttgtctcttcaattccctttttcttcttctttgtctttgtttttctattgtaaatttgtaacagtaaatctgaatggtgtttatatatccacccacccaatccttaaaaggcagacgaaactcaactaatttacattcatatattcaatttaattgaggatttgagaattttattccaatgtttattttgaaaattttctttcatttttaattttaggtctataaatttatgtgttatttatattcttaaacctcttccctgaacctttaagactagaatcacaaaaaatatccatttatggatatatctctaaaatacaacatatgaaaaagagatagaaaaaaaatgagaatttgattataggatgggttcattgaaagaggtggtgattgggttcaggtagtggggttggacttatcaatggtttgtgaaaggaaaaaggtcatgataaagttttaaagagagaaatgaaaaactgagaaagaaacgaaacgcaattaatgtgacgcctcctaaataatttggtagatattaaagtttaggtagcatgatttaatacataaataataactgaaattgaaaaattgaatgaaattaaataaaagtcctcaaatttaacaatctcaatagttcacgaaaaatttttaacaacaaaaaaaattcaaaaaacataattttataaatatcaaaatttaaaaagtaaaaatcttaattaacttaaaataaaaattataatgacaatcggtaaaattggtaggaaaaaaaataaagaggggtgagtatatatataaatatatatatatacatatatatccttccatctatcaatcatgacatgatatgatgtaaaattcataattttttctatatttattatgtaatctactatcacttggcaaaacaaaactaactcatcttaagtggatacctttaataaatgagtttggactgaaaaaataattggctttaatcacttttctttttcttttctttagaggtaataatatagctttttcttgcgttgattaattactttacgtacgtactctttgttactttccccagtctttctcttttacacacttacgtgcctacatacatgaatttatatagggaaatttgattttctatacttagaaa

SEQ ID NO: 388355 - DNA, 2026 bp, Cannabis indica
ataattaataatctagtttcatacttaagccctaattattcactaattctaaattaatattaagcggtctttacataaagatttactaaaaggagatatttctaatacctttttctaatcttgtaatttattaaaaataaattaataaaataaactaaatttaaaaattgaatatttatggttaagatattataattaagatatttataatatcatgtataacttatcattcaaacaaaaaaaaaataatattaaaaattcaaattttaaatttgaactattatggttgatatatctataaaatatctagactaattttaaattttattactatttaattagcatctgataattaaaatatgatatttcaattaaataaaagataaaattaccaattaattaaaatatatctaatattatgacatcaaattttatatattaaatgataaataaaattaataaattaatcaatatccaataatctaaaaaacataaaattcaattttaaaccttttaatattcaaattaataataatttattaaaaaattcaatattattaattttgaaatgacatttaggttcaaaattgaaaaatataattcaccacaaatttttggaattttctagtaattactttaattaaaaaaaaaataaccaaaatggtgatgtgcccaaaactaactgttgaacagtctttggaagcgcacgagaagggccttaatgcccaaaaatcatgcgcacgggacaccaacctaaggccgagaaacctcgaccaccgtccaagtgacgcgcactggaaagacgagccacaaaggctcttgcgcacgcggagaggcagcccatgccaagaatattcagctttgcacccctaaatgtggacacaaaccgcccagcaacccaaaaataagtttttgggtccaattttaaattttgtgaaatcagtacatgcttaaattcaaggaactttatttctaaaataaatttaatcactgaatatctaaaattaaattatttttcatagaaatacatgtaatttcacttaaaattcatcaaatcacatacactcaatatgaaaccatctaaatcacattaaaaaaaaatcgtatgaattcatatttgagatgaaagtaaattattaccatagctgtgaggcaagttttttgaacttattttatcaagaccttaatttactaacaagcatgtttgagtaccaccttgaatagtgtgggcttgtactcaactcactaatggaacaatttgagatagaggaaagggtatggaatttttgaaaatgaggaagagaaaatgagagctttttcatgtcaattcactttgaatccgacagagaaattaggttaatgataaaactctcatctctttctttatatagccaacacactaaggttagattatatgagatgagctaaaataaagataattgggcctagacaaagccatggctaaaattcatatagaatgacacatggatttgatttttaccactttattttatttaatgaagcaaataagtcttttccaattttaccatgtatgtcatctaattatttaaatatcaatttttatttaataattacaaataattattaaagagaaatacaatttaaatatatgcattaattagacccgcaaagtgtcttaattaataaataaactattatttcttttcttctcaaatttctccaaacttagtgaaaattttgaaataagatatattttatttttgaattctaattaagatattaaatcaattaattgagtctacaaagcacgattatctcaaataatgtggggacaacggacttatgaaatcaagctcccaataagcagatctgaaatttcttaactaattaattctttctgactccactatagatttggaattgcacttttaatttaataatatagatacgctatgaattattcattgtttcaatctaaatattcaatgatcctttatagacagtttacattgagtaggaataaatttactattttaccctttaa

SEQ ID NO: 388356 - DNA, 888 bp, Cannabis indica
cacatagatacatatccaatacaaaatagcataaaaagatcttagaaacatgtcacaattgatttccctgaactaacaatcaaaattgaaaagcaaatttaaccattggatcttcccactaagctactgaattataaaccataaaccctacaactataattatgtcaaatcatatctaaaaatgaaaatacaaagacatacagagaaagatatttacttggtagcagaggcggactcttcttcaagccaatttcttatgtgcttaacgtttcgcctgaagatggaggcggactgctttacatcggacctgagaagaagcacgacggcgctaacaccagccacggttaggataaagttggtcaaagccattgaatccaactccttgcttctcaatttcaacaatacaaacaaccctaatctcttattcaagggttttacagagcttttccttgttcagaatcggagacgatgactgattttcagacaattctccaatcaactcctcgtctatgggccttaggcccatcgtttcgcagttattatgggcccttctcctcttattacaaagcccaattatttttgttggacggacctattaaaaagttggggtttttacaaaaatattgattttgagcaaaagtttataattttactgccacacgaatttttttacagaaatactatctttttattaaaacaaccataaaacaacaaaacggaacaattaaaaataacagtggaccaactaaaaaataactgtagaacaaaagtaaaattaaatacagtacacagtataaaaaatacacaatattttttaaaagaattttacccacagtaaaaaagaaaaaaagaaaaaatttcatgtaaaaattcttaaaaaatttacat

SEQ ID NO: 388357 - DNA, 892 bp, Cannabis indica
ataataataaagaaataggtgattaggtaagctaatagttctgtcacagtggatatatgtaattgtttcactatttaaaatattaataatattgggaaataaatgtgaggataatacccttacggtaacgtatatatatagtgcttaattgagactcaaataggggaacatgttttgtttcagtagtcattaatcaaaatccaattaatgatatcaagtctcaaatttgggaaacagagggtcatgaggattagatgaaatgttctctagaaatgatatagaggaaatttggccgataataaaaataaatgtaattaaatttaaagtaaagtattataattactggtttttgagatgggaccagatattgggtttatctaccaaaatgaatggttggctctaccaaatgtgtctataatagatgaatcgaccattgaaatggatgtacctcattttcactcgctaaggccattttcaaataatgctaaaatttgtcgcattgagaattaaagagcaaaattaaagaaacttcattatatataatgacttctcttttgggtaatttggctttcatctcacaaattattagacagagtattatatgttgaacaaatactgaaaaatgaaagaagaataatattactaaataatatttttggattgagttgtagactaaatcacttttttttaagacgtttacataactgtttaaaaatatgcaagcagtcaaaaattatcggtcgttcccagattaaaataacccaatcgaaacatcattgtatcgaaactttactgtacgataaagaaccgtaaaaaaaacaatactcaaatactactgctcagaatacttatgaaaaatcgtgtttttgcaaatgtcagttgtatataagaa

SEQ ID NO: 388358 - DNA, 747 bp, Cannabis indica
ttgtaagattagagggttgaactcacattataggtcaacattcaattatatattttatgaagcccaagtgactaagacaacggaagcatagaaacgaaagaaacattaactaaaacatattttcttaagtttctagcaagtaaagaacaaacaaaacttactaataaaccttccatatatattcccatcttcgaaagaaaatattggttgtttgcttctgcttcaacaaggctcaacattttaattgttacacaaaaataaaaataaaaaatcctacaaacatagtatttatcttcttacaggattttgtccaagcaatgggatttgtgctatttagccaagctcaatatataaaagtataagtttccattcctcatcatgaagaagacaaacattcaatttgatccaaaaaaaaatgaaagaaaagaaactgtatctaactatttaacttcaaaatatccaaaaagctatcatatcacaaaattaatcaacaccacgttcactattcataatcatcttccactccccttatcaaaataaaagtatataattatttctttaacgatatatttagactattaatagtcattctcatcaaattattatacacgtttaaacaaaaaataaaagaagtaaagtacgtagaaaaagtaatataagtttttacataccttttctcaatcatcttaaatcgataccttaatcgatatgcttgcacaaaaaattgaaaatatggcctcaacggat

SEQ ID NO: 388359 - DNA, 920 bp, Cannabis indica
aaaaaaaagtttgaccggtttgggcgggttaacctgaccaaaccgttagtcggtttatataattttttttttttaaattggacgggttagacttcaattttagcaacctgcactttagattgggttaaaaaatatgtaggataaattgcccaaaccgaccgacgtacaaccctaccaagaagtatgcagccctgaagagagaggtggattgtctcgacatgatcaagtttattcgagaggccttctacccggtgtaggtatcaaatcctgtgttggtccttaagctaaatgggaagtggagagtcaacattgataatacccacttgagtaaggcttttccaaaagatagcttcatattgccacacatagaccaacttattgacgcgatggctgggcacgaattgttatgcttcatggatgcatattcaggatacaattaaatacccatgaatctagttgacaaagagcatacctccttcactattgattgaggcttatgttgttatcgagttatatcatttggcctcaagaatgcaggagggatgtaccaaaggcttgtaaataagatgttcacataccatatcgatcgtaacatggaagtatatgtcgacgatatgttggtgaaaaccaaaaaagcaaaggatttgatcaaaaatctgaataaaatattcaacaccctcagaaaataccgaatgaagctaaatccacttaatgtgtcttcgaggtgttatctcgaaagtttttagggttcttggtcaatgaaaggggcatagaagtgttacgaaaattatgtttattacgcaagtgtacgcaatcaagtagtatctcacgcaagtgaggtcgaaccacagggaattggattaagtactactgaactatacttatgattctattcggtaaaataataagtttgaaaattt

SEQ ID NO: 388360 - DNA, 1671 bp, Cannabis indica
actatttagaattaacttttggaaaataaagaataatatatcgtatcaaaataagatcaactattaagaaaaaaaaaaaaaaaaaaacaatacaagaatgcaatactaattttttaattaattttcagtattgtaatttattcaaaaattttaaaatttagtagtgtgtctactataattacaatatacacattcatttatataattttttttttaattacagtaacgtaaaaattaagggtgcatttggtaaaaaaaaacatgatgtttttaaactacaaaagtaacgatacaatttttaaattttcaaaaataaaaatgtgtttgataaccatttttgttttttgttttgtttttttatttaaataaattaataagttaccaaaagtatgtttattcataaaaataaatatttaagtcggttcgagaaggttccagcgccggttgtgaatatttgcgttgttaattcatgattaattctaatcacttcgtaaaaaaaagttagaagaaagtgtgaggtgagagaaagtggggaaaataaatattaagagagaaatttaagttcgtttggtatgtcaggtcggggtcaggtgctaagggctaaggagtcgggaatcgggtcacggtctaattacgggtgcgagtgtggatttggggtcgtcaggaacatgattcggtgtaccaaacacccttaaatgaaataaaatacacactataaaaaaaaaattgttcaaaaaattttgaaagtaatttatttttgttttcaaaatttaatttttatgaaatatgtttctaatttaaaaaagataaaaaaaaaatatatgtcataaatttataataagtgttgcctagatttctcccaaaatacgtgacagttcaagatgaagtccagtgacactaggacccacgttactggacgcatcactttaattataatagggatttaacctacgatataggagacgaccaattttctaaaagaatccctctgagagaataagtatagaaaacccagtatttcttacatttaatacttaatatcttgtatcctgtaaggatttacaacttaaaaataatatatagaatcatgaactatgtagatttaactacaaaactacgtaaaaattatttatcttatttattgctattattattaattctataaagattattcctttgatttcatttaatttcatttaaagaacctcattgttgttaatgaaattatgtgttaatagtatcgttttatcgtacctcatcgttccatttaaaatgtaagcctgatgagtattaaatggttgccattgtactattatcagccacctatcagactactatcttcccattttaaacataaaaataagcatttaatgagagactatcataccaccatcgggcacctattggcctatcatcgtccaatttaaacataataaaacataaaaggacaagcatttaaagatggactatcgtaccactactaggcacctatcagcctaccctcgttccattcaacataataaaaaagaatttattgggggtacgatcgaactattattggactatcatcatcctatttcaacacaataaaataagaatttattaggggtacctgttgggttttatgccctaaataaaacttcatttcaatgtaatccattttattcaaca

SEQ ID NO: 388361 - DNA, 1830 bp, Cannabis indica
aaaaaaaaaaattaaaagatcaataagttgaagtacataaaaatttaactttttactttattaaagccacttacattgccatataatattattactcattttaaggcaaaattaattttaaggacaaaatggtaatgttatcaatattcttgaaagacccaaaatggactctaagactcaagaaactcaagacaagactccatgaagatttatttacattttctacaagttcacacttaaaatttctaagtacgaaatttagctcactaacttgtgtgacaaattatttcacaaaaatgatatctaaaatttttaaataattttttaagatcgcatatcatttaattaagagaacaaatttagaatttctgaaattgaataaacgggtaaagagttatgatcgttttaagacggaaaaagtggtattttgccactatgctattttcggctagccatttggcaaacagtgaggtgacccatttgtcctagtaaacggttactcgtttgtgaaatgatgaaacgtcttccccagtatttctctcgaaaaatgcgctaacagctataaacgactactttctttcccaactctatataaactcatttgttccatatttttgagagttgactaagcatttattgagtatacctaacacattgaaagtggttttgagatctccctagcattaaatcctattaaatatttttcacacatttgaaccaaaatttgtatttatttctttttaagtgtacttgctaatcactctaggttcttcattgcattactacatttctagtgtgaatttacttgtaatcattaatacatttccacattgtgttgaggtgatgttgatagtccttggcagatatccgcactttgcagatttgattggatcgtgcagattatattggattgactatttgatgaacacccatacccccgagggtgagataggtaactaccccgtaaagttggttagatagtcacctccctacctccccgagggtaggtcatctacataggggtggtaagttagtctaggggttaactcttacccctacactcttatagtcttggtctcacaccctacctgcatatgaacatgaatagtgaaataattgctctaagtatcaagactataaactaccaagctctgaatataacatgagaatcaagagggagaagtcctaaggatacgaccctggagtaagtgctacccaccatagggtcaatcagccaaactctatcccatgaggtaccccacgtagcttgatacatccaacactctcccagcatcatctaatcacgcatgaagctcaaaggtggttacgaacccatagaaataacaaatattaccgtaagaatcagacctcaaccactcccgaaaattaagagaatagttgagatattttagcactaaggtcgcgtctcctgaagtgagatgcaccaacccttcccctatataaggggtcacacctgacctgggaaggggatccaaaaattatcactcaaagagcagaaaattttccattaattgttacttcttgctttcaagaacttgttattgactttgcaactcaaattagtaaaatacaaggggagtaaactataccaatacttggggctagagctgtacataaactatcgtaaactgtccaacccaaacaacccgcccaaactaaacagagataacccgacgaaaaatgtaaattgaaagacccggcaaaaatataacttgccaaatctttatattggcgggctaaaaataatactgattcgcccaattaacctgaactaacccgaccaacctgattaagaaggttttttttttt

SEQ ID NO: 388362 - DNA, 1141 bp, Cannabis indica
tttttttttttgaaaataacctgccagaatatattaaaattaagtggtatttgtggcaaaattcttttatattttaatatttatacacttaactcttttatttttttttttgttggcaaaacttccttaagtttacttttctttgtaaatttaaggtgtcagttagatattactgttatataccaactgtataaattactactgtatcgatttcaagattttactgttacatatataggtgtatacaatggtcatccaattgatatttaactgatgtgtcaaatttgcaaagaaaaataaacttaagggggttttgccacaagaaaaaaaagataaagggattaagtgtataaaaatcaaaacataaaggggtttcgtcgcaaattgctctaaaactaattaagttagacctcgtggtcattacaaattaagttaaccggtatggaagccagatctaccataccagtgatattaccggcaaacgcctattttgccacattatgggacgcaaagttacaaagtctggaaaaatatatgaaaaacaactagtgaacaggtttgagagcatttcacattgaattacatagttaccaataccctaattgaaagtagttcccttgagtgtgttgatcaccgtctcagagtcactctctatcatcacaaacaaatgcttcctacgggtcgctgattcgagggctaacaaacaggccgcaacttttctaatgaaaggatcaaagaagttgatgttgttgcgagctacccacaaaaccgactccttatgatctcttgccaaggccaccacacacattgagtcgctaccaaccttaacatcgcagttgattttgttccaatcgtctggcggggggaccaaacaggagtcataagaaacaaacaagaggcaaaatctgcgtaataaatagaaatataatcaattcaacgcttaatgttacatatacaattattagtatgaatcttatcgttctgagttttccatatcgtctccactacaattgaagcatacaaaaacaactcttcgacctccactccttttcctttcaagctccatagaaaattaacccagccccacattcatgttgggttttgtgccctaaataaaaccctttacaatctgattagttat

SEQ ID NO: 388363 - DNA, 1970 bp, Cannabis indica
tttttattctgttttttatttttagtattctaagtattttcaataatttaagattttctatacaaatagctaaaaaaataaagaagcctatctcctctttcaaattatctttatgagaaatagtagtcttaatattgaatactattaatttctcatatcaaaatttttaaatatgcactctgctagacgttatttttttctcttcttttgtttaattttgtgttataggctaatttaattgacaaatttttctaaaaaaaattagctattttcttatataaattgagtgctctttttgtttataaattatattgctgaatttgttatttatattgaaattttgatgatgtgacataaaacagttattagcagtatgtagaaagcctctgatttattgtgtcataactgaatacttatcagaaggtttattgagggcatatctacaaactcgagagcaaaactctttccatggatagactcattcaaattgcattggatatagctcgagactagagtatattcactcgcagggtataatccatagagatctcaagcccaaaaacatctttagtgatggagattctcacatgaaaataactggtttcggtatagcctgcaaggaagcatattgtgatgctttaattgatgatcctgggatatatagatggatggcgctagagataataaatcacaaatcatatgggcaaaaagttgatgtttacagcttcggtctcatgttgtgggaatcggtgacagggacaataccctataaagaaatgaaccccatttcaagcagcttttgttgtggtgagcaaggtaggtagtcttttaaatgtttgtttggtaatgtgaaaattttattagtaataatgaaaatgtgtgttttgttgtgttttagaatttgaggcctctgatccctggaaattgttcacctgcaatgaaagctttaattgagcaatgttgttattgcaaccaaaaaagaggcatgagttttggaaaatagtggaagtactagagcaataatttgaggctttatttgcccatgatggaacattgaaacttgtcccaaaccagaatttccatgaccacaaaagggtcttcttcactggattccgaaacttggttttgcttaatctcctaatactgcttatacttctacttctacttctactcttctactagatattccactactactactgctacattacgtgtgtctaaactaaaattcatttgaatatatcatttcattgtcaaatattatgacttgggcttttttagtttgaccaagtcaattttaattaaggaaaaaaagagcatttttttcattgtgttaattccctcctctccctccattgtcacatttaagtgagatttgtgaatgaagaataggttggcattgatattgcttttcaattgccttttatttttagttcaaacattgattttttacatacacaattatactgtacacatgtagagagaggtggtttagaatattatgatgatatgaagaaaaatattttgttatatggataaaaaatgatcacatgttggcctatatgttgtgttgttgtttgttctcttcttttctttatatttctaattttaaaatttttactttatttataatatatatatatatcaaaatattatattttacattatattacttaatcagaaaatttacaaaattagggtcaaattcgtgcaaggcgcgacttagttacctagtatatatataaaagaatgtataaaagaggctagtggcattacacatgagctatcttttctattttttatttttccattttcttatttattaaagatttttattaatttatttaaataaattatcaaatcattcattaatagaatattaatataatgtcttttcagataactcacatcctaaataacaacttataaataaaaaaaatatcatcaaatcattcataaatatgattaat

SEQ ID NO: 388364 - DNA, 862 bp, Cannabis indica
tttttagaaattgtaaattgttttatagttgtaaataatatatataaaataattgtaaaaacctcaactattattgtaaaaaattgtcaggcattattagggtgaagagcacatcacattaacgaagtaacatcttatataatataaataaaagaagagaaaaaagttgcactcatcttcaaaagttttcagctaagaaagataaacaatattagtcaatggcattgccactaaattttcaaagatatataaaaaaagattagagatcatgtcataccacaaaaaagaaattactaattagatattttattttgagctgccatcatcaacccactttaatgaataaataatgtatacataagcatagggatgcctggcttattattaagggtggccccaattaccaactaaaagaagaaagctcaacatgtgggaccataatagtaatgaattttgctacaaaaatgtcagaggggtgagaacactagaggcaacaaaaggttagcagagaaagcaaaagtgaggctatgatagttttcccattcccttttcctcatttcttcatttatttaattaatttctatttatttaattaatacaatttcctcctaattctctctaattgttctcatccctattttacttctaggttagagaataatatgagcaaacttaatatatcttctttctataaagcagaatttcaaaatagtttaaaaaaattaaactgcaacaaacaaatatacttatcatccagtcatagctaccaagtcttaattttagaataaagttttggtaattaaattaattattgaaatctattaaaatacaaatatatccatcgtctttttttttttttttt

SEQ ID NO: 388365 - DNA, 1716 bp, Cannabis indica
aaaaaaaaagtcaaccaacactaacttaagaaaaagaaagaagaaaaaaaaaaagtgccaatgtgacggaagaaaaagaagaaaaaaaaagaagttactgaaaaacacaaagagatataagaaaataaaaaattaaggctttctacaaactttaataaacaaaaaaaaaattgatagggaaagtataaatgtaaatattatattattttataatataataaaagtagattaaaatgtggtaatatatattattatgtgaataatatattaaatgtttggtaaataaattatgtaatataaagttgtaatctacactttgtaatatggagaggagttacagtattaattattttgtaacttcttttggttgatcatattttgtgtaataaaagagatattacacaattgatgatggaattcaaatgttatgaaatgtagttgttacaaactatattaatacttatttatatgagagaaatgagtgttgtgtattttgaattctaagtgatcacctatacattataaaatgagatttttggtgctcatttgagagtgggagatcaagttttctattaagaaaacactttgctataaaaccctaaaagacttgataattcttaaagctatttccatgagagttccttagggtccgtttgctacgcatgattgcattgaattggattagaaaggattagattggatttgactggttaggattatgctgaatccagtaatgtgttcgtttatgagttggattgaatttttattataaaaacaattttaaaaacttaatttaatgaaatttatattttattggtaaaaataatattttttaaaaaataacaaaattaaaaaattaaaaaatatgaattataatttttttaactaattaaattttacaattaacattataaaatatacatatattttttaaaataaatttattattttattaatttttattgtattatctatacgttaaaatatttgttttgaaatgaaaaaaatattaaaatattttttatatgcagaaaaaaaataattattatcatttaataaatttatttacataatttacttgtatatattaataagattatatatatttaagaactcatcccttacaagaaaaaaagtacaaaaagaataaacctatccaaataatgacgttgatgttgggttttgggagaaaagtggtcggtgaggtttatcccacttaatcccatatatattattgggactatttattccacagaagatggattattttttagtctaaagattatttatctagtcaactatcaccaccaatgtaacgtccctgcttcaagcttcttcattgggcccttgcacccacggaataattggctcttatatacgagtacgtcactctggctgcttcatggactgacgactgactctacagaccaacacgagtgttttctgcgtgctttgtcctcactcgcacgcttcatgggaaaaattcccaggaggtcacccatcctaaaattgccccaagtgaagcacgcttaattatgaagttctttcgtgatgggctaccaaaaaataagatgcaccttgttgatataggtagtatcaatcaatccatttaagctctattcaactgtgtagtcacatacctacacagtctcagaatcatcacacatgaccttcctcaggcgatgtgagattgcacagcttacccggtatttcccc

SEQ ID NO: 388366 - DNA, 1088 bp, Cannabis indica
gagagagagagagaagaactaggatttacagtatttttcttttaactgttactgtaaatataaattttattttaatacatttagtcacaaagaaattaagtaatggttgtgactaatcgagccttcaaaataaatagttgtggctaaataaaagttattagtgataacttaagatattagtaactaaataataattagttacagattttagtcatgaaattttatagttgtggctaaatatatttttagtcacaatatttaattgtgaccttatacaaattataaaatttaaaaatttaaaaatttaaaaattattacaaataatttattgtgattaagttgtgacaaaaacacatatttagtcacaaattatttttattatgactaaaaagttgggactaaaactctaattttttgtagtggtagttgttaaaattattgttgtttttcaattaggttgggtcgatcctctcatcaataacatatacataagtgaaaacaaattacaagatattgtatattcacactatagtcacaataaaatttataagtaaaattaaaaaaaaatgtgactaattataaattattattactacgttgtgattataatatctgtgactaaaaatattattcacaaaaattataatttattgtaactataaaattaaattagtggtaaattgtatttaaatactaaaattaaattaacgaagaatagaattgacagttcgatggagtagtgaccgacaaaccggaacgtgtgtgggacacaaagggtaatgaaagtgatgataattaatgagttatgagttgcaatgcacatgtactccaaccccattttaaattttgtcgactactatatacataagtttagtttggcatcttttcacatcatatatatatagggcaagactatggtaggacctagcaagagtttcctaccggtagggtactttttttaaccattgattttagatcgtgtggttattatgatgtaaggtatatactcttacgataagactgcttgtatacaattaaaactttatacatattataataatataaaaatgatatttatttattaaaaa

SEQ ID NO: 388367 - DNA, 1275 bp, Cannabis indica
gtcagaaatccataatagagtctaaccacaacgaccacgataactgttacagagattgatgatgtttttgattgatttataatttgtttagtatttggtctatgggaaaaacctacatgtaattatatgtgttgatttttaatttttttgttccctcactcagtcactcatcggaaacaataacatcaaaggttctatttttttaatttttttctatctgaatgagctccttttatgacagcaatgccttttgtattgaatttaatattttatttttcatataaatctctgtgttttgagtgtttgttttttttatatactattattattatatcaataatatgtattcatgcttactaaataaatttaacaataaatattaattttaaaatgttaaactatttgattttaatccaatggcaaataataaaagacaaattttaaattttttatatttaatttagctacttaattaaaaaaatatattaaatattagtagttttatattatatatattgatcagagttcaattattcataccaaatttcactacctcagtgagtatatatttttcctttaattgaaactatgtttcttttgtttatatcttggatattggtatatttactatgtatttttttctttttttgctatttgttaagtagtaataaaaaaatttctcgtaataataactttatttttgaactgtagatgatctcatgttaaaggatcaaacaccaaaagagatgaatatagacactgctgattcatgcattatggttttttttgtaagacttattgttgacatcattttagccagcgacaatattgacatcacttttagttaacgacgcttagtcaattaaagtgattagaacaaatgataattgttaaatgaaattaagcaataagaacacagatatttatagaagctcaaccttgtgattgtggaaatagcctactctcctttttgttgtattacttgtgagaaaagaagctagaagtttttgatctctcgaaagcttaaaatttttacagcataatagctctcttgaaccattgattttggatccctcaatattgaaatggctccaatatttatacaaaagaattttattaattaggtttcccaaaacaaacaagaaatcaaatgggaacatttttactttcataaaacagataaaactacaagggaaactaggaaggtctcctcttatttttggggttttttttacacaaaatgacaaatttgacaaattatttacatttttaatg

SEQ ID NO: 388368 - DNA, 819 bp, Cannabis indica
ggtctatgccgattaggattgaaaatggggagttgagtgttgacctagaagagttggaactaacagagttagatattatacttgggatggattttctgtccatgtattcagccagcattgactgtaaacggaagatggtaactttcaagctggagggcgaagatccattcgtttatgttaggtctgttcaaggttctcgaatcccaattatctcagttttaaaggctgaggatttattacatagtggatgtgtagaatttttaccggttatcattgactccagcagacatgaaacatttaggcttaaggatgttagagttgtaaaagactttcttgatgtatttctagaggtgttaccaggatgaccgccacagcgagagatatattttataatttatctggcactcggtgtagaacctatttctaaggcaccatataggatggctccagcggaacttaaagagctaaaaagcaaattcaagggatgtttgatttaggatttactcgacccagtgtatcgccctagggagctccagttttgtttgtgaaaaagaaggatggatccctttgaatgtgtattgattatcgtgaattaaataagttgatgatcaaaaacaattatccattgcctaagattaatgatttgttcgatcaattccaagataaaactgtgtcctctaagattgacttgcattcgggttatcatgagttgagaatttgggaagaaggcattcaaaagattgcctttaggtatggtcattatgagtttttagtgaagtcgtttgggttaacgaatgctccagcgacctttatggatct

SEQ ID NO: 388369 - DNA, 1317 bp, Cannabis indica
gaaatatacaagaaaatagaagagtgaggaaaggacacgtgtatttaatcagcagctacagcagacaccgacacaggattgtattatgatttattaactggcacgtggctgtcccttccgcgttgtttctaattttagtttttttgatagattttgtttcaaattttagtagtcttttgtactctttttttgtttcctataatttttgttgagagagttttttttcctataatttgatagaaattcaatttagaaaaaaaaaagcaagcaaataagtgagagagaaagaaaaagtaatataaactaaaatagtataaaactataaattagacatttttgttaaaagaaaaaaaaaatgaaaaaaattaatgaaatctaaataaaaagtaaaatctaccaaaggattttttttatgtatctacagtaagtacatattaattacaatacaatataaattagtagaatacaatatatataacggctttatttattttttattttttaaaaaagaatacaataataaatacaaaattaaaataattaaatagtcatattaatatcgatagtcgtttctatatatatttataattatatattaatgcaatactactaattataagacctactatatatattatactagtaaagaacactcgtttttcactgcagatatttaaaaaattttaaattatttatataaaataaattatagtttttatttattaacaaccaaataataaattgtatcaaattttaatttaatttttcatataattttgtatgaaaaattatgtatgtacaaataaaccgatccaattcgtatttaccaaatctcattattataatggaagctagacacgacctgtataatatgatgttaggcttgacccctcaaattgttataaaaattgctaaaaatttatagaaaacttatcatataatttcaaaatcgttctcatcaccgtatatcacttgtagtcaacattacattcaagagtgttattatcatatctcacctgtataccatgatgataggcttgacccctaatatatttgttgtatataaaatatatgattcaaaattaataataataataataataataataataataataataataataataatatagtgtttcttttaaataataataataagggatattggcgtctaagccacctgaactttacgatttgtaacatttaaccacaaaaatcgaattttgggcaactaaactacctaaaccctcgattccgttttgctttccacacctccgtccaaaaatcacagttaagtgccacggtggactgtcc

SEQ ID NO: 388370 - DNA, 923 bp, Cannabis indica
gaatttcttataaagaattgttataatattattttaaatttgtgttaatgacttgttaataattagtaattaacaacttgaaaattagtatctatggatcaattttattatactacttttcatggtacatactaggttatacattttatcttagagaactcacatcaaatgttttaaaattaaaaacctctagaatatttaaagagctaaactaaaaatatactacattagatgctctaaattttttctctatttcaaagcctctttaaaattcattattcatgttttatattgatagaatattattcattgctctaaacatattttattacttatttaaggttttaatttaattttttatatgggaacatgcgtaaatattaatattacatcttttaaatgaattaaatactattttggactttgtgttttgtaaaagttatcgattggaccctctattttgttaaatgacaaaatggaccttgtattttccaaaatggtaaaaataggactctgagcttaatttttgacaactttttttttaatataaccaacttgaagacaattcttaacacgaacagatacagaaaatataaacagttttgtcataaaacctttagatcggattattattaaattttattttgataaaaaatcagttcggggtcttattcggaccattttgaaaaatacaggggccattttattatataacaatacagaggtccaattgtaacttttgcaaaacacaggatccgaaatagtatttaccctaaaatatattaaaatttgaaagaaaaaaagtaaatttagataatatgttttaaagaagttgatgtattatgtaatatatatttaaatagttaaactgatgctatatgtcgaccctgagttgaaatgagccataggcaaaaaaaaaaaaa

SEQ ID NO: 388371 - DNA, 1254 bp, Cannabis indica
atacactacacttaaatgaccaagaacaactttaaatctacgttgaatctgttaaaatttgaagagaattatgaatagatttatttatttattttagtataatgctatatatgaatatgtaattattccatcaagcatatatataaatcaaatttcagaaattgcaaattatttttataattaaattcgagatcaatatatgagcattattaatattttcagacttaaaataatttatgcgggtttgagattcttatttttctgatccgttgagttctagtattaatgaagcttttgtgttttgtttttacatttagtttctgcttcatatcactggcacattaataatagttttctggtgttctagcgttgctcttgtacatctcatggtaggtttgttgttgctcttcgttttagcccgtgtacagtataaaagagaatataaaaacaagacgatataaaagtattttttcccagtataaatgtatttcttagcctattatacaatgtatacctaactttcccttaaaatatttatcagaataaacccactgtaaccataaggatatgtttggtgggagagagggagagtaggatggatggagagtttagagaggatgtggagtaagagagatgaagatgattgttaatctcttttatattgtttggtattaggtgtgaggtgagaagtattgagaaaaaattgattagtaaaattacaaatttgtcattttaaaaataaaattttattatttttttaaagatagttattgcattttgcaaaatgtattttgtctttttctacaatcctcccaaatttagagagattaaattttaaatgtttgaacggagaatgtatccctctatctctcctctccctcttgccaaacaagtaatttagactcgccttccatcactctccctctatccctctccatccacccatcttttcctcctaccaaacatagtgtaagaaaatgaccttcaacaataatattattattggtattttcggctaatcttattcaaaagaagagactcatctcaacaagacagcttgtcttacaaaattttcgaccgttgcaaacaatttgcatgtggccccaatacgctccgctcacgtagtcaaaatttaatttaatttttattcacgcatatagtttttgtttttatttagccaaaatagttttcagaaatatcaaattcccaaaataccctcacacttttcatacgaccctccgcccgctaaaggcg

SEQ ID NO: 388372 - DNA, 956 bp, Cannabis indica
aaaataattttttacttgttagttgtaaatatgttattggggttctgatagtgtggcgttttgatggagcataacttaagcatatttctcaggtaaacataaagagaagtagaagaagaaaacatacaatccatgctcttatatgaaagattgtttaacataagtacttaggaaggaggactacaaagacttattatatacaaaattgagataataccaaatattattttcattttcatttactgtttttgcttgttgacatctttttttgtttcatttaagaaaattaatttgaattatgttgtgattttttttggggagaaagtgaactgtgaaatgttagctttcacgatggatcatcctagaggcaaaagttaacatttatattagaataacatcaaaataaatataataattgttggaactttgtgaaatattacaaaattgaagtgtgggagtaggagtcccatatgggataaacacttcatttgaagtgtataattagtgcaagtttgagatatgggtttgggcctcaaggggtatccagttttgtgtgtatgggtgaggactcacacatcggaccaccacatgcgtgcactgccgccgtccgatcgtctcgagccggcgtgtgtggtgtcaccatttatttattaaattattatttaattaattaaaacaatttttttaagtttgattaatcagtaaatagaggcttcttaagtttttgtatcgatcccatgttctaacgttcccttcaccacacgctcgtgctgccgtcgtccgaccgtttcgagttggcgggtgtggtgttaccatttatttattaaattattctttaattaattaaaacaattttttttttatgtttgattaatcagtaaacataggctttttgattttttgtatcgattccatgttccaacgttcccttccagtaacgtctttcttcctgttac

SEQ ID NO: 388373 - DNA, 534 bp, Cannabis indica
ttttcataaatgcaatttttgcgtcagttgtccactggcgcaagttagcatcagtacaaagctgacgcaaattagtgccaaaaccaacgcaaactcagcgtctattctcaagcgacgcaaatttttccgattaattttttgcgtcagtcttgtaattttaatgacgttaaaagcgacgagaaaactaatttttgtagtagtgcatttacaagcacaagcttactaaataagattgacttgtggactaatgctagttaacgccccaaccgtgttaaaactatttttctcgttttatactttcttttaggggtattcattggaccacatccatgatttttaggcatatccagatccgattcatatatatatttgatgttagattttaccatccgatccgatccaattagtttcagttatccaatcgatccagcatccattgaatgttggattggatcggttctatccattggatgtattttatatatatatagatatatttattagtttaatttgagtttattcaatattttagac

SEQ ID NO: 388374 - DNA, 601 bp, Cannabis indica
attatttcgtaaaaataacaaagaaggggtttttttttcgaatggatcaaaaagtatatttaaaaccacaaacacacaataatatatattatcaagtattagcaaaacaacaaacacaccttattatatttttttgtgatacatgtggttgcatcctaatttgatacccaaacccaataataaagttgtaataatactcacgtaatattaatgacacccaaatccaatacaataaagtagtattattttaagggaaaacctcaatgagagatctaaatccaacaattggatttatcttgtagtgactaaatccagcagccaagaagaggttttcccattccttttcattacgttctttgccagtgaggttgaccatcattaacatatcaaagcagagttgagtctcaactgatgactttggctcctcatcatcatcaataaccatatctatcactatcactttccctcctttatctttgctccaaatagcttctcggcatttctttaatataatcacaacctcttcatcgttccagtcatgcagagtccactaaaaatataaaataaaaagtatgttccattaattatgccatgtatatag

SEQ ID NO: 388375 - DNA, 1678 bp, Cannabis indica
cgtttagacgccttataataatttagcaaaaatcaagaaaattcaagaatctaataacatagttttcaactggatctttctctgtccgatggtgatttaacgtcataaaaagtagttcaacttgatatgatgttatcatgccaagagcaagagtactcacctctgtcagttttccctcatctagtacatcaaagacactgagaagtagtttttcatacagcctaacatttaggtgataaccatctgcccaatgacatacttctccagttaaatcacccctagcaggtctctcagctagaggaattgctatctctctgagagatcttaaacaatctgttcgctggagttctccggtagaagagggattaaactgaaatcaaagaaacagagattaaaaaaaggctaattcaacaaaaaaatttaaaaaaaaaacagagacttaaaaaaatccactaaaacacacctcagattcttcaatcttcgccaaaaggatcctcatctcacttgccttgcgtccagattccccaaaaccaacaacagggaaattaataagcccctcctccagcatgtttagctgcatcaaaataaaaatactaaagttgagtatatgtttacatccccaattccacggaaacttcaaggccactacttggcaaggccaaataaaggggaaacaacgaaaataacacacctgccttttttgccaccttatatatgccttcttgtcagaaaattctgtcctagaaatacaacataaaagctccagaggtactagtagggcatccattctctttcccacttttcctgaaagagcgttaagcagcccttgtcttgtcctgatgtccattgcctcagatatctgcagtcaaacaaaaaaccccatgaaatcccaaatatatacatgtgtgaacacacatcaatactagaataagaaagcaccccaaactccatataaaagatatatatttgtataaatactaaatgcttttcttgtacctccatctggacacgcattgtctctaataaaccaaccaatccaggtgcttgtagagattgactcgaaatgctttcagttctactacgccctagcttcctcattagcttggacctcttgtctttctttttttcttttgatggtacaatgagacccctgtttgcaagtttaactgaggataaaaaattcaagaatatagaagaaaaaactagaccaaagctacgcatacagaagaattcaatggcattctaagtgacagtgacaaaaatgctgtttagatgatttataaaaacttttgattttgaatggttttaaaagttttgcattaatttaaaattacacttgtctttctgttctattattgctcatgaaaaatacacaagataaaatctactccagaaacattatcttgtatttgaaaacaactctataatgaaaaaaataatactgaaccccattttcttcaaacattacaaatcaacaagatggcataaaaagtttatttttttgcatcatctaaaaacattgaatgtactgtctttgtttctaatatataaatatatattgaaatgtaataaagtgaaggaagaaccgaagaagtatgacctcacaaaacaaagcaagaacttttatgcaaaatagttaaataaaatagataaaagggaaattattttaaaaacaaaa

SEQ ID NO: 388376 - DNA, 828 bp, Cannabis indica
taatagtgagtcttttttatatatacaattattaaaaactttttaatgttttgacatgtgttatttacttttatgtatcttaagatttttttaattaattttatgactttcagcaaaacaaataaatttatagaaaaaaataaataaatactgaagaaaagatagctcaaagatatttttaagaggcactaaagcctacacccaacaaaataagtttgaaacagaaatggtgtgactgtctatgagttgtggggtggattgggattccgatttttcctcaaagaaactagagtgttgtgagttgcggagtgggttgtaattctgttttctccacaactagagcagtgtgagttgcaattctaatttcatcacaactagagtggtatgaatgcaaggtgggttgtaatttctagtttctctataaccaaagtagtgtgagttgcagatcaggatgtgattctagtttttccacaaatagaatggttgtagtgtaggttgtgattatggcttctttgcaacaatagtcacgtgagttgttgggtgggttgcgattctggtttctttataacgaaagtgttgtgagttgtggtgtaggttggaattctggtttcttcacaactagaacgtccgtagggtggcttgcgattctagtttctctacagtgagagtggtgtgaattgtggtgtgggttgcgatttggtttccctacaacaagagtggtgtgagttgtcgagtggattacaaacttatttggaactttgagaattccaagtggtttaccatcaagagtagctattggttggctcgtcgtaacttggctttgactcg

SEQ ID NO: 388377 - DNA, 1709 bp, Cannabis indica
taaaagtgaaaaaaatgtgactatttataaatcaccatttctatgttgtgactaaaaggtctgtggctaaagatattagtcacaaaaattacaatttattgtgattaaatgtatttttagtcacactacttgttgtgactaaaactaaattagtgataacttgcaaataaatagtatgttttagtcacaagtaacattttgttgtgagtaaaagtcacatttagtcacaaaaaaattatgttgtaactaaaaagttgtcactaaaagtaacagttttttgtagtgatgaatagtaaataagatcctggtaaaacaagttttcccataaatccatgctgcacgcgcccattgatgaaagtaatcttcacgagccaaagaaataatgccaaatgttgcttcatttcaaaaaactagaatttttcaaccacaaatagtctacctagaattcaataaggtttccacctgtttaagcatccacctgtgatctagccatttggaaggagaatgcaagcctttgaaaccctttgagttttgaaagcttagggagtaaatgttattcacattttcggttgaggacacatgaaattctcagatgattcaatataattacagcatgcccaactgaaggcccaatcaaggtaatggaccagatccattaccaaagtcaactcttccagatgctagacatactttttttccagaaaagatggttctccagcacaatatgcgtccggataacgtcaagaagagtgcccagatgagtagtaaaagggcacttggatatgtaactatgtatcgcattcattaattatcagatcccacaatatcaaaacttaattcgaaagatcgtgtccaagaatcatatttttgaatattgaaataaagtatgtcaataatcaagcatttatgtatctttaatcctgaaaagtaggacacaatttgacaactatgaacatgatgtggcatccacattagtgtataatcaatgcctcatgagccgtgcttcgttaaatgagcccaaagtcaatgtattatctgaatttaccccatcagtgggcaatgggtacatactagaaccctagcactataaatagaagaaaactcattcatgtaaaggggttggaatctcattacttgagtgctaaggcaaattctagaatccacttgtgtaaatcaataagactttttcagtcttatcataatgatattgactcatgaactagatgtcattaatctttgaaccacataaaaactctcatttcattattcgtttattatatttcattaacttcattatattttattagtttttaaaaatctcgataaacaataaaaaaataggtatactaggttcaatttttttttatatttatttatttattaattataatataaattaaatttgaaaaaatattaaaaataaagagaaaacagataaagatttttggggttttagacggccacctcactacactttaatcctaaataattttatttttatttgtttttaaattagtatagattgaatttaagaaaatattaaaaaaaaaaaactagataaatatatttggagatatttaaactaccacctcaccccctagatatagttattaatttaaaatctcgtactataatagtgtaattttgtctaggataaaatgatctgcagcccaaaatactatgagcatgtttggcatgcatactaaaaa

SEQ ID NO: 388378 - DNA, 1309 bp, Cannabis indica
caatgaagattaatggtgttccccgagttttgcacgcttgagggactctggtgcaaaagctgactcttgatttttaacgtgattaatataccaatttgggcactattcctagttccagcgagatgtggccctccagaattaaccgaaatgtcctcaccctcaattgagggaggttgtacaccctagttttgattctggttgttgggctaattttatttatttcccttgtttctcacgtactgcttgagatatccttgagaaatgaatccttcaatctcgtccttcaattggcgacattctttggtagtatgtccaatatccctatggaatcggtaatatttatttggatctcacttacttcttgagttcctcattggttcgagctttcgaaaagtgatccgattctcatttgtgagaaaaatattttcatgagtctcattaaattctgtataaatagaatatatgggaatatgcttcttgtgtttcttttgtgtcttcttatcctttgatgaatcttttgattaatcttttattttttttatttgacccattctggatcacatttcccactttcattgttacagtatttgcagtaacggtacttgaggttgggtttatctcccgagctccatttgaccatcttcatttaattgcatgcttcctcttttcacatgcacaaagattaatgccctgtcattgaactcattactcaatctaactgggtgaccttgtagatcatttgcatagttcgcctcccgcgcttgacaacttagtggttataccttcttggagcacttttttagagtgttatcatttaagtttcttacttttgatgttgctgtgctaaaacgactcatataagcctttagtgactctcctggttattgtttggtatttgttagcgatgatgtttttggccttctgacaatcgcgacctagaatttctttttaaactctttggatagctgctctcatgaggtaatggaatggttcgtaaatttatcaaaccacctaatcactgccctagttaaggatgttgggatcaatatgcaccacaagttgttggagacgttacttgctcacattttagtgttgaagttattcaaatgtgcaactgggtcggttatttcgtcatattgcgcgacgtagggattctaaaatgctttgggaatcgggaattgagtgtgtcaggatgaaaaggttatgtctgctcattagaatcataccctgatagtttcccatattctccatcttgatatcgtgtgaacttattctctaacaaaattaccctcaattgaataggatccat

SEQ ID NO: 388379 - DNA, 927 bp, Cannabis indica
aaaaaaaaaaaactacttaaaaatctttgtctgaagataattttcatctcatctctttttagaactaggctcaattccctctctaaagaaattaaagactttacattactctccctaaactcctgggttgtgagatcttagtgatctaacccaataaatgttgtttggagaaactatgagccatttacatttttattattgtacaactcagcccctttgtacaagaatataattgtattgggtttattctattttgatatttttgaatacaaaataataaagtttaatgttgaaaagattaatttttaaaaatattaaattattttgtgttaagcgtgtcaattcgttttttgacttgtgtttaattttctctaaccctaatccaatccgtaaaaaatcgtgtcgtgttcgtgttgacccactgtgatctgttttgctattattaaagctagagttgtagagaaaaatgatggatttaagttctgttagaaaacttatatatatttatgtatacatagtttgttatatatataataaaaattaaatgttaaaaagaaaattaaatttaaaatcttttaacttaatattgaatcaataaatatatacttttatataattatattattattaataattttttattttagtattttataaaaaaaaaaacgtatcaaattcgtgttaagcgtgtcgtatcgtgtttgacctgtttttatttcgtgtcaagtcgtgttgatccgttttcgacctgcgtctaattttttttgatcctaacctgtaaaattcgtgtcgagttcgtgtatcatgtcaaaacctgttttaaaacctattaaatgattatatttatatatattatatataactaaaagggtgactattcaatggttacatttttattgtaaccatatggttacatttttttttgac

SEQ ID NO: 388380 - DNA, 874 bp, Cannabis indica
tgaatatgagagctttatataatgataaagttcttttgcttaaggataggctcaatgtgaatacatgtgtaattgtttttttgatacaaaactcaatttgagttgtctagatagataattgctttgtgttttcattcattgtaattttctttaattgaattatgttttttaaggacaagcatgagaaagttgtcaaaggcaatttagcttttgcaagatgtcgatcaattcgaaagaacaatgacaatccttcaagcgggttgttaaacaattttttctattcactgaccatttgtaaaggctttatgacccgtcttgttgttcgtaaaaaatttgttcgtaaaaaatttattgtcgactcatcatgtaacacttactaatttataatattgctttcaagaaacatatttatgttactaaattctttatagtgttttctattaaattctagttgtacaatgaatagtggattgcaatctctaacccacattatctctttattatgcattaagccgctttgtttgggctctctccactccttccttactctctaattgtgcgattgagttttaatagaaatgatatcttgtcataaaatgattgaattagattaaaaaaaaaagaacatttagttttctatttcaatttaaatttaaatttttaagatgtctttttctcatattagttttaatttaattattgatgttcatgaattaaattagcatatactttagcttaaaagaaactactcttctcatatcttatgggtaactctatttcaatgtgtattttttaaataataataataataataataataataataataataataataataaataagatgtatttaattttgactaattttcaa

SEQ ID NO: 388381 - DNA, 931 bp, Cannabis indica
taaaattttctaaaaatttatgtaatgatcccttctagtaaacgcatatgatgaacatgatgagtactaaaatatttaaaaatgtgtacaattaaatatatatatatgttataacttacaatgtggtggtagatgagtttgagaatattttggggcattcttgtttgtagaaagggacaatatctttggcagcaaataaaggacgacccttatcattaggtgttgatatcatcgtggtaataagaccaccagtacttgttcctgacatcacatcaaaatagtctgcaatccttgcattcttgttatcatccagttcctataatataattcattataaatctactatatatatatatatatatatagacaaattaatgttatgttaattatgttttacgtaccttgagtttggattcaagataatcaagaaagaccccaggaatgatccctctaactcctcctccatcaatactaagaatagtagttgtatcaccttcaactccaatattataataattaaaatcactcatcactattaattattatttgttatttgttattcaaaaccaaacttagaacgatatacaataaaatagagaatatgaaaaactttatacgtaattaattaatgcatgagaactatacgtaatgcatagtagattattgctcttcatgcaatgcatatgtttatatatgtaatttacttttatgccctctgtttggaagaaactaatataatagatttattgtgacaaaatttgctcaatataaaagtgtctaatgacgtgtatatatataatgaaaaccacacaagaactaggccttgtttggtaacacttttgtttttaatttttaatcacaaaatgaaggtaaaattttgttttttaaaaatttgtttttaaaaacaaaaatgcgttctataaccactttt

SEQ ID NO: 388382 - DNA, 765 bp, Cannabis indica
ggctggttttcttccattcccttaagcactttgccctaattatgatatatattaattatcaatacatatatatactcatattatatataaatatacataatatatcattatatatataattaaccacacacaaggttcgccacaaaactccatctttccactttgtgatgatgaaattctcaacagcctatagttcttaatataatctttttattaattattatttttatttatatatattatatatgtattttttctttttgctatattactttatatatattaatattagaggacaccactaatttggaatatataccaaaaacatgtctcttcactttgtgaaacgatcgatcatcgatcattgactgagtattattggctatatatatataataataatttaataatgataataaagtggtgtcatacatatcctaatagaaacaaatataaatatatattatatataaatttataatatattatatagatttgattgcatgcatgccacacgttacaatttgatttaattaggtttagtattattctagagagttgttgtgtttgtacatatgaattcatgttcataagaccatgaaatagtactaatatatttttataactttcattagatatataatgatcgaaaagacaccatatatataatcaaggccgtcttaagatgctgagagacttagagcgaaatttgaaataaggtattttcttttaataaaaattaaaaataaattttaattaaatttt

SEQ ID NO: 388383 - DNA, 884 bp, Cannabis indica
gggtgttgggacaaaggacctcagacaagttgaaatcatcgacagattcactctccagaatcaacttggctctcctgcagttgaccgtcgttactaggtcacccacattaagtcttccttcttgtagctggcaaacacctgcgcgtgattcaagaagagttgggtgggggcaatacgatgcatggggggatcctgacctagtccgtagatctaaacactcaaaggccttgaacccaaaagagaagaaaaacctatggcggtattccttgacattcttctaaaaattaaaaggtatcggcgtctcattggttggatgggcttgtagtttataaaaaccatatttaaacttatccccctttttgaggattgaaagtagttcgtaaaaatataaaatttcagcggggctgggtgcagcccagcccctggctatataaaaataaaaaggcctgataacaggcggtaagcttggggaatcaattggtatggtgagagtccaacaaagacaagaatattgatgaagtcgtcttggaggggtagcatggccctggacataaggtgagtttgactccaggccctgaagccattatagttatggtttggtgtctcctcgtcccttgggagacggtggttcactccagaactggacggcttactccaagtacggtgataatcttctccaattgatgggggcaggtcaacaccgaatagagtttgtcagcctcccaaccattggaaaggcacgcaaacttcttgtaaatgatcgagcccttcataacctcctccaaggtgggcaacttctttggcccattctaagaagattttactccggtggctacgggggtggacatagcgccatcctgttggaatttattttaccaggatct

SEQ ID NO: 388384 - DNA, 1129 bp, Cannabis indica
ggtggatttatcaggatttgtgaagtgctttgccctttaggtacttgggaattcccatctattctaagcggttatcagaactaaaagtgagatactcatagagaagatggtgcaaattagaattagagtttagagttcacatattctctcaaatgcagagcaatttacattaatcacttcagttctcatggccagtcatgcttattgggccaaaatcatggtgttgtccaagaaagtgcttcacaaagtgaatgtggtgtgtcttacttttccatgggaggggattgctgaatatgatggtccaggattggtctcttgggaaaaggattgcaaatcgaaaagagaaggtagcttgggttttagaagaactagtcagtagaatactattacaatattgaaaatatatttggtcaatttctaccaagcaagataatttgtgggtaaagtggatttatattgtgtacttaggtgacaaagatcggtggagctatgaagctccgagcaatagtaataataaaaatatatattactaatatatatgtatagtatactaaccaagttatataggtgtttcttacttttttatggaagaggattgctgaatatgatggtcgaggattggtctcttgggaaaaggattgcaaatcgaaaagagaaggtggcttgggttttagaagaactattcactagaatattgttacaatagaaaatatatttggtcaattgctaccaagcaagataatttgtgggtaaagtgggtctatattgtgtacttaggtgacaaagatcggtggagctatgaagctccgaccaatagtaataataaaaatatatattactaatatatatgtatactatactaaccaaattatataccataattaaaatatatacaccatgacaacaaaattatataccactatttcatataatagaatagttactaattaaatattattttaaataaataatatatcatacaattaaaatatataaaaaataattattaaatatatgtagcatgccaacaaaattatatacatatattaaaatatttgtattatgctaataaaattatatactattattatacacagtaaaataaaaaataaatatcatttaagaataa

SEQ ID NO: 388385 - DNA, 1329 bp, Cannabis indica
aaaatgaggcccttcttagcccgattactgatgaaaaagtaaagaaggcattgtttcaaatgcatcccgacaagtcacctggcccggatggtatgacaccgggattttatcaaaaattctggtctatagtcggtcaagatgtagttaatcaagtccaaactttttttgcaacttgcaagcttcctgctggtttgaaccatacgaacatagtgttgattccaaagaaaaagcagccgtgtaccatgagtgatcttcgtccaatctcactctgtaacgtcctttataaagtgatatctaaagtaattgctaatcgtctaaaggttgtacttaatcatattatttctgagaatcagtcggcctttatccccggtcgcctcatttcagacaacattatgatctcctttgaggttatgcattacttgaagcgcaaacgtaaaggtaaagagggctttatggcgttgaagcttgatctaagtaaagcttatgaccgagttgagtggggctttattcgtgctatgatgcttcgtttggggtttgctagctactttgtcgatttaatcttggaaactatcagtacggtggagtataatgtggttcatggtggtaggcttcttggcccaatttgtccaaactgtggcatacgccaaggcgacccgctttcttcatatctatttttaatctgcgccgaaggtttctcatcactgctgaaacgttttgagactaacggtcttattaaaggttgcaaagtggcaaacggggctccaaccatatctcacatgttgttcgctgatgatagctacatctattgtcgagctaatgaaagagaagcagctaatgttatgagattactccagctctttgagacggcatcgggacaacaagtcaactttggcaaatcgtctatcttctttagtgcaaacactaatgatgcagttaaagaccgaatctgctctcttcttcatatggagattgcgcctgacaatagcacttaccttggacttccgtgtacaatggggagaaacaagaaagccattttgggattccttaaagataaaatgcaaaagcgaattcagagttgggagggtagacttctgtccaaagccggtcgagaagtacttctcaaaacagttgctcaggctctacctagctatgccatgtcagttttcttgctgcctttagacacttgctctgccttggaaagcatgatgtctaaatattggtggaataccaattctcaagattcccgtggtatcacctggatgagttggaagaggcttacgaaaagtaaaaatgatggaggtatggaatttcgtagtcttcatgattata

SEQ ID NO: 388386 - DNA, 1685 bp, Cannabis indica
aaaaaaaaaaaaagaattagtcgagctttttttattttcatttattttttattttcttgataaatagaatgaaggacgttacttataaaaaaaaaaactagtcattaaaacttgtaataatctttccatatactcatcatgaccttgtcttttctataatgtgttatagtgtcaaatttcatatttttttaaaaaaattttaaaaaaaaaattatatagactacaaattttaaaaaataataaaatatattaacacgaataaatttttattagtaaactgtttgataatctttttttttgttgttttatattttatttgtaattgtcatgagattgtttttctcattgtttttttgttgttttataatttatttatagtagtaaggttgatttctcgttatttttgtaattgttttcttactttttgctgaaaaaattatattttgtaattttaaaactgtggaaaatatggttacaagttaccatataaaagttagttaagttagtactaagtaagacatgtggggttaactcggttcaaagttaattaaatctattagggctcgtttggtacgttgtataagggtcgtattgtattaaataataaataacaatatgtttggataaaacaatgtattgtattaattattacgaccaaaatttataatacaatgtatgctgtattatttaatacataacaaatggtccatttttagcttgtattataatattttacgaaggattcgggggtcaacaccaatctctgacctgaacccaaacccgagacctggacctgaactcgagacccagactcggacttgggacccggacccagacccaaactcggacctagacccgggaccaggacctaggacccagacccgaactcgaacccggacccggacctaggcccgaacttgggacccaatcctaaacccgaaccagtactcgcgacccagtatacgggacccgaaccccgactcgaaaccccgactcggacccggactcgagactcgagacttggacttaaactcgaatccgaacccaagacccaaacccagacccgagactcagacccgggacccagacctaggacccaaacctggacctgaacccgtagttggtgttggggtcgagtgtattgaaaatatattataactttacacaatttataatacaagtcaataccaaacatagtattatattacataatactaatacaacacaatacaatacaataaaacacgatccaacacaatacaatacctcgtaccaaacgagcctttagagtcttgagacattcgcaagactataaataacacttccctttacctgtatccctaatcattagtccatacttgtatattcagaaagagattaagagaaagagaggggaagtggaaagagagttctacacaagtgagataagtcatccttgtaactcacttgtgttcttgagttgaattccttgtaacctctgtaatttgatctgataatgaagatgattatggttgttgatcaactgagatgtagagcatttcacatggcgtcgtaaatccttggtgttgttttcttagttttctgcattgctcttccttctcatttttggttttattgttttgttgtaataggttcttgaaagtgtttgtgtgtgtgtgtgtgtgtgtgtgtgtgtgtgtgaagtg

SEQ ID NO: 388387 - DNA, 1871 bp, Cannabis indica
cttatctgtatcaaactgaacttcttaaagacttttacaacaaatttccctaattataataagtatgttaaaaaattcttaataatttaacatacttattaagaataaaattatttttacatgtagagtttgaaaatctagttgggtgctcatttatttttttgtttatttttacagagttgaatgcctactatagttataatttagtcatataaagatttataagcgctaaaagtaaaaacgtctctacctctacctgtagagacaaaaaaaaatgatgtccccacaggatttttactttatatacatatgtttatttctttatttatataggagagagcgtgattattttcattcacatgagcccataggatagggaacatgaaatgttgtacctggtagtagttgtaattaatcatgcattcatgttgtatttgtcaaaacagtgtacacctaaatgccatcaaaaacataatccacaaaacttttaagtactagttaaggaggacttaacagaactccactcagctcacagtccccgtggtgatttcagttggtgtggcactggggatcctctaggactcttgttcataggtgaagggaaattgtgtttcagtggggacttaggtactggactgtgactgtggttgctggatgacaggcggggaggtaccggactatggctgccagttgacaggcgggaatgagatggactttgtgactgtttggtagttgagagctgttccagagcatgcagaacctctgacatttgtggccgaagtttggcctcaccaatgcactgtaaagcgaggattgcaaccatgaaagctcctttttgaggatactgaccctctaatttggtgtccataattcggaataactttcgcctgtcacccaaatagggtctggcccaatccactagattctgctccacaccaacttttgttttgtcaacagcatgtcgtccggatagcagctccagtagcacaaccccgaagctatagacatcgcactttgcagtcaatcgaccttgttcatcaccagcaaatgttagtataggaattgtaaaatggagtgtatgacaacaccccaagaatacaaggcagggttgtgatgtcccagttcaagtgaaaagctttcaggaatagcagacttcacagctattatacacaagtccaagttatattaagaattgcaaatgctgaaatttaagttcaaaccagatgaatgaccagagacccacccaaattttaaagttataaacaacaatttacatatataattattaataaagtcaagacagaattttggttcaatgtactaattccatacatgtggagctcctaaactgtttcaaaatctagacaatcaatcagcacaccaaatgatatgatattgttggtactaggaattcagactactttaacaagaatcaacatgtactaattcagcatgtcatattgtcatataagaatctacttactgaatgtgaagcatcttttagactgttataaggtcatgctctaataacaacacatatgcaattacactcgctcagtatagaaggaatacaaaaagctgaaagaagagcaagaacctgtagccatatattcaggtgcagcatagccttgagtacccataacttgggtggaaacatgagtacgatcaccagtggggcctgatttcgccaaaccaaagtctgaaagtttcgcattgaattcctaaagaaatgaaacaatactgcgtaaattagaactaaaacaaattacatggactgcctgcaggaaaagaagtgaatatctgatggggtcattttattttcctactgagcacaaaacagtacctattataacaaatacaatccaatcata

SEQ ID NO: 388388 - DNA, 1065 bp, Cannabis indica
tatactttgttcgagacaaagtattacagcagcaaatacaggtcaatcatctcccaactcaagctcaaattgccgactgtcttacaaaagctatatccacctctagattcaatgaaattcgatccatactcagtgttgaatccaaattcacactgagtttgaggggggctgtcaaggataataaatagtttgttctgttagttagttgtaactaactccaactgtcataactcttttcatgtattctgttacaagttgttgtgttctgttttactctgtatataagccttgtacagtttgatattcattgaataagatagtctttctcctctgttatcttcttcttcctttcttgattgcattatcacaaagaaatttagacaattacttatttgtccacttgtatatgtgcaagttaccaaagtgtagattttgatgattagagtttctgcaacctcatcaaaaaagagctaataaaaagagctagtaagatcagctaataatagagagaaagaaatctatttctcacaaatgctaaaagatgaaaagctaccatcaatgttgtggctggttgttcttgcagcatatatattggacaattcatgaaaaaaaagcagagattttggtcaaagagaaaagtaaaagaaaattaaacaattatgggaaattgttagatgagttttattacaagaagccatgaaataaaaaacttctctcttctaacttgaaatgatctaaacataaatcaattcatattttgatatgatattaagatcttgccaattcaaaattttccatctttatgcaaataatatcatactgatcattttaaataaattgaaatcaaattacatgaggagaaatccacattattctgcaacttgaaaggaaaagagttacaaattgtacataataagattattaattctaaactttattcatcttcatagtgaagtttgacatattaaaatttcccatatttcattaaactattaattccattacaactagagtaaaaataaaacaatttaaacaaacatattttattaaattaaaaataaaaaa

SEQ ID NO: 388389 - DNA, 1757 bp, Cannabis indica
atatatatatatatatatgtaattttaaaataattttcttagtttaatttttttcaattttaaattattttttaataaaattatgattttgatcaaatgaaaaattgacatatgtggcattttattattatttaatagattagttaaaaaaaattaacagacttataaaaaatataacattaaaaattattaccgctaatttttaaaattaaaaatttatttatatcaaatataagtttttaaaaactatgccctaattttaccttaataaataactacaaaaaactgttacttttagtgacaactttttagtcacaaaataatatttttgtgattaaatgtgatttttagtcacaacaaaatattacttgtgactaaaatatagtatttagtaacaagttgtcactaatttagttttagtcacaacaagtattgtgactaaaaatacatttagtcacaataaattgtaatttttgtgactaatacctttagtcacggattttttagtcacaacatagaaatcacaatttataattagtccaaacttttttactttaaatcacaaattttattgtgactaaaagtaagatttttttataatgaatattgagtgtatcagaacaaccattttagaaggtttattatagaattattttcaaaattagttgacacaataaattttatactttgacctactccatgggcacaccccaagagaaaataagcttgattaattagtaagatatccaagaaaaaaaaaacaatataaagcttttatcatctaaaccaagaatcttgaaagaagatatctaaggtgttgcattaagttgcaccatacaatacataatgtcattatcatataaataaatatagtggcatcaccaatatgtttgtatgttgttgtaggttcaccaaatagcttttactatctataatctaataatttaccattgtatagttacttgaaagtgaaagattctttacccaatacttctctagtagtgtaccccatcacgtgaaggaagctatacactcacttataggacaatgctagctatttactccctttgcagctgagacaaagtgtcccttgttcaacccttgtgggaaggtcataggttttatgcccttaacaaaggacaaaagctcaccaacaaaattaactaaccccactctctcagtatatcccttaaattgggaattatgtattatatctttcattgactttggtatgttggattatattgatgtatgaagtttgatctaaataataattattttagtatttatgaattattgagtattaaagtgttatgtgctaaatgtatagatatcataagtgatatttctaatttattgagacactaaattaaaaaatactaaaatttaatatttattagtttatataatggttgtctccaagaaacaagagttgcgatctattctcatctttttttgtcaagagagaaaattagagagccttaataaatcttgttttcttagaaaatcattaccctaagattatctttacagggatcatacctatcggttgattaatgtatgctttcattatttgatttattatttttctctagctttgaatcaacaaaggtattctttatacctatatatatttatacacttaatatgtaatttatttatttactgatttaaatcttgatatgtggcatagtgtatgagtgttgaaaatttttaacaagtggtattaaaagtcacatttgattgattcattaaaa

SEQ ID NO: 388390 - DNA, 2445 bp, Cannabis indica
ttttatactcagtcgtatagctaatggtaggagtcaaccaaaattgaggaagaggctaagaaaaatgttatggaatacaaattcatcatattcaagtgaacaacttgaataggagctgaagcgattatgaaaaattagttcctctttgttgttatttttttaattataaagatattgtgacatactaagtcgatcatggttggtttgattttcattccaatgatcaacgaaaagaattaatcccagaacattgcattatctcttttcttttctttttgtttggatctatcaccaaaaatcattacaagaacagaatcctttcctaaaatgatgaaatctattggcatccctcacaacaagttcacgctcaaagaattttgatactagttttctgaaagtatgacaatcactacaaacacgaagactctttataattctaataggagttccattgggagtactaatcaaaccatatgcaatagctagtctttcactatgtccatgaagaatctcaactttctcttcttcctactaacttggtttgagccacataacctgattccctttgcaaagtcttaatctaattttctgtgtatcttaacagactctggatgtgacttcaatccaattacatcaggatttttcttcaacccacttcctttcattctcattctcaattcatgtacatctttccactttccattggctgtaagaacattagatattagcacatattttcctggattcgtggggtccaattctaagagcttcatggctgaaatttctcctaattctttgttggagtaaaccctgcaagccctgagtagagcacaccacacctcggcagaaggtttaccttcaatgctatttacaaactcgtaggccgcttccaagtggttggcacggcaaagaagatcgacaaagcaagcataatgctctggccatggctctaaatgataatcccttctcatggaatcaaaatatcttcaaccttcttcgataaaacccgaatgactacatgcgtgtagaagtgccagaaaggtgatatgttcttgccatgaccatacattccatatgcattaatcatggtagtccatatacatctctactaatgggcgagaaacatgcccctctgggaaaaaatcctttttaacaaagaagccatggatttcttttcctttatttaaggcagacaaactagctgctgctgaaagtatgctcgctagaagttcaaatgcctcatttgcaagcccattatgaacataacaagatagcatgcttgtccaagacacgatatctttagattctatcagttcaaacattcgattcgcatactttatgtagccacactctccatatacattgacaattgcattttaaagcacttgatcatacaatccccttctcataatataaccatgagtttcttttaccaagtatttttcaaccctttacatgccagcaaatactttcaatcatcattgaactataaccactccttccgtttgttctttcttgctcaattctaagaccctcacgtgaaaattgttctgaccataaccaacaatgattgtcgtccatgaaattaaatccttgacaaccatcctatcaaaagcgcagcccatgaagttcaaacaacaacacttagcatacatatctacaagtgtgtttccaatgtgtaaattagaatctaatccctcttttactgcataagcatgagcttcctttccgtacaataagtttcctaatcgaccagtttgtccaaagaccaatatgctcttaaggcccatatttcacatataacacaattaggggcaactcaataatttcaaatatacataaatattcacatattccatatatattatgttataacataatcacataataaaataattttggacctcgaacttggtctgagctaaaatatctggttgtaactataccgtgcctacttgtcaaaaatcacatgtggtaagacaatataaacatattgtacaataatatagttcactcgcataataaatatcaaaattataattttacccttctcaagtcaaaattacgagaatacccctaactcataaatggggtcatgcaataaatctcaaataacttcgtataattaattatataataatataattactcaattacaattaattcattttaattagggttgttaatcaatgtactaattctcgggataacacacgctcagtattagtttacttctttttcttagttaattttcttatgggtttctaaattcttttattattaaggtggacaataaaacttagtgtatttaattaaatatatttttattttgattctcaatataatatatgcttataatttttgcttctttaaataatttctttcatctttagtattatgtattttttatagttaaaacttattaatgcttggttttatatttta

SEQ ID NO: 388391 - DNA, 711 bp, Cannabis indica
tttcatgtgaaaaatttcatcataatatagttttttcatacctataatcaaaattcgaagttattttatttttccggttgcgaccagattagaaattttcttcttcaattgcaaccactttaattagtgatctttaggtactctgtatattgttttaggtaataataaggagaaattttaaaaggaatctagtcgtaaagaagaagaagaagatgatgattttgaccttgagaagatagtttctaaagttgttcaacttattggtaaaaaagaaatctgttcttaaggatggtagtgtatcaaaatatggttttatactcccaattcttgtgtaaagtttcttttgattttgtaagtttttgattttttattattttatatatatatgtcttatttttataatttttataaaaataattttattgttgtctgttattttattaaacaacaatttttattttattttaaataacaagtttcttatgtttgatttgtttttttttaagtataagtttccgttttttatttggttattttaagaaattggttttgatgtgttagtttttaatttagttgcttggttgctttattaactggtttctgtgagtcagatttcaacgtgtaacttgggtgatgatcggcgtcaaatttcagtaacgacaacaacttcgatgactttttcggtgattttttccagcgacaataccaatt

SEQ ID NO: 388392 - DNA, 610 bp, Cannabis indica
atgtctctattccaaaatccaaaattttatttagcagagcaattgataaataaaatagtgtctaaaataaagatatactctggtgcaaataatcaattttttgtgatactattatcttacattactttgactataaaaataaaatagaagtattagtgatagctctctcaaccaaactccggaacatgactcaatgacttgggagaaccatacaatagcataatataattcaaaaccttttgtgacactatactcatgggttaagtttattaaaaaataattaacattatataacaatatcattcttaataacttaggacaaaaatgtattataatacagttaatactattgtacctaggggtgagaattatggatttatgatgtgatttgatcacaaaatgaaatcatagtagaagtaaccaaatagacaacatgtttggagagcatgagtctctcctatgatgctgaaaatattatctagctcaagcataacctctcactaaaccactcactcacaaagcaatattatattactccataatataatgtttgattgattaaataaaatgttgtgttacaaattatttgctacaaatgagatattattta

SEQ ID NO: 388393 - DNA, 1093 bp, Cannabis indica
aacatagtatttagatacacattataaaaaaatttatatttaatcacaacaaaacttgtaactaaaaataaaaaagctgtcactaatttaattttaattacaacaagtattgtgactaaaaacacatatagtcgatttttgtaactactacttttaatcacaatataaaaatgataatttataattagttacaatttttttacttttagttataaattttgttgtgattaaaagtaagatttttttacaataattataatgtaatttttctctttaaaaaaataaaaagaaattattacactttatatgtatataaatggagatacatccaaaaaattcagtttgaaccatttgtatttttggtttctaaatagttataatttaaattctatttaaattcagtttgaaccatttgttttttggtttctaaagaaattattacactttatatgtatataaatgaataactctagattatcaaattaattatttctcaataacaatatactaattaataattccatatgtatggaaaacaaaacaaaacaaaccttgattagaatggcatcagcttgaggaatttgttgaaacatgtcaccttcaataaacttcaagttttgaatattattattatgtaaattattggctgcaacaacatgtggtagatcaaacactgagcatttcaagtgaggaaatacttccatcagaatcttgcatacatctccagtacatccaccaacatcaactagtgaagttattccctcaaaaacatgcttgaataaatctttattctttgcattaaaaaccaacttcaacattcctgaatcactacccattgcttcattcatccgatcaccgaattcggtgttcttctcccaatactcataaaatttcattccattattagctaactgaaatggtgttgttgcatcatctttcttgaaccaacttccaagaaaatggaatggagttaccatagctggctcaagcactccaacaacataaggtgatgaaaagtgctacacatttctacacttttcttatctagaaaattctagtattaactacacaaaactaagaaaattagagaaaa

SEQ ID NO: 388394 - DNA, 663 bp, Cannabis indica
ttttatgttaattttttttttcttaacatagaatgcaagccaatacacaacagcactcattgaattgagattaattttattattttaggacattatgagtggtcctttcaagttatttactttatgtgagtgccatatatatgtacataaataaataaatactaatttaaatttaacatttaaacaatcgacttctaataatataaataaatttagtttttaacaatttattcttttcacttggaaccacttgtgttaccatcacatgaaattgtactatgacaccaataattcgtctactttctagctatatatgtaacacaaataaataaataaaacatattagaattaaacaaaatgatggtttcttcatatatattaagaattgtgagttagggatatatcttaggaagttgaaaattaaggattgatgaagtgtagtttgttgtttatcgaaataggttaaataaatgttaaggatcgatgcatgtatgttacgtattcattcatgtggtatgggcaactaataatgttaaaaaacacaagaagactcaacgtacctctaatccgattccaacttccaactaccatatagctattatagctaatgtaagaatcaagggattcatttttggaacacaagtacaaaaccatattacaggg

SEQ ID NO: 388395 - DNA, 933 bp, Cannabis indica
gtagacaaaagaaattagtggttgagaaaaattagtggtttaatagtacatgaattgattatgtactattaaactaatatggtttaatataagtagacaaaagaaattagtggtttaatagtacatgaattgattatgtctcgttgttttggttttggttttgtttcaaatgttttatatgtttgtgatatagcacttgtaatcatggtattcctccgtcacaagtgaggctttctatatatttcgggggaggggtcaatcttagataatgtcgtctctctttttcaaaaaaaatacaagccaagctgtaaatatggatgggctaagtgccaacccatcaataatatgtgtcgtgtcgtgccaaatttttatgagtaatgatatatgtatatacacaattcacacacaaactagacatatttattcttcgcatttatctttgaccttttctattattgaagaatatgtctattagtttcggattccatgttaatctttctatatgaacctaatctttatcttcattcttcttgagctgttcccacttagaggaatgggacccttttagagttgagaggcagcaaataagtaaaaaacttagattcatatgtgacaagtaattttaactaatgatcttctatcaaaagtgattttttacataagtatgtgccctagtagtgtataatttatgtgtacatattactacataatttttataaggtatgcccgacactaccgtaggcctggttcatttgtgtgatttgtgtcgggctttaaatggtcgtttttctaaaatggttttgttcgttttcttattcggattctaattcaatctctacttttttagctttgcttttataattaataaactaattactaaactatctatgttatcaattgttaatacatattttttttaataatactttacac

SEQ ID NO: 388396 - DNA, 1919 bp, Cannabis indica
gaatgtaatttggaagggaattctaaaataaagtataagcacaaggggtaattttagacaatgatattttcttcaaataattgagtttatattaaataaacattgataaacacgtacgacttccactatgcatggtctaatattgcagttctttgacttgaaaaagttttcttttcttttttttccacttttattgattatttaaatgtaataataaaacaatattatatcattatttggataatgaccttttcgttttattagtcattttttattcgtgtttttggtggcgtgccttttggaccattgtattttcatagcacccaaagttgaggtcattatcgttgtgctcaagggattaatataatatatgtgtcccttaagtataagttctattattattattaattaattaatgtagtttattcatcaatattagtatgatttccccaaaacacacattaataaaatgaaaaaaaaaattgattaatttgttgagactgcctaaaattaattattagttatagttattaataattagagtaatgctataggatactagtggtgcttagcaccctcctatgtgttaatatcgttattggtccatttaagtatcgagtctcatataatttaatataataattattaaaaagtatcactagacaatcgcaacgcaacatgtggagaaggtactataggaactactggtgtctaatagcaatgctcaaataattatatgtgtctttgtggtgataattgtgcgtagaacttaaaagtatttttctctatcagtgctgtgcataatgcaaatttattatatatatacatacgattttcaaacatttttatttgatttttaaaacagtgaaaacttctttacatataaattgatattttttaaaaaaaatgttttctttacatattaatattaatattagttatacgttgaagagagtttagaaattaactgcatgtgtgaacatgaatattaattaaggggaaataattagtttggttgtatatatatacattaaaagaaaattagtttgttataatattttgcattctgttatttgttaattatgtttatttttgtaaagcaaaattataactactttgttcaactgtctttaagcttcaacttgtgtatataaactaagatttttgcttatctcaataaatagaattttttttcttcagtttcattctttaatctttacacgtacgcacaattctttcattacactgttagataattattaattaaaacaattttagttgactcgtataactaaagatgtttaccctgatcatataatatattattttacagtacttatctacctactttgttttttttttattattttttgttgaacaattataagtatgtctatactttttttatggaaatatgtatgcatgctaatatatataaattgaacaagtggctgatgatcagtttcccatgctggatcacatacgtttggactcacgttaacgtaccaaaataaaaattgtttattatatgtaattagtttcacgtgtcatcacttaaatttagggttcattaattacaattaaattagatattaaaagttagattctaattaaattagatcgattatagtatgtaataaatcttaaaatctaattaaaaactgactcaatctaattatatttatatatactaaaaactatttatatttatttatatataataaaaataaatattttacttatatattaaaaaaaaattaaacacttgattattttgtatatttattttttataatattttattttattttttatttgaaaatattgttattttttttattctaagtaaggaacaaaacttctattaattaatctacaagcaattaaaatcaaatctaagcaacaaaaacaagcttaga

SEQ ID NO: 388397 - DNA, 1135 bp, Cannabis indica
gcttttttacactacagcatatacatactcacttcttaaattttatattgaattcattaaacagttaataggtgatcagacaaattaaaagaaattaaatacgaatgaaatagataacacaaaagaaaaaattagggaatatttaattaattttaacactttaataaaaaagtctagctactcataatcatcgaaaatatctgataacaattaagaacataagaaaaaataagagaaaaaggaagaactcttcaaaaaataaatgttgaaagtcttcggatccgtttctcacttctaattctcgtactcccaaagtcatctcttgaaaagtgttgaaaaaagacatttatataggtaataaaaaatagataaaaaaaaacataattttttctcaatttaaaattggtgagtcatgacactaccttgtagtgtcgcgacgcttgaagctcgattttttggcagcaaacttcttggtgctacgattgataatgttttggtcataactttttcaacattattcagaattagataattctagatgttttggaaagataaaagagagatctagaacttttattcacagcattttctcttaaattgaacgcacatcatagtttaaaattttcttgatgtttcaaacttaattttcgatcacaaatggagtgtgttgggcatcgaaaacttacaattttttaccacttatatcctaagaactctaaatttcatgataatctatcatattcgatctcatttaacatgtttcttttcatttttaattcacattacgaattttaccatttaaacctgaaacaagtagaaaacaagcataattctacacaaaatgaatataatcaattgaaacacacctctaaaatatttcatgtacctaaaactaacctatcaattataagcatatctcgtcatataaattactatgtgtaaatatatatttttatataaattcatataaaactacattcaacatatatatttatataaaatgataattctcaaaacttaaacaataaaatattaatattatcaaaaaataaaataacacgtagtttcgcatgatacatataggtagcgtttggtaacacttttttaatcacttttttttaaaaaaaattgaaaa

SEQ ID NO: 388398 - DNA, 1573 bp, Cannabis indica
ttgcaagacgatatatctaaaggtactaggcgttactagttgctactagtacccaataataataatgttctaatatatatagtttggcgtgaatgaattaattgagaatttgagagaatgttgttttggggaccatttatatgggacacgtttgctaatgattccttttagacaatttggtaaaattatatattaggaaatcaaaaaaagcaatgtagaaattcaggaaaaaaaataaaaaaggaataatgaaggaagcttttctttattatttacaactttacaagcatgcatgcactaatcaatttaggaatactagatttaacctccgaaattgactaaattctttaattgaatacatataaaatcaaataaaaagtatatatttaattggatctggatctatctacctatgtggacgttattttcatttttattttgttcttgcatgtgttttgagcattgctataatagtgaaggggtagcttgtgaatggttagtgatttttaatattatttattaaatgaaaaagtgtgcgaccaaatattaaattgtattaatagcaatttattattcaacaaaaaaaaagtgactttcaattccaacctcgaccttgggacccacacccggaccccgacccgtacccgtacccaaacccagaccctagcctcgaaccccaatttcaaccccgaaccccagatcctgaacccgaccctggccttggatcctgaccccggccccaaagcccatccttagacccggacctggccccaaactcggacctggacccagacttggatcccaccccagacccaaacacggatgcaaagctggacccagacccagacccaacgtcggtcctagaccccggcctcggacccgaccctggccctagacccaaatctcagccccgactccgaaactggccccgaaccccaggtccaaacctggaccccagccacgacccataccccgactttgactcagactagacttaaataaaatcaacaaatgaaaattaaaattaaatttacagaacagaattttgttttctgtttttgaaattgaaataaaagttattatagaacacatttttatttttcaaaaataaaattttactaacatttttgtgattaaaaaaattaaaaataaaagtgttaccaaacgccacccaaactaaaaacaagattttaacagatgtcttgttgaaactttttagcaaatatattcactatcaccatgacccatgtttcccaaaaacttaatttgaaaacattgctcaacctagtgttgtaagttcgtgcgtgtcatgctgagccgacttatatttatctgtattttttaaaaaacgggtcatgccgtgccacagaaaaatataagttgtgtcgtgtcgtgctaacattttaaagggtaggctcgacacgacccgtatgcctgatattttcgtggcatgctcggattagtgttgtgctttgctcgtgtcggcccatactttttaaacaggccagctcgttttcatattcgggcttaaattcgtgttttttttcttcatatatatgtatatatttttttt

SEQ ID NO: 388399 - DNA, 860 bp, Cannabis indica
ttttttagattttttttcatcttgtaatcttttataattattaaataaaatataaatttttattcataaaagtcttacagtgctaaaatgttgcagcttatttcgccaacgttttaaagtcaaagcgggaaaaataaaagtataatatgaatgactattacctcaactacagccacaaccaccgacagctcccactcgagacaaaagcaacttcaacaacaactgagcaaagttttgtcattccactttcgctccaacagtattaaaagtcacatttgctcatctctctattatatttgtcagaacgagcacaccatacccgtccataggattgagtcgtatggctgagtttagagtgtcgacatcgatagcgtgaagctctcatcgttgcaaataaggtaaaggttgaattcaatttctatggagtgttggaggtgagtcttgatgaaatagggattgtcgattagggaacactaggactttgaaatacacctgtaccgcaacagatctttcacctctaatcgatagaggatgtttttggactggatctccagggaggctctgttggaattattttaccaggatctagatttactaccaagtatgtttgattaacatccttatatgaattctaaaataatgaaataaacacataagactttaagaaaaccttacagtgggtgcagcggaatattatgactacttctattcagatctctagcccttcattcactcaagtgtttcgaaatttagagagaagaaaagagagagagaggcgtgtagcttttctgaaagaaaccaatgttcaaagttgtgagtttcctgaagccaacactttctatttatagaatgccctctag

SEQ ID NO: 388400 - DNA, 1129 bp, Cannabis indica
aaaaaaaaaaaaagtagaagaaattgtagcacctgcttacgctaacgacctctatgcccttagaaactgcggccttgcatatagccgaaccaacaaaaccactgcctcccaacacaacaatctactaagagcatcatggtcaatacaaaacatatgcatataaatgtagccaaaaggcctgaaattgtgacctacccgttcactcctaacatcagccacaacatctatcgtggcagagttggagtccgcgtttatacttgcttcagcataactacatctaactccaaacctgcataagctaacaatgaaacaatgtgaaaaccttcacaccaaaatcataatagaagtactagcatcaacaaaagggtttacatagtagaaaacaccgtaaaagaagctgttttattcttaaagggtaagaatatggtaggtcttatcattgtttcacgtatttccttatgggctaataacagaaaacatatgccaatacagttcaaggaaaatgataactcccattagataacttgctgaaaacccaaatgaggagcttcaaaccttactattattttctccattgcaaaaacccactacaaatttgaaattaaaacccaaaaagaaacaaagacaaaaatatgaataaataaataaaaatcataacttttctgggttgcctgctatatttgctgataattctagaaactagaccattcaattatctggtaaacaataagaaagaaagggaaaaaaaaaaacaagtaaactataagaaaaagtgtatatggagtaaatgagagtgagcctgaattgtgacctgggaagttgggtgagagatatagttgagcgattatggaaaagtgagttgaagcgaatgggtaaggaaggtcttaggagaaaggaagcagatgtggaagtggcggggaagaccaaaacagacgccataattgaaccaaacgacaaccaagaatctcagatataggattggaaaggactggggtccggttgttgagattgaagtttgaagtttccggtgacccaaatgcttctgggacaggatgttataatggtggctgataaattgctagttttgggtcattatggaaaaataaaaaatggccgttataatttcact

SEQ ID NO: 388401 - DNA, 1066 bp, Cannabis indica
ttcaaacatgtttatatattttagttcggtcgggatactatttaattataaatgtgaatactgttcttgtttaattatgtttctttcaaatctaatttaatatttaaaattaattacaatactattataaattattaaaatataataaattattaatttttttttaaaaaaaaataaaacaaaggctttcacctacgcatttttgtgccagcaaaacttaccttaaatcctaaaccctaagactttttccggtgcataagtgtgccggtataggtcattcccgcaaaaatccatttggaaagtaaaggttttgtcatcgcaactatgcgccggcaaaacctttacctgacaaatgaaaaaacacacaaaactttaccagcgtaaagatgcacagacaaaagttattttacccgtcgatgggcggatttaggtccctactttacaccgacgtagggtttctcccgatgcatagttgcgccagtgaaagcatgtttgactggcgcaatgccaattgcgtcagtaaaaagtcttttacaaagggagattcgtggacaacttttactagcgcatttatgcaccaataaaagtttgctagcgtgttatgcctacttttttttaggtcagtaaaagtaacatttcttatagcgtttccaaaatgcctcatactaatggagtaagtgaaacccttattttcaagccaactcttatatatttttctaatgtgagacttgggttaatattccaacatatctctatcaacactagtaggggtattcattagatcaatatttttaggtctatctagattcgatccaattatatattggatgttagattttaacatctgatctgatctaattcatttcaatcatccaatagatccaacatccattggatgttagatttgatcggttctatcaattggatgtatttcatgtatatctatttgtttaatttggatttctctaatattttagacctataatttttttgattggattggatccatccaatcctaaaaaaaagtaaaattttaatgctaattattatttatatatatgttttt

SEQ ID NO: 388402 - DNA, 1812 bp, Cannabis indica
tttgacacttcttttttgctttgctgcataagagcattcaatcatccccaatggctagcatctgcagcttttcattttgtgcatgccattcccatccaaaaactccaagacaaaaatgatatctagtgtgtgtgtgtgtgttgggacgtttgtcttgtcacacattatgttcaatcaaagctaaaataaacaaacacgttgcccctttccctctcctaaagattattattcctttctttctatctagcctttgtctttttttgcactaatactcaccggccccacattctcatatgatctctttcctatttccaaagctaattaccataaccaaaagctaaaaagagcttttggggacaaatactgacagggcattgcccaacccaacccaccttttattcctccaactgcttccttccatgtactactttcaacattcttcttggactcttctcccaacccttttgctccctttacttataatgctttcctcacttaactcttcttaataagatttggcctcctaaccttttctctttggattattcagcttagttgccgattcccattctttctcatcaaacaattataatttttgtttatatataaaaccaaatcagacaatcttaaccgaacaaaaacttccctatatataataagtacatgcatgtagagcttataaagctaaaccatttatgatatatttcaaaacttccttataagagttctcgcccacctagctagccaacttattagttttgaatagagctatatatatagatagactaagtttcataatttattaaacagtgattatgggaatggaacgccatgaatacccttctcaagtggttcattcctccattgctcttcttcaagagcgattcagagagttacagagagtgaaagaaatgagagaagaaaaagagcttctcagattgctttccgaacccaacaacaacaatactagttatattaataaacagttcaatttgatgaaaagccttacacctgatcagtactactacgagccagccaagttgatttttcaacctgatttggtgcctcatcaccaaacaacaccactaccaaagccccaagtttctctctcgttgtggccaacgtttcagaccagctttcatgaggaacagtattactatgttaataccaatgagatgagtcctgatctgttgatgaaatcatcatcatggcccatcatagtcaactccccatcttttcaatcttctatgaacaaatcccatgattctgttgatcatgagcctgatgttgatacctctcttcatctgtaaaacaaatattatttagttacatacactagctatataatgcttctctttctcttttgtttttttgttccctggtaatgtagtggttaaccccatattatcaattccatacatgaagctatatatccttgataattaataagtgtatcccttattgctatatataatattactaacaaattacttcagatcaaatgcttgtttttcaagtatttgtataattaatccagagatatctgaagcatgtcatgactcatgcatactcaaaatcaaagagtacacaatatccttctttcttctttatgacctacgtactcatgattcaattacacctttttagaatcataagcatttttctcccattacttagacatatataatatatatgaataataatatatggcacctgtagtgagaaaatgtttataatcagtgacggacccagaatttttgatctgtggggcttaattgttataaaaatatttattatttactttacattaaa

SEQ ID NO: 388403 - DNA, 1848 bp, Cannabis indica
tatataattaatatgttagtatctactactcacattgtgttaataaaaaaatcaattgtatttttaaaaaaaaaaaaatgtagtcaaaaaaaataaactaaatatatgtatctatatcttaaagcaatatacataaaaaaaaaaaaataccatgaataaactaagatgacacgaatcatgatctactcaggccatttactcaaattgatgttgaacaagcactaaggactatgggatcggacaaatcaccaggtattgatggcatgtctgccatgttctatcaaaataattgggatgtggttggcaatttggttacctccacagttctaaatgtgctcaatgacggggctgaccgaacaccactcaactctaccataatcactctcatttccaagataaagaagcctcattacatgaaagactttcgtccgattagcctatgtaatgtcatctccaaactcattaccaaggtgttagtggctcggctaaagcctattcttccaagtgtcatctctgaaacacaaagtgccttcttgccaaatcgtcttataactgataatattttggtagcttttgaattaattcatgggattaagaacagaacctcagggcgaaagggggtggctgctttgaaacttgatacgagtaaggcgttcgacagagtggaatagaaattcatcgaggccgttatgagcaaaatgggtattgctgaccactggatatctcttgttgtgaaatttgtcacaactagccatttcacttttcttttgaatggcgaaacaacaggttccttaacatcaacttggggtctctgacaaggctggccactatcgccatacctttttttgatttgctctgaatgtttattgcggctttcgaaacatgaggaagtataaggtcatctacaaggttactcttttactcgacgtgttgcacctatctctcacctattttttgctgatgacagtcttctcttttgtaatgctaatgagagttcttgcttagcaataaagagagctttgaacaccgaccaccgagcctcgggtcagatgtgttgaccaaaagtcaatcactcacttattttgatgataaacaaatatttgattattatttgttactaatcttttcttgaccattttgcaagcaaattcacaaagtatcaatatttgctcggtaaagtcaaacataatcaaagaagtggattcaacaagtatatcaactacttcatacttcataagatcaaaagttttatcaagagatcaagaattcaagaccctatccaaaagaggacttcaaaagctaaaagtcaaaagtcaacccgaaagtcaaagtcaaagtcaaagtcaactctcgggaaaaagtcaactttggatcaaaacatgcaaatcaagttaggaagctcatctacatcaagactacaaacaatcaaatggtataaatttattttagtcttgttaaagtgatttgcatagtatactagggtttataagtacaaattttggcccactcactaacttgtgcaacaagttttctcacacgatagtccaaaaatttttgattgaatttctaaatcacattttgtttaactaagagaacaaaattggaatttttgaaatcggataatcgagtaaagagttatgcgcgttttagtgccgaaaaatgcaagttttgaacctgcctgattttcgtcctacctattgaaaataggtagtccgtttttcctaggattctttttgaaaaatgtgctaacggctatcaacgtctagttttggttcctagactctataaacttgtttttcactcaaaaattaaggttggttgagcttctattcatcatataatatcatt

SEQ ID NO: 388404 - DNA, 1103 bp, Cannabis indica
cttgtacatttaattttatgagtttttttttttttttgaaagtaatattaagtcttatggttatatattgcagaagccttgtcatcatcttcaaaaaaggtttgacattttaccaaacaaaaattttccctataatggtggattttcactaaaaggccatggatatgcataacaattaacactttttttcgttactagtttttgtacgaaaccttgtcgtggtatacttaattggaaagatgccattgccaataattaaggtaatttatagataaactacatatagtatatatacacagtacaaatagttatgtactttatgtacttctatcctccatatataattgaaataaggaaataatatatgtgtaatatagttgggtttcatgtaactctgatgtgtacttatataaatgaaataaaatttgtttttcggttttttgtggtaaagaaaatttgctctccttgaattggtgcccttcctccatgtcccactaattattttatgacacattatttaacatatacatttctaataaaagacaagatttatagtctttaaaaataatacatcatcttgaaatatttttttattataatattttacaaagagtattctaatgattgacaattttaaaagttacccactataatctcgcacgtataatatttttaatattaaattattaataaagtttttagtaaaactaactttttttttctaaaagaccaagaaaaaaataatatgatctactttgagcaaaactcagcatttattgttgaatcatattgtacattaaagatgatcaaattaattgatttagagtttgttaacgttaacaaggttctcaatcctctctcctcattaatactactgctctctccattatttattgtacacgtgtattaataattagtttaaaatttgtatgtctgaaattttaagttaaaaatcttattattttggcaataatctactgtattaaaaattctacatgcaaattaactttttttttatagaagaaaaccccctaatatagtaaaaagaagatttaatgttttttttacagttgatataaaaaaattattggttttttttttta

SEQ ID NO: 388405 - DNA, 1765 bp, Cannabis indica
gccacatgtgtgcttttataaataggatttcaccccgtgaactttgacatgtaccaaatcatgccctctgaacttttaaggtcgttaaaaatgcccctgaactattaagattgttggatttaaagatttttatctaattttattcaattttactatttcagtgattgttcatgtactaaatcatgctccacatactttgatatctactaaatcatgccccttgaactttgacatgtactaaattatgccccctgaactttcatccatgttagatttttttactaaaattggaaaaaaagtccttaaatccaacaatctcaatagttcacgggctttttaacgaccttaaaatttcagggggcatgatttggtacatgtcaaagttcagggagtaaaaatcctatttagcctttaatttataaaaacaaactaaaaatttaataagacttgtgatttaattaaagtgtaattcaaaaaaataaaaagattaaaatgtaatattacaaattttaactttgaggatccccatttaaaatttttacaaaagttgccaaccaagcattacatccaaaatataaattttaatgctcgaagtgacataaaacatatgtcctaacaacttagtccagctggccaaatagactgatatgtatattaattggagaagacttcaaatcatggttaatccatcttcttctcgcccttacatgcaccacaaagcacttgcgagtcataatgactcaacaaaaaagtaatgacttaaaacacatatatcaatgtacaagaagaatcataaagcacacatttcaattcatatgaaagaattcacactacacaatggaagatagatattattatcagctaataagaatttataaaataactatttcaattatctttgcctaattagacaattgctatgtaataagccccttagtgggttttatatagagttataactctattttacttacgttaattatcatatcccatacagagatgcttttaggtacaaatataattttctttatctccaatccaacttaagtggaaactactggacgttttgagccctatatcacattagcaataaactaataagtgtctagataaaacactttttaagacttaaattataatttgaagtttttctattgataaataaggtagaaatgccctaaatatcgagataacatgaaaattaaggtaccgaaaaaagactccaatcaaaccctaaactgattaaaaaattctaggtgccgccagaaaaaccagtagcccggatttcccatctaggcagccgaattgcaatagacatctaaaatttgagtttttcaaactcaaaacttacccaatttgttcccaattcaaattacacttccaaaatagtacaaatagatattctaaacatatactaaagctcaaaacacaaaatagcataataaaacaaaatctaccattagtgagctgaagcttttaacttaaagcttccaactctcactaattcaaacaaaatattaattcccccctttaaactacaatttccaactccaatacagaagaaaactcaaatataactcaacagtttcataaagaactaactatcccaaaatccatataaaacctatttctacaatcaaaataaaaaaaaaaaaagaaaattacaacttacatcaatctttctatgtccttatctttggtttaatgtaagaaatttgaaagaagaatgaagaaaaatatgagtttatcctgatttttgcttgat

SEQ ID NO: 388406 - DNA, 747 bp, Cannabis indica
agagagagaggtagacattattaattgctatatacaaaacaccaaaagtggaaaataaaaactatatttataggtatatataggtggacagtgggaccatatgtgcaaggcaaagagggaacacaattaacaaaatgttaaaagggtaattaagcttttaaaaatggaggtgagaatacccaaataattcccttttgtattttattttttgatttattttcaagtggaaactgtgtactgtgtaaggtgtggccgtagtggagggcggcaacatagcccatctaactctgcacttgcctgcaccagaaccaacataatacagttcacagctacagccaccattccaccttctatacaattttttttcctatataataatatatatttcttttaaaaataaatgaagtaccccaacccaaccccacactaaaccctagttaatagtatgtagctatctatatttatatatagctagtttagctatatatgtatatctgatttacagctctgtgaaaccgttggaccttttctctctctttctctctgataacagctgatcaggcttgctgttaaatcgctttccttcttcgcaactcaattagctataggtgacctatatatatacataggacgttcaatttagaatttagatcatcatataataatttacatatatatttaaaaaataaaaaaaattaatgagagacttataggtactactaccttaattaattaattatagctatg

SEQ ID NO: 388407 - DNA, 564 bp, Cannabis indica
aaccaaaaccggcatcccttatttgctcttttgctgacaattatattcaacaatacattaattcctctctgcagcaaacttccttggatccctggtcctatgtacagcctagttcaagtcataaggagcaacggaatgggataccgagtccctctgcaataattaaatggtctcctccgcctgctggttttttcaaactaaacgtggatgccgcttatgatgctgttggggctgttattggtattggagcagtaatcagagattattttggtgatgttgttggggccttctccaatcctttgcggggttgctattctgtgaaggaaatggaagctatggggatcattcacagcttacattgggctaggaatcacggtttgcacatacacttcatagagacagactctcttattgttgcaaatgttatcaacaaaggatcttcgacagcccatgtttctcttttttatgatcttattgatgatatttctcttttattgtccttcttttctggagttttaatttcgcatgtaaagcgtgatgctaataaagcagcacatgaattag

SEQ ID NO: 388408 - DNA, 949 bp, Cannabis indica
gttcatgtacaaaatatctaactcaagggaataactcttcacctcccatactcttatggtcttgatatatatcatcccctaactacatatgaacatggatagtgcaatacttgttctaaatattaagactatatattacttgacatcgttttgggggtacgaccttagggtagagtcggttagccgaactataccgtaggactaatttttagtgtttatagtgcatattaaagttaaaaaaacataagtaggttttattaaaaattaatttaattaattcagtatgaaccataatcttaatgatctcaacataatatatgtagattaaatctaaactacatgaaaagagaaacaatacctcttttggccgttgtattcggtttagtgcagatgagttctatttgatatctggtttggaatattttggtgattgtaattaataaaatattatttagccaagaattaaatcagttggtcgatatatgctttcctagaactaaaatcattgaccataattctattcaagatgcatttttgggtgctaggtggggcaatgacgaatctattggtttaaagttgattgttctgtatttcatttattgttttcttttaacactcctgagaatgaagttcataggttataattaaatattattgataatggtcggtgtgatgattatttatggggtagggagtcattcgagttaacaatagattcattcaagggtaaaattgatcatggtatcaagatgaaaaaccagaaggagaaaaatagaggtgagtcttatgatggttggtacagagctttggggtctccgtgggtttattctctagttttatgagtgttgtcccgagatgtttaattatttttgtaaacgagttgctgttgggttttatgccctaaataaaacttcatttcaatgtaatccattttattcaatatcaataa

SEQ ID NO: 388409 - DNA, 1142 bp, Cannabis indica
gcgagccctcacacacacacatttagaagggtttcgcacgcgactccacatacaccacttcacagcggctcacacgtcgaccccacacacacattcacagtcgggctcgcatgcgacgcccttcacacaccagtcgggctcgcacgccaaccccacacacattcacatgggctcgcatgcgacgccccttacactaccagtgggctcgcatcgccacccttcccccccccacccacaaccacacacatgcgctcatgcaaagacccactcacgagttattacgggattgatctctgagttatgtggatatatctcgagaattacaagcatcgattctcaggattaaggagcccctaaccatatatgttgattcagtcatttctcaactgacttttaaagttgatgtctctcgcttcctgagactaattgttggcttaatctcaagaatcaacactatggatttttgaggttaacactacattattaatttaataatcaatttgaagatggaatgactatattagtccaattggtatatttgatagggtatttttaacaaggttggtgggatttaaagtgaggaaagttgagatagatgcttcaattgtttgtaactgggttaattttcttgattctaatattgtgttcaaacgtattattgatgagatttttttttaatagctgcagttagtggtggttcttgttgtgtcattttgcgggttacaaatggtgtggcccatgctctaactaattctgttactagtttggtaggagttcgtgtttggacagacctttgtcatagattcttaagtgctcctgtaacagttgatttggtttaatatattaccacattttccttcaaaaaaaaaaaataataaaaaaagggaacacaacagtataatgtcatcttcatagaaaaatagtgtcataagtagagggacagaaaaagttaattattcattttaaaaaggacttttacactaatagcatgtttactaaaggggaataggaatcaattgtatgtgattgattctcgttcatttgtttactaaattttggaatggaagaaactagtggggtccacataaattaaggaaaaaacaaagggaaaggttctctccatatttttataaggaatacat

SEQ ID NO: 388410 - DNA, 1019 bp, Cannabis indica
tttccagatttaaattttcttatctgttttgtcgtttatattttgctttgatttctatatgtgtttgtgtgtttattttcattttgtttatttgatttgtgcgtccgtttctgtacagtttttttgtagtttttttacagtttaaacactataaattaatagacaatattttttagtattgatcatgtttctctttatatttttcacatcttttaatcatttatgttctgtgtggtatccatatatatataacatcaagtagtaaatataagaattaccttaaggagctttattggggcggtctactccttttgttttatttttatgatttttacgtgttttatatattttgttttcatctatgtttatgttatgtattttttttttactttttctatgtatgattgttttttcatgattgctttttagttgtattacagttttgaaacttctatttgtctattcattattttatctttcgttttttttgtatacaggattgggtatacaaatttagtcctagagattattatcgatccaagtgtgtttctacatgcacttactctgttattcttaacattaagaacactatctcgggtactttgttgaagatgttcgaagatacccagtttggtcatttttggatattcccgagttcagattccatccccaaattttgcacagccatcttttacgggaggttaatcagcccaattcgaaagaattttgggctaaggttgctggctgttgtatacagtttaatgtagtagagttttatttgatttctggtctggaatgttttgatgattgcaataaattatttacccaggaatcaaaccaattggtcgatgtatggtttcttgtaactaaaacaattgaccatacatcttgaggatttttgggcactaggtggggccatgatgaatttgttggtttgaaattgatcgttatgtatttcattcactgtttcttctaagtaacactgttgaaaaagaagttcttaggtcagaattagatat

SEQ ID NO: 388411 - DNA, 2321 bp, Cannabis indica
atgcataaaactaatcctaagacatgagaatcaagaagttcataaaagctcaaaaactcatcaatggtagaaatttaaaggacaaaaaagagagagagaaagatttgaacttacccactgagaagatgcaaggaggctcgagctagtccacacaacgagtgtgggtgttaaaaacttaagaatccagaaagaacttaggctcacaaggctttggctctatggagtcttggagagaattttcactcacgaaatgtaaaagtgaagtaaagaatgaaaaaagaagaatgaggcgtttatatagtttgtggaaaaaaaaatattccccaaaaaaaaaaacttatggggagttaatgtcacaaaaataggcatgtatgggaaagagaaggccaagagtttcaacatggaaaaatgtgcagccgtcacacaacttcccacattgatcgacgtaaaattaataactaccataaaatcacatcagctaaggagtctactatctggccatggatatctacacagtaaaggtcattacaataccagccagagtgtaaagtccctacgtaactagacgttcggataggacttagggaaaaaatattatcccaagttttgtccacctgacctggcacctccacatggaaaaaaagaaaaaaaatacattgaagacaggtcagcattaactagccaggttagtgtcgtgcagccttctaacctgcaagatcttatggttgcacggtagacacaagaaaagacaaaactgtgcacaaacctgcaaggtcctagccagaccaatagctggccggccaagggagacagccccctatactgggcagcccatcaacatggttggtcgcccaagtgtacagatatgcttcaacacttgtatttttctcacaggccatccaaattgtctccagcattcgtatgacttcagaacagtcaaactgcccacaaaaatagggatttttcatcaacaaataataaccctattctttaggaatattctccatattttatgtattttcaaataaccaaccatgtaaaccctaacactatataaagggtcttaaccctacgtgaaaaggggcctcaacttgaatcctaagtctcaagtacgctcagaagcacaaaagcctagagtcctctctctcttttctcatacttctcatctgcaaaacacattctcattataatattgaagagagccatagctataaattatgaggtttcaacctctgcttggtattatctcaaagagtgaatacaactaaaaggaaagtaggtcattacttgaacaaagtagctaaacctctataaatccttatgtttttatatttattatcattctacacgtgaaagtcataagcaaaatccaatcctagtcaaatctgtgtcggttgactaaatccacgatcaataaagtgggtatacaagattaagttgaatgctgatagtatgtttcaaaaatacaaagctagattggttgcaaaggggattaatcagaggccaggaattgattttggggagacatatagccctgttgtgaagacttccatagttttggatcatcctaactattgttgttgctaagttctgggagacaaggtagcttcacatcaataatactttcctaaatagagagcttcaagaagatgtttatatggaacaacctcaagggtttgtagatgcctcaaaaccagattatgtgtgtaaagttaccaggtctctttatggtttgaaacaggcaccaagggttggtatcgcatgttaaaagctacctttataacttggaagcttaagagctccaaggcagtttcatctttattcttttacaaagttcctagtctggtttttatggtattaatctatgtggatgacattattgtgatagacaacaacactgctaagctgaatcaatttatcaataagcttcatgctgtgtttgctttgaaagacttaggtcccttgcattacttccttaggatcgagattctgttgggttttatgccctaaataaaactctttttcaatgtaatctctattcttttaaatatcaataaagaaacagaagtatttatcactcatttgtgtgtcatttggttcatgttatcatttacttgtctaattgatttataaattcatccaaacccttttcacatttatattcttgtttattgtgtcgtcagcacagtggaaagtaatcaagattatgtgattgaatgtatattcctagatttatcagaacacagggtttaactgatatgaaaatctacaacatagtttacttgcaccgtggataagtgctatgttctttccagagcatt

SEQ ID NO: 388412 - DNA, 1919 bp, Cannabis indica
agtaatgtcaacttggagaagaagaataggacagtggagacctattgtaactctgctcaaggctctggatatgggactattaggtgttcaagctcaattttaatggggtattaaagaggtagtttatacataaactgaaatttaaatgtgtctaaattatagaaaatttgaaagcaaatgtgtcacaacatattgttgaccttaatgaattggcttaatatatattttcatttagtcttattgaatctgttgtgttgtgttgagtctgttgactagtctagtacatatattatatatgtcatgcaaaagttgacatttttacataactgactgataatttggatatttgggcttgcaagagctacttttaggtgatgtaataatcaacccagaaaaagtgcctgcccaaagatctcacctctaaatttgaaccaattttcaaaaaatgtcttaagctgagcccaatttaaaccttttttttaaggttcagccaaggttgaatactgcttgtgaatgtcactaatttccaaagaacacccaaaaaaaaccaaacaaaaataatgtgaaaactcggttaaagtgaatagttatgttttacaaaaaaaagtaacataaaattattcaaacaatattttgaaggaaaaaaaatatatattagaatcatcacatgcatgatttcatctttataatattatgagttatatatttttttttttgggttccttgtgatcataactaactacttggggtagatcaatgacaattctgattgtagcagttaatcatcaatttcaatgtcttgaaagtaaaaatatagatatgaaaatcattagttaaattttatttgttttcttcccataaaataacatatatattagtttagtttcaaatatataggtacacaaagggggaccattagtattgtgaatgttaaaaacctgtacaagtcaacaaatcacctataatttttttcaaaaatgcagaaccaagcaattttaaccaatttgctttgtttttgcagtctgaaaatttaaaagctgaactgtataaggaatcagtggtagtcaccaccatagcttatagtaaactgtaagctcaactttagagacccacatgtcacaaaataataatgctaataataatttttatttaaaaaaataaaattaaagaaaaaggcttctgttggatttcttctgtttttgcaaaatggacaaatacataaaattttgctaatagttaaatactattttagactctgtattttataaaattattaataggattctttgttttgataaattataaattagattggattctgtattttcttaaatagtacgttgaattaattttctggcaaaataaaatttaataataatttgatttacaggtattatgacaaaactggttaagtttactatatctgttcgtattaggaattgtgttcaagttagttaaaattgagtttatagtcctatttataaaaatataaaatttatttattatttaacaaaacaaaaggttcaatcaataacttgtataaagtacggatccaaaatgttattaacattctaatttttaacacattgtggtccactggaattatgctgcaaggaagatttattgtggttgtcttattcctttagttgggttcccaatatattttgaagaaaatgaaaacaacaataccctcttcatttttttcaattctaaatttctaataaaaactctgtagaaaaccaaaaacaaaattgtcacttctagttgtttttgtatatagggtaaatactattttggaccctttgttttacaaaagttaccgattggaccatgtattttattaaatgacaaaatggaccctgtattttctaaaatagtacaagtaggaccctgaattgattttttgtcaaaataaagtt

SEQ ID NO: 388413 - DNA, 1571 bp, Cannabis indica
aaaaaaaagaaaaaagataagaggaaaaaaaatgggacagagagcgagagaggagccacaaaagaaagaaaaagttcgctcacctttagaagaagaaagaagacagagattgagaggagaatagaaaaaaaaaactttataaaaactttaataaataaaaaatagtcaaaaaaaaatatagggatagtatatatgtcaaaaaattcttatcacattataaatgtaaagtttagaaaaaaaattattgttttataagatttttcatcaaacctctcaaaccacctgcactgcaaaaaaaaaaatgtttgaaattctttttggtgcggtcgcaatttgaattttttctaaatcgcgtcacgcggtgtgatttgcagttttgaattattcagatacggctcaaatcgcactgcgccgcatatcataaaaataccaatttttatatttatttaggtccaatatgtgaaggtccagcccaaagtccactaattattgtattattaaaacttaaaactttttttcatatttattttcaagccttatggcatttttgacaggtgttgctcaagatttgttatatttgtgatagtttaattatttggtgatagtccaaattacaaaaattgcagaaactgtaccacaccatttttcacggtgcagtttttttagtttgggaaatcagaaaaactgcatgtgcaggttaatttgaaaaaaatggtcaaaaatcgcaccacccccaccgcgaacaaccctaatattttgtgtaaattcattttttttttcgtgagagaattccaaattctaaatcagtaaagtttcatttagaaaaaaatatatatcggtaaaggttttggcattagtatagtctttttcattctaactacaacaccaaaaattacacaaaaaatattttcaattattatattactttttaaataacatagaatattattttgattattatatgttgaagcagaatggacacagatctttgagccacacccacttgctaaattggtaagaatgaattataaaaaaagtatacatatatgagagacacaagaatttatagtagtctactccctgtattgcgacaataatagagctatgtctacttcaaattttatttctcacgagatggattacagactaatggctaagtcgggatgctctaatttctagagagagaaactagagagagatgctctgcccttatggctacttttctgaacttaaaaaatgaacttgtggagctctccttttatagggaaggacgaaagagggccgattaaaatcacaataaaataatccacaaaaggtgaaaaaatatatttaggctatttttgaccgttgatgatgatctaacgatgaaattgactccagaggtcagtcctcaatttttagagctttagtcgtgtctgcgggacccgcttcgggtaagttctagcttaaattcataactctcttaagggtaaaatttggaatcgataacttcaaaattgcaattgaagtgtgtgaaattacttgatagaacattgaaataacttcaaaaacacaagttgaattgcgtcaat

SEQ ID NO: 388414 - DNA, 506 bp, Cannabis indica
catatatatatatataccactttctggataatataatagaaagagactgagtatatacattgagactaaagagaaatgtatatgaatatatgctgataagatgttacttggatttcataccagtgcatcgatttggtaagataagaatatatacatattcataacaaactttatatatacattcatatatatatatatatatgggacaaacgtgaatttttttccatttatatactcactgtggtataaattaaaataatgactttggcagtcaaattacttatcttggcccattataagtgataatgaaatattcatgctttgttatatgcatgtatacgatccagtctaaaactttaaaccagaggttgagaaggatatagagatgaaattaagactcgccaaagaaagatatctatatatatctattctatataaaatgtgtctatataactaaattcttagtttatgagaaattcgtggtgacttttatttatatttaataa

SEQ ID NO: 388415 - DNA, 641 bp, Cannabis indica
agttgaatagtgttgtttggatacagatttcgaacctacagttagtaacattcctccaagcaataagaagaatcgaactggtttgattgtggggatcattgttggggctgtcactttcatccttttgtctgttgtagtggccttttatgttgttcagagaagaaagaagtctcaaatgaatgatgatgaaggtcagcattttttttcttatatgtttcacattagttggtcctaattgaaagagaaattaatgatcaggaaaacatgattattgtattgtgatatgcagagttcttggggatggatgttaagccattcacttttggttatgctgaacttaggacggcgacaaatgatttcgattcctcaaataagttgggagaaggaggatttggacctgtctacatggtatatttcatataagctcattggaaatatagaatgcaataaaattctttttgacaattcttttggtataactaataatagggaacacttgaagatggaagagtaattgctgtgaagcaattgtcagtgacttctcaccaaggaaagagccagtttgtggctgaaatcgccacgatatctgcagtgcaacaccgaaacctggtcaaattatatggatgttgtattgagggaga

SEQ ID NO: 388416 - DNA, 2401 bp, Cannabis indica
ctaccagaggtgccggagaatcaagattaggatttggagcacgctgagctcgctgctccctcaactctcgaatttgctcaccttgttgccggacggtctcctacattacgacatataattcttcccaattaggtggtggtggagaattctcaccctcacctccaaccctaagcccagcaatctcgcggttacctctaccagaccgccttgggtgcataatctatacacatgtggtcacattttcgagaaatatctagtaagtatttccagaaatctcaaactttcactcttttctatcagctagcatatttcaaataaacatgcaattaggtaattaacagatattctaacaattaaaacttaccgaaccatgagtcgaacgagtcttcgcaaccaatgtacatattaaaccaatcttcaggatctttaaaccttggtcgctctgataccatgttgtaatgccatgtccaatagggacgccacgtgtgtgcttttataaaattcttattcactaataagtataagtatgccaaaaagtgtgcttaaattaaaatttgataattcaaatcaaacacacaaaatttcttttataaaagataagtattattaattacggggttcccttattttcaaaatatttacaaaccagattaacagtgcttttacaacataggtttatatttcaagatacaatcaaaatggaacttcttgtccactggaccatggcaccgcgactgatatgtacattgatgctacgacctcaaactcgtggctactcaactttggccttccctttacttacaccatttagcacacgtgaatcacagactcagcaagaaaagtgaataaaattataaataatacaacattcatttagtcacatcatgcattaattatgttttaacaaatacacatcattgtaatcacacaatgtcggtacttcataaagtacccttaccactcgttacctacgagctatatatgtcactatcgttgcccgatacaatgaaggataagtaagaaacctatttgcagtttcaggagtaattactcgtaacggtaattactgtttccaatcctcggtcataaccaaagcttagcaaatatatattcaagttctcgatcataatcgagactataaccacacaattgttaaccacttaaccttaagcgatgcataacccttttcttaccttaatccaaaaatcaagtgtgtggggcgacctaagtggaattacgctcgacgatcctgggtcctatgccacaacaaaaaaatccaataaacaatttattcaaatttcaaaatcaaaccctaatctagacatcttactcccactggatttgaacaattcaaatatcgctagattaccctaatctaagctctaaaaaacaccctgagaaaaaacatgtttcgaggctaaaaccagaattttcccctactagcagaatcggttgaccaattttacaacacttgtaaaaccaattaaccggtttctcaactggcagaaacggtaaatctggtttttgccccaaaaaccacacaaaactcctccaaacctgttcaaacctcccagagcaatacaatacaatacaatgcatcccaagcaccaattcacaacaattcatcaatttaaataaatcgccaagctaaaaccaagatattaagttttaaaacccaattttccaatccaacaccacaaccatctaattcaattaaattaaatgctaacaaactttaaatcaaacctgaaaatagtatccaaacttgatctagcaatacaaccccgaatttccaaaccctaacccctacactagcctaaaaacttgaagaaatctaaatacacgtagaagaaacttacctcgagacttttaggttgacctagggaataaattctgctagaaatcaaagagaatttgatgagaaatcctctggttctaggctagttcttggctacttgaaggagggaaggaggaggctaggtgataactccaaatttctaattttctctttttatttccttactttcttttctttctttctttatgcttaataatactaataaaaatcagcactaacttcaaataagacaaaacaatcatataatatcatcaaatgaccaatttacccttaagttaaccttaagcataaaacacacctaggggtagtttggtaattctaactaatcccgccaatctgacattctaaaattctaaactattccaaaatacttccaaaataatccatcctttattgtcgtgacattttctgaccacaccgttaagttctcacagtcgtcgagcccaaaaatattttatttcaaaaatggtatccacgatacccacatattctaataaaatctcaataattaataaattacgtcttatttaatcatttaataaa

SEQ ID NO: 388417 - DNA, 793 bp, Cannabis indica
cctaatacgacgttccaaacaagacctttgagattaattgaatacacttctattttataagaattgtgaaataattcaaatttacttgatttagtatctttaattataaaagtaatttgaattagtagaagttgagagaaatttgttttgacaaagatgtgtatcattttgttacatctagtcacatatttgatactgaaatttttgtttccaaaaattgcttgtacattttatttgcttcaggttcattcaatttttttttttcagtctttcaattagcattgatacatattttaatatatgtctacttgttccttggagcataacatattttctttttttgcataacagattttcattactgatatatatcaaacatatatacataaatatatatattcattatagagatcactttgattacaccccttttgaagctagactgaaattttctacgacaattagctttcgaccacaacacaattttctcaaagttatttaatggtaacttttcataattagattttgttttttttttttcataaggtagtacataattagctaatttgactttctttgattatgctgatttttaatgggaattttgacaacataacatttttatttttaagatttttatttttgtctttgattatgcaccctcacattgacttattttctgaagtctaaagaatcaaagagaaacataaaaataatttatgagaaatttggcagcataacaattgtgttttcttctttttttgttaagatttctatcttcctctttgattat

SEQ ID NO: 388418 - DNA, 4138 bp, Cannabis indica
atttcagctgactttgctgtataagttgttttgtaggaataactagggatgcattattgatgagaatgaagaaagcccagtggcaagatgtgattgatctaaatcttaccggtgtctttctttgcactcaggtgtgcaacaatttttatttttgtactaccttttctattttttttccctaaaagaacaagagtggtggtccgatgtatgaaaatgaagtttattccgtctaactttcttctcttaaacaggctgcagctaaaataatgatgaaaaagaggaaggtaagtctgaagattttttaagcagaatattttgtcacaaattcgaaccccccaacatataaattttccttttaatgacaactaggcacctcacaaagatgagaggtttaatttttagtctcagaatgatttgtcttgcattttgtgctttttttttcctttctgcactcccttagttcattatatagtcctttcttttacaggggagaattgtgaatatagcatctgttattggtctggctggaaatgccggtcaagcgaactacagtgctgcgaaagctggtgtgattggtttcaccaagtccgttgcaaaagaatatgccagcaggaatattaatgtaagtaatctaggatcaaattataaattgtattgggagaaacatttctattctattgagtttgaagtttcttgttcttgattatgatatacctcaaagcaaataataaatccttctttttcataggtcaatgttgtagctcctggttttattgcatctgatatgacttccaaacttggagaagacatagaaaagaagatcttggagatcattcccctaggtgagctaaataaattcctgcattttttatagttataacagtcaaattaggatacaattaagcttttaatcactctcacaggacgatatggtcaacctgaggaagtagctggactggtagaattcttggcacttaactctgcagctagttatattactggacaggtacaatcctttacttgcaacttccgaaagacttgtagccaaaaagaaaaatagcttgtccggaaaaggtgatatgcatttgtgttctttcattttaggtttttacaattgatggcggaatggtgatgtaaagcctgagttcgcaatattgcctgcttcaagaacaagtctttttttttttttttgtttcactcttagatagattcttattttctgttgaaaattacataagataggagagtataatttgctctgttttttaggggatttttgtatgctttattttgaactattatgggttttaaaatattctatgaaaacatcaaaatatcaaatacaaaagaacaaagaaagtcttttctaagttaactttatttccctcgtcttttttactttccagtcttataggagtggaagtgtcaattttaagttatacatccgaaattgcatctctaaaaagagattattctgttaacctcgaaattctgcaaggcaaaatcccaaagctaccccaactgaagccatcattttgttagttttacggttaattataccgaactccaagataatccatgtaaaaataccatatgtagcctattaagggtcatatttttatttttgtatttatttcgatctcttcttatccaacatgctagaaaataggttaattaagatttttgctctcgaactttaacatgtaccaaatcatgccccttgagcttttaaggtcgttaaaaacaccccctgagctattgagattgttggatttaaggacgtgtccaaatttaagaaaaaaagtgtaacgtggatgaaagttcagagggtatgatttagtacatgtcaaagttcgaggacatgatttggtagatatcaaagtctgggaacatagtttagcacatgaaaaataactaattagacaaaagtctttaaatctaacaatctcaatagatcaagggaaattttttaacaactaaaaaaattcagcaggcatgatttaatacatgttaaagtttaggggtaaaaattctaattaacttaaaaaataataaaagagaagttcacactttaatttgggttaataagattcacaaaataatgaggatctcgtttaatctaagcacattagcaataattctttctaggatggaaaatattgagtaatacaagtaagccctaaatctaccgtactactaataaaattattatttaggttaagataaaattaattagtaattttttttattaaatatgaaataaaaaaaattataatatttaaataattatcataactggtttttcttattgatattattttaaatttagtttttttaaataaaaaaatatatttaataatccagtaagaaaaatttctcaattgtttagagagaatatcacaattgaaatatctataatcaagcttttaaatttaaatttaaataaatatttaatatttgaatttaaataatccaaaattaaaccaattgtgtgacgccaccactgttttgtccagacaatagtgtttttctaatttatttaatattaaatttaagataaattatttatttttaaagaaataaaaaccattttgtcccacaaaataaattatcattatcttttattttgtaacatccatacccttggtaatgtagtatacaagcaatttagaacctacaatactaaactctaatataccaaactatttattgaagtttttaatataataattttatttattaattttattattagtccgctataaatataaaattacactattagttattatagaattatattattaagttcattaacattaatttattgatataattaagtagttatgtactcctattaataattaataattagaattggtcaaattattgtttcactattctaattatctctttatcttctagtactatttattcacaagcaaaagttcattcaaattaattctaaatttgtgtataattttttagttctagtattaacaatgaaagagaatcaatctccattagaaaagtcaagattctatatctaagtaatatgatcataattttaatacgtcctgcaatcacatatattaacaatttaaatctaacttgtttgcactgaataacatgcttaataaattgttctaacaactattgattaaagattctaaactttaatatgttgttgataaatatattaattgtatgtgatcttaattctcttccactcttataagatcacatcctcgtaaatgatataaattttatacatatttataaattataaattttaaataattcaataatcaaatataatgaaattattcttttttttaataattaaaatgtattcacaactttttaagacataactcctaatacatttgatgaagaggtcagaatgatacatgccaagacaagctttacacctggctcaagcacatcttttcacctggccaccttctcactaggcacccttattgctaggcaactttcttgccaaaaaaggcttctcttcttgccatatgtcacattcgcacttgagaagttatcttcacgccaaagatgccatctcctcgccaatctctattgacgagaagatatcccgaagactgcattccgtactcagtatagacattatgagtttctagtgatgtcatttggactcaccaatgccccaacggcatttattgatcttatgaatcgggtattcaagaattacatggacaaatgtgtaatagtgtttattgatcatattctggtttattctgagtcagaagaacgagatcacaagctgtatgctaaatttaagaagtgtgagttctggttaccacgtgtctctttcctagggcacatagtggataaagatgggatcatggttgatccggccaagatcgaagctgttcgggattgaccaacaccaaaatcggctactgaacttagaagctttttgggtttagctggttattatcgccgatttgttgagggtttctcgaagatgcattacccctaacggacctaacccgaaagaatttgaagtttgttttggactgatcagtgtgagaaaagttttcaggagttaaagagtgcttgattaccactctaatattaactcttccttcagataaggaaaagt

SEQ ID NO: 388419 - DNA, 2496 bp, Cannabis indica
caaaaacctttataatgaggaattcagggatcctcctaaatagctgtattctctccattagccaccagcttacaagcacctctctttaaaatagagttagtcttcacaacgctcttccagaaccaagagtcagagtttttatatttatattttagaaaatccttcccttttaaatattttgctgttaaaactctgcaacacaacgattggctaccagtaaggatatgccacccccatttagccagaaaagcctgattcatctctctagttttccggaaaccgaggccacccagagatttaggaaggcacaacttgtcccaagcttttaaatggaggccatgatttcctttctcaaaaccccaccagaaatccctgaccagaccatcgatacaagtgaccatacgattagaaagtttggtggtctgcatagcatacattggtaacgagaggcccaccgattttatcagagtagccctgcccgcctttgacaaaatcttagccttccatccctacagctttgaggtgagattatcaaggatgaagttaaagtcagggtccttttgtcttgaacggaacaggggcaggcctaaatacttgatgcacccttcaggcgaatcaatccccaacatttccttgatctctttcctcatgttggacggggtattgttactgaaaaaaaatagaggtttttaacttattaacctgttgaccagaccacaaacagaatttttccagaaaactccagaatccctcaacctcgttcaaataggagtccacccttcctcaaacttgaaacatctcttgattttgggctcgaaaccacccgactgaaggaacaacggcctgtgatcagagttactagtatggaccgagctgagaatagctcttggaaaaagattgaaccatgcaccgttggctaaacctttatcaagggcagatttaacatgacctctaccagaacgatgattatcccatgtcatcgtatctccttgtatggccatattgataagaccacgggagtcaataagattcgagattatcgggataaagggttcccttcccgaggacccttctctttcagaatcacatagaacaaaattcaaatcccccaaaataagccacggaccaccaaatctatctcccaattttaaaaaatcagtccaaaaatttttcttagcatgcaagtaaggagggccataaacacaagagagtaaccacgagtgggtaggaggatccgaatacactaaaccagagatatgattgcgcgagcaggatatacattcaaaactaaaaccagacttccaagccaaaataataccacccgcagaaccagatggcgacacacaaatattaaagtaaaagtggagggtcttaagagtacgtaccagaggcttagggtccacttttaactcggacagaaaaataaaatccggagagcgcattgcgatcagggacttcagttccagaactgtagaggtctgccccaaccctctacagttccaagcaatgcctctcatggctcctgtggaggagattcgacattctcctccacagggtttcgagagtaagcagacacactggaactagaatcttctataacaaacgaaccaataagcgggtttcataattccggaccggctcggagaagtagatgaattctcaaaaggctcaaccgacaccactttagactcgttatcatgctgtttagtgtcccaagggaagtcacgaaagaagcctggatatttgcgatgaatcttatgcggcctagaacagagtgaagcagaagcttcaaattttcttttcttaaaaggcgtggtcctctcatttacgtccgaagaagtcgggacgccaatgtctcctccaatcttatgaatctcatacaagtctaacttcccaaagtgttttagatcatgtagtaaattttcttgggcttgaaaaaattgagatagagccatgtcttcatcagaatgaattattgttacacacgcatcctcgggaggggtagaaggaagcaaggtagtaggttgctcgggttgcccgactctctgcctatcaatcgtattagctaaaataatttttagagaatatcgctaaccaatcgtataactactccaataacaatgctctaaaaaaatcatcttataccaaatttatgggtctagttgtgacaaataaaaaaaaaagattttttaagtaaaggcaactaaattataaaaatattgtgggttagccttttaaatatttatacaactcacaaataaaatattacaattatacctcttgttataaaccttcagctgcactaaccaaaaatctcaccaacggaagcttcaatcaatcaacacagcaagacaaccgaaaacgaaactcaagcaggcagaaaactaccattatttttagcgacttcacttgagaagataggaatcattccaaacaaatgttgtttcgtattgatgaaagaaaaaagaaaagaaaaattggtttgaaactaaaatt

SEQ ID NO: 388420 - DNA, 2510 bp, Cannabis indica
atataaaatatagatatatatatacttatataaatacagataaaattttcaatttctttcggttgctaatgaattgtaatggtttggtgaatgttattgcaggtgaaaggtagagaatagagttgtgcaatatgctggaaatcagaaattattgtgtggagcagcaagtcccaggaattatagcattagctcagcattttgaagcaaggatgcaaagtaggtagcattgcctataacacctgggagtattgagtttttatgaaaaaaatggtgagactgaaaattcatttcattgactgtggggtttccaaagaattttttttttatatatatataaatatatataaatataacataatatatctatataaaaaaaaagaaaaaaaaataataatacattatatataataataaataaagttttaattttacttaattattattattattattattattattattattattattattttatcattttctttcttactttaatatttctgtaaaaaaaaaaaattgaaaaaccagccccaaagtcatcatcatcgtccccaaccttgtgcccctgagccccagtcgcacaccaccattaccgcccaaatctccaccttctccatcaaattccacacacatcaccatctctggccctcatcgtcactgctcccatctctgcagaaaacgcaacccttcaaccagccccagttccgcacaccagcaaccttcaaccgctcaccttcaccatttctccccacgaagctcaacccccatttcgcacgcacaacaccagccgaacaccaccttcacgagctccagtttgcacaaccaactgacgcgctcaccaccgagtttcgttcaccacgcatcaccatcaagctgtaactttctctgcaccacaagccgtgcatcatcttcagcagcaagaaatcgagcagctgcacaacagcccctgtacgcagtcaaagccaagacaacgaatcggagcccgcacatttcagccaaggagaagtaattccgggtttgtgaatttaaattgaaaatatttttgcttggaaggtttatttggtgaacattgtggtctgtgctatctgaatatttttatggtagattagtgttggatttgcctcaatctttgagtcgtgttggtgtgagtttggactgttgttgtgaagattattgtggctgaatatatttgaacagaaaagaatgccgagaaccaagcaaatggcttataagaagctgctggagctagatgaagacaaacgctttacgactcccgaagccgaaaccaagtacaaccaatttatacagaacaaagagttctacattgaacatgggttgataactaaaatggatgagttggggcacttgcttgcttggctagcggagaccatcaaagcgagaaagtgggaactttttgtatggactccagaactagcccgaagagagcttgtcaaagaattttatgccaactttttaaatcatcaatagccaacaacaattattgttcgaggggtgaaagttccgtttaatgcgaaggtcataaacaagtattgtggccttaaaagggttgagtgccaatatttgaagagtagcaagaacatcactgatgagcttatccgagacattcttcctgagttagccaaaccaggggctgagtgggagattgatgagaatggcaattttcagtttcgaagaactgacctccaacatgagttgaaatgcttgtacaactttgtccaaacaagtattctccaaacctcacatgattccacagtgagtatggagagaatgtggatgttgtactgtgtgaagaagggaatgagtatcgatgttggcaagattttaactaaggaaatctttgattgtgcacaccgagagaaaaggaagatgttcctccctgcactggtcacaggaatatgcagagttgctggtgtccccatacgggatgatgaaagcacagtcacacagaagcaggttattaactttggacttgcccctgctccaaaatacactcctgcaactgaatctacttccaatgatcaagtgatgaattgtttggccagccaagaggctacacagaatcagatagtggaaaggctagcacaaagcggctgcatgctcactgggagtacgaaagggagagagacatgtgggtgaggcatgcgctgcagaccaatgtgcacaaagttatcctgggatatccagaatttctagatcagattcttacgccttggcatccgattgacggtgaagagtttgacccttgaaggagttttcttctttccttaaccaattttattactgtaaatatgtgtggtagttctgatgtttagtttaaatgatgtgagttatgtgttgttgtggttgttatgtatgttcttgttgatattggttgtgtttattgctgtctttagttgtttgtgtagcaacattgtgtagttaatgtcatgttagtgatgttatttaacgccctaaataattaggcacgctacccaaaatactta

SEQ ID NO: 388421 - DNA, 1195 bp, Cannabis indica
ttcttgttgactaaagagatgtatcaatcaattgaacgcaagatatcttacttctagcggagttcaagctcgacagaaagtcatggtatttcttggaaaagttggtcaaaactcagcaagcataagtctaatggaagattgagatttagagatttgagagattttaatttgtctcttctgggtaagcaaggcttttgaattggtataaattcaaaattgaataccattaataatagtttagaatttaatacacaccaatttggtgtgtcattggagtgaaatagtgtaaagattttataccaatttggtaaaatggttttcgagatcttagacatctctaatagttacaccaatttagtgtagaatctacaccaatttggtggagaattttctacttttagtataataactctaataatttataccaaatatcctactaaataaatatattttacttaaaaattttacattttatattatttgcattactaacccaaaataactaacttattatattatatcatgactcacgattactaataagattttaaaatcttaaaataacttaatcaaataaaatgtttattaaaatatttagtcaaattaattaaacattatatatatatttttctttttttttttaaaaaaaaaaacttaaataaaatcaagcctaatatttattaagttattattttacttaatgtgtattttaatttattttgttctttttagtttcataacttatagtgttatgttatttaatattaatatttttattgttgttattttatattttttcaatatgttagtcttttaaattaattattacttttccttacacacaaaaaaaaattattacttttgtaataaattttaatttgaggactaaaaggtacggttaattttaaaataaattaaaaaggatcaagatgaaaaaaaaaaacgtttaacaccaaattgatgtagactcaaaatctaacaccattaatgatgtagtttggtatacacttatttagtgcatatttagtgtgtcaaggcttcttcaaaacgatattttatatataggctaattaggatttttgcccctcgaactttgacatgtaccaaattatgtctcctgaacttttaaggtcgttaaaaatgcccctgaactattgagattgttggatttaaggacttttatccaattttagta

SEQ ID NO: 388422 - DNA, 537 bp, Cannabis indica
tgtagtaagcgagatggagtcctattaataagataaacaacaatatgaattttataagaccagtatgtaagatcaacatgagattgaaaaagtaaagcacgagcaatattcaatatgtgctgatattttcgttcctttatagcaatttgtttaaatctgccaacacatgaatgataaagttgaatacctttggatgcataaaaaagtggtaaatttaattccttggcgttgtcacatcgaattacttttatggcaatgtgaaattctgtggagacatagtagaaaaattgtgaatgtgaataacaacttcaaatttaaatttaagaaaataaatccaagtatgacgagagtggtcgtccactatagtaaggaaataccgatatccttcaatactttctacatgaaagggtccccatatgtcgagatgaattaaatcaaagatgttagtagagatgttattggcacccgaaaattttaaggaaaaaaacagaaaaataaaaaaaggaaaaagaattacaaaaatactatgggccggcc

SEQ ID NO: 388423 - DNA, 2146 bp, Cannabis indica
cgtactaggcatgtgccatcagagttagtctaaaattatcaacaacaattattcattttttggagattatttattttggaatattattttttttattattttatattttaaacttatctcaactataattaggaaaaaattggttaagaaaccttaaaccatacaatgtaaacttatataaaggttatctgaagtcattgtaaagggtgagaggggagtcgatctctctcgaacttacatcattttcactctaaaaactcacttaatggttgatctcttagaggacataaagcattgagattaataatactgtaagtggactatacatattacaactgaaagggggtgcaccaatataaaaattcgttgttcatcattgtcaaattgcattccataaattagtttacttctgatcgacattcacttgtgtttatcttgcttgtttacgatctcttaatatctatttgttgacaaaaattgtgtcaacacctaaataaaactttatttcaatgtaattttatttatctattaataaaaagtcaaagattatttttgactaatgtctattacatggttcaaatatttattttatgattaattatttaataaacaaattttgcaaaataccgaacatatagcttttcctaattatagtgttgttactacagtaaaaaataattgtgatcatatgattcaaatgtttaatttatcagtacattagatttacattgacgtaataatcaactaaatggtttactcacagttggctaagtggaatatcttttctaaggtattatcaaaacaaactagattcaagggtatagggtttacatcaaattggaccgatattggcagtgaaaaagatattataacttaccgttatatatttttcaattcaatatcacttagttgatcttagataaattgatctaattcccgagatggttaaattttaagctaattatattattagagttctttgatttatttgttaccaacttacatggttcaacctttagggtttattaatcctaaaaactccaccaaagcttgcaaactacataaggctatctatggtctcaaacaagctcctagagcctagtttgagaaattttccactttagtattaataaagtgtgccactcaatgcatcaaccctcataatcttatcttgtttttgttaaaaaggtatttggctggtacacttgactatggcttgtatctgaattgtctttcttctatgcaacttgaagccttttgtgatgcagattgggcaattgatcctgatgatcataaatccacaacaagttcttgcatattcctaggttgaaatctaattggttggcaatcaaagaagcaaacaacaatttcaaggtcttccactaaggctaaatattgcagccttgctgctgttgttactaagatcagttagattcaatcattgctttctgacctcaactaacttctactcctcctaagatttggtgtgacaatttaagtgctgttcatctttcagctaatcctgttttgcatgctcacaccaaacacattgaaattaatcttcactatgttcgggacaaggtgatgcgaaagcaaatactagttcatcatgttccaagtgaaagttaacttccaaactgacttactaaaccaatctctagttctaggtttctagtttggagagacacactcagtgtggtatgttctaccaccctaagtttgaaggggacgattaagggtacctagttaagccactgtttagtaattgctaatatgttacaagttagttaatgtttatagttgcttttcccttcttgttaactaacttttggttagttagttgtagagtcttttggctcaattggttgtatataaagccctgcaatctcgttccttaatttaatgaattacatagcattttttttttcaaattgctctttaatttacaaatactaacagctcggttcggcaaagttaacaaacatggagaaggagagagagggggcgaatgagagatagattagagacgagatagaatgataccgacactaaaagaggataagagagaaagagagtagagttttatttttaagtgtgggctgaaatagatttttaattaataacttttttttaatatatataaacg

SEQ ID NO: 388424 - DNA, 1934 bp, Cannabis indica
tgctagcttaattatatctcaatttaaaaattaatatatagtatatttacaaggtattatttagtataattcaaaattaatgattgaaatatttgaaaaatattattataacaatatatatagtagccaaaaaaatatacaacattataaatttactaatattatatatttaaatatttgaaacaagatatattacattaaataaataattttacatatcaaatcccattactaaaaaattatatactaattaatataaggagagctatatgagatattatgtcaaaaatcagcattatataataatataatttttttaagaataatatagatttttaacttatgcaagaaaaataaataactaagtttaaacgagaattatgtttattgtccaaagatcttgttttaaaattactaatatatttaaaagtaaatttaatttaatatacatataattatataatttatatgttacgtgtgctacacgtaaaacttcactagtactataaataagtccatcagcagcatctgtacaaaattcagtcctacttgtgaccatattgacaacagttcacaatcagattcaatggaaaaggaagataacagaagatctcgagccatcctgagtccctcgtgttagactttttatttgtgcatacattaatttttattagttttaataaaagggttttttcttaataaatatggggaaaatgaatagaatttacatttatatgacataaataaataatacaaaaagacataagattaaaaaataatcaaagtttaaaatataggaatttcaaaaaaaatcataaataaatttaataaaacttctaataacaaatatcctcggaaaggcgccggagaagatatcgacaccagaaaagaccgaaaaagtcattagcgtcgaaaaagtcactggagaagtcatcaacgccgtactagaaaagtcgttagaaaaatcaccatcgccagaaaaatcgctgcaaaaatcgtcgaaaaagtcaacagagttgtgtcgtcgtttgaaaaatcactagagttagatgtttcagatataaattaaaataaaattgattctttaacataatgaatagaaataagtaacacgcaataactcaaaccgattataattaaaatagaaccaattctataaaataatgaataaaaacaaattgcacagaataactcaaaccggttataattaaaataaaattgattctataatataactagtacaaagaaataatacagaataactcaaaccgtttataattaaaaaaataaagagaaaaattagttcctaaaacactgaaacataaattaaaaacaaaactagttccacaacaaattgagtaaaaatgaataacacattatacctcaataaccgattataataagaaaatgtaagaatttttaacgtcattttttgttaacaaataatgagtcttgatttaataaataaacttcaatataataaataataactgtaataataaataaggacaagaaagttttttacgtgattttgaagtgaattcttcatattcatagtccaagagtccatcttattatcaggatttcgatgtttataggatacaatatctagttcattctctataattctcaaattgttcgtccccatcctacgaaatctttccttatttatagatgtctgggatatgcagttcttcccttgagatcttatccttgtaactgcatatgaaacatgaacaatccccacattttatatttaagacacatgagccaaatagataaccatcataactgcccttgtctatatctaaaaacggttatgctaactaagtttctacgcctcacaatcactacaagaaatcctgcttttgccggcgtattgttgtgccggcaaaagtaccctaactgcgtcggcaaagcttatctgggaagct

SEQ ID NO: 388425 - DNA, 896 bp, Cannabis indica
tgttgaaggatctgggcaactacgttggtacgtacgtcaaaatgaatacaaacaattttattggggggtggagaaattatctgagaataagggtgcgaattcaggttgacaaacctctaaaaaaagaaagaaaactacaattgaagaatggtccagagtgtactgcaactttcaagtgtaaaaaagcaattttaatatgtctctacagtgaataataggatactgtacataatctcatatattattttaagtgagaaacaacactaaattcaaatttttagtgtctggttagagatatccttaattagtgagaatgttttataggctgagatttattaaggagtcaccaaactaaccaaaggtgtgatcctttaggttattttttgctgaataaatattacttgtctataaataattatttctacaaaactaaacatgataaatgtttaatgatgttataataacgccataatcttaaacccttaaaataaatttaataatattgaccgaaattattatacaaagctttctgtatatagagatgtaactaagatttttctcataatgaaatgaaaattatacttaagcaaaaaataaataaataaatgaataaatatataaacaaattggtgccacctgtgcattcagactgcctgatccgccactctctgactgtctaacatgtatttacagttgtatgttgtagtacatatgatgcactttactttgtaaattttagttgaggttatttttctgacgaatttcgaatcgtcaaacaaccaccgttcgattgtaaaatttacatatatctttatatattaaaagtgtttatttaacggcatttattgatttaacagaatataccttaaaaataaaaataaaagaatattctgtta

SEQ ID NO: 388426 - DNA, 1263 bp, Cannabis indica
ggtggaagcggcggcagtggcggtagcggtggagaaagtggttggcatggatattgacatattgtagatgaagaatcaccatcattgtgccttgcaaaaccaagtttgaagaaagtagataaccaaatagctatgaacaacataattagtttttctttgaccatctttgctctattgagtttcaacacatctcaagctttaaaaacatacataaatatagctaagtttcttgaatactcttcttgaattgttgccaaatggcagaacatctgtcaagtgacaatggcaagtagtagcctaagtgttcttttttattactaaaaaatgtatatgcagacaaattatcacatgtaatatctctattgatatgtgttatgtttctacaaggctgatatttatatttatataataaaatttattgaggaaaattgaatagaaaaatactcaatttaacaaaaattttcatattaaacttaaaaaattgatttatttttttgttattcacacttttttttttaatattttctttcctcgctaaaatccaactttaaaacatagccatagtgttgaaatgatatacataatgtcaaattttatacatgttggacttgttaacttattaagatagctcaaatggttagacctgtgatttgcttcgataattcgagtatcttttcggcctttgtggcacttttaattcaattcttaaaagaattaaaaatctagcagctcattgatgtcacaacataactacaaattttttcaaactttactcttaacagtacaaatcaattcctattgcttacaattaatcagtctctctattgcttacaattaacataactcacttaaaacatttcatttcagccactaagaatttgacacaattaaacaagagtgattcataaaagagtgagagccatcttattataatgtaggacaatcaaaccaagtacataattgatgaggaaatgatacataaaatgattaatattatgagggagaagtagtaaatggggatcaattattgaagtctttctcattcaaatatacataacttgatcgactagtaaaagatgattttgtaatttgaggtgaaaatccattgtaagtcccatgaagcttttttaagcatatgtcatttatgcacttgaaaaatccatgttgttgcttcatcaatggttgttctgcatattccttgaatggcatccactatcaaaaatgaaaccaaattgaattaataaacactaattagttagtagg

SEQ ID NO: 388427 - DNA, 1220 bp, Cannabis indica
gtaattgaatcggtcaattgtcattgaattggataatttatgcaaccctaagaaaaccaaaatgtttttattaattctctctctcaattctattatttaaaaaatattaataaatgttaaatattaaggtgattattttaatttgtgaaaagcatatatttaatcaccattacaaaattaaatatttcaattttaagttataatatataacatatatatattacttttttttatgtaattagtaatttttttaatataattcattatgtatacgataatattttatttcttaagtttttatttttaaagatctattaaaattgctcgataaaaataacttagataaaatgctatgtggtaaaatttaaaagtgaattaaaaatactttttaataacccatatgaagttggttacttatttaacgttaattttttttagcaactttttatgttaattttaaatatttttaaaaaaattaataaattataataaaatataaaaagctaccattgaacatatatgtataaaagttacaagtttatggaaaattctataatacaccatcttaaaagggatgcagcgatacatctttatctattatagtattcgaaataatttttaatcaatttttttctcatggtcatgtaaattatagttatttaagacaacctgcaaaatttttaaaaattcaaaaaagtttaacatgccaaataaactgtttgaacattattttctttattgtaaattatttcgaattttttaaaattttgtaggctatcttatatagctataacatacatgaatatgaaaaaaaaaatagataaaaaaattcttttggatgccaaaacaagtagagggtatatcagtacattatttttaaaagggtgcattgtagaatcacataaagtttattaacaaaattagtataatcatatgtattattttgaaatggtatttaaaatactatttggttacttaataagtttttttaaaaaatatattggaataactttattaactagatttgttctaaatatatcaattggtgtcttttaaatataaagtaacatctaccacgttggtttttgtattgaattttaagattctacataattttcttataaattattttaaaaatttatcaaaattgttttataaaataaactcaactagaatacaatctattattttttaaatgaaaaataataaaatatttttta

SEQ ID NO: 388428 - DNA, 629 bp, Cannabis indica
atgaattttgccctgttttctcgcatagtttccagctccagccaccgatatatttttcaaggcaatatttctacaacaatggcagatactctgtccggttcgccggagacattcgttgataaattagttgtaagtatttttcctcttctttattcttcctccggttaactcattacctgtatatgcagttcttaatatatattttttattttggtatcattacttaaacatgaataattatgggtttttaggttcctggtgatgtggttcttgatctctcagccatggctaaccagaccattaagcttggcagcggtcttcgacaggtctccatttatctacctcataacaatacggacgcacatatattttttttattgttattttatatattttcttgggttggaaatttcaggagtctgatgctatatctgtgacgaaagctgggaaattgaagttgtctaagcataataagtactgggttgagagctcccagaaaagggtaatgagctttctagttagagagtttggttttgttttggaaacaatgaaattggggtatctttgtatcactggtttgaattctctaaatctgcaatttttattgtgttcattagtttgtgtttttt

SEQ ID NO: 388429 - DNA, 569 bp, Cannabis indica
gatgaagatgaagataatagtacggtcgatgaaagtggctccattgggatggttttgttcagcactttgttgctgtttgtggatctttcgtagtttggatcatgtgtaagtatataacattatatatatatatatatatatatatatatacttaatgtaagtagttttactgaaatgtatttctttttgcttgttttgttttctgaataggaagccacaaaattaaaaataaccaaaaaaaaataaattaaggtaaaagaaaaggtttgttttagcttaaactattattttggcaggtgggtttttcagctcccactcaatctgctatcagggaaagtctaaatctctccttagctcaggtttgttgtttttgttcattaaaaaccagttcttaaaataagttaaaatacatacatttcttactaactcttatatactataataattcacattgcagtattccatgtttggttctatagtaacaattggtgcaatggttggagccataacaagtggccggatttcagatttccttggccgtaaagggggtaatatatatatatatatat

SEQ ID NO: 388430 - DNA, 603 bp, Cannabis indica
cacagagcaaagggcagaccaaaatcatgaaaaatgttaaatggtattacataactattttttaaaaacactacattaataatttaataattattagtggtacaattttaataatttaatattaaattttatatatttttattttaagagtaatggtatataagtgcacatataagtcacacataactataatatacaggtaacatattagatattagttttaataagtgagaatcatcttaaataaatataattaattaaaattatttatagcataagtgttaaatttatgtataatttgtatatccacgtatcattccttttattttgataaatcatatggaaaattaggacactgccttttgctgtgacatcctagagtgtctaataatagtatttctctattataaataactagggaatggtacggcgcgcggttttaataataattgaaaattacatatattaaaataattttatattttatagtgaagtttatatattttatgattaaaattcatgattaattttacagcgtgtacaatttaaattattataaaaataaattagtaagtattttttttctcctgatttaaaaaaaaa

SEQ ID NO: 388431 - DNA, 1115 bp, Cannabis indica
ttattattttttttttcaattttgacgattaattttagctattttttcaattaataaataatggcatccatctagttattataacttttgatttcggttttataaatcaaatgttattaaaaaaataattatttttttatctgaaatattaatatatattttaaataatcgtttttagacttacaatatttagaggtcaaaaattggtcacaaattaaagattcatgagcattattatgttctatttggtaaaatataaagttgaaattgtcatttaacaagataaaatatctattaataatttttgtaaaatataaagtctaaaataatatttaatctatcttttaatattcttcattctttgataaataattaacaaaaattataatttttaatatgaaaatatccccaatagatgttttataatagctaagagctaaaaaatagctaaaaggttaacattcatcttcaacaaattctctaaattcttagctaaaatacatcattccaaatttcaaaaaatatttagctaaatgtagctaaactttaaagtttctctatttagaagtaaaaaatgggtcacaaattaaagattcaaatcacgagtattattatgttctatttggtaaaatataaagttcgaactgtcatttaacaagatgaaaaacaaattaataatttttataaaatgtagagtctagaataatatttaatctatcttttaatatccttaattctttgttaaatatttaacaaaaaatatatttttaatatgaaaatatttttttaccattcaatattgactaatgaaactaaaggcatctccaatagatgttttataatagctaaggactaaaaaaaatagctaaaaagttaaaatatttcatctccaacaaatactctaaattcttagttaaaatccaccatcccaaattctcaaaaatctttaggtaaatatagttaaactttaaagcttctctatttatttattttaataatttcttttatatttaattgtctttatttctctcattagcatttgtttattaaatttatcatttgtttattttattttattttatttttttgtacgcggtgatcaaaatcacacaaga

SEQ ID NO: 388432 - DNA, 3559 bp, Cannabis indica
aatcttgttgatagcttccacttatccatttacttgaggtctggccatagctaaaaagcttttgacgattccacacttgacataaatttagtgaattgatcactgtcaaactactttccattattgaaaactattttttgtggaaatccatatcttcacacaatgttcttgattgcgaagtccaaggcctttttggaagtcactatgttcataggtttaacttccacccatttattgaagtagttaacaactacgatggcaaatttgactcctccccttctatttggaagtgatgccactaagtctattaccccaaacaataaatggccaaggacaactcatgagggttatctctgttggtggagctaatggaactttggaaaaatgctggcattgtttgcatttacgaatatattcattgcaatcattctgcatggtaggcccaaaataaccttggaaaatgattttcttggaaagacttggtctgaatgtgtgattcccataaaatcctttatgtatctcatgcataacagtgattatctcagttccaacaatgcaccttaggtatgtcgtcaataatcctcttctgtacaactttccatccatgatcacatatctgggggcttggtattggatcttccaggagtgtgcctgattctaaatacttgagtattggggccataaaaggaagttgaatgatcaatggttgacatacccagtgtctctgtgcttggagtaagtagatgtgcgatgggcactagtctgtatttctccacttctagatttgttgccaatttagctagtatgttcgagaaggcattcttatccctagggatttgcttcaaaaaatagttcttaaaatgttgcaatagctttctagtattggctatgtaactaaccatcttttctccatttttcttgtagtctctagacacttggttgacactagctccgaatcactgtacaactcaatgttcttggcatcaatctctttagcaaaatgtaagccaaaaatcatagcttcatgctcagcttcattgttggaggctttgaattcaaaaagtgcactttggagttgaagttattgaggagaaattaaaattattctggctccaaaacctttttcatttgatgctctgtctacatatattttccatacttctatctctaggattagcatttcaagatcttcattcatccccgtgcattccacgatgaaatctactaaggcttgaccattgatagaattcttggttgatactgtatatcaaattggcttcgctctattgatcattttgaagtctttctgattactctggcttctgtagcacttgatggagaaggtggttggtcagtaccctgatggaatgagcttgagagtatggtcttaacttttgtgaagaaattagtaagcaaaaggaaagcttttcaatcataggatatctcgactccatgcccagcaatcttttactcacgtaataaacaaagagatgtatatttccttcttctcgcactattacggaacttatagtatgatctaacactacccggtacaagaaaaatgactctccctcaatttgtttcgataatatcagagccttcgttagatgttctttaagttgttgtaaggcttctttacactcaattgtccattcaaactcactatttcctcaaagtacattaaagaaaggtatgcacgtatctgtagatttggaaacgaatttgctaagtgctgcaattcttccagttaaattttgaacatccttgtgttttctaggtgaaggcatctctagaagggctttgatcttctccgagttcacctcaatgcctcgagaactaactatgaaacccaagaattccttgaaaaaactccaaaagtgcatttctttggatttagtttcattctatactctcggatgataaaaaaagcctcttctaaatcttcgtgatgattcatggaagtctttgatttcactaggatgtcatcgatataaaattccatgttcttccccagtacattcttgaacattttgtttaccattcgctggtaggtagctccgacgttcttcaatccaaagggtatgaccttggagtaataaattcctttgtcagtttgaaagcttgtatgttcttggtctaccgcatttttatttgattgtagccgaattatgcatccatgaagcttaatagtttgtaccatgaggtttcatcaaccatctgattaatttgtggaagtgggaaccaatcttttggacaagctttgtttagatctattaaatctatacacattctccatgtccctttaggctttgggaccaaaaccaaattggctagccatatgggatatagagcttccctaaggaattcgatgttggttagcttgtctacttctgccatcactattttcgagctcacttgatataagggtctcctcttttgttgaactgaatcagccttgggatctatatttatttcatgaaaaattacttgtggactaattccaaacatatcagaatgactccatgccaatacattattgtttgccttaactgtggagactgtcttttctttcactactggagatagattttttctcgctctaattactttggtgggatcttaatgggagagagaaagtatgaagaggttaagtttctttttagctaaatgatgtgagataaataatttaggtttatttaaacctaaaatcacaataataatagtaataaagagattattccacaactccataataaaacaaggtaaacctcttgggtaattaccttaacttatcacttaagtaacctttaggtttaggggtaaaatggtctaaaattataaccctgcttaaccctcataaaccaaaatcaaacttatgactgacccactagaacaaaggttctaagctagctcatgcgactctaatgattgttcgacactttttccattcgaggaaaaattacaaacataataattttcacatatagcataaataatacacttagagtttaataaaatcttcgaaactgagaaattataaatttaatgcccgttcttgaaaatagggcgcacaacatatattttcatacataattataaaataaaagtaattaatactaattgccctactaatccatatgctagtcatgcagtcattacaattatctccccgttaaaagtatttcgtcctcaaaatctaacatgaataactctgaatattgagtcctcctgttggactctatttttgaggtggcttccttcaccttactattcctctaaagtactttgaccaatgctatcgtcttgtttcgaagaatcttttccttcttattgaggatttgaactggttgttcctcgtaggataaatttaactagttttagggcttcgtaactcaagacatgagtcaggcctgacacatatttcgttaacataaaaatatggaataaattatgtacagccgacaatgctggtggtaagcctagccaacacgctacctatctgaccttctcgagtatctcgaatggccctatgaacctagtgttggaaacttattttacc

SEQ ID NO: 388433 - DNA, 536 bp, Cannabis indica
ttggcagcttgtgcattagagtacataattattaaattcttgcgtgttttttattctaaatttagataaaactattacaccaactccagtggttttagttattacatttacatatatagaacaagaatattatttagttagttaaggggcgtttggaatgaagtattcaaaacaatttgattataggatatagtatgaaggaaaatatgatggtagagaaatatgtaaattgtatttaattgtgtatggtaatatgtaatcatatttccattaattgaattatacagtttagttaagtacaagaattttatatattatatattttaaaaaattaaaatgaaaatacttttttattatatttgtttaatgttaattatacataaaaataaaattattattcattaaaaaaatacataaactaattaataaattttattatatttattattaattaaaatgattatttctatatattttatcactatattatttatttttgttcgctatgtcatttgtacaccatccgtataaaattt

SEQ ID NO: 388434 - DNA, 556 bp, Cannabis indica
catagtctaacagtcgtttatgtgagcttgtgtgttgagttggtaatggtgaggtgaatgtagaataagagagaaagcaggatgaggaagtagttactagttagtataaggttccatcaccgacataaggaatcggtcattgacacttattaacttattggccttgatacttgtgtttatttattaatggcgatgttgatgtctcatggcctgtgttttcatcaaagatacagtatattgttatctctagttgggaaaaagaacagagtgcaaagtgtattttgtgatttatatttttctgtcccctttcttaatcaaatacgccaaagtggaattcattttttattttaacttcatcaccgcaggctttttttttttagggaaatttatataacaactcacataagaactaataaaacagtttaaatcgcaaccgaaattcacatagcaacctacatagaaattatcagagtactcactagagcaacccaaaccgtaaaaataaaaaaataaacaaaaaaaattaacaaatggtatatgagataattctccttaa

SEQ ID NO: 388435 - DNA, 635 bp, Cannabis indica
ataaaattgttgaaaaatgagtttagggtcctatgtttaccatcttgaaaaatatatggtccattttgttatttaacaaaataaagagtccaattaataacttttacaaaatatagggtcaaaaataatatttatcctttattcaattgaaattcttggttggcttgcgaaaaaaattgcaaactctgttagaatttgaaatataaagtgaatgaggtttcacccaaaataaatttacagtgagagaagtagcttattcatcatatatttagcaatttagttccaaacatgatcaatgtggaactaagtctaataaattcgagaaagattgtataaaatgaatgcatatgtgtttcagtatgtattttttttttaaaaaaaaaaaacaggtgtcactcatctttgcattttagcctagttttgatagttttctgcaaagtggcctcagtctaaaaattcgacaactgtcttgagtgtcgtaggcctttcatacaaaatcttatagatatattagcatacatacgaaaatatatgagtattattttaaagtaataattacataagacactattttttataaaatatttatatttttacgtttaaataatattttttatattttttacgattttcta

SEQ ID NO: 388436 - DNA, 1990 bp, Cannabis indica
aatatttttttttttaaaaaaatatatttacaaaaattcaaaattaattaaaattgatataataatgatattttggagtaaggtggcttcagctgcatgcttttggctaatgttattatgtacacgtatgttgtgaatcacaatatatatctttctttctttctttttttggtataaataattttagtcaaaacttattaattttttttctataaatatagccattatacatgtatgtaacaacttaaatatataattttttacaacataatatatttgtgctgacgtttaaatgaagtattcacatgatcaaaggccttttttttctttaataataatttgagtatccaatattttaaatgtagtatttttttttagtcagattggattcatttaatattttaagtctagtatgtattggattggactgtattcattcaattcaaaaacagtaaaattttaatattaatttttatatatatacatatagattttatgtataataatataaaatctaactacgcatccaaactaaataaaaatactaattaactcgattggatgttaaatatattggatttttgggcacctcatctaccatctaatccgattcaattggatatttaaaaataacatccaatcccgatccaggatcacaatagatctctctaatgtttggcggtcggttgtagttggatcagtcggttctcattagattcgatcgatttataccacccctacacacaataatgcatagatcaagtcggttctcattgtgacgagccagtagtccttagatccgtaaaagaaaaataacaagtaagatgtgcaatcccatatcgtcgtcggggaaagatcaagtgtaataggcataatgagattgaaattgacaataacaaaaggtctaaagattaaaggcaacagtaccggttgacatgcagtcggttttactcactaatgttttgtatgtgatatgtaatgttatcctcattatgtgtacattgtatacatatatgattgatcgagattatatatattgagctttgtatttccttaatttttcaataagaaaaacaaaatcaaattatatgtaatgttaaatttttcatatgtagtttctaataattaacattagcacaaattaacaagaaaatacatatttatttattgatgatgtttaataaatcaaacagtacatatcatatgttacagaacaacacaacctctgggatttgtgtcatcgaacatgtactggagttacacaaatgagtaacaataattaagaaaaataaaaaggacaaacgataatgttcttgttttttattatttaaacattaataagaacttagaaaattaatatgaatgagatctcttaattgtgatatcatatcaaaatttgagcatgcatgttcccattcccatacccaatgaattcgaaacgtcacaaacgtagggctcgcaacacttctgtcccaagctttcgttacaattttccatagccgaaccgcaccctagtagtttccttcccaccgccgcatcttcatgcagaagctgctcggaaaccacctcgccatcgccattggcctcggcctgggccacggctgatggaatattattaacaaacacagataatgttatcaacaatactaccaaatacctaattacttgcttcttcataatactctccattaattatctttcttgattatgatcaataatacttaaagtgtttaatttaattttggtgattttatcttaggtaatgtgctatcgttttataggccacttatactaaataatgcatggacgaacgaattacctacgttatagtacgtgtgagcaaaaatccatcgttaattttttttcataattatatatagaaatgttcatatagtcaaaatctttttttatggccctaaaagagggcatttgagagctaaatgttctttaattagaaaatagaataaaattgttttttgtttttgttttt

SEQ ID NO: 388437 - DNA, 821 bp, Cannabis indica
aaaaaactgtcgacatactattgataaagttaggcatttaatgctaattattgttaagcatttattactccacctttccaacaacttttctggtctataaaagtaaacttctatttcttaagttgttcatatttcttctttaatcctagagtattcttctcttctaagttatatatgtctaataattctagttatccactcccattttcctccagtgtggatgaatttgattctgacttaggagctcaatctccaaactgtcatcgtactttcactatgcataatagaccaagccatgatgagcaagtttgtagaataatgtgtcattatcgagctaggccagtgagcagctcgcttacgaataaagattcgctgcaagttttatatgctaacgaaggaaataacatctcccttcgtgttcttgtcaatgttgaatgtcaaaccatccaattaagagaaaaacgtaggtgacaatatcgtcgcattcaggttagagagcaaagggaacgtgaggatcaatttgaatgtgaaagggtggcaaacgagaggaggttggaatgcaatcgaagggatggtattcttttttctcctccaaggttccccgaaggtaggggtgttcataaaatagccgatccaatccaatccacacgatccaatccaatccaatccgtaaagtgcggagatgcacacttgtgcggattggattggattgaaaaattcaaaatccgcacttgtgcggattggatgttgattgacatgtaaaagtaaccgatccaatccaatccacaaatatttataacaaaattaaaaaattatatata

SEQ ID NO: 388438 - DNA, 843 bp, Cannabis indica
ctctctctctctctcatgtggatctatccacattagtgcatgagaaacacgacactgcacgaccatgacatactccacaccgtcccacacagactaagccacaattttttttgttcttcttcaacaacaaaggacgggtaagcatctcctcctctctatctctctccgtcgatctctctcttcttctctctaattttttaatttttttagatacaccatggttatgggttttgttgcttgctctcggtggctatggagtttcagagatcaatagacgtttcacttttattttaattgtttgcatattttatttttgtgtatacgtaatctagtttatgtaattatgatttttgtgtatgtatattgatttcacataattgaattttgtgtatatagatatatatattagtttgtagttctgatttttattcaattttatagtttatgtacttcaattcgtgtttggtaattcgaaaagagatctaggctcgggattgttcgagttcccaaatctttatttttatttttgtttctgtagtgtcggttttgaaccgacatatattgtataatttatttatattacgtctatttaaagttgctggtactatttaatacgtttagttacaaaacaacataatagagtaaatatttgtgtcccccatatatacgtcagttacacaaactaacacagctattatatacgtcatttaaaaaagagtaatttgcggtaaaaccccccaactatcaatttacttgcaaaaaaccatccaacctcatattttggtggaaaaaacccgtccaaagtactgttccgtttacatttttaaggtgccatctgtccag

SEQ ID NO: 388439 - DNA, 669 bp, Cannabis indica
tctaaaacccaacaataacatccgataaaatattcttaacatataaacgcgactctctaaaagctcaacgttgctttccacagcttccgaacacaatcacagaaattgaaaaattttacataaaataacataataacatatatgatattaaatatatctccaaaatatgcatttcataaatattaattaatctcatacataaaccctaatcatttaataattcaaagtattaatcatatgcggtctttacaattaacattgtattattatattaaataatgaatacccatgagtgtgaatgttcttctttgactgaaatattttcatttttttgttgtttgactgtgatttctatcagagaacaatatcattcattccatgaggatgattaaatgcaaaataagaacatgtatatatataattaaggacatgtagatcggtaaggcggccacgtcaactattgacaatggcatctcttaaatcatcattttaattatgacatgttccaatatttattactgatgcaaatatattgtcatcgtcatttttatgaaaattgcatccttatagttattatgaatattttgtttttatgctatttcgatctaatttgtttctttgaaggattttaccatttttggttgtgcttcttatggcaaatatatattt

SEQ ID NO: 388440 - DNA, 1673 bp, Cannabis indica
ctcttgctttaatgtatggattgtaatggctacttgctaatggtctcaatgttcattacatagagactgactctcttgtagtggccaaaggactgcaaacccctattacttcagtgtcagattttcatggtctcttatcagacattatgcatctagtgtccttcttccctggagtacaaattggtcatgtttacagatctgccaatacggcggctcatctacttgccaaaaatgctctctcggcggactctatttgttcttggttggaggaaatgcctcccccgttaaatgcttttgtattatgattgttcatttaatataaatgcattttcttctcaaaaaaaaaaaaaaaacgatcttttagaggcgcatgtattgcaccagtaaaatttttcaaaacaatgcaggcgcattaaaggcttctgcaaaacaattaaacataatgcagtcgcataaattaaagggcgcgaaaatatggcgggtttctattttttctatttattttacttattgattttattttcgttctcattttcattcttcaatcacctaaccattcctctattctccatgaatctccaattacctaaccgttcgatttctcataaatgaagttccctcattgatcgttgttgtattctcctccatcgacagcaatggagttcaagcgtcgtcgacaacagttccgatctcatgccttcggcaatttcgattccacgttacgactttatttttttttatctttcctctttccaattgtgataagtttagctcttgattttttcccaaaaattaatagcgataacctaccctgtatattgtgaatttggttgattctgtctcaattttaggaacaattggttttaatttctctaactacgcaatctttttattttcttattccatttgatattaaaagaaattgttagttttgttacctgtttagaataatgatgaattaaattgagaatataggtgtgaataattcttaattagttggtgggatataattcctaattagagttttgctacctgttttatttgaaattagaggtatttttactaattttcatacgtcgattatgtttgttgttttcacttacccaagattcttagaaatttgatcgaatgagtacatggaagctttttgagatgctgccactaatgttccaaaatattttcaggctctgtatctcaccgtgttcataattttcaggctttgaaggtgagtgtaaaatattgtttaagcaaagtcatatgtttgaggctataatttttgtattcctttgcttttgaaatgtcccaaatgcattcataatactaagctctgtgacttcaatatgtactatctatgtaagaccaggacatcaaataaggttcttcatattccatcagtctgctttgttacatttgctagcaaggagtctggcgacaaagtagtagcacttattggaaagacatttcttttaagaacaattcaagtatgctatcctgctatattttagcaacacactactacaaaattgggctttagaggcggtttttaagggctttcagcgtcggtattggaaaaattcgctaccgacgctgttctgggtgcgctaaagggttattatgaaataaccgacgccataggggtcctatggcgtgggttgtttcatataaccgacgcc

SEQ ID NO: 388441 - DNA, 1024 bp, Cannabis indica
acggtttttttttttctttacgttgtcgtgacgtttcgtttcgtcgctatagttaggttaggttgtttagtactcgttactatttttttttttttttttgaagaaggtactatctttttaatggagatgggtgcaagaatgctgtttaggagatttcccctagtgctaggcatttgttgatttattgagtataaatttacacagagatcaccgcctatttttgttagggtaaatagctgcataagtactcaaattttaagtttgtaagcggcataaatttaattattttttttagtgccataagcacccaatgtttataaaactgtaattttcttccagtttatgagtacagacacggttattgttttatataggacacatataaaacccaaattttaaattatttggtctggacgaaaaatatgtggtatcagttactttcaaatctttttttaatatgtagtattagtttctgacgaaaatagagaaaaattacaattttacaaatattgggtatttatgccactaaaaaaaatcattagatttataccgcttacaaactcaaaactttgagtacttatgccgctatttaccctttttgttatgtatgtcgcactttctaatgaatatgcaacgagtttcccccagattaatgattatagttgaaataattgattataatttggtcaccctttgtattgtgttatcatatacattcagattagaatgtctatgatgtatgatgtattgttttgtagattattattcatgaagaatgatgattgcctattggatgtgttttgtattactgtactagctttttatattttggactatgaatagatttttttaggactgcttggacttttatctatttacactttggaccgttgtgttttctaatttgaatgcctggaattttttgtattagaggttataactatggatttggactttattatggtggtcaggtggtgaattcttactgactttgaaacttaaaaaaataattaatgtttggtgg

SEQ ID NO: 388442 - DNA, 1372 bp, Cannabis indica
gtatattcttaggatatatcattttcctttacctaatcctacatagtcatgcccccatgctaggacaaaaaaaataaaaaagtaatcttgttatgaatagtaacatgggatattgagcattgttttatactttatatacatacataaaagcagtcattttcttaatacccccaaatcaattttcatgaaaaaaatcaaaactttaaggcaattttcagttatacattacaaaatatttgagtttcttttttatgtaatgcgagccaacaaggagtagtagtttgttgcatgttttatgggaaaagtgactagaaaactcttaagctactcaaattgtttttttttttgtttcttttgtttttgtttttgtttttgttttcatgtatatctacaaaagtacagctgtccctagtgaaagaaagaaagtacaatggttatgcttgtgagcatgtacgaagcaatatgggggtgcttggtcataaagacaagaaagaccaactcacctcttcatgttgattctgtcttatatacaccttcttctatctacctatgttctttttgtttgtaataataaagtttctgttaaatttgatgatagaaaaaaaaaaaaagatgaataaatcatggggtgtaaagctttgtaagtaccaaagaaaaaactctcataaagttaatatctttgtcttgtttgaactttgaagccccctaagaaaaaagttcttaggcattatcatgctagaaaggccaaagaaagtgaaaaaaggttggctttttgttcatcattggattgtagatatttatgattctttgtacattggagttttgaatgaaatttctagagtgatttaatgttaatagagatattcatatggtgaaaagaaacataatcaaagatgagaattgtactttagatccctttaatggtattcataataagtatttatttgcttctcaaacaagagtattaaggtttagtgagacataatttaattatctaagaaaccaatccgaaaagattgaaaatttaggagccttttcaaaagtaaaagcagcattagtttatcaaacaatgacaaagaaaatgtgaaattgaagcttttatttgcaaatttttgaggggagcggttaaagaaccgaaaataaaaaatattctctttcttcaagcttcaagagaaactgatacagatgcaaaatgagtggagggaatggccttcatcatgtaggtagaccggaccatttagaggttgccgatgtttatcggttctcgcaagaacctctccatttgacgtgccctagtcttaatcgacatgtcaaacaccttcctatcgaattctaccacgagcccacccagaatactggtatcaatctgtca

SEQ ID NO: 388443 - DNA, 1017 bp, Cannabis indica
cagcaattgggtctatggcagaaaccaacttccaattgacttcaataagaacatatattcccaaagattagcacaaaaagatattaaaatcagtaaattaatcagaggtaaactgagaaattggactaaccttcattcaaatgagacatctctgacaaaattcaaacttttttaactgatcaactaagcagtacctgaaacttcacatgcattgtttggttggaaagaaacttgttctgggattttatagtgtgtaaagtgagactcaagctaaagcaaaattcagtcttggacttgactttcaaaatgttgtaagtttggttcatgaatcatatatgcatattataatttggtcaaacaaatgtattcgatgttaaaacattcaattacatacctaaagactgaaatttcaggtcaattaattaaaatggcagtgaagaagaaattcacctccaaaatcctttcttggattaacaacacttaacagaagtgcttaattaaagaacccccaaatgcattatatttaagtgacaagcaaatactgaattttaagcatcaaaaactatcaaagaaacccaaatttttaaatgaaattataattgaattgttccaaaatcaaagctaaagctcatgtcatttacaattcaagaaatttcatcaatcaatttaatctcctctaatcaaattaaagattttagggttttcagtttttcactgatatgaagaaggaaaaaaaccattttttttattttatattttcaatctgatatgaacaaaggtaaaagaaaactgtaagaacctggaaatgtaatggtagtaggccaaggaggagatcggagaggggcgattggtgaggacgcgccgccgttgggttaagtcagctaatggtagaagaggatttcttttcataaaacggtgtcgtttatcaaaattttaggctaaaataaaagctacaatgaaaaacgacacattattgattttttctcattcatatgtattaaattaaagtaaagaact

SEQ ID NO: 388444 - DNA, 1428 bp, Cannabis indica
tatgttaggaaatgttgtctcgatcatacatgcacaccagtactcaaaaccagaagctaatttgaataaagaaaaatgacaagtccttataatctaatatcttaatgtgttaaaactctagtctcttagattagtctaacaaaaatgatagttgacagtagaccatgtttttatatataactcaataattttatatttattctatataatgttctccaatacctttatataagtgctcaaaactaacttgactagtgtcaattaaatatcttaactggcttaacccttaacagcaatagcgaccacaccacagactaattacatcaaagtaaacttgacttctcaaatattatttgttgctgatacatactaaaggatgagcactttttttaataaaatattgtgataggttaataacatcgtaggtacttaaaattttatgtttatgtttttaagcggtataagtttaatatttattttagcggcataagtactcaatgtttgtaaactgtaatttttcttcaatttcgtcagcacagactcttttaaatttattaaaagaacatttggaagtagctgatactacatgtttttgtttacacctaatgatttagaatttgagccttatatgtgctttatatgtgccttatttaagataataacagaatttgtactaatgaaattagtaaaaaattacagttttaaaaatattgagtacttataccgctaaaaataaatatcgagtttatgccacttacaaccttaaaattttaagtacttatgtcgccatttatccactgtgatatttcttctctatggcctataactaggtacttctgcattcagcttcagcccttacggtaatgatttttttccctttgaatatatgtttatatgtactttggtttttggtcaataatattttcctattgacatgaatttagataatcagatgagttcatttattatgaaccagctaaaatacatacaaactggcaagataggaagcttttgacgagtcgatggtcatcgccgcctatcaaaaatagggagtcgggtgctgcgacttgtctagttgctttgatgtctaaaatgaaagtttaagcttaggaatgatgtttctcttctctaatacacattagtgtaattccatattatgagtatattcttcttcaaatgctagtagctaaagtactttgttgactatttcaggttttttttcattttgagtagttggtttggtttgtgtgtttgttgggatttgtctggttggttggtgagaaaatgaggggaaatccaagtgggcaaagagctaattactggatttgataggtgcgcatgaaaattggtgaaaaagaagaaaagaaaagggaaatttgattttctatactaagaaaataaaaaaatttgatttctaaaccaataatt

SEQ ID NO: 388445 - DNA, 2261 bp, Cannabis indica
gtactctaacaatttacaatttggcactagacttagtaaaatttagggtaaggcggagagttgcgctatctatggtgaaaatattgatacctttgttcatctcttctgcctttgctagttggctagagctctttggttctctagtccttagtcagttcatagtgagtctctcggtttcactaatccgcggaagctggtttgttggctgctagacccccttcttccccacggttcttctaacgatgactctctttcttttagcagattcgggatctatctttacttcgaattgtgggaggctcataaccatgctttccatgacaaagtggttcccaatgcaataggtgtcttgtgcaagattaagaagtgtcttgcttctctttcagcatttggagggggagtcccctgggtcgcacaacatcagggaacaaagtgtgaatttggtggagagcgagtttcgaggaaaattgtgcatcgagcggcgactgatatagtggttaaagatgctaaaggtcttcttgtggttgtgcagttcaactgtcttcctccgatcctttggaggctgaaactctggcactttctcaggttgtgagcttgtgcatgtctcggggctggcatgactgttttgatttcgatcccacaaggcaccaattggaggcttgctcaaagttgttagagcttctggatgcgatctctggtgtgaagttgctgtgggcaactcgtgccttcaaatggggaagctcataacttggcagcttgggcatttacttctgcttcttctggttttctttttcggctggggagttggctcttcttgtagccaattaatgtagtgtttgttttttttctggtcatgttgtaaaatccaatcaacaacatgattcattgttcaattaagctgtttttttttaatttggggttttgtcaatcttcatttatatatgtaccaaattatgtttctcacatttatccaaaatcaccaaagtagaacaaagatagttgaagattaataaatgaccatataatttttgccttgttcaactagaaactctaaaaaggggtatacaatacaatgtaattttaatcaacacaacaacaaagtttaaacagattgactctaaagaaaaacaatccacacatcaagtttaataataacaagtacataaattcttgtctgtttttcaaccaatctgacattgataaattctaatcaacactctcgaattcaaatccctagtttcatttagccattaacacaaaaaccaaatgagtttcactatttattttttgacacaagcaaaagagaacctgttcaattcaagtctgagatgaagagttgagggtttctgtttggagttccttgacgagagcagctaatgcctctggattgagacccaaatcacagagagcaatgagaacagaaagggtgtgacgatcaaggcctgtgtcaagcatattcgacatgtgaaacgccaggtctagagattccctagcagtttttgcagcctcagcatccatgtatgtatgtatgtattatgctttgttctcaaaacctgaatgaaataccaacaattttcattctgaatcagattagaaagctctctaaatcaatgcaattttccaactttaatgggattgattaaacaaccatgaataaacaaaatatgaagatgtaaaagaaaagaggaaaaaccagtttaacaactttggtgagagtcttcaaaatatgaagaaattccctttgtattttgctattacaaaataactcaaattgaactattttttcaaactagtaacacttcatacaaagcataatcagtaaatttaagggataacgaaaccctaatactctcaaccctaacctatcttcctccttcttcttcttctccattatcaaccaccaccaccacactagaactaactaaaatcaaaaaaaaaaaaaaaaaaaataagcaccacaaatcataacaacaaccacaaacctcgacgatgcaacctgttggacaagtatgaaggtctaagaatggtgacctgtagagaaaatagaataataagagaagagagacatatctgaattagaaagaaaatgcagaaaacgagggctaggccattctcgaccagcgatcgtggaaggaacctcaccgttagctttgcagctcccaaaatttctcgatctgtcacgattctctcttggcagctccaatggtgtgcagtgcagcagatctgacgaagcaaagacaaaatgatatatatgtatatat

SEQ ID NO: 388446 - DNA, 2102 bp, Cannabis indica
aaaaaaaattcataaaagaaaaagagtttgggaggcttttcgggctgagtgagcttcggcaacagtcccagccgctctaccctaaagacggccattgaaccaattggcaatgagtagaaattttcttacagagttaatttgttgtatattatgtcttgtaagtgttgcatattctgaattgttgtactgatggatgagaatttctttcatatcttgtgtggtcatattggtcagtgaagtagatccctgttattaagaaataataacaattaacaaaactatatgttagttatgtacagcaattaatatttaacataattaatagaaattatctgaacaataaaaggaaaaataataataataaccgattcttctgtaatagaagttttattagaacgcagaaatgatgaagttgacacattgtcaaagtctgaattaacacatcgaaggaagtgatcagttgggtttgtttttgtaggacatggaaacccagcatctgcaaagaactgtatatagaaatataacaaattaaattaggattgtttaggaaaataatatttatctttatgttttactttgtagaattaattttgatttgaaaattttcttgacactttgcagcgaaatctataaatattatcgaaaattcttaacacccttgtgtaaagagaaatgctcaaggacactcatggtgcttaacacctattgatgcaattcaatatcgggtctaacttattttactttagtattgattatagaaaataactaaccatttataggatactatctcgtggtggtggtggtgctaggcactatagcaccatttcacacacacacacactcgaaagaaaaagactaattacaattattgtattagtagtttgatttaccttgacagctgattttgcatctccaaaataaacagcttctccaccagagaggagatacaaatcatcaaaaagatcaaagagatagccacttggttggtgaatggaacaaacaacaatcctaccattatgagcaatgtttttaagagtacagaccacaaagaaggcagaagcactgtcaagtcctgtggttggctcatcaagaagcatgatttggggttgtgttaaaatctctaaacctatccttaatctcttcttctcccaccacttatccctctaaaataccaatttccaatcttgtaatcagcacaatgttctaatcccatttcttctattgttttctgaactagattctctatctcttctttgctcattttatttgaaaccctcaaatgagctgagtatgtaatggtttctctcactgtcagagttcccaaaaacacatcctcttgagtgagatatgactgaaacattagttagtttgcaaaattatataattaatttggtgttgtactgtaaataacattaagtttttaacattatcaaattaaatagtatagatactacttacaattcctccacaatttcgattattctctttgtttcctttgacttgaattttgccaataattttaacatttgaagatagtcttcctgttaggattgaaagaaaaagttcattagtaagaaatattatttaattattgtatatatgatagagaaatgctaaaagacatcagtggtgtctaacattcttctcggtgtcatatcacaattggcgtaagtaagtattgagtctcgtatattaacttttaggaaatatcgctaactaatagtagagcgctacctttaggtagttttaggtactactggtgtccaattattaatatgtatgtataactcgaaatctctaaaatgattcatctttctttatatttagttacagactaaacatctttttcttaaattttttttcattctctctcattttttaatttaattaattaaataataaaaaagttaattatgatgtaaaataaatgtgaggtagaatagagaaaatagtgttttggtaaattatttcaaagaataaagtagaaaaattagtaagcatcctaatagatgttttataatagctaagaggctaaagtttattgaagcaaatgagagaaaattgtttttatttctgataatctcttttagtatatacaaagg

SEQ ID NO: 388447 - DNA, 2282 bp, Cannabis indica
acgaaaatttgcgttaacactttctaactcatgaatgattctaaaatataattatgaaatattttagtatcttttattaataatttttgagaaattattatttggtttatttgttccaaaaattatctatatgatcatcacatctatttttgaaaaaagccccttattttatgcatacatatatatatatatatacatgcatacataataataataatcttcatcatgaatcacattccattttcattatatcctttaattaaaataaatggatttctttgtccaaaaaattaaaatattaatataattgatatcaagtccacaaataatattcttgacaaaaaataaatccacaaatgatataaaaaattctacaaataatataaaaaaaaatccccaaaaataaattatattaaaaagaaaaagtatcataaatattcaattatttcaatcatactcttggagagaaatcaataataattaatagaattgatataatagaataaaattgaatattttgtgatttttttaattataattgatataattaaaactcttcgccattcttattttagaatagatataaaatatagttatacaatcatgtaggatttatttaaaaaatattagatgtgtacataagtttttgttatccatgtttctggcaagagacacgtagatacaagacaaataattaaagcccatcagctagtcgtaaacgacaagattgggctaagcccaatatcagctggctaacctgagtggaacagctgctcgacgaattacatgcccctaaatcacattatttgtaaaactggtgagtgtcacgctaaatcactttttggggacttaaagttgaaactaaaagtttctctatcgatgaataacactgtaataccctaaatattgcaaaaataggaaaatctagggttcccaaaatgccccaactggaagaccggttcccccaaacggcattccatttctgtggggtttactagggagcaaccggaattccagttcctacaggtcctcctaaactggtcgaccggttcagtgcaggaaaacttcaaaattttactacacccacaattcaatcccaaagcttaccaaaccttccaaatctgctatttaaaccacaatgaacatattcaaggcaataaaacaccacaacaaagccacaatcaaaatttgtaattaaagacaaaaatttgagttttaaaactcaaaatttgtctaacaaccacaacaagccccaaaaaaacatcaaagcagctcatctaacatcaaaataactccagaacacttcaataaaaacaaaacactactatagctaccataattctaaaatcatgcataaaccttacttgaaacttagggaatttacaaagaaaaggtgctaggatatttaccttagattaaatcactaagaaattttctaaagttccaaaattaggctgaagaatcacaagccctaggtggcttctatggagctcgagagagagaaaaagagaagctattttcttgttttttctattcttggataaatgaataaatctaattgatttttctcattcatcggaagtcatatttagatcaataaagcttaattaaaggtcactagaggaaaaagaactaatttgtcaaaaagaccgttttccccccactaaaactaaaaagcttctaagtcacttaggggtaatttgatcaattctaaatctcagataactcctcacattcccaatgtctaactaggtttccccgtaactacaaaaatacaaaaatataattctaatggccaaaggccgcattccaataaaacataaaatttcatatatgacagatataatacattctgaattcaaataaatctccataaaatgataattcataattaatattccaatttcatattgaaatcctaattatatgctaatttccaaaacaaagttaagcggtctttacatttatccccttgttaaaaggatttcctccaccttactgtatctccagaggcaccttgaccaaagctatgatcttattccgaagaactttatcttttttgtctaagatctgactggttgttcttcgtatgataggcctcgttccagttcaagattctaataactcagcacatggggaggatctgaaatgtactttagtaacatggaagcataaaatacattgtgaactgctaaaagaggtggaggcaaagctagacgatatgccactagtccaacttttttgagaatctcgaaagttcctgtaaacctagggcataactt

SEQ ID NO: 388448 - DNA, 832 bp, Cannabis indica
tgttaataatgtagattgttagacccaaacaatcataaggtttaattagctgccattgcttaattaagatcatatagtactacttttgtagttgaaaaaactagttgctatgtttccatcataatcaattttttttcttgttataatttctatcttttgaattctatatattggtcttgattgaagaaaatcataattaataattactgtaacaaattaatatctctgaatttgaaaataacaatgataatggaccaggaatatatgtattgatgggtttggtcttttagagcttaataaccatcatacattactactaatattaattatttcattttagtgtatgtgcccagttatgttaggggaactctataaaataacccaattttaattactttgaattatttaagcattttcgtttaattttactgacagatgtctgacatgtataaaagtataaagatcacaatttagtacatgttaaagttttgaaacagtaggcgcaagtcgtagacatatgcctctgcggctcccaaaaaaaaattattaatgtatagataaaacactaaataataagaaattataataaagttttggttggtgtagtgtagtgctaaagaatcttactttaagttaagagacaacaaaagtccatgactccaataattcgagagaagttttaacgtgttgaaaaatttagaggacacaatttattatatatggaaattcggggaataaaaattctaattagcctaatagtaaaatatgtataattcataattttcattacaattaaggtgtaaaaattaaattatataaatttttgtcacaa

SEQ ID NO: 388449 - DNA, 556 bp, Cannabis indica
taacaaaaaaatttatgaaaaaataatgtaaaagtacaaaaaaataatcaagtcgtcaaaactaagtaaaaaaataactttgtaatacaaaaataagttaaggagttgatattattttgcatattgaaacacagtaattttgtaattttaaagctttaagacagtatttttaaaaacttaacacaataaaaatataaaaaaaaaatatatgatagtaaaaatataaaaataacaagaaagataagtatttttaaaaaaaccctaaagaaatatcagtttgagctttcggccttatttcttcgactggcccagaggccattaatgtaaaaatgaaatgggaattttttttaaaaaaaatgctaactttaaacataaattttatcaagtatcatactgtttaataacaatgttgttttgttagatatagataaaataataaggtcaccaaagtataacaagacggacccactagtaacaatgtggtggctctagtaaaaatattgtattttaaaaaattaaatgtaattttttaatttaataattatagaccaaaata

SEQ ID NO: 388450 - DNA, 2120 bp, Cannabis indica
aaatcaatgccactttctatgaccaaattggtaaatggttggtattcaccaccatgatcagactttagctttttgatttttctgtcaaattggttttctaccagatttttgaattgtgtaaatgcttgaaaagcatcagatttagcttttaatgggtagagccaagtatgcctgctaaagtcatctatgaagtgaatataaaatttaaaattggtgtttgacattatgggagcagggccccaaatgtcagtatgaattaactcaagaggatgcttagctttgtcatgatttaacttaaagggcaatgcatgtgacttgccatattggcaagcctcacaaaaatgaagatcatcagttttggaactcttaacattcatttgatttaagacaagattcaagacatgattggatggatggccaagcttcctatgccatttatccttgattgaatttaaactaaacacattctcagtcacagactgagttacattaggactcaaactagatgacaaagcagaaaaacaagttgatttaggttgctgaactcgggtgatagcaggatttttggtggaagatttgacacagtgagattcaaattgatagagcccttccttaagcttcccttgaagcactttcttctttgtttgattgtccttcacacaacaatcacgagatgagaactcaacagtaacatcattgtcagtagtcaatttagaaatgctaatgagatttttggcaatcttaggaacatgcaacatttctttcaacacaagatgactactgttattagtggacattaaaccagaaccagtgtgtttaataaggagtttactgccatctcctacagtgagagaatccttaccattgtatttgattttctggttcaggtttgaagcttcggatgtaacatgattgctagcaccgctgtcagcataccacgcatcatcttgaagcatttcaggtgtagccacaaatgctgaagcattttgtccaggtttgttgttgttttcattgtttccagatggtgtggttcccatgaaggtttcatcaaatcggttgtagcagtaggcagcagagtgtccatactttccacaaacttgacaagtgggttttggaccacctctgccacctcttcctctaccattgaacctgcctcggctgttggtgtttgagcctcctctgcctctgttattgttgtttcctggattgtgattactaccaccagatttgttagcaagattagcagtaggagagctattattggaatgcttactgttaccagaaagagtagtgagtctatccagtttactgtcaaaactgaggagtaaatcttgtagtatttgccaagttgtcttttcccttgcttcgatctgcagtactataggcaagtactctatgtccaaaccagataaaacatttgaaacaagaagagattcaggatagggatcacctgctaaggccaaaacatctgaccattgcttcttttgcttgaggtagtctatcattgacatcgatccctttctcactgtctgtattttggttctatactcatccattttggctttggaatgagcaccaaacaatgcttctaaactgctccataactcagctgaggtagagcagcccatgacttcagtggcaataccttcggtcatggatccatataaccagcccatcaatagctggtcattaacaatccattgttcaaactcagggttgatttcagattcaactcctggttgttcttctgcattgtttgcaggtaaaaattcatcaggcatggttcttgctcctgtcaagtaaccatcaagtcgatgtcctctagcaatggcctttaccattgttttccatagagagaaattatttctgtccaacttgagagcgaacggctggttgagagtactcccaaagtgaggaacagagatgttcgaagaagacgaaccattactgctgaagttctgacttgcaatattgctgccagattgagctgagccatttccaggtgtttgctcaccagtcgccatggatcgtagctgaagctctgataccaagataaaatatagatatatgcacaaggtttgtgaaaaatcagctcagtgagctctgctgcagatctttac

SEQ ID NO: 388451 - DNA, 1245 bp, Cannabis indica
aacaccctaatctatagggacgctatgtgtgtaattttataaattaatttagtactaatagattaattaattatgaaaatttatgataatatttaaaacttcactaaaataaaacactaaaaaccagcatcattatgatactcaaattgtgttatggggatccctatcataaattttttataaaaagactatataaaatgataagtcaaaatacaaagcagattcagtccaaaacaactcatggcgactcaatacacaatccaataaggtcgatatgtatattactggaaaagattgtcacctcatggctgctctaatttttccttgcccttacctacaccgcaaagcaaccgtaagtcacaaagactcaacaagaaaagtaaccaaggagagtacatgaaataactaattatccatctcactattataaaataattaaacaataacattcaagagtggataatataaccaacaatatgcttggaaataaaattaattatttatcatgttgcctaatcaggcaaacctgtatcataatctggtatcacacatactgtcgctgcatcacctaattagatgagcctgtgccataacttggcaccaatgtatcgcatcgcctaaccagacgagcctgtgccctaactaggcactaatgtattgcattacctatctagacgagcccatgctaaagcctagcactaaggtagtgcatcgcctaattagacaagctagtgtcatagcctaacactcacatgtcattgcttcccatgcctaaacaagcatcgtcgataggaatgcatcgcctaaacaaacgagttcgtgccatggcctgacactcacatgtcactaccgcccgtccctaaagaagcatcgccaacatgaagaaacttaacaatggttttagtttagagtcatgcctttatcgtggattcctcacaggaataaccctaatatcagtatccacatatcacatttcctactcaggaaaattagtcccatatcctgacattcatatattgccttacctaatcatgcaagctcatgtcatagtctggcattcatatatcgcattgcctaatcaggcaagcctatggtctagcttggcatccatatgctgcattgcctaatcagggaagctcatcccatagtctggtattcctatatagcattgcctaatcaagcaagcttatgccataacctagcatccatattgttgggttttgtgccctaaataaaacccattac

SEQ ID NO: 388452 - DNA, 710 bp, Cannabis indica
atggtggtggtggttcgagtcgtcagggacggtgagcttcgatggtggttcaagttgtcggggaaggtagctttgctactgattcgcctaagagggagaaagagaagaatgagagagaccaagattagaatgaattaaatatcaaatcttagattttttgggtttcatatagcacgagaataagaaatagacgacgagtttaaaatgtcggctgtactatagtcgatagttttaaaccgccgagtatagtatagccaatattttataactgtcgcctatatattcccttttaaaagtgccccgttttaatttggtagctgttttaaactgtcgagaatactcaaatttagtcaacggttataaacactcacttacttttattagcgacggtcctcgaaaaaaataaattaatgggacggatggaaatagtactttttgtagtaggaaagaacaattcaaatttaaaattgaaggtttgtaatgtattcattggacaaaaaaaatgtacccaaattatggggaattatattcttagtttgctttagatattctaatcttaattaggatttttaacccttaaacttttatatgtaccaaatcataccctttaaacttttaaggctgttaaaatttcctctgaattagtaagattgttgctttaaggacttttgtccaattttagtaaaaaaagtctaacatgaatcaaaatt

SEQ ID NO: 388453 - DNA, 1058 bp, Cannabis indica
agttgcaaacttccttgttttaggaagtcggttaattagttaataaccgacttgtcatgagttgttaagtgctggacatgtcagctactaacaatataaaaaggcctcttcattgtattcaatttaaggcaagaaagaaagagagaaacagagagaggctgagttagaatgctcttagaagatcaagttcagagttggataagattgctctagtgttgagtgttgtagagtcaaatctgactgtgattgttcttgagtgcattgtactgtaaatggagcttgtaattactgattcatagtggagaaatcaccttgggggagagctggagtaggactcaaatttgagatttgaaccaggataaattcttgtgtttttctttctgtttttggtgattgattttgatcagcatgaaaaactaagcaatttgaatcacagaagaaagaaaaaaatcttgtgtaactggagagagtgtgattatattttgaaaaattgattaacttttttaatgtttttctatggaattttctatttttatactcatatatttagttaattttattataaaatgacatttttaatgagattaactttacatgccatatatatcaaaatttttatttattttcccatacttttataaatattccttttacttttaaatgaaaatacttaagattatcttcaacagaatgctaacatggtagtatattagcaaacttagaaaaaagttactccgctaatattccaaaaagtatgcttagatttgataataattgaaaataactattaataataaaaataaaaaataaaatattttcaattgtgtaaacacatcaataatactaaaattgatgtatattaattttgtaatttattatgattattgtttactgatatttttggaaactaaatgtttgaaaaataataaaaaaaataataaattgtagaaataaagagatgaatttattttgggaaaaaaaaacagaaaaatacaaaaaaggaaaaaaaattacaaaaatactatgggccggcccattaaacatttatacagtccaca

SEQ ID NO: 388454 - DNA, 748 bp, Cannabis indica
tttattttggaggattgttcaaaattttatccgtttcaatcaaaatgaaaattaaattttggaagaggagttatattattggcgatcttaaattcatcggtttaaatattaaatgtatctgtatatatttttggaaaggcatggattttcttaatcccatttgggaaatgaaaataaaaatctatcttgtagacaacatacgtgtggaatatttgccttctattgtatattctttcaattcaattgttgccttcgttagtgcggaacactggatttacttacctaacgacctaaagtttattattaataatttataagctcaatgattgcacttgattaagaacattattaagaagcaaaaatcaagtatttcctttctcgttgcttataattatgaattagtattcatagcatttattttaagcttggcgttattcaaggagattgattggcattctttgtttaatccatttttaatcaatttatttatttttgtatagcaaaaaaccaaaaaaaaaaaaaaaaaaaaataaaaactttttaatttaaggggaaaattcattcatgctccaaaatagagcaaaactaggaggaagacagggcaggtcttccatacagggaaatcactaatccaaatttggctaatacagtttctcaaatgaacactagcaagtgcatgtgatcttaaattagaattggaatggatcttgttgttgtaactttgtaatctaaccaagttacccaacat

SEQ ID NO: 388455 - DNA, 605 bp, Cannabis indica
ttgttttaacttattcaatatttttcaagttgatgtatttttttaaaaaaaaatgaaaaataatttaaaaaatttagaaatatttctaacatacgtacagtattacattaacaaattatttgaaaatttaaagtgtattataataatttaaaaaatcagtttcaaaataattattaaaattaatgtacataattttgtaaagctttacaactagaaaaaattaaatgtgcgtggtacttaattaataggtaattcagttgtttttacaataattattatgaggtgttattttacaaacaatatatatagaaaaataatttagtttagtttaatattatttttacaaaaatttaagtcttcttttctcattttagaataataagagtttttttattataagatgaataatatgttataaatttaattttttttttttaaaattgtatcataatcaaattaattttaaataatttattttgttttaattatatgaggcatgtgcatagtgttagacatttatatgtataatataaaatatatgtatgtgtatataacatgcggaataaataaacatatacactatatgaatataaggatcgaaatac

SEQ ID NO: 388456 - DNA, 760 bp, Cannabis indica
ttgtgatgtttttttcaaaattttatttgcaagcgtaattttctctattttatagcctatttgtcttttattttaagtccatttaagataaacgtagcccttatgataactatataagaaaaaaaataagagttttattaaataacttattccatgtgatttgagccttaaactgacaagaaaaacttcttcctttccttgaattttcaaaaattctatagccgagagagtgatctaaatcacactataatcgttaacgtagaagaatttccagtcaacaagctaattgtctagtcaaagatatacagagtcagaatacgagtcactacaaacaaagtgacttatataagacctagttatttcagaaatttagacaaaacaacttgagaccaccttcaagaggcatcccacgagttgagtatcaaccccaactatatttgataattttaacaaattaatggtctcccacgagtttgtactagccctaggaggtcatctttctttttctcttttcttttgatacctaggtcatctatctttaagtggttaattattatatagggatatttacaaaaaaaatgactaaaaatctatgttttttactttttataatgacacatttttttttggttttacatttatacagttgttaattaatttacgaggggacaaatactgacgcgcatggattccacttgcatctagtgtcgggagaacgcgccaagtggcgcgttgggaaggtttttttttttttttagtt

SEQ ID NO: 388457 - DNA, 1058 bp, Cannabis indica
attgctaaaccatacatctaaaatagaatgtcattgatagtcaacttttatagaatcaagttaatgttcgatgcttggtattaaaaaaatgggagaccaacaaaaataggaacttttattagagataaaaatctctacagcggccatgtttctgagaccttcctcttctacttacatgatactcaacagaaatttacatagcttaagaaaagacaagaaaagaaaaatgggataaaagaaatataacctttaacagatttcttatgcaggctccttaagccagtaacaagtaggaagaagtttctaatataagcagtgcaagtggtagaagaaaactacatcttagattactgttccactaggaatcaaggcatccttgattactgtcacaattccgctctttatgaaatacccatcagtttctctagccgcttcttgaacattgtcagtattaaggatctgcatgttaaaaccccatattttgatgttcattctcccaaagattgcatgattaagctgaggaatcctaaaagctagaacaatgtgtgtgcgcacgagaaatgaccacaacgtaccataaggtgtcatattgctaagtatagattattacgtaatattgctaatcaatcacaaaccgttacttcgtgatagtaataagtattaccgatacctaatagcaatgctcgtgcgtacatatatataatggttgtgtcatttgcacagccttttagttttgagtacatgtgcaacatttatagtttcctactgttaagtacactagcctaaaggttcatataattgaactgttgtattgcacacagaatgttatgacctcatcatgtataacgattagcaaaagaaaatagatatttaatagaaaaattcatcaccttcacatcgtcaccaatacgagcattcttgtcaattatagctcttctgatgtgagagttcttcccaataccgattggaacgctaccttttgcagccagaaaccttctgtcagcatccgtctggaaaaaaacaaagccacaaacaataattatcggcatcggataaca

SEQ ID NO: 388458 - DNA, 1287 bp, Cannabis indica
aattaaattttgtatttttcaaacctgtacaaaatagtactctgatattacattttttacatctattccgggaagaaactagttttaagttggttatgttaaaaaacatgagttgcacgcttatgctaagcatgaaatgtgcctcaaggtaagcttccaactaagtggcgctggttggtagttatacaacacaagtgtgacaccataatcttaacaataataatacagaacagttattccaagtacgtatattagactagaaggttgtacacaatgtaatgctattggagaatgaagagtgaaagtgaatgaaagccagcataaggaaatcgtataaatagaaaatgtgaaacaatattgaaaggaaaaggcaaaaaatacaatatatgcgtaaattcttcattgaaaaaatcaattttgagcactctaatttttttatttttctattttattttaaagagacctaacttaataacaaaagagagtgtagtaggctactctactcatctacaattagatttttttaatataataatcaattttattgctaaaagtcaaataatacattagttattaaacaagaaggaatttctttcaaccaagatacctcgttttctatctgtagtgcatatcatacttactatgtattgcggtattaccatttcacattacatattgaagacatacacccggaaagacaaataacaatgttctaaaagatctaaaaaacaaccccacttggagacactctcagaaagaaaaaatgaaatagaattcacaataacttcaaaattactctctacaaaaaataaataaataaataaataaacccagcaacgaacaactctggcttgaggggattgtcttagccgcttgaaggtgaaaaacatgtgtttgtgaaaattgactccctcgaggagaaaatgttttaactgcaattagttttaatataaatctcatacttcttaccgtgcaccttgctctaatgaatactcaccaaccaaaaaacaaataactagaacaacacgccactatcccagaaagattagactagagaaggcaaagaataacaaacgaccgaggctgcagtgggaaaaatactgcaagtatctgtttaaaattcaaacatccaatatcacatttttatttaacattctcaattcaaaattttcacgaccaaactaatcactttcaatttatttcttataattaaatttatgtatttgagacacacattcatatcgcatcgcttacataaatgtataatgacagagtaattagattcaa

SEQ ID NO: 388459 - DNA, 1137 bp, Cannabis indica
aggattctaaaacattaattatacaactatgttaaaaatacatgtaaacaaatatctagtaaaggatttgtaaatttttttctttcttctttttgaaaatacctaaagtcgtcattaattgattcattgatcaatactacaagctaatacatgtaacaataattttttttaaagaaaactttgcctcaatcattacaggagatgtaatacaatgtgcgcaatttgattttgcttaatttttcaaaagaaaattatattatacaagaatgaaaagagaatgctataataaggtgaaagaaaaccaatttatgaaccgattatacactaaccacccacataaaaaataaaaatactcaatatttagacaaatataacatagacaaaaaaaatactcttcaccatctttgaatgtttaaagtttaaaagtctaaattataataataataataaaaaaaatttaaagtctaaagactttttaatgtttgacatattgattataactaatttaaaattaaaatttattaaatttctaatttttatattcttcttattcacatcaatcaagtatacaaaaataaaaataaaaaatagtaaaataacatcaaaaaccgttttgctactgggtaaaaaaaaaaaaagagggcaaatacataattattttgaaaaataaagagtacctttagtaacactttttaatgaagtttttgtttttaaaattaaaaagtgaaaatatttttcaaaattatattttataaagctgtttttacttttcaattttttaattaaaatctaaattttaaaaataaaaaaaaaatcacttttaaaattttgtaaacaaaatttttaatcaatattttggacaccgactccaacttagaccttagaaaccaaacccggacccgaccccagacttgaacccgccctcagtcccgaccttagattcagcctcgaatccaacttaaattaaataaaatcaataaataaaaatagaaataaaatttacagaacacgcttttattttttgttttttaaattaaaaaataaaagtgattatagaacacattttttttttaaaataaaagttttaaaataaaaactttacttttatttttgtgattaaaaaatttaaaaataaaa

SEQ ID NO: 388460 - DNA, 894 bp, Cannabis indica
tctcttctttttgtttttctttataaaagtaaggttttaaggcatgaatttttgagttagggtactgtggtgatgtttggtgcttgattttatgttcagaagttgaattgaggtgatttaagttgaattatgttaagtttgtggattttggtgatttttgggcaaggtttgagtttaagaactcaagctttgctctttaatggtggtttgggtttctatgatagatgttgaggtttattgcttgaattaagtctattatggtatatacgtgtgttttggagattattgggaagtttggggttgatttgaggtgttgggagcatttttggggtccccttcactaaactggaattccggttcaggggacctggaggaactagttgaccggttggtccccaggaaaaccccaccaaaccgaaattctagttggggaaccggtctaccagttgggacaattttgtgaaccctattttttccctttttttgtgatatttagcgtattgtcatgttatccatcgataggaaattttctagttttgattttaaatttccgaaaagtattttagcatgtctctcatcaaaattatgaatattgtgttataggaccctataaagcgtcgagttattgttccactcaggctgaccagcacacctgaatacagaaacaaggtaagattagcataaagtatatatgtgtgtgtgaatgaatgcatgttattattgtttacactactaacatttggatggttgtataattaagcgtgttagtacagtgtagggtatttaagggtagttactcccagaagtcaataatggccctaccaacactagtacggagtcgatgttaggttttatgccctaaataaaactccatttcaatgtaatctattttat

SEQ ID NO: 388461 - DNA, 768 bp, Cannabis indica
aatgaactttcattagttgttgtgttttctttttccatttttttccgtcgcttttcttttgcatttttttctctactaaaattctaactccaaagaaggcctaacagagatgacccttgacaaaaaatgttgattaactgtaacagaaaatattatatatatatatatattaatattaattatgattctaggataatttttatttatccaataacaacgaaaaagtgatatatttcttcaattttaatttattttttcctactttaagaaaatatgaaaaaagatgataaaattcagtcaaacaaacatcgtggagacaactgaattttgtcgaaacaaaataacacacgtcgtcgtacgtgcggtgcacacagctacttctgattaggtttcacatattaaataacctcaaagattttctacttgtaatatacctatattgtcatattgatttgtctaatcgtctttcattgttttaagtaagtaactcttttaactgatatgtttacaaatatattctacaaagatatatatttatctcacataacatggtttaaatttcgaccttacaactcccaaatttaaaacatatttatcaaaaataggataatatatataaagaaaaaaaattgatcataacaaatacttacgtagtatatgatcatttaaacatggaatttaaatcatggaaatcatctttaatttaacgggttatgagatggtaaacttacaaaaatattgaaatttaagttaatttttataaaaata

SEQ ID NO: 388462 - DNA, 1501 bp, Cannabis indica
taataggaaaaaaacaggtaaatagcacatgggtttttcaaatttcacttaggtggctaatatttttgtactgtagcaattagatcccaacctatatctcttgctacataggttgtttattattttttttttatttaagcgtttatatttacaaccatgttgtacttgggactccaacgcaggacctccaagacacacacactcacttatggcaacttgagttagcctcaagtacataggtcctcattattaaaatttatgaaataaaacttaaattttatatattaaacttaaatgagattttagacaaaaaaaataataataataaaaatatataaattaacatagctcttgtttttattttattttttatcatcaaacttcttctaatttttttattttttgcaaagtcaaactttttttaattaggggtaaatattattttagattctgtattttacaaaaattactaattcgattttctattttgttaaatgacaaaatggaccctgtattttttagaatagtaaaaatatgatcctgcttaatttttgacaatttttttaatataactaatttgatggcaattcctaacacgaacatatacaaaaaaaatataaatagttttgtcataacaccattagatgagattattattaaatttttttttgacaaaaaaatcaattcagggtcctatttgtacgattttgaaaaatacaaagtctattttataatttaacaaaacgaagggtctaattagtaacttttgcaaaacacagaatacaaaatggtagttacctttaattaatttacttattatcaaatatataaatttagtaaattgacgttagaaatattataatcaatattcaagaaataatgatatgaataataatatagatattttgaggctttttaacgatactatattaagattatttacaaattattgtaatacgtgcaaattaaatgtggttgcaacatttttaacaatagttgattatgtggtatatattctatttaaaattatttatttatatatttatttttttggaaaggtgtaattaattgattaagtttaacgataataaaactttgggaaatgatataaaaggatgaaaaaaaacaataattatatgtaggatcaattaataaataaatgatagataagcggggggagtagagaagggaatgaatgaacttacaagaagacagaagccagtgacatcagcgaaagaggtggcaatggcagcaccagagagtgaaagttcaccaaggtgcccggccatcatggtcgacacaacctgaggaagaaactgagccaccgtcacaaccaccatcggcatacctattgcaatcatcttcttcatttctcccacaaacctaccctctcttactcctaataataattcactactcttccccctttttaccagcaatggaacctcagattcatgatctgcttccatttttttttttatctctatttgttttttttttt

SEQ ID NO: 388463 - DNA, 1009 bp, Cannabis indica
aatatattatttttataaataaaggttaggtctcataaaagtctggcacgacccgtataacaatatggttcattctaggcccatattttaagaattaggccataacagtttatgaattcaaattgttcgtgtcaggtccgtgctttaataaattggcttatttttgttatatgcgccgacctattttttattaaatcagttgatcctttttatatatatatatatatatatcataatacggcttataacaaaattgttattttttttcctattttttaaactaatttttaaaggttttaatttctaatttttgagtcataaatgataatattattgtaattttatatttttgagtaattgaatttttgaaagaccatttctagtttttatctttttaatttttttttaaaaaaatattttatatttatacttttatttttattattaacaaaccacatcaactctagtgtcttataaattattatttttttacaagtaaaaaaataatttataaatattatacattatttttatcaaatgcgaataaattaataattacttttaaatttttgatatgttatgtaaaagtttctataccaaatatagaataaattggcgtagagaactttttaaaagaaaactgatgactaaaaaaatgaaactttgacataaattttaggctaattaggatttttatctcctaaactttaatatgtacaaaatcttgcttcctaaacttttctagcctttaaaaattctccgaactattaagattgttagatttaatgacttttgtctaattttatttaattttactatttcagtaattatttatgtactaaactatgctccccagactttgaaatctaccaaatcatgctcactaaacttttatatgtactaaatcatgttccctgaacttttatccatgttagatttttttaattaaaattggacaaaaattcttaaatccaataatctcaatagttcagggatatttttaacgacc

SEQ ID NO: 388464 - DNA, 1246 bp, Cannabis indica
ctatatatatatatatgtccatctttgtaatgcattaatgtagtatttagaaattaaatagactctttatcaattttagtatttagaaaaatattttagtttaattaattttttatagtcgtgcactttatataattatttaagatattttataaaattttaaaaaatttaaaataatttacaatatagaaagtagtattcaaacatgtctatttcacatacatataaaataaaagagtcgtgtgtataataaactgtttgaaccatatttttggcatgttaaatttctctaaatatctcaaaattttataaaatatgttaaataactacaacgtacatgaattataaaaaaaaaaaatctctaaataaaagtgcatgatcaatatatcttttttaaaaggtaaattataaaaattttgctataatatattaaataagatctatatgtaatataatatcttaccatttaatagggctgggtgtttaaaaatataggtttatttttttattattatttttctggaatgtggaaaatataggtttattttggttttgttaattaggaaaaacgtaaatatattaaattaaattccataaaatatatatagctagctagatatattaatattgtttaatttaatatcatacggcaaaaaaaatggtgcatgcacacagcaaaaatcttcgatcatgatctcatatatatatatatgaaaaagttacgatcgagacgtgaattcaatattacaatattggattgtactataggaggagaacaagaaaggcttattaggagacaagaaaatttagataattaatatttatttttcagaaataaaatatatgaaaaaacttgtcgatcttgatcataattcgagaaaagacattacagtgggtttacttacgttctatatatatgatgttattatatatataactatattaacaatcatacagtgattatcgcttatatgttggcaaaaattaattaatatatattatgtaattatattattttgatattaacaattactcatgcatcacctattatatttaaataattgacacacactaaagtttctacaaaatggacactacttatttagacataattaaaaattaaagaaaaaaaatactctcatccatatatctttatatattaaaagtgtctaactaacgacaattcttggtttaacagaatattcttttcttattcggttaaatttaacgatacactttaacatca

SEQ ID NO: 388465 - DNA, 1069 bp, Cannabis indica
tttttttttttttgttatctttgatgttgatgataaaagggtttaatatatgaaatttcgaatcactcaaactggttttattcttctaggttttttcttaacattatggagtttacatgtcaggttgctggtgtgagatttagggttatattttattttatggagatgtatattggtaattgctaaaatatagtctatcttgtaaaagtttattttaacactgtgtgaaaagttgatccaaatttatcatatagcaaaaattaatccaaacttaaattacaatgtaacatgatataaaatttcatcccaataaatgtactattttaatattttattattaatttaattattatattaaattataaactttatattttttttattattttatataataaaattattactttttatattcttaatataaatatttaatttttcatccaattttataattatatctcgcacaatactacaattgatacaaatatatattaaaaatctagtttttgtgtcaaagataacacaagatgttgcatctgatctttattagctaataaagatatgggaaattttgatgagacacctaaatttggaaattatttacaaaaaataacttggtttttgtgagtaaaagggatttttacatattatacctttctttctatcttaatatcaaatatatcttgctcaatctaataagttatttctttgccttttatacatattaataacggttttttttttcatatgtgtatttgaaattttcttttttcctctttttctcactctcttttttattttatattttcttttaggcttacctacttttctttcttttttttatgccttcaccctatgataatttttttatttatttgttcttcttatttttttaatcatttaaatttttatctttcttttctcatattttaaaaaaatatttctgatcacattactacttagttgaatttaaaaatgattgttataatctactcttcaatatgattatttcaagacaaaagaaacatatatattcttttttatttctaaaaataataaaaaaaaa

SEQ ID NO: 388466 - DNA, 746 bp, Cannabis indica
aaagaaaaaaaaaattaaaactacctcaaacgatccttccaaaacttaaacacaattccacaattcaaaatcctctttaatttccacaaattcctcaaaaatcacaagaaatttcaaagatggaatagagagagagggggttggtgagggagggtttcaaaaccagaaaaaagtggtgttttgattttaatttttctgaaagaataagtatatctcatttactaatttttggtcaaattaccattttgtcctcatagctaaaaattaacacaattaggaaacaagggcaattctgtcctttcacatcacacatatccttatataatcatccatatttcatgttattaccataaaacacataactcataaattttagaccctgaacccggttcaagccaaaatatttgattgtgacaataccgcactaacttgtcgaaattcacctgtaacacaataaaacaaacatattacataataatgtagtccattataacaatatataataaaattaccattttacccctttcaggttaaaattacgaaaatactcctaacacacaaataagattttaaatttaaatattcttaaataatatcatataattaatataatcctacattattatatacttaaattaatccatttctaaattttaagatattacatgtgttgaccgaggttttcggcaaccaataaaatattaagagtttaaagagctgtaagaaattaagagaaggatttttac

SEQ ID NO: 388467 - DNA, 2260 bp, Cannabis indica
aaagacatcactgtgtctagcaccattctcagtggcatactgatattagtataattaattattgagtctcatataatttaataaaataacatttaaaaaatattgcaaaccaatcgtaaatgctatctataaaagatgttggacacccctagtacttaataacaataatcttaaatatactaataaaataatataaatattataaataaaaaagtaatatgatacaaattttatattaaatcaaagttaaatttattacaaaatttgttatatattaaatttacatcactttctacactattagagtatatttttttgttaaataagttatattttaattttccaccacttaattatatttgcattagaaatgttttaaccgtttgcatcattattatattattttagctcatttactagccaaatgtattaagttttttataggaatttttaatttaaattttattagtgttcctataaccattaatttttatttatttattttttgttaaaagtaaccgttgatttgttgttttaatgaaatttcttctttcaaaaaaaaaataaaataaaattgagatctcacataaaaaaatgatgtaagggagaatttggattgagcaacaaagagatttccttgagaagtattgggaaaccttctatatatttataattgactcaaatggaagtcttttgggagagatttcactaaagtaaagcaaaagtttgtcattcttgaattcctactaattataatagggaatattaagaaatatggaggattacaataaaatatataacatacaaataaaataatttatcaagattatatgggaagagaaagaaaagattacaactctttgcaataatgatacatatgaatataaacaagaggaaaagatctctcaaaagcttaaataaggttaatggtctttatcataaaagttattttctccctcacataaacatttagaaaatttctaaaaatacttttaaagatttattaagccttatatgctcattgtagagtctaagaatgatcatatcttcacaagtatctaactacaacaaaagtgatatcaatcaagagtatcacaaataaacaatatgatttctatttatagagttttcactctcatataaacatgaatgaccactataaaattttttatattaccaattataaattaagcatttatggtattaatagagtattttggaggagtttttagctattagaaaaactcacacacattcaaaaacgcatgcaattgtatgctgaaaaacgcatactagttatatttttttagttttggtcaattattcttcaaagtgtttcaaaccaatctcacttgattttgaactatttttaaatatatttataattttacgacctaaaatttttatttataaaaattaaattataaagttttaaaattataaaaatataattttttctgtaaaaagtaagaaaactaaaaaacaataagaagtcaatctgatacctataaatcaactattgaacaactaaaaataactttatgacagctatcatacaattataaataaactataaaacaactaaaaaaatagtttattatttttactaaaaaagtatttttataaataaaaaagttcgaagcgtaaaataaaaaaatttatgtattgatgtgtttttctaaatttttagtctactatgtaaaattttcttaatttttcgtatgaaaagtattatatatttttattttggtccttataatatatatcttttcaattttgtcatcacatgttttttatttttgtccaaatagatttatatttccatttatatcttcatatatttttatatttattaccataaatctttattttacattattatatttatcatcacatatttactttttttgccctataaagtttatttttcatgttcactttgttttttatctattaaagcaaaaattctgtccttattgctaaatttttcaaactgggccaacttcgatctttcattatagcccattttgattaagcccaggtttattttcttcacatgtttaggaaattttgttgatgatttaacacacctattaatattacgagttggaaactttttataattttattaaatttgtaatgtacaattaaaattaaaagagaattaaaattaaaggaaaaattaaaaaagaattaatttgattaacataaaaatttatttggaaattaaaattaagattaaaggagattaatttagttc

SEQ ID NO: 388468 - DNA, 2684 bp, Cannabis indica
gaggggtagttgagagagaatagatgcttttaggtttaaagataaaacgaagtggaagaagattttaagtagtattttctatcaataactttttttaaaaatttaaaaaaaaaaaatctaccacaagcgataacgcatcaaattcatcattatttttaataaaaaaaaaattatagtcacaaacatgacaactcatcactttcacttcattttaattttaataataaaaaagacacaaaagtgataccatttgtcaaatcaaaactttttaaacagtacaaacattatatagatgaagaccttaaggatgaaagaaataatgaaaaataggagaagaatgaaatgatgggagagataaatggcggtaaagtgagtgataatattgggaagaagaaaaaaaattgatagaagtgacaaaagtcactcatacagtatcaaaaaattgatcatataatcacagtataaaaagtagctgtacacagtataaaaaaaatttctaccgtggtacagtaaaaaaagaattgggaaatattaagtatgggatgtaaatttccctttaatctattgctaatttatgtacaaaactatatttaactattaagggtcccataattatattatcgcttaaggctcctggtttctttcacgatcaaaatgatgttgtgggggtggcaaatgaagctttggtgtgctcaatgatgaagatgttgtgaatcttagtagtctaagtaatcaagatgatgctttgagggtggaaaattaagttagtggtccagtcaatgatgatgttgctgtgaatcttgctggtctaagtaatcaagatgatgaagtgcaattccaatgcaaatgtcacattattgtttcagatttgatgattgtgtatatatcacggtttagtgggagtaagcatatggccctggtattatatattattaggacaggttgttattccttctgttatttcggttagttgttaggtttggttagttgtcagctgtcttcagttggttaacttgttggttagttggttaggtgtttgttacagttgtgcattgtataaatatcatcttataacaaatgcttattcaataatatcagagacatcttttgtctcctcttcctttcttcctctttctctttcttttctctattttctctgttatgttttaatggctaagaggtctggcacctctcacatggtatcagagccatggccgtcgttaatggcgaacatggccactgctggtcctggaaactcaaactctcagcctgctcatcaaggagctcccattttgactcagagaaatcgcatcagggatcaagaagacactattactcacttcaattatacgatctcgatcaagcttaatgatcacaactatctcctatggaaacaacaaatccttgctgcgattcgtggaaacaggctgcaaaaattcatccaagatctgccttctcctcaatttctcagtgaagctgaccaagctgcactaaacttcaatcctaagtacatgaactgggaggttcaagaccaacttcttgtgtcttggctcttatcttcaatgtcagagagtttgctaactcgaatgttgggctgcaattctgcgaaacagatctgaaaagctcttgaacagcacttcactctgaaggtttcttctaaaatccttgagtttagaaccaaactccagaagttgaagaaaggagcattgaacctcaacgattaccttctcaaagtcaagcaacatgtcgatcttttagcttccgttggagagattatgtctgatcgtgatcacatagctactattttcaagggcttaccaagcaaatatgatacatttatcatttcgacaaacactcgaattgaaggctatacagttggggaaatcgaagctttacttcttacctctaaatcttgaatcgagaaggaggatcaagaagttgaacctagtgtgaatattgctactctagatcaagatccgactataagctttctttgctcaaacaaattgcaattactgatcccctgcctatcccagaggtcaatactggcctaatagctttaattctccaaatttttccaatactagaggaagctttcgtggaaactcttctcgaggaagtaacaacaacacttaggtcactacgatggcacgaggaagaggagcatgattccgtgctgcaccaaacaaagtccaatgtcaactttgtcatcaacttggacacactgtcattgattgtttctatagattcgataaaagtttcactggtgtgtttccagctactgactcaccacaaccgcaggcaatacgactcaggattaagatgacacctggtatcccgattctggagccacaaaccactgcaatcccaacagccataacatcatgacacaaactgaacaggaagggcctgataagctatatgttggaaatggagctgccttgcctatctctcaaactggtaatacttatctgcattctaatacatgtcaaaaacctttaattctgaacaatttacttcatgtccctgaaatcactatgaatctccttagtgtttcaaagtttgctgcagataatcatgtgtactttgttttctatcctaatgtctgttatgtcaaggattaggtgagaaattacacactgctgagacatcacaatggcctatatacttttaactctagccaa

SEQ ID NO: 388469 - DNA, 892 bp, Cannabis indica
ttaaatattagaatcacttgagtgtatcaatgatctaaaataagaaaggatgtgaaatgggattgttgattccaacatacgacttgattagtcatgggatctaaagaatttattaatagtcataattaatataatcaatcgggtgcaagattaattagtttcaaaacaatagttttgaataaacaaatatctaatattgagaatattaattgattaatcaaaagatgaacctaaaagaaataaaagaataaataaactatatatactgagaattaaattatgtatatttatccaatgatgatgtggtggtctccaagatctgtaactacattatgtggagggcctcattcacaagacttagcttgaattgtcgaatgagatacaatatctataagagttatagaacatacaccatttacttttagtataagtgggagattattaggatttatgcccttaaagtaggtaattaatggataatatattacagaatatatgaatacaattataagataaatcaatacattaattacagaaatacaattaataaatatttaaaaattccttattcatatggacaaggtataatcttgtaagaatctacaagagaattaagattatacaatatgaataaaactagtcaataatgtattaaagtaaaaggaatcattaatatggaactaataagtacgatttattatacactatactctagtgtgtgtaattttcatttggatcacatatgtaaagagcgcttagtttaaatttggtaattagtagataattagggtttatttatgaaaattatttatggatatttaaataattatttatgttgatttatttaaattcagaatgcatttttatgtattttcggtgcctagcaacatgg

SEQ ID NO: 388470 - DNA, 1412 bp, Cannabis indica
cttatatatatatatagtataggtgggaaactaaaaattataaaatatttcagagccttattctttgccattgctttttttaaagaaaataaataaataaatagttagagttagagttagagttagactcacacccaacgtaaatttttggaaaaaaattatatccataaatttaaaaagtaattatttaattaaattttaaatatatagcacccctctacttttttatgtccaacattgtctgacataatacaaattttttttctagtccattaatattgtatatgaaatcttcttacaaaaattttcatgtccaacactaattttgttgaacataaaagaaaagacatgaaaagggttatttgtagtaatgatccctggtaagataaaaataatacgacaatggatagtgagttatgaagacatcggaaggataaatgtgtgcaggagaagagataattttccaaaaaaatttgtcttcgaagtcaggggacttgttagggagttagatgattatccaacggtcgtgagtgttggtggacaggtaataaaagccatcaaatttcgatttctagatggggcaaccttcaaggtgtaaaattagctaatttgatagggagttaaggtctctcatcccatcatcttctataaagacttcaaggatgccaagatcgtgtctctagttagaattagtttgaacgaagctattcctacaaagtctataaattctttcaagaaatttttgagtggtagcagagccccaaccattatgtactccatgctctaagcaccgactcgagaagagccacttgtattgcactcctataattcatcaaacttagtaggaggtatgtaactcttttcatccgggttggtcgagcgacggtagaaaccatctgtgtactttgtgctgcattccttaaagcatcaaccatgtaatgaaacaaggtgattttaaaaagggaactgatcgacttcaaaaggatacattgggattttgtgaatcttttgatatgagaggtttagaagccatgctttagaattcaaactcaccatgtggaaaagcaactgctacagtggatttattgtaaggcttatttaaagaaaatttggttaaaaatatcagctcaagcaatgttacatcttgtagaaaatacctttaccttaatttacttcatcaattaaacgtctatagtgagtagagatatctactctgccttacctttcatcattttccctaattcgtttgtcattgatttctaacatagttgtaaagactgagagcaacaccaaggagacaccaaatatcatatatgacgtgaatggagggtctaacgaggctgcatttcttgcagcattttgaagttttgtctacagtgcacgacatatatgtcgtgcactgtagacactgc

SEQ ID NO: 388471 - DNA, 2490 bp, Cannabis indica
ttagtaacgagtgatatgcaaaagaggtcgtacgcatcggtgaagaatcccattccggcgatgagtatggccgtgaaatggtaccattgagttttggctacatcaagagctgtaagtacttgtaattggtcgccagccatggcttttttttttttcttctgaaaaagaaagaaagatgtatagaatagtgaatgtgtgagttgagacttaagatagcattttattataacattaatttatacatgttattataacactttattattattttacatatatagtaattttttttggttaggtatacagagaattggaaaatcatctaattttgaaaatgacaatacaagagttttggctcaaattttcaactcttaataaccaaactaatatatgtgattctttaagaaaatgacaattcaattgataagcgcccctttgaagtaattctgagtaaatataaaaaagattattgagaccatttttatttaatttattttttgaggttgaaagttatgggaggttttgaatgaaacgaatatatataagagtcaaaataaaccaaaggacaacaattctacttgttagacctaaatagcttttaaaaaaataacttccaattaatatttatcaaaaataagtctttatataaaaaactcaataacaaacaaacaacctaaataccaatccaacataaaaattataaaaacaactcatacaggaaatataaatttttaaaatagtatataagataattattccccaaatagtaatgggaaaatattaattaattataataataaaaactgtaaacaaaaaaaatgaaaattatgtttacctaatatcacataaaaattttcaatatggaaaagaaagtaacgaatatttttgaaaataaatcacggatataaaagccaaatgtggcaactttctatacattcattcatgcattatgtatttgtataaatatatatatacatatttatatttatttatataattaaataatagtcaaatcgatcgtataattatcatgtctatgtttctaaaaaactagccagagccattgtgaaaaaaaaaatgtcccttcactaacatcaccataagtactgataaaaacaattaattaattaattaattaaggaatacacatatatgtatataaatatagacgtaataaaaaggttacaaaaaaaaaaaaagaatttctatttagaaataatgaagctgaagaacatcgaaaatgttacattataaattacaaagtaataataactatatatataataataaaaatgcagaaacatgagaagaaaataatgcatatataataatagatatatttattatatatgtacacatatgtgaaggtaccttattcgaaaatggcagagcttggtgaacctgagattcttattatttgttttagtgagagaaagtgagaaatggagagagagagagagagtgagaataagaaagaagaagaagaatgtgatgatgatgtggaaaatggagaagggtttgggtccgtatttaagtgcataagactctctatattaattaacaaacttcatctcgaatctctttaattatcaaaagcatattcttttttaattaattataaattactaatttaccatctcattattccttaattaataatcttttataatttttaaaaatattatttttatgttttatttataattttatacgatctaaatttttattcatactaaaatatgtttttcaaagttttaaaattataaaaatatattttgtttaacaaaaaatgaaaacaattaaaaaaataacaaaaaatcaatctcttaccatatataactataaattaattataaaacaatcaaaaaactgtttattgtttttacaaaaaaaagtaatatttttgtaaataaaaaaattcaaaaggtaaattttttattttctcgtttacatatttttgtaattttttttttaaaattttggtttattacgtaaaaattttattattaatcttacctagctagttattgcttaatttcttatttatttaaatattatttggagaaatttttttattatgatagactaaaaatttaaaatggctacaatgacatcactaaaaaaaatagatatatatttaaatattgtgctctatgcacgtcaaaaaaaaataattgtgctctatatattcactataatggaataatagatatattattaacaaaatacttttatattattttcgtatatatatattttcctatcaacaatataattagtattacaatttctgaaatattttattgtataaattatatataaacaatatattttttttttatttttgtaaattcaaaataaattaaaaaaaacaatatatagtatattatttgtaaacattttattcggctttttggttgaaaaaatttggtcggtggaagtaatgccgttttcagatttttattgtatttgatcaattgaaatttcaag

SEQ ID NO: 388472 - DNA, 856 bp, Cannabis indica
atttaggcccttaaaatgagtggccctaagcgcggacctaattcgcgtatgcccagggccgggctgataataagataacataagaagtcaattttgcttgtgatttccttagctaatttattattacagttgctggtgagattactcgtttgaaaagcgttgcataccgcagtggcctaaaaatcaacccgaatgtttcaaaaatagaggccgaggaaggtcttactgaaactttattaggtaagtatagctgatggattaagcttttctcagtgatcatctcttttatgctaacagattctttactattattgttttatttttccagctagtaaacctgtttgggtgacaaataaaaacttcatcgactatatcttcacacaaagtttggaggttgcacaagaatttgacttgccaatgcaaatacacacatggtatgaaataaaaattgtttgtttttttttttctttttaactccagtttgcctatttatattgataaattgtacatttgacctgtaactagttttggagacaaagatttggatatggggctctccaatccctttcatctccgggatgtcctcgaggaaaagagattctctaaatgtcgtatagttttattacatgcttcctatccattttctaaggaagcctcatatttagcttctgcttattctcaggttaataattaaggtagcgtttggtaacacttttttaatcagttttctgtttttaaaagtagaaaagtgaaaatatttttcaaaaacatgttctataaaactgttttaacttttcaattttataattagaaatcaaaattttaaaaacaacaaaaattactttcaatatttttt

SEQ ID NO: 388473 - DNA, 1193 bp, Cannabis indica
gatactattttgtacaattttagaaaagacaatgtctaatttgtcatttttgaaaataaatggtataatctgtattttttacaaacacaaggtccaaaatgatattaaccctttttctttttaaatatacccaatttatttatttttttttttaaaaaaaaagaaaagaaagaaaacaagacacatttaatgcttttgtggttgagttaaactacaatttaattgttaattgttattttttttttattatatttaatactacttaatcacaaattctcacatttaaaatataaacaaaaagtgtcattttaaaaaaaaataattacaccccactcaacttaaattttaggtccgccatatccttaacaatcaaataatgttatacaactaaatgactatacatccccaaaggaagaaaggaaaagtcatctagccaaaaaaaattagttcatccattcgaagagcatgcacaactaatccatctgtaactatattgttcgacgtatataaattagagatactcctaaaaatttaggcaaaaaactattacaacgtctgcaacaccatccccatcaataagttcaagtaggaaagtgtttttaaagttgaaataaattcagtgcgaaaaaaacttgaggtattttgtatattattcttaaatttataattaatgtatttaattttaatgtgtatgtagcttttttacaaacaaagtttatgtgcccacaagataataccaagtttgtggaccatgctgattatgaaatgtcaaaaggtttgcgtgactgggggctgattgtaagaaaaagtggattgaatatcttaaggagcttagacaggagaggacggacatgttacctccggacagagtaactcaagtggagtgaagtgattgcattgcttacttgaacaaaaaaaaaatgtatttgatgaaattattaattttagtaatactttacgttataaacagcaataaataattaattgtaacacaaatatgttaaattcaagcaagatcagcaaaaaaataaagaagattggggtaagataaaacttcaagaaagatgtggatcaaagtgtattgaagcacatgttgttgatggggtaactttatatatttatttgtgatatcgataagtattattttatttttttagaaaaataataatgacacttatttttacttaaatata

SEQ ID NO: 388474 - DNA, 960 bp, Cannabis indica
agttcaagcacacataaataaaagtaagagataaaaaaatggaccacgtattcatcatcattggatcagaaaaatttcatgatgctgtccatcctcctgagaagtaaggcttgacttgtctctattcttggggtctctccgggagttatccttatacaagggtggaggctttcggtaatgtgtattttaccgggtggcgaagtacacacgttcctgagtatccgtaagctccgtgtattgagtgtattgtcgagtataccccttttgctttcgtttgtcctcagtctgtgtgctacctttgaaggatctcttactctaggagctttgttgagctcctgccatacttgtggctggtgtggactgggacggagtttggacactcaccctagatgggttgctcatgggcgcaccaatatgtgacaatgctagagttaaatcgaggctttggttgtatgttggggtagcagagaactatactctgcttgtttggggagtggcaggaggtggagctcctggaagttgcgttcttggtgcatatcctgacaccccagtcgggtaataccttctgtaagccactatctaggtttcttccaaattgatgtatttttggactctcttttgaaacccctggaggctagctgctccttcctactgcaactcattccaaaaaggggttcttgtacggattccagcctgaagaagggccagctattgtccgttgtccaccttctttattttaaaggcctcctctttgaatctctttatgaagttctttagggtttttgtgggcagttgttttatgatggttagggcgctaatctaaaggttgatctttcttgccataacaaactgccgttggtaacttacttgcaacttgttccaacagtccactgatcctggttccaattttttgaaccattcttcggtagacccactcagtgttagtggaaagcatagaca

SEQ ID NO: 388475 - DNA, 1405 bp, Cannabis indica
tgtcaaagtttagggggcaaaattgctaattgacaaagacacatcatcatttaaacagaataatgggacggaacttaacagaaggactaaatttttataaatgtaaaagttcagggagattcttaacaatattttaagggtcaaaattaatattgtcaaaaatttaggaggtaaaattgttaattattctaatataaaccaccatttcaacaaaaaaaaaaaataagttagccaaaaataaataattagcaacaaaatcctttttattttaatatttatacacttttctatttttgttgtggcgaaattttcttaataagtttacttttctttactaatttaaggtgttcaataattttttttttacggctaaaccctcttaattatcattccacttgcactttatcttttaagcttaaattttggtgataaaatcctctaacctattgaactgttagcaaatttaaggtgtcatctattttttataattaactgctaacatagactacttatgtgtacactcttgtacatgtagcatgtttacattggtacatctaatattattatttcaattataaaaaattatgtcaaaatttataatattttattttttatttttataattttaaaataaattttgaaataataatattaggtgtataatataaatgtgtcacgtgtataagagtgtacacataggtagtccatggtggcaattaaccagatgacactttaaatttgctaacaattcaatagtttggaaggttttactaccaaagtttaagcatggaagattaactgcaagtgaaacaatatttgagagggtttagccgccaagaactcactgttaaatacaaactgaataacttgtatacctgtgtatacatgacataagaaacttgaattgttattgtcttgggcgtttccacccgttctcgggccttgctggttaaagattggcctttaggtgactcactcccggatgtcctaggataagaattcaccttgttggccgccagaggtgcacttctagggtgttggtctgctatgggttggacaattgggggtgttgttgttccaaagactcatggccggcccctcaggccaatggttgccagagtctagctattctcgccatcagatctttgtggtaaggcttgtcatactttaggttggggaggtttgtcctagttccagaggaacttggttggacagtttgtctgtagaccctccctgatctgttgattagtctcccttgaagaggatctctaatgagatcctaacctcttctagcagttctttcattgaatagtcttattaagtttctagcatctctgttatggtagtctaattctgcctggtgagattggaggatgtactcttggtcatccatctatctaaaaaa

SEQ ID NO: 388476 - DNA, 1788 bp, Cannabis indica
ttctctaaaatgatacacgatatgatcataattttttgtcagctttaataagatgatgatgaacgaggtgatttgggactggtgcagctgggttcatgtgaatatggtgatgaggtcgtggttcaggtgaaaagaagtcgagaataatgatgagatgtgagtgaaggtggggggatggttttctaggctcagcgggtttggtgataatggggaaaaaaagaggagaaatgtcattgggggtctgataatggggtttctggcaaatggaggtggagaatagtagatggtggtcagggtggtcgtggttcagatgaggggaaggtagagacgaggtggctatggtgattaggacgaaaaacaaagaagatgtgaaaataggattttctgagaaacagaaatttagggtatttgagatttttttggttatgatattatttgagaaattatgttttggttttagttttggttttttttttcttctaaaaagtccttcacagatcgcaaagaatcccaacttacacctgttgtagcaataattttgcaaaaattcagcaaaaatattactggttgcttctttaactagtactacttttgctaaaaaattactacagtaggtgaacttctccaaatcaacgataaaagccttttgttcatgttgagttttgctgcagcaaatttcaataaaaaatttagcaaaaaccttaaacctccaaatcacatccgaaattccaaattatgctaaaaaaacacctgaaataccaaacaagtgtaaaatccacccaaacactaaaaataaaaatgaaaacaaaacaaaataaaataaacataaagaaaaagaaaaagaaaaataactctaatatgattatttataattttaactttaaaatttattatttttttaacaaaaatatttacaaaacttgttcttcttccaacattgggttgccttaaaaaggaattgacaatctaagcacaaggcaatccaactatcttccgtttcatgcatcctctaaagcaattgatgtctttgctcgatcaacctcaccacccaaattctttagatgctgctcattcactttaaattccttttcagattgctcattacaagcatccataactccatggcgataaactttggttttttcatgaaaatcatgatttgtcacaatataattatcacaatgtagcttataagttagttttgaatgataaatataatgattcgccaagtaattttacatgtggtatttgattagatttatattcagtaaataaagacaataaatttttgctaccaacatctgaggttaaaattaacaaccacaatatgaaattgcagacatacgaagaaaatgagagaaaagtaggggagagagaaaaaaaaagttttaaaaattttaaaaacatcaaaattatatttttaaaattttgattttaaatttaaaaaaaaaaatagaaaacaaaattgagttaactaacacactgtttttatataaaaaaaaattcactgaacacactttcaaaaaagtcatttccataatttgattaaaaaaacaaaaattgaattttaaaaatgctaatataaataatagtatatatatttgtatgtatactaacatattttaattatatgttcctctattatttaaccaattaaaatttatgctctcataagtgagaggagtgattctctcagctaaggagtttcctaagtttataaagatgctgtaatttttttaaaagagctatttcatgaaatatatatttttttataaatttaaaaaaaaa

SEQ ID NO: 388477 - DNA, 3127 bp, Cannabis indica
atatttgacttaatccatcttgacatttagggaccttaccccactccttcaaccgaaagatataagtatttcctaaccattgtggatgaccactcaaggtacacatggttatatttccttagggccaaatcagatgcccctacaatcattcataacttcttcacctttgtcaatgttcattacaaaaagaatataaagtcagtaagaacaggcaatgcaaaggaattaaaactcacaagtttttatgcctctcaaggctctatacatcaaaattcatgtgtggctagaccacaacaaaatgctattgttgaaagaaaacatcaacacatacttaatgtcgcaagagctcttacttttgaatccaatctccatttatcctattggaatcatatggtcaaaactgctgtttatctcattaatagaacaccatctgttgttcttaaagacaacacaccatatgagttgctgcataacaaaccccccaactataatcatctaagaaattttggttgcttagcttatgtttctcctactcacattgatcataaatttgcacctcgggctaaatcttgtattttcataggttaccctgaccatatgaaagcttacacccttcttgacatccaaacaaataacattttccaatcaagagatgtcatattctatgaaaaaatataccctatgcaaaataatacaccaaatatagaaattgacagtttttttttcctaacagtcaacatgaaacatatcagcatccaccaatttttctaactgcttcagatcacgcaactgataatgcatcacctgaggcaacactagcacccactactgattcgaataaatcagttgcaccaggaaaaatagttgcaccaacaactaatcttgacttaactaaatcagttgacaaagcaaccataccagctactaaatcaactaaatcaggcagaaaaatcaatacccctgcccaccttaaagattttagttgtcatactatcagcagcacacaatatcctctcttgaactatctctcttatcataaactctcccctaaattcagggcagcagttctagctacttaccacttgcttgaacccacatcctacactcaggcatgcaaagaaaaaatatggaaccatgccatggatacagaaattgatgctctcgaagcaaacaatacttggattgttgtcccattacctccaggacaacacacaatcagcaacaaatgggtttacaggataaagtataatcctgatgactctgttgaaagatgcaaagctcgactcatagcaaaaaggctacactcatcaacaaggaattgattacttcgaaacttatgcccctgtagctaaatttaacacacttaaacttttgtttgctctagccgcaataaaccaatggcatctttaccacatggacatcaataatgctttctacatggcgatcttaatgatgacatctacatgaaatttcctcaaggatacaaaccaaaaggcaacatacctcctaatgcagtatgcaaactgaaaaagagtttatatggcctaaaacaatcatcaaggcaatggtatgccaaactgagcactacattgctacaacaaaattttattcaatccaagaatgatcattcacttttcataaggaacaccaacaattctttctcagcaatcttaatatatgttgatgacataatcattgcaaccaacaatactacagctctaaatcaattcattaacaccctcgatttccaattcaaactcaaaaatcttggaccacttcacttcttcttaggccttgaaatagcttgaaataatcatggcatctctgtaactcagcgtccattcactatacaattactgcaagaaacaagaactcttggcacaaaaccggtttcaaccccaatggaaccaaacatcaaaattgacaatgaaataggacctcttatagacaatccaactcaataccggagcctcattggaaagctcgtctacctcacaataaattgccctgatatatcatttgctgttgccaaactaagtcagtacctacaggcccctcatgcaccacatctcacagcagctaatcgcgtcattcagtacctcaaaggcacacctggacaaggcttattcttctacaaagatgctcccactcctctccaatttcgagtatttgcagatgcagattggggatcatgcttggacacacgacggtctatctcaggttactgcatcttcctaggaaaatttctaatctcctggaaatcaaagaaatagcaaacggtctctcgctcctctgcagaagcagtaccaagcaatggcaaacacatcttgtgagctaacatggcttcattccatcattgccgatttcaacatcaacattcaactgccatctgttctcttctgtgacaccaatgctgccatacacattgcagaaaatcctgtttaccacgaaagaactaaacatgttaaaatcgtctgtcatctcataagggagaagatcaacaacgacactatcaaaacaaatcatgttcctaccaagtctaacttagctgatatttttactaaacctttgtttcccaatcagtttcattacattgtatccaagatgagtgtttaaaatttatacactccatcttgaaagggctattagattagtttagttttggttaagtcggttatattagctaccttttactgtgccagtatatatatgtgtacctcccctaatattcaatcagttgtaacaaatatttcacattcaatttgttcaataaagaaaaatactctgtttccactaatacctatcacaccatcttgtttgacttgattagaaaaaggactttgaaagtactatatgaaaaaatgactgaaagaaaatttgtccaaaaaacgcgtacggtggttatgttgatgaaagtttactgtgaaaattttcggattgatctaggcttgtatttttatggggttatttagtggagaatggatattgccctattggagcttttcctgacaggattatgctccagaggttttctcaacgatgcttttgactgctccataaaagtcctggagagagggaagctgtaatatcccgaaaaataaataatatctaaataggcatattttat

SEQ ID NO: 388478 - DNA, 1936 bp, Cannabis indica
gcaaacagagagaaactaaaaaaacttgcctgcagaaataagcagcaaggcaaactaacaactaaactagttaaactaaacttaaaactaaaataaaatggataagtaaccgaatcagccatccaccaaaggagaaggtgggaaattgaaaaaactgggcgcctcaaaactcccaaacagttgagagtgcagggccctttgagcattgtgggccacacgattgtgatttctggggatccaactgatctcccacagatcaaacttagtagataaatcattgaacttggaggcaatgtctttgatgttgtagtgaagcttgtccaaagcattgttatctatcaaaattgcagatacagccccagccgagtcacattggaagattatgttcttgtggccgaggttgatggcattttcagctccccagcaaagggtagcaagttcccctgcttgaggctcactatactgaattcgggttgtgtgtatgcttgtgatctcccccttgtcatttctgagaattgccgctccaaccgattgagcttggccgatcgctacatcggtgttgcatatgtaccagccctcaggagtaggcagccactgcatcatcggagctggccacattgaagggtctgaaaagcatcctgaagccgattatcgatcagctggaggattatctttgtgggcgtgagttgtcgttggtgaaccaccttgtttctttcgctccaaatcttttcgaaaattattgtagccccctcaaggaatgcatgaagggtggtatcttttggtatgttattggtgactttgaaccagtttatccattcctcccaattggagaagttgaaggagcaagtcctaatactccaacatcagccaaaccacaaggaacgagccagatggcatttccaaaagatgtgcaacgagtcttctactaccaaagaacatagaggacaattgggatcattaaggccagcaaagagttgtagtttacttcgagttaataggcaattggagagtattctccaccaaagcattttcagtctcgggtgcatcttagtcccccataaaatctgccatttttcattaccagtgtttccttgatcaaggttttttatggttggtaggctgagcggatagtgaatttgccattgctttcgggagtccacaaccaagagtcttccactggatggtttggtatgttgatattcaaaattcttctggcgtcttctggttggaaccattggtggacaaggtcctccctccaggtgaagttgtgaataaagttgcacactaaactgatgccctgagttgcatcaagcctcggttgaggttggagattgcctaggggaacccaagggtgaaaccaaatggatgttgattcaccgtttccaattttccggcacatacctttgtgaagttgattctgtgccttgagtattgccttccaaagcacagagtcggaagcttgagggtcaaggtcgaggaagttgtggttcttgagatatttagcacccatgacatgcttccaaaggcttgagtcatccgacaacactttccaagcccatttcatgagaaaagcttggttggttgcctccgtagttctaaaaccaagacccccgtgagttttcggtttgcaaagggtctcccaagcaacgcaatggagcactcgcttttcttctgtatcacgccaccagaagtctctaagggctttatcaattttgttggcagtggtggtgggaataacatcggaagaagcaacataattggacagagttgagccgactgatttgataaggcaagctctgaaaggagtttggctttccatcccttgatacgcagtaaaacccggtccaccaagttattgtggttactcgttcttcttgaagtattgaatagcgacagtcctaaataggtcactgtaacaccctaactatcttaggcg

SEQ ID NO: 388479 - DNA, 1319 bp, Cannabis indica
aaaataaacaaaccaaacaaaaaaaacctactctaaataaaatgattagggttttatttcatttttgtaactatcagctataactaaatgccctacataatactatattttatataaaaataaaataaacaacataccataaagtttattatcactactctaatgaaatatatgcatttttaaagataacacttgtatatttgatattaataaattagattttgattaacttaaagtttttagataaacactccacaactacaaaacaagtctttagaggcagttttttcagctgattaataaaaaaaggaagctaattgacgccatagagtgtggttggaatgaaaaagatatatggtgtcatttaattagtaataactaatgccataaagtgatgaattttaatgagaaatacatatggcatcagttattttgtgataaccgacaccatcgcgacacgcattagctgatacgtagggtgtacgttggtcagtttggtcggtttatgctatattttatccaatccaatgtaaatatcgggttacaaaaatctaagtgcaacccatccaattacaaagaaagaaaatagtaacctgcccaatgaaaatagttgttttggtcgagttaatccgtccaaactggccactaatatttttttttatttttacattcaattattatattttagttaattctaataaggaggaaaatgtatattagattgaatttaaaggtcaaatcaaccactataaaaaaaacatattagtttcaaccatcttaatcaggttcgtcggattagttcaggttgattgggcgtgttggtattattttcaacccgtgtaacataaagattgagcgaattatatttttgtcgagtttttcaattttcattttttgtcgggttatctcgatttagtttgggcgggttgttcgggttgggtggtttacaaaagtttatgtacagccctattgatgtgtgtcccctttgttgtcaattttttacaaaataattaacgtcataggatttataaccctcatcctagcctttgtcttcgtcacttcatctacctcaaacctaaaactagagccccttcttcctaaaaacccacgaaaccctcgcccaccacccctttcttctcccatttattcatttttcatccattcattcttattttttttaaatctcttgcaatttcatacccaaaaatatattcctggagtttgatttgttgggttttatgccctaaataaaactcatttcatataataatatttacttattaataaagaccagaaataacattttatgttgcatggtt

SEQ ID NO: 388480 - DNA, 1654 bp, Cannabis indica
ttttcaattttaaatttcaaaaattacttatgcatgctaatgtcatcattttctcctcccttacacgttattgttcccttgttcttctctctcattctttttgtttttttttcttctctcttttctgttgatttttgtttctctatgcataacccacgacttgcctgtgtaaaccatctctgccctaacccattatttttccaacctcccagttcagtcatgatcctttctcttccacaactgtattttgtattttccttctcattttttttttcgttgtgtataaatggccaccactagattgggttccaagttccttttccctgctaaattttttttaaagcatcttaagaaacctccttcgaagtcctctaaaggtgatccaaaaatgagtttaaaaggcattgcgaaaaaaagaatgtctaatgtggctgatgctgcagaggcgatggccattctccggcgtaggtcttgcatttctgcctccaactccttcatccttttactcgtcctccctttgtcttgtgtgtgctttgcattgggccctgcccttgggggggcctcatgagaggtgccccctagtatgaggcctctggggtgaagtctctttcttttgctatggggtgtttccctcaacgtaatctccttatagtggataggtttgagttgtctcaactggctcgttgggctcctgtcttgcgacaggacccttccgtgctcatctcttggggtgctattagtggatgatagggaatcacctttgttggcacatggagttgagatctcattctctacttggtggcttttatgacgtaaatgtgaggcttgggttttgcctttgagtattatattcaacactttttgcataccagccacagtagtttctagctttttattcttttagtggaggtcacttatttccgcttcatagtagcgagcccgagagcttgaacccactcagcacacttgctcttcctttctaggtccatgccttgatgtgtcgggatttgatgatgcatgtgacagaaggctctgcaccagagacgactttctcggtagttgaacgttcttattgacggggttaaccatcagagttgttatcgggtcacacagtgctgggggctctcttcgagcgttttcttggtagcccacacttttgttgttcatccttctgccttttccaacgacgggaggttggtgtcctctaaatatggtggctgactgattttcatctaagtgacccccattttctttgagataatgggaatgttttgacatttcgaaagtgatggtgaatgatttgagaccaacgtagccagagcttgtcgttcccatagaagacaccaaaatgttaacggtctgaactcgttaacgatatagataaattttttcaactaataatattgataaactttaatgaaacattgactataatactcggaagaaagaactttagagtctttaatgtgtttgagaatagtatcccctaaatgcttttacaatcatacaatttttagctctcagaaattcaaaagccccccactcaatggactggagagtcctatttataatcaaccctcttgcccttactcttccaatttcccccacacaccctatgaccaatcacttgttggaatttattttaccaggatct

SEQ ID NO: 388481 - DNA, 1605 bp, Cannabis indica
aaataccaagataattaaaaaaacaaaagctgaccaatccatttacaataaactaaaaaaaaaaatacttaacaacaaccttaactaaaaatctaacaagccatcaatcattagtattaaagtatactaagtttacaaactaaataaacatatatgagtttgactatcaactaaacatcctccaataaaaatatataaataattatcaatccaattttgactacaattttattacatttttaattatatctcttaaatatataatttattttaaatagataattaaatcaatttccataaatataaactttacgacgtatcattatacaaaaaaatcttattttagtcacaataaaaattgtgacttaaaaatggtcttttttgtagtgttaacattatacaacaggttatttttcaaagttatggaaattagattttggtggaaataagtaaaaagaaggtagggaaaaaatgtcaaaaatattcttttattaaaaaaaattctcaggtgtgtgttagcctattacgattagctttagttagtttaatcacccttggttgagttacttgttaaacaattgttaatgagatatgtaaaatcaattttagtttatattcaatagaatcagactacccaaaatcaatttcataacataatcacataaacctcaaaactttaaacttaaaattccagaaaatacttaaaaattttatgcaaataatatatcaaaagaaaataatttcatgaggaataaacctcctaaagttttaagattttaaaacaaaaaatttaacctttaattattacgaaattaatatgtaactatagataattatcaattgttatataaattataggtcataaatcatatacaattggtgctcggatgccacattagaaaaataaataataaaatcaagatactaatttgtatatactatagaacataacaataatagataataattaggtatacatacctaattgatttatatcgatttcctagatttctaaattagaaacagttttatatatttgattataaaaatatacaattgtaatgagataatatagagacttagctacagaatccaagttggaatgagcctactcatcaaaggtttcagttaagtagaaaagctcacacaaattttacacacagatgttaagctcattaactattaatcactaccaatatgagataacgtaaagaactatttaatcaattcaaattttaataaaaccaaatttaatgaaaacccaaacaaaaaattaacaaacaacataacaatcaaaaaaaaaaaaatacgacataactataaaataaaaaatattttaaaaaaattaatatagaatcatatatgtaccatgatattaaaatagtatgcttctaattttaaaaatatattgtaacgtccccgcttcaagcctccattgggcccttacacccacggactaatggctcttatacacgagttcatcactctggctgcttcatggactaatgactgaccctacagaccaacacgagtgttttcagtgtgctttgtcctcactcacacacatcttgggaaaacttcccaggaggtcacccatccttgaaa

SEQ ID NO: 388482 - DNA, 3758 bp, Cannabis indica
ctggtagatcggttccccaaccgtaagatcaattttgtggggtttcctagggaccaaccgaaattcttgttcctacaggtcccactgttatggtcgaccaatttagtgcagaaacaccaagaactccacaaacacctcaattcaatcccaaatgctaccaaaccttccagagtacctatttacactacaataaacataatccaacaataaaactagccaataacctctgtagcaaaaaccaccattagagagcaaagcttgagttcataaactcaaaccttgctcaatcaccataacaaccagccaatcgatcctaaaagagcttaaataacttcaacataatatcaaaacacaaaatcaaacactgtaaaacatcacaggtcctaaccctaaaatcaagcataaaatcttaacttatagcttaagaaaccatataaaaagagatagggaatttaccatggactaaaacctaaaagatcttgctaaacaccttagattgagctgtagaaatccttgaatgggtgctgacttttcttgagggttcgagaaagagagagaatggaagaaatagagagtttatgtgtttattataatctttgaataaaagtaatattaagttatcatctaacaaagtaaatataaaatcagatcaataaacataacaaaaatgggaaaaagatcattttgcccttgcctaagccaaaagacaacattaccacctaggggtaatttggtcatttctaaaacctcaactatttttgacattcccaatgtctatctaagtttccccattattactaaagtacgaaatcattagaaaatatgatcctatcagtcgaacatcgcgttctaatgttgtcggccataaaatatgaaaaacatgaaatttcatatacaatgtaataccacacaagaattcgaatatatcacataaattcataaatcattactaataatccaatatcacaattaagccatatttatcttctaattaatcatattaaaacttaagcaatctttacaattatcacctgttaaaaggattccgtcctcaaaatctaacttgaataactcttgatattgagccttcatgtcaaactccaactcccaggtggcttcctccaccttactgtttctccagagcaccttgaccaaagcaatggtttttttttcgaaggactatattttctatctaaaatcttaactggttgttccttgtatgataagtcaagctgaagttctaggctttcataactcagcacatgagtgggatctgaagtgcgttttcgtaacatagagacataaaatacgttgtgaactattgaaagtgctggaggcaaggctagacgatatgctaccagtccaaccttctcgagaatatcgaaaggccctgtaaacctaaggcataacttgccctttttcttgaaatgtttcaaccccttcataggagatactcataggaatacatgatcacctacttggaattctacatttctgcgtttcagatctgcataactcttttgcctactctgagaggcaagcattctgtccttgatctttcctatagcctcgttggtccgttgtactgattcaggacccaaatatttcctttctccagattcatcctagtgaattggagatctacatttcctgccatacaacatttcatagggagccatccctatagtactttgataattgtcgttgtatgagaattctatcagtcatatgtacttgctcccggggcctttgaaatcaaacacacaggcacataacatatcttcaagtatttgaattgaacttcggattgtccaccagtatgaggatggaaagttgtactaaacttcagtttggtacccatcgcctgctggagaccttgccaaaattttgaggtgaacttcgaatccctatctaatataatggacttcaaagcctcatgtaacctcactatttctttcacgcataactctacatattgatccactgtaaagactatttttaccggtagaatatgtgaggatttagtaaatcgatctaccacaactcaaatagaatcatacatccacgtagttctaggtaatccaaccacaaaatccatggtgacatcttctcacttccacttagaaagagtcagaggttgcaacaaccctgcaggtctctaatgttcagccttaatctgctaacaagtcaggcatcgggatacatattataccacatctttcttcatcccgcaccaccaatagaagggttttaaatcgtggtacattttggtagtgccaagatgcagtgaataaggagtggtatgtgcttcctcgagaatcttatttctaagttccacatttctaaaaacataaactatagttctatacaacaacatctcattacccaacactatataatctttagcttaaccatatgaaacctcttctcagatcttcacaagttctagatcagttaactgagcagttttaattctatctaatagataagattgcaatgtcaaattgttaagatttcctacaacaaactcaatacctgatctgaccatattatctgctagctggggttaaatcttaatcatactagttacttgcccaagacccttcttaataagggcatttgccaccacattggccttcctaggatggtaaaggatttcacactcgtaatccttaaccaactccaaccaatgtctctgcctcatattcaaatcttaaggggtaaagaaatatttgaggctcatgtggtcaggctaaatctcacacttttctctgtggagataatgtcaccaaatcttcaaatcaaaaactacagcggcaagttccagatcatgagttgggtatcactgttcatattcctttaactgacgggagacataagcgatgcctcgattggcttgcatcaaaacacaccccagaccctgtctagatgcatcgcagtacactacaaacttctctttatgagagggtagggctaacactggagctgtgatcaatctctattttaattcctggtaacttgcttcacacttatctgtttgcagaaactgttgattctttttagtgtgttcggctaagggtcttgagattttagaaaatccctcaacaaaccgacagtaatagccagagaaacccaaaaaacttctacctttcgtaattgtttttggtctcggccaatccttgaaaaattcaatcttccctagatcgaccttgatcccatccttactgtcaatgtgtccaagaaaagacacctgacattgccaaaacttagactttttgaacttggcataccgattgttgggaatattttaccaggatctagatttactaacaagtatgtttaattaacatcctaaatatgaattctctaaaacaatgaaattaagcacataagggtttaagaaaaccttactttgattgcagcggaatataatgactccttccattcaagttctctagcccttgattcctttctgtaccagagccttatcaagatctgaacctagatctctttctctccttcgggattggttaccaccctcttactcactatgattgagtacttgacttgctatgtatgggcacgaccctcattcactcaatgttttgaatgtgaagaacaatgaaggaggtgagaaatcactaaggaatgaactctctcaactaggttggttgaatagttaagtttacatttatttgacaaagtgtcaagtggatgagatgagagcatcatgttccttttatagtgtttcaactagg

SEQ ID NO: 388483 - DNA, 659 bp, Cannabis indica
actcatattttttgtggtacggcacaataacacccatttttttgaaagcacaaataaatataagtcgaaccaacactgcacacacgaacttacaacactatgtataactattatatttattcaataataatgttattatgatataatattaagaattgcttattgttattgttgttacattggatacttttaggtgttttgattttttttttctagtgtacgtctatatatagttataatcttttaattagaatataatttgattgatcctaagtgtattcttaaatagaggtttcactatattttttattaaagtaaaataatgagactcgatattaaattacatcaataataatactacactttataaaaacgctagacacaaggtgataatattttgattatatttacataactaactattttctttattacatataagagtattattttttagaactagtaaattaaatggaaggaatatgaatctctttcaaactacaaaatttattgtccatcctagaagcatgtaaatatactctaagggctcgtttggaacgctgtattaagtcgtattgtattgtattgtattatattgaattgtattttatgcaatatttttatgtaaaactatatgtggtaataacttttatggacac

SEQ ID NO: 388484 - DNA, 801 bp, Cannabis indica
ttttttttttttttcagaattaatgccattaaaactttaagtaaattctataaaatatatcttagaaaagaaaaaaataccattaataaaaattaagttttgccaaaatatatgcaacactattagcttctttaggacaataataataataagaacatctttaatgaagtgccaaaaaatagtatattattatattttagtacacttaaaaaaaattactactctaatagtgttctaaaaaatatactaaatttagcacattttaaaaatagtaccaaatttgacccaagatatgatattgtgccaaatttaatcaacaataaaaactacttttttatttattttagtaccactaattcttatgattcattaatttttaataaattttacattctttatttatcatattactattatttaagtaaaaaaaagaattaaaataatactttttgtatattcttaataaaatattgaatgactatcaatataattaattgttttttttttcttattttataccttgtgcattggagtacaattataaatagtaggccaaatataacacaaactaattttttgtgacaaatttagccaaattaattctttcaatggacatggtctaataataaaaaggaataatttttaatacttttactgttgtttagattttatttatataaagtacggtcttctatataattttatattgtactcttattttattttttttcgttatttgtatattatttttaagttattttgttgttattttcatgtgatttttttgttgttttttatatt

SEQ ID NO: 388485 - DNA, 912 bp, Cannabis indica
ccaagcaaaaaaccaaaattaaaagacataaacttaataaatactaaaaaagctaaaaaaaaaaaaaaaaggttttttttatttataggcagaggagtcgtagccgtcttgctaggaaagaacgaaaacaattcaattcttttaacagcagaagaattggaacaaataagtaagggagaaagttagtttgtaaatctctttaattaactatacaaatagttatacatatatatatatgaataatctaatagcaacaaaacaaacatagatgttcttttgaaattaataatttcatactgaacactaataaagtaatatgaaagcattcttctattaagaaacgattaaaaatgttgaaagcaaatccagaaatttttcatttcaaataagaagaagaaagagaccaaaaacctggttaatgaaaaactcagataaaatcaaggacctttagaacgaatacggtagggataattagttaaatgaccttaaaaagtgtttttattaactaagcaaccttcattttaaaattttagttacactcgccttctcttttaataaaatttttatatctcaatagtaccatttattattttatatttatttttaattaaaaatagaaaagtcatatcattaaaaataaaaaaaaaataaaaaaaataaaaaagacctcccccctcacatggtgttttcatgctctttctatattttttttaaaaatctttcaaaatcttatgaaatctcttcaaatttgtaaaataataaatttataatacacttacatatagataagatcaatatattgttgtcaagagagcgattacattcaaggtaagtgaataaattctaattttttaattttttattttgaatgttaaaaacaataaaagttaatattttttttagcttgattct

SEQ ID NO: 388486 - DNA, 943 bp, Cannabis indica
atggatcatatagtttcaaaaatgtatataagagtttttttttaaaaaaaaaaaatatattaagcatttttttaaaacattttttaaggatttttttatttaatatatattaaaggctaatttattgtaatcctatcctcatattttttagttttcttttcaattttttttttccttatcaaaggttattgaagaaatctttttaattaatatataatatttttttttttcaaaatttaattctaataatgagttcttagtattgtaatgagaaatgctaaagggcaccactggtgcctagcaccctcctacgtgtcaatatcgctattggtgcaattaagtatcgggtcccatatagtttaatataataatttttatagagtatcgctagccaattgcaagtcgacacatttagaaggtgctaggcaccactggtgcccaatagcaatgctctattgtaatgatagtgactacaaataacagaatcgtgatacgtgaaataatattcaattgcccaattaatgatagtattgtaaggttatcctcatatataatttaaacctaaacacagctgctttttatctatttttttattttttttttctaaattctcaatctttcttatacactcataaatgtatttgttgatgatgattttattgtgtacaataatatacagagatacataaaaaaattatatggtaagactccctatatcacttattctatttagatgtttatttttctcacactcttataaacatatttcttgatgattttatttgtatgtacattgatattagtgcaattctttctctatataattaaaaaattaatatacaaaataaagatctatgttactatttttcaaattttagtatttattagcaacaaatttattatttaagtatttatgctacaaattttttaatagtaaagttaa

SEQ ID NO: 388487 - DNA, 2415 bp, Cannabis indica
gtatagatagacatttataattgccatttggaattcagtctaagacaattaatattgaggtaaacgcaagtggcgaccctcactaaggaggtgaatgtggaggaagtttcagctatgactcccgtagagaaacttcaacaagaatctgtcttggaggctactccatctggggaggcagtaaagtccaaggtgaaggaaaaagctaaagttttgtccccctacatgttgtctataatgactccatctgggaaatgaaccaaaaacctaacaactttaggtcctatgggatgatagagttttatgcttccgaagtcgagcttcgtaatattccgcgattgatgtggaacaggctgtcttttacagaggaattggcttctgttagtactgatgggttcaacgcctagagttgggctcacatagtgagtggtgcacatctccttctaaggacatactttgaggagttttgtgcgaggataagggtatcccattttcaactgatacctttagcttacaagcttatagctaggatgatatatcttcttcaaaatctgaaagctttaaatccttaccccgaaagcgatactttacttctgcggtgtaaagtcccaacccatgtgtaccaattgcaaaaaaaaaaataagttttacaagctggagagatatcataatttgtatcttccacttatcatttcttaaatgttaattaacgaacataaacaattttatagaaacaataatatacaaatatatttttatacatgtagtttatttttaatatactcacattcttatattaagtagtatggaataaaataaatttaataaaatcatttataatttcaaaataggcaagcatagttttaagatttttttttctaaatagaatagatttttgttaaaataatttatattttcaattagtagatttcatttcaaatttgtttcaaatattatattatttcaatatttaaatttaaaatgttagactttttccaatgtattttaagttttataattaaaaatatgaaacatacaaatatatcctaattaactttcacttatatatgtttttgattatttttgcttttgattaattttgatctaatttagtatatttttttgatccaccattttttttttttgtttaaataatttgatttggtgactttgttgtttttatttatatttacaaattccattccataatgatcgataattgattttcttatgtaatggtggatttttgattagttttgttgaataaatattttaattattattgaaacaagtagagtacggtaatatatagtgtggaattttccttttttactctaatggactgcaattgtcaccttatttttatgggaatctacagtgtaccactaagtgcaactctaatgcagttgatattgagaagtagctgtgagaaaatgggattaaatatccaaaaaatattaacttttcaaccttaaatataaagtgtcgtaccttctgttgagcaccgctgtcacttttttttttctcaattgattagtttattaatattcaaattaaaaaataataaaatacaaccactatggtagctaccattagagttggcctaataatagtggccaatggtattttttttttaataattaaataatatttaccaatataatttattagatttagtgaacatttagtattaaaatattcttattatattaataaaataatataataataaaaaaaattcatgtaatttttattgttgtgattggaattaaaaaaaaaattagtactgaaataatagttttttggtattgatctaacattaaatttgagttttaccattagaaataaccttagtaaaagaagaattacaagaagacataaatgatgtcacttaaaatttgacaatattttattacttaattataagtaaataattaaattttaaaataaaaattatcatcaaataaaaaacataatttaatatttcttaaacatcttccacaaaagaattgtttactatactaattaaaaaattataattagaaaaaatttaaaacacaaaaagtaaaaatataacaacaataacaataattaaaatataattaaaaaaatttattcaaaaaatataattaaaaataaataaataagattggatgtccaaacctaatttcaagtgaggaaataataaatttaatgttaattaggatttttttattttgtctaattttagtaaaaaaattctaacgtatgaaagttcaaagggatgatttagtatatattaaaatttgagagacatgatttagttgatattaaagtctgagagcattatttagtacataaaccatcactgaaacaatacaattgaataaaattaaataaaagttcttaaatctaacaatctcaataattcaaaaaaaa

SEQ ID NO: 388488 - DNA, 669 bp, Cannabis indica
aagaactccagagtccaaattacagagaagatggagacaacacttaaagccacctaaaggtgcgcccaagacggggacgacattgacccccattttggggaaatcaactcagagtaggtccaactgaggaacttaaagaacttcccctcaacatagcggacccgaccaaggttgtcaagattggaacaaacctagcggatgtcttgagtgagaggctcatggcttgccttaagagaaattaagacattttcgcttgttcacatgaggacatgatcgggatcaactcccaggtcatttgtcatgccctcaacatagacaaagtaaacttcaagaatgtacaaataaaatgcaggctccttgcaaagagtgctccaaagctcttaacaaagaagttgaaagactactggagaaaaacttcattagggaagctttctacccagtttgggtatccaaccctattttggtgcctaaaccaaatggaaagtggagaacttgcatcaacttcacaaaccttaaagcatgacctaacgattgtttcccactaaaacaaattgatcaactggcagacacgacagccggccatgaactccttacatgaggatacctattcctgttgggaatattttaccaagatctagatttactaacaagtatgttgaattaacatcc

SEQ ID NO: 388489 - DNA, 1654 bp, Cannabis indica
gcagatgctctaagttaaaaaggtctagggcaagcctatgaattgaagaagatttcaccgaagttggtcgaggatatgaccagagtgggaattgagttcgtggttggaaaacttgccaatatcactaggggtgcacatgggtcgggtttttgggtttttggggttttgggttcgtgtattcgggtttcgggtcttggaaatgtgtaaccgaacccggtgtacaggtgtagtcgggttcgggttgggtgtaatcgggttcgggccctattgggctgggcacgaatgtttaatttatgagccgactgccgaggcgatgccactactctgggatgggactccgtcggcgaagaaaaccagtcgccgactcgtcgtcgcaggtcttggagaagaagaagctaagtggtaatggtgggtgacaactcaagtcgactgcgacgactggtgtgggtgagtcggacgagtcgagtcagtcgactagtgtcgatggtgggtatgggacagtgagtcgtgtgggtgtggtcgtggccatggccgtgggacggtgggtgtggttgtggtgtgtgggtgagtgatatatactgtgtgtgtcactgtgtcgtgtgtttgaagaagaatagtaagtgatagttagtgatatacttactgaatattaactgcagattgaagaagaatagtagaatatgaatagcctattcattgattgattcattcattgattcattgaaatttgaacatgattaaaatttaaaaatttaaaatactatttacattttacagaatacgaataggcaggcagttaggcacgcacggcagtaatttttattttcgggtattaatttttaattaaaaaaacagcttttatattttcgggttacgggttctaacccgaccactgaaataaactcataagtgacccaaacccgaaacccgttacagtccttttcgggttgaacccgacccgactatacgggttttcagttggtcagtttttttttgcatcgggtcggggcgggtgttcaggttttttgggtttgcgggtctaaatgtgcagccctaaatatcacattaaagtctaatttgttagaaagaatcaagacaacccaacaaagtgatccagaactacaggggtataaagaaaagcctgaagtcaagccaacaggggatttttcaatttcaatagatggattattatgatataaggacaaggtttgtataccaactgacgaaggtatcaaagaggagattctagatgagtctcacactacaccatatttcatacatccgagaacaactaagatgtatcacaatgtaaaagcgatgtactggtggtggggtatgaaaggtgacattatggtgtatatgtcaaatgtctaacctgttagcaggtcaaggcagagcatcagagactagcaagattacttcaacctcaaaagattcctgagtggagatgggaagaagtaatcatggactttgtggttgaattaccaagaataataggattctatgattctatatgggtaattgtggatagatatacaaagtcagtacacttttaccagtgcggactacgtacagtggatcaatacattgatctatatgtcaaggaaatagtttgactctatggttgctccaaagtcgatcatctcagatcgag

SEQ ID NO: 388490 - DNA, 1157 bp, Cannabis indica
aaaatggaacgagaaattatctggtgtggctcatctctttgaatttaagcgtacccataagagctctaaccctaaccttgctcacaaatattcaccaaaatcttttaaggcgggttggctccacctacgatggggtacacattacatgaataaccttgaaatggatgtcaagagtggttagactaatatattttgtcctcacatttaagaatcatttaagagccacacagattcaaacttaagaccttcagtttagaaaatcacttgggagttagcactttgatattagactattcacttagtaagtttgttcccaaactttaaacactactaaattatatctcttaaagctcgtttggtaggtcatataaaaattatatttgttaaatacgaagaaacgatatgtttgaataaaattttatttgtattaactattatgatcataaatcttaatgcaatatttgttaaaaaaaattacaataagaatcatagtacttaatatgtaaaagatggtttgtattaatttacattataataataaaaaatggtctgaggctagagcacgaggttgagggttgtggtcgaaatttgagtctgggtccaagttcaggttcagtgtctgagtccaagtttaggggttggggtctaggtttaggttcaagttcgggatcaggctttgggtcttagtcgaggttcgcatccaaggccagggttggagttggggttcaggtttggagtcaaggttcgcattcgaaccagggccaaagttgggtccatggttcgagattagattagggcagagacacattcaaatttataataaatattatataattttacacaacttattaataattatattaaaataaaactatacaatacaaaaaaaacacgatagtacaatacaatacataacacacctggggaagctttggaggaagctttggaggagtttcaaggtgtcggggctagttgtggtggttgggttttgggtgcggtggtgcctggggaggttaggctgggtgcggggggtggtggcggtggccaggggcggttgaggaggggtggggttggggtgggaagggcgcggtggtgttcacctggggtgggtgaatttgtgttgtctgtggatgcggctgtcacgtccgggtaggggc

SEQ ID NO: 388491 - DNA, 873 bp, Cannabis indica
aaaattaatgtttatatacgctagctaattaagccttcatgacttgttctgtatccattgtgacattattgaatgaattattgcttcttaatttccctcaaaagaaaaagaaaattggtgggaaatataagcctgaacgaatattttgaaaatgtgatatttttcatgggagctcattttaattgttgtgcccaatttcaagttaaaactccctaaaaattcttaatttttattaaaatccaaacaaatgcaaataatcaatatccactttggtgagtctaccacttactacttcaatcaattctactacttaatacaatcaataataaattttttcatttcattttaattaataataattttattataaatttcattatgttagaaactgtaggaaagaaaattacagttatgcctacaccaactaaaaattatatcaatattaattaggggtggcaagatagatttcggcacatgaattttatgggttagggtttgtaaataaatgacccaatacctcgggcccaccgattcctgagttgacttccacatccaagccaactttattcaattgcatatcttctaaaacaagaacgaggaaagctaactttccatgttcaagaccttaattatttgtatattatgattaaaaagagggaggaagacgaaagaggaagaaatagcagaggcagaggcaaacattgtcttgatgtatcacgcaaaatagaagaggcagctgctaggcctcaacactgtacagtgaagagtggcagaccacattgttagaagacatgtcctttgtccaacttcacgtacgactcggtttctccttcatacaaaaaaaaaaaaaaaaaacaaaaacgaaaaaagaaa

SEQ ID NO: 388492 - DNA, 1513 bp, Cannabis indica
ttttttttttttaaatctaatgtttttactattaatagataataaatagaatccaatatttattttttgaaaaataatttgtgtcataaatacagttcaatttttagcggtcataatatttaagttataattataaaatttttgtaggtaataaaaaaatgacacgtggataatagtttaatttttaagggcctagctacagagttttagatttataacttgagtattattatcgacaaaaattaaatttaagtattaatttgcagctgaaaattaaatttaggtatttacagcgcaaattatccttttttaaatttaatttgtctataaactagtgcactttttaaagaaatattttggttgacttatttatattttttaatatcacgaatttttttttagtttaattcttttgtatgttggtgtatgaatacttaaattttcataaacttttgaataatttatgtgtagtaagtaaatgtttaaattttagcttgataaacattttagaatgtcttaaaaatatataagtgactttttttttaaaggaaaatatataagtgactttaaataactataatatatactatcataaaaaaaaattaaattaaaatctctcttaaatgctgaaatagataaggaggtctatgaaacaacccttttaggtggtgtataatctcgaagctaataaaaacatgtcatatataaatagttgtacatagtgacaatctaattggtatttaatgacgtgattttaaatttgtaaagaaaagtgaaactaattagaggagaacaaaaaaagaaaaaaaatcaagagatgaattgtataaaattaaaacatcaatttagttgttaattaccaaataaaaaaggaatgtttaacattattaatttatagtttttttttttaacttgatttattcacttactagcagcaatatataaagggtgttttataaatattattttttatttttactttttttaagtcgtgtttagatttggatttggagttgtggttcgggtttgggatcgagatttgggtttggagttgtgcaagcacctttaacaagcaagtagctagctttggggttgtggtccaggtttgggatcgagatttgggtttgggtttcgcgaccggggtccaaaactgtggttagggcttggttcgagtttgggtctagggtcaaagctggatccaagtcaaggtcgaggtctaaaatattgataaaagaaaatacaaatagattgtagctaaaaataatctgtttaaaattaaaatatttatggaagtaattttttttcttcaaaattttgattcttaattttaaaattaaaaagtacaaataattttacggaactttttttttttaaaacaaatattgttaccttaataatttgttacttttttttgggaataattacatgaaacactaatatttataaaaaaatctacatcttaccttcaaagtttttttttttaacacttttacagtattctataaaaacacaa

SEQ ID NO: 388493 - DNA, 1169 bp, Cannabis indica
aaaatataaaaatttatttatttagaaaacaaattagatgtgcgcatacatgaaaaagttgcacaaataatttttcattcctctagacaatttaattattttgtctttgaacaataattaactgtggccaccatgggagtatagatgactcatgcaaagggattcctctcaaattggattaatcattcatatataagttaacctcaaaattaaattatttattactttaaaaaaagactatattttttaaagttaacgtgggagagggatttgagaggagatatatttgaggagagagcttaaatgtttccataactgagaaaatgaaagcaaaaatcacatacccaaaaattcagatgaggaaaaaattactatatatataacagccaactttgatggtggcctgtgcaaatggtggattaattctgttgttggtgtaaccctagaatataacagccaaattttgcattgatcatcaatttaataagttcttattatttctatacttcaattatttaatgaaatttcttcatcacttcaagaacaactattctcaacttcgtccgtacctttgttgaaacaaatgcatcttaatcaacaaaaatcaaaatggaattgttgcaaaggatagcccccatagctgcttggaggttttgccaaacagtagtgtggtttcagagttggagtaatactaatttatattctagttgaagggttttagggtttaatttttttttcaaacttaaaacaatcgttaaaccaacaaattttgttagatagccacattttatatataaaaatataaatttttagtatgaactaaaatccaaatagtgagctttcaaagactagaacaagacttcatgaataaatatggtggtttcagtacgcaaacagtaccgttttgggatatatatcgtcttttttgtagcctgaggtgagtggtggtctcatgtttgccctggttgtagtcgatagagacatgcttttcgttgtcgaggaaggtggaggaggagaagttgttggcagagctgttgcagcggtgtgagattcgaggagaagtgtggagattgggtatagtgaggaatgatgggatgtggtggttgattgtaaagtccttttttggcaagttaggtgacaaaataattttttctttttatggtaagatt

SEQ ID NO: 388494 - DNA, 1980 bp, Cannabis indica
tagctttccataattattgttactaataatatatgttatttatgatttttgacagttacattcacgttacaaaatttagcattgatttagaatttttgttgtatataattattattattttttttgacgtattgttgtgtattatttttttttatggtgaatataaaaggtttgtacatagttataaaactaatgaaagaagcgttattattgtgatgtgatcataattaatgtattatgtagatgttaattaggatttacaactattaatacattaaatatgttatatatatatatattaggttttattaatttattagttgttaataaatgttaaataaaaaatagaaaaaataataatttagagaaagttaaaaattaaaagaggaggaagccacttcacctcttcaaaagcttcatttatgtatatatatatatatatagattgggacacgattgtcccatgatgtactttcatggaatgtattctgtgatgtacgacaaccattagatgggaaaattatttgatctgagggctggggttgatttaggggtcattacggttaaaatttggtaacataccctgagacctatctaatgtaccatggaatatattccgtaaaagtacatcacggaaaaaaatcgtgtccctatatagattatatcttttctatatagatattaattttaatattttgggatcttttgtgggggtcagagcctaaaccccaaccgcctcattctgtggttagccatgaatcctctaactctctccctcatcgttattataaatttagggataatatataattttttttataatactttaacaaagtttagatcaaacacacataatctttttatacatagttatataattatcattttagattttaggtgtgatctgatcacatcatattggctatacataaattgtctatttatagtgcatcgtgattgtgattattttttacaaagtttgttgttgtgaatgtgattcgaatagacttttatgcatgcctagctttgtggtcatcattctcatacctattgtggtcatggttctacttattacacatattgtatccagcatgctttaaaaaaaatgggcccaagacggttttagcaaattaagaaaaatttgtatatgtattttttttttatgtatgtaattttaaataaaattaaactaatatttagtaatataaatacattccaaaccaataaatcatcacataaacttataaatttcaatgtattacttaaatattatacgtcttgcatttttagatgcaaaagtattaattaaatttgcataatcaagttttgcaactaaatcatgttcaatggataacatagctaaaccgcttaatctttcttgagacatggttgaacggagataagatttgatcaaggtcaatttggaaaaactccgttctgcatgggcaacggtgaccggaatagttagaaaaatcctataagcaatccaagcatttggataactaccatccacttcttttatatagctcaacacatcgatagctcttttggtttcttttggtagactttgacgcaacatatataactcttggtataggtcatcattgtcaaggtctgaaatctcaccatgcttcattaagtttgtaagattgatacaaaaattcctcaaagtgtcatcatctgcagactttaatttctcaaaatcaaacaatagtccaaaattctcctcaaaattctgaaattgttcgaacctagttgaacaataattatttttattagctattatggtaggaagtgaaatataattttaaataaaacactataaaagtatgcatacctggttttaaatgatgaaatagcttgatcgattatgcaaagaaaatagtcaattttaaatgactctgctgctgattgtgtcaccccctcattgacactttcatcaaattgctttttcctgtaaacttttcgtttttcaataaa

SEQ ID NO: 388495 - DNA, 720 bp, Cannabis indica
tttttttcttttttcattttttacggtgtcaggagattggctgatgatggtggtctccacttgctgctagttggaggaggacgtgtcatttggcgcgtttgaagcttattttgttatttttttaaaaaacaaataatgcttgaaaattaaaaataatattaaacaaaccattataaatttaagacatataaatgatgttattgttagttgaaagtgacaagacaattatttaaaaaatatattaagacaatgaaactgacaagacaatcaacttaaaaaaaaagttaaaaaaaattaaagataaaaaagtaaaaagaaaattaaataaatttctagcaatctaaaataaaatactaattttttttaggaataaaaaactctttatgtttgaagtattttttttttctttattttattatttttttttataaatttcttgatgtgtcaaaaatattatttatatttttagattatttattcgttatttttaattttaattttacatttaggcgcactattttaatgtctgattaattttcttattaaagtagagttgtaattaatttttttatttatttttattcaattgttcaactaaaaaagaaaattgagtgtatatttagttttcagtggtacatatactattgagttagtgagcaagtgttttataattgattttaagttttttttattttgtaagattattggtgtcttgttttt

SEQ ID NO: 388496 - DNA, 644 bp, Cannabis indica
aatgggaagaatagtttctcatttcaaatctagacagtaaatataaataataacatagacagacaatcataaaaattgccaaaggactcttgacaggtgacactacttttttaactgttagtaagtaatgatttttcctaacaaaatttcaggttgttctttgagaaatgcggatttggagatgacatgttgggctcaaccacaatgatgtatacaaggacagtttcagctagttctgaaggcaacaatatgaccaaacgttttggtcgaaagctattgttagtgccaccactgaaaagtagtctgcgttttccaaaccagtgaacctgaatgaaatgaactttaatgtttatccttggatactgaagagatgcagtaaaagagaatttcacccagctgacaatggaattcatagggtttaatattcatgtcctttttttctttatccgggttttaacaaatagatactttacagtcttacagatatggttataatgtaaatatagcataaaaaaagttgctaactgttaacatgtttggccttctccatgtgttgtatcaaaatttctcccatagtatgaagaggaatttgaagaaacagagagaaatgacaattcttttttcattcattctattttagaaaa

SEQ ID NO: 388497 - DNA, 1198 bp, Cannabis indica
cattaaaaacttattatcatgtaattaactaaatcgttttcttctcttattattattatcttatttattaattaattagaagtaggtcagctatatatatagataagctttaattaattagctgcaggggtgttatttgacttcgactttatgaagttgttatatatatatttagttttaattaagaatataactcgcttatttttgtactggattaaaaataatttttggtataagttttaaacttcaatgctatttatatgaacattatattatatatagataataatatatataaaaaaaatgatgaagttattgtatttaaattttttaagttaatcaacttctaagtaaggcgttataacttatatgatatcataattaacaatttttttacaatgttaaaaataatattaattcactaatccaatctccaaagtaattctaactaatcttttataatcaattcacatgactaaattaccagaacgttagttcctgttaactatgctccccacgtggttttattttattttttaaacacttatatattatacttttgtacagtaccatgaagaatataagtaaatataatattacgtccagtaaaatttattatttattaattattaatttatatataacctcatactttattttacaaaaaaaaaatgcaaatgtaaatgtgaatgtgaatagaccacgaatttaattggctgatatagtaattaattctttgacagcacagttcagtcctctttctttttttattttttatttttttggctgggatcgactttattagaagaacagaggacaggagtactatatataaggtagaaaatggtacctaaaatgctgaaagagtaagaaaagcatgacttttttgacttttgccattttgtttgactatttagctttacgagaattttcttttactctgatcttacatgacacgtgtctcatcttaactggagcgcaacctcaaacgttggatgcgttgtcactacattaatgtttcactgcattattcttgtttaaaatttatttaccttttattttatctttttgttttggcagaggcaccacttgttgtaaatatatatttaatcaaaggcggaaccacgtagaggcgaggtggggtagtcgcccaccctaaaaaaaataatcgagaaaaaaatatatatctattttagtt

SEQ ID NO: 388498 - DNA, 1248 bp, Cannabis indica
ttttattctccaataatcgagccttcaaaatgtttctttgttggtcgatctatggcgggtgcgattttattctctaataatcgagccctcaaaacgtttctttattggtcgattttccctttttcaaacttttgaccctgagttaggtgtttcaacaatggtggtggtatgatatttttttcttgttcatctatgttaatatgaataattatatgtaatattggaaataataagttggattcaattctgtataataatccaaaaaaaaatttaaaactattcaaacattacattggaaatatatagtcaatacattaaaaagagagcttgttctaattgggtggaatcaccattccttttgacaaaaaaaaaaaaaaagaatctcgaattaaatgtaaaataaaatgaaaaattccattatgccacctcaataatttggcttttcaacgttgttaaatacttgctatggcaagttgatgaccgtgccacatcagcaataaaataatatattttagtttctatcagtggtgacgtttccaataagaaacgatccatatatatatatatatatatatatgtattacattcaatcgtggtttataacattataatactcatataatatcaggtctccctcaacctaacatgccaataaaaaaagttatttggtagtagttaactcaaatttttagatactaattaatagttttttttttcctctagaaaataattaatagttaaattatatatttaaatactaattagtagttttttcttatatcaattagtacaaaatttcatatgatactattaattatataataacaaaatatcttctactaaagaaaacaaattgtttatcatcacaagttatgaacacctaattattctctttaaaagaaaatattccacttttaaacaaaatcataacaaaaaagattgggttattttttttttggaaaaaacaaaagattcagattacttttcaaaagagcaaaaagtaaaaagatttagattaatttttcaaaaaagaaaaaaaatagattacataccatcttttcttatacaaactattcaaaaacaatccgtaaaataaaatatgcattaaagtttaaagataggttatttaagtaattaagtaacaaaatgtgggtagattaatttctggctaatacataagtaatcatttgttttaggggagttatatttgcaacacataaaattataaatacaccccattattaaaaa

SEQ ID NO: 388499 - DNA, 1300 bp, Cannabis indica
tcttcgaagaatcatttcggttgttacctttacaccttcttttatttcgtgtatggctcacatttgattttagagcttacatttttgcctgtctgagagccacactacacttggtctgtgctgctctatacccaaaaaaatgggtatgtgtaggtacgagaccagaagcagtgggttcataaacagttggcaaaaattgagttctgggaagagtcaaagttggagccagaacttgaggtgtaaaattaggtgcaactgcggaagaaaccagaactggagggacttcgaaggcttgttgataagcgtcctcaaggttaataatgccttgggactttgacataaacccaattaatgtttcagctctctttctttgcattttccccatagcaaagaatcaacaactagcctaggttgaagggccatcaacttcatgccatcactaacttttgttttggctgcaacttacatcatcctctggataaatgccttcaagcttttattttgttgctattgatgttgatgagagagccaacttccatgtctagatcgcgtgcgacaataaactgtttgcggaaggcttactataaatctttctagctatcaattgatccaagagctagacgcttccaccagtctttcgcaaacttggtcaatgttagggagaaacacaagcacttggcatcatcgctcggacgtgccacatgcatcatcttattgtattttgccaagtgtgtttgcagatctatccttccttcatacaattcgatgtgtggcattttaaagttttctaggagcgaggtctctgcgatcctcctcacgcaaggttttgggtcctcatcctcagtatctgagagggccctacactatttttgactagcttaattagagctgctatttactcctctaacctttttatgtcacttttaggaagatcacgtccttgcattttgtcacttatgtgatttttgaggtcgcctctatgtggcctcgctttttcacttttgtacctttcatacttggcatccaatcatcaacgaagatctatagtggactagttgtcttcagagtgcgcttgagtcgtccttctgtcatggttaatagaatcattgggtgtggttttcctgccccttgggcttaggtactttcgtactttgcccgtttggcatagttttgcctctaggagcaatagggtgtccacactcgaaagcatcggtgtccttctgcgtcttagagggctagccagccaaatttttgtccttccaaggaggtttaggagtagacttttgtgtgggttcaccta

SEQ ID NO: 388500 - DNA, 559 bp, Cannabis indica
ctctctctctctctctcgaattcgacccaaacccaccaccaagaaccgtcgccgccaccaccaccaccgcctacttttttcgtctgactccgtcacatcgaccacaaaaccacgaaccaccgccaccaccaccaacagtcgccaccaccatcaagctgctcaataaggatccctcaataagtttttttttatgaaaaaattaaatttttcatatacttggatgctaatttttgcatgtttttgagattagttgatttttttgtggattttgtgctctttctggatttaaattgtagttttagatatgtttgagttgtgtgtgtgtttacagtgttatcgatgcgatatcgaccaaaaaccaatgggatctgagtgtttgagttaacggtttatttttaatttgtttggtgtttattgataggatgtcgatatgatatcgacgaaattaaaatggatagtttcttcgaggctgactgtggttttatcaatataatgtcgatatcatatcgatagtatgttgatattatatcaaagaaaagaaaattaaactgagttttat

SEQ ID NO: 388501 - DNA, 1003 bp, Cannabis indica
gaaaattatttttgcaatggaaagatagttaaaaataaaattaataataataataatgactttaaaaaatataataataataataacaataataataataaactcttcattttaatagggaaaatacattattcgtttgaaaagttaatggaagattataaaaatcagtattcattttaatagaaaaaatgcattattcttttgaaaagttaatggaagataataaaaatcatatgatatattccattccatgtcatatcaatcatatacttagttattaaaaaaaaatcatatactaatagtttatcataaaaaaaaaaaaaaaacatacactaatactatcccttaaaagaaaaagaatagatcatatagtatatagaacaaaaagttgacgtggtgggagacaaaatcgagtagagaattaaaattgatttttttttttttttgtttaagtagaattaaaattgatttggtacataaaatttttatctacgagatattttttatttggatcatgattggtcacacacgtgtctctattttttttttcttgaaaaggaatactagcacactgtacttgctgaagagtttctaagctccgactgcttaattatttctttttgaaattgactcttttgacttttaaaataaaataaaagaaaatgctaaaacatctttaaaatatgagcattatcataggtataggtatttatcaaactgcctacactatataaattgttcgctcagtactacatcgtataaaaaatatggcttgaaatcttttgcaatgcggttgtaatttgtatttttaccaaactatatagtacggttagatttgcggttttaaatttaataattacggttcaaactatagtgcactatagattataaaattctcaattttttcaatgtaacttttattcttttttctatataaaacaagtatatataatttatgtatatattacattattttttagagacaacccaatataattatttg

SEQ ID NO: 388502 - DNA, 1383 bp, Cannabis indica
aaaaataccattttttttttaaaattacatctctgctcgtgatagtttttaacccccttgatccctcaaccgaattctatatcctctaactcctttagggtagcctaggaaaacccctttgattgcccttggttctaattttttaatgctttggtgtgcatatactgcacaaccaaaaactctgagatttgttaggtctggtggttttccagaccaaacttcgtcaggtgttttcaagtttatggcactagagggacacctattgatcaaatatgcatctgtaataactgcctcaccctgaaatcccttagataagcccacactcaacaacatacacctagctttatttaacaatgtcatattcatcctctcatccaccccattctgttggggtgtgtgtctaactaatttgtatctcataatatcctgttctttacagtaatgactgaacaaatcattacagaattctaagccattatcagttcttaacaccttaagtctcttaccagtttggtttttcattagggttttccaaggcaaaaatttttggaaagcatcatttttattcttaagcaaataaacccaaacttttcttgaaaaatcatcaataatgtataggaaataggagcaaccaccatgtgtacttactttctctggtccccataaatcagaatgtatgtattcaatgatatttttttgtatttatgggtaccagtgttaaatttaatctgtggtactttcctaaaatacaatgttcacagaaatttactttaaatacctgatctttatcaagtaggttctggctattgattatttacaaccctttttcactgatgtggccttgttatttgttccataaagtggctttatcatcttcaggtgctagaattgtgttgttgcagctcactgtaggctccccacatagggaataaagtccatcttcctttacttcttttataatcaccgtaaatcctttgcatagttttatttgtccatctttgtttttttttttcaatctgcaagtcatcaagcacacttagtgaaattatctagctaggttaggtacataccttacacctcttagtgatctggtcacaccatcaaacatcttgaagctcacaattcttatgccttctattccaaatgtttgattattttcctatatgacttttccttctctaacatccctgtaactagacagtaaatctttgttattagtcatatggaatgtgcagccagagtctaggatccattcattccttaggttagttgcagccacatagacttccccactatcataaccatcactaaggctttacgtcggtcaatttgatcagtttatactacatattttctaacccaatgtaaagatcgggttgcaaa

SEQ ID NO: 388503 - DNA, 660 bp, Cannabis indica
ttttttataagtttcatactgcagtatactcttgttaagttttcacgtggtgttctactgtttattttgtagttgttccactgtttgtttttagttgttctgttttgtgttctactggtgttttaataaaaacacagtatttttgaaaatattttgtgtgaccgttatttttgtaaaacttatcccaaattccagtattttgtaagtttcccaactaaaataatactttatttcacctcatttcccctattttaccccctcataacaataaaagctaaaaaaaaacaacaactctctccctctatctcaatctctcctttcacgaggatgacggtcggcgacgccagagagatcactaaggccacgaatcacgcacatattagaaaaactaaataactcaatatataaaaatttatatatatagaacacaataataatagataataattagaaatctgtatctaatagattcatataaattatcgcaattcgatagtgtaattctattaactaagtcttcctctctaggtctaggtctcaaaatcataaacaattttatttatttgattatcaaaagtatacaattgtgatgagatattagagacttagctacgtaattacataaggcaccattttttgtaaaaaaaaaattacattttt

SEQ ID NO: 388504 - DNA, 1167 bp, Cannabis indica
aataattctccgccaggcagtagtgttccaaaccctttaaaaaactttcatacggtctatccaattttgataaaaatcttagccgccacataagaatgtctatttttagaattaaataacatagagaaataagagttgataaccgagagctgacttgtaaccattgaggggctagcttcagcataagcctgaggtaaaataaacacccttgctggagtgagttttgcaattgtcttctgttcctctttcttaagttgcgggtaatctctcttataatgcccaggaaaatgacactggaaacatccccgccctctacacgcacctaaatggtgcttcttacaattgggacattctgggtaagtatatcgggtctcagaaccaccctaatagttgccttgaccctggttccctcgaaacaacttgttcaggtttgagccactaggtgcagatggtgtctttctcttctggtcagtggttgagtcactaccaccctaccataaccagaggtaggagaaatagtggctccaccaacaacctgagtccctcggggctcatgaacatactcaaaagcgtacgtagctggagaagtattcatctcgtctaagtttgttagaataattgaatgcccttgcatcacataattcccatcggatagttccattcagttactagccactctctgttctactgagaatatcggaataaaagaaattggacttcgagataaaggtacgatacaggacctttgttgtctcaatctcttaacttcctcctattctcgttgaatcctagcttccatttcaacgaactttttactccaaatctgatggaatctacagtggattttcatgaccacctccaaaagtctcttaacaaccttgagtaatagggggatcccaatctttccatttgccaccagtatcactcacattagcccaactacatgattcttgccaggcgtccattctataggacaaccctgtacattcatgagtcagctaggtcaggtagcaatgaaagtcaaaatctaactactgcttacatgggattttaatatactcctattcagctatcaggctactaacatgcttcctattaggcttgtcttataatagacaaataagatgaactactaaagcaacaaaggcttactgaactgtgagtcga

SEQ ID NO: 388505 - DNA, 2018 bp, Cannabis indica
gggttatggaggatcaagatgaaggcatttcttgtccacaatggaatttcagaagcaattgatgaagagagtcttaaggagattgaaaatgagaagaacaagaagaaggagatcgaaactaaagcacatagtgccatttttctcaatttaggtgatgaagtcctaagagaggtgtctagtgaagacaaggctttatgattatggaacaaactcagtaccatatacatgaagaagtccctggccaataagctatacttgaagaagagaatatacactcttagaatggatgaagggaaaaatttgaggaatcacttagatgaattcaacaaaatcactcttgatctcagcaacattggagtgaaattagaagaagaagaagaagaagatctagccaatattctgctgagttctttgccaaaatcctatgagcactttgcttatgcaatgctctatggcaaagaaactcttacaatgttcgaagtcaagacagctctaaatttgaaggaaattaagaagaaaacagaggacaatcaaggtgacaatggagaaagcttatttgttagaggaaaatcacaaaagaaagatttcaataaccatgtgtatacttaaatggtacactctttcttcttctctatgttgatgacatattgttgatagggaaaagtaagagtgagattggagaaatgatgtcactattgaagtcttaattcaagatgaaagacctaggtgaagctaagaaattacaaggcattgaaattagaagaaacaaacctgaatctctgactttgacaataggaaactaccttagaaaggtactacagaagttcaaaatggacaactcaaaacctgtgtcaactcccttagatgcccatttcaaactgtccaaagaccaagctcccaagatagaacaagaaagagaagtcatgaactcagtactctatgctaatggggttggaagtttggtgtatgctatggtctgtacaaggttagacatagcatatgcaatgagcattattagcaggtttattgcaaaccctggagagaagcactgggatgcttttaagtaggttatgagatacatcaaaggcacttttgatctaggtcttacctacagcaaatgctacaaaacacgggttaatgtctcaaattatgtagactcagactatgcaggctacataggcacaagaagatctatcataggatatgtgttcacaatgcaaggaagatgtgtgagttggaaggtaaatctacaaaaggcgatagctctattcttaacagaagttgagtacatggcaactactaaggcaattgatgcatgtcgtatgccatatcaaatttaatatatatattttttttaattctaatatctccaattattttagtataattgtaagtaagggtcgatcccacgaggactatgtttattcagttattcacaaattagtaactagaattagagaagggattttgatgattagaataaaatagcaatgataaaaataaaaagaaaacaagtttaaagagagactatgatatgagaaactagttaaaggttattcgccaccgtcaacaattattcctaattcctattaataaatgtaatttcagtttccaatcaaactattaatcttgtagataaagctgaagtagtcaattatcctgatctccctattgtacgtaatcaaagcgaagcgcttaataattaactattttacctaagcagtaaatccatgaaacatgcaatttatttaacttagataaagctttaaaatttatggagatagactaatctaggcaacttacaaacattcattctaagggaatattttttcaattttttttcttaactcatacataaccaaatactatttttccacaaaatccacacaccgttaccaataccaaaaatcattcatagactatggtgtgaaaatggatgaataaggaaaagaaaacttttaggctcaaaggttattgtatagggtcaaaaagaaaaaacaaagtttcaacatttaggc

SEQ ID NO: 388506 - DNA, 1068 bp, Cannabis indica
cctttcttcactactcctccttgtttcgggtctgccatgatgatcacactaagattttcttgaaattttggttctgctttaataaattacaagtgataatatgttctttgttactaattagaatgtgctatttattgatacccccattatttaaaagagacaactaaagtggagaaaccaacggaatttaacattgaaataatcaccatttttttttcattgtaattgtgttttagtccggtcttacttagtacttacctttatttcattgtctgaatgtatttgtccgttaattttttttaatttgttcagggtatgataaataaatcataaaactatttaattttttctataataaaactttatttcaaaattgtttcacattatagtcttgatgataagtaatttttgtcaaaaatatccaatacaaaattcttgttttaatttatttatgaaaagtttaaatttttttaaaaataatatatcaaaatatgtcatcggatactttcgcaaactacttttttttagtttccactaaattagatagaggctgtagaaattaatatggaatttttttttaattttaggctttgaatttttttatttacataaatacctcttttgatcatttttttaattattttatagtttatttatagttatcatgaattatttttggttgttttttaattgttttcttactttttactaagaaaagtgtacttttgaaattttaaaaccttacaattgtatttttgtaaataaaaaatttaagatataaaattataaataatatatataaaaaaaaatagttttaaaaatttctttttataaaaaactgacttcattaaaatcacaagagtaatttcagagagaaaaacttcaagaagaaaaaaagtatcaaaatatatcattagtcaattttattgttagtctattttgtggcacaaatataatcagagtaggtaggtcaccatacataatgatcatgatagctaattttgccaatgagtaagcattatataaatgaattattacataaaaaaatataaattaacactttattta

SEQ ID NO: 388507 - DNA, 567 bp, Cannabis indica
tttaaattatttttatataagtactgtctattattttttagctatgtaaattgtaaagatttcaattttttttttatctcttatgtacataaatagttattatttttgttaagtctccaaaaaaaattttgatgctcgttaaaatatggcaatatatacaaaaagaaattaattgtctaaatttttatatatctctaatccatttgaataaattttgaattttttatttttaacaaaaatagtgtgtaaataaagcataaatttcacaactctatctcgttaataattcttctatttgcctcgtggtatctttcaccatggcagccattttccaagagagtgggtgtgaaactaaattgtgagtggtttcaaaaaaaaaaaaaatagcttcaattatggtgtaggtttttcgtgatacatattcatttgcttgtttttttaatatacaaagcttacttaacttgtctaatttataatattagtaaaaagataaagttgtgaaacttttgcttcattcaacacaatatttttgttaaaataaaattttagaaattataacacttcaca

SEQ ID NO: 388508 - DNA, 1022 bp, Cannabis indica
tttttaatttattttatttttttcaaataacttcaatacttcgagacccccgatatgaacaagactcgaccacgacccatgattcgtccaaaccggccgcactcgcaccctagttgtagccccgaaccctgtccatgtctctggacccaaacacagtgccggatcatggatccagtcccgacctggaccccaaatcccaacccccggccctagtccagatcgataatgaggaaagagaaaatagggggaggagaaaataaagagagagaaagtgatgagagagaaaataatgtgagaaagtgaagagagagaaaataatacgagaaagtgaagagagagaaaataatgtaagaaagtgatgagagagaaagtgtgagaaaataatgtgaaaaaatgatgagtgagaaagtaacgagagagaaaaaaaaaggagataaagtgatgagagagaaaataatatgaaaaaatgatgagtataaatgtataatgatgtgagataaagtgtagaaaaaatattgaccaaaagtgaattatttttcaaaatagaaaataatattttgttattctcaaaattcttaatttttgtatctttattctttgaaaaatgtttcaaaaaataaggtcaaatacgcctaattgttttcaaaaaataatttcttatttttaaaaaacaaaaaataaatttttaattataatgtcaaacatgcactaaatgtcttttatgaaactttcactttgtgctactattaattaataactttacattaattattaaatgttgaatatttcatttttattaatttttttttattatataaatactttgaaagattataataagtaattataacattaattaagatgtacatattataatttaataattattataaaatattattaactgttacttcttaaattttataagagctaaacaccaaaactagattttttctgcactgagggcttctccaacgagccatcaaaacaagtgacggacctaggatttttactttgtgggg

SEQ ID NO: 388509 - DNA, 1172 bp, Cannabis indica
ctctaggctagtatgtcatcatgaacgacgatatccgatccctccagggcatgcctagtggagcactgtgagggatgaagaagcgtccgaagctggcagccgaacagctgagacagcttagcattggaataatttgttgagaaaaaccaagaatacaaggaagaggaggaagaggacaacagtgaaattagagatgattattattatgagcaagaccccaaggtggtccgagtatttggcgagctagctgaatctcaacgaatgctagcagagcaaaaagctttctctcatcaaatggagaaaatgatggcacgactgcaagctaaactcgcgatatagatgaggactctgaggaagattctccagaatagcctattgacatggaaaaatgagaaaactctactgatgttggaacctcggctcctgtgaaggacaaggggaaggcaaaggtaggcgagccttaacctaaaactgtcccattacctcctaaaaatattgtgaacataaccaaccagcccttgcggacaaagaaggccaccaattcctccaggcttggacgttgttttgctctgcaaggcaaagttatgtgtaacgataagcttggtactcaggtgcaaagttgtgtctctatgtcttctattaggactatgaatgtagtgaactttgaggcattttcccgaggatgttgttcggagttgccattgaacttgcttttcttcccatcaccttatttattgccgctgtgtgacctttttcctccttgattagatatgttgggattttttgaattctggtctagctggatagatgtatcggctgtagtggtgtgttgttttgtccaacggtatctacacgccgcactgctttttcgagcttgataaatccatatgctcaatccaagaattttgccattgatcccacaattagtcttattatatccttccacaactctcctacaggttcgataccttccagtattgcggccaaccttccttcttcggttagcccctttacctttgtttcttcaatcatgaacctgctgatgtaagcttttaaaggttctcctagtatttgcttcacttgtactaggtcttctaaatgggagggaagctgaagagaagagaaaaattgtgcatggaatttagataaaaaagagatccatgaactgaact

SEQ ID NO: 388510 - DNA, 1412 bp, Cannabis indica
aatgaatttagactacactttgatctgttgtacaactagtcttttagtattagaactcactaatttatttcaaaatattgtgatcacatgataatgacttaaaattaaacctgtaatatatttttgttgtcttgttctacaggaaccaatcatgcttgaagttcttgatcaataatgcttttgtgtaatggtcagaaaccaatgcatagctcgttgaaaattgtatgtgcaactaagctatgtgcttttgcattgcaacatgttatcacattgaaaatttgaaataactttttttttctttcacattctcattaaaataatttttctctctaaggaaaaatcgaatatggcttgttattttatttcatttattataaggatataaacaaatatgattggggttactttttataataagaataaaagattcatggtttagtaattccattacttaatattcttcgaaatacaatgatttagtaaaagatttatcaagtagttttgagttagaaaggcataacatggaattcctctactgtattctcaggcatcaatagttttgaaagattctggggtttggtatattatattatattgtattgtgttggatgagactgtattgtattgtgtaatattttttgtgtaatttgcagttaaattatttatacttttcaaagcgtctaatacttttcactggagaaactgtaggaaaacatgttctcctgcctaaaatgtgatgtctctgcgcctcggatcagcataacttttatgcctgctttgtaaagcaagcatccaagtcttgaccttatctatagcttcattggtcctttaaactaatttcggacccaagtacttcctgtctccaattttgtcccaataaactaggaaacgacacttcctaccatacaacatctcattaggagccaatccgaatgaatcctggtagctgttattgtaggagaattcagtcaaagggaagtacttacactatgaaccctcaaagtccatgacacaggctcataacaagccttctaatatctgaatggttctctctgattgcccatcagtcgagggtgaaaagttgtactaaacttcagctttgtgcccatagctctctaaatttgccccaaattttgacgtaaacttagtgttcctatctaaaacaatggatttaggagctccatggaggcaaactatctccttcacgtacagctctgcatactgattcactgtacaagcagtctttaccaggagaaaatgtgctgactttgtaaaatggtctactatgacccatattgagtcatatattcctgtggttttaagcaacccaactaagaagtctattccaatacgctcccacttccaccctggaagggctaatggttgcaataaccctgctggcctctggtgtt

SEQ ID NO: 388511 - DNA, 1559 bp, Cannabis indica
tcatctctattttgtttttttttttatctcaaaatcaactgatgatgaatagatgagtaactcatgttcttataaatgactcaatattttaatatttaattaatgaggaataatacttatatttaattcatgattaacagagtgacttgctgatatttatagtatttatatataaaatggtatttttctgaattgggatagtgttacttttataaaaatttggggtcaacactgaaatataatatttagtatttgttttgagggtttatgtcttaactctcatctctgtttttacttggttacaaaaattgtcaaactttttgtgtgaaattccaagattaaataggacatgaattataaggtttttctcaaaatcaattaaaaatgagtgtaaagtaatctacgttgttaaaaatggctcaaaaaatttacattcaatccatgtgaaatatctttgcttctatatttttaaaatatgagtgtgtgactcaatacaaaatatgacatgtttatagtatttatatataaaatggtattttgtaaagatttgggatcacaaaattttgatttattgatggtgattatgtatttggattgataaattgcagtacactcaaaatgaagacaatgtaatgaacattgtgttatcagctgtatacacaactggatgggttggaataggattttcaaaagatggaatgatggttggttcaagtgccattgttggttgggttacaaaaaaaggccaagcaagagttaaacaattttacttacaaggttcaagaaaatcacaagtcatagcagacaaaggtgaattaccactaactggtataccctcttctgttgttcttcatggaccaagaatttacttagcttttcagttgaaattcgaaaaacaacctctccatcaccaaccccttattcttgctttcggattttcatatccgaatcacttgcatttgtctcatcacgatgacaaaacaaccataatgtttgacttcaatgcaggtaactagtaataaaaactatgttgtcattttctcaaagtctgaggttcgagttcctttttggtttctaacttttttgcttaatgttttttgtcataggctcagcaagtgatgcacctagtgatcttggcaaaatgaagaagaatcatgggatattggccatactaggatggggtttaattcttcctttcggggcgattatcccaagatacttcaagcacaaggatcctgtttggtactatttgcattcagtgattcaattagttggatttgtgtttggtcttgctgctgttgtacttggacaacaactttataacaagattggagctcattttccaacacacagaggcattggcatctttattcttgttcttagcatccttcaggttagtctccttcttgtattgacaaaaaaaatggtacttttcaaaaaatatgtttttttttttcattaaataaggccctaagtacaagtttaagtgggtaagttgaaaaatgcctcttttattaattaattaatcaaatttagctttaattttatatttatttgaa

SEQ ID NO: 388512 - DNA, 2305 bp, Cannabis indica
aaggactagtcggagtggtatgaagtacccatactttgtcaagcgatcgactactaccaaaatagaatcaaaaccgtgtgacataggcagcccttcgatgaaatccatggaaacatcctccccaacttgttcaggaatgggaagaggttgtacgtattttgctgacaaattgcacactcggccacaaacttttagacatctcttctcattcctgaccaatacaagtcccctgccaagcgctgaaatgttttgaacacccccgaatgaccaccaatcttgctgtcaatgatactcatctaataataagggaacatatggagaagtagatggtaatagaagttggccacagaaacgcaacacccctagcactagagtgtacccgcccccatctaatcctttttccaagtctcagaacactagagaaagcataggatcaaccttcacttggtcttgcaaatgcacaattgaaaccacattgggagcagaaatggcaacaagtaatggttcattatggaccctagatagcgcgtctgctgccttgttttcgagccccgaccgttattgaatctcaaagtcatatcccataatcttagtaagccaccgttggtgctcctcccacaccaatcgttgttccagtaggtatttaaggctgcgctgatctgttcgtaccacaatcttgcggccaaggaggtacaggcgccacttttgaatagcaagtacaatttctatcaactcacattcatacattgacttggcttgagatcgaggagacaaagcttggctgaaataagctatgggctttgcattaaaacaacccccaacccgaccccagacgtgcctgtctccacaatgaacgggctggaaaaatcaaacaaggccaaaaccaacactgaacacgtcttcttttagaaagcattttggacctccatagtccacccggaggcatccttcttgaggtctgttggtggtctagctgttgtaccataatccttgacaaacttacggtaatatcctgttaatccctaaaaatctcgtaaatccttgagtgtctttggaacaggccaatgtgtcatagctgcactttagtcgagtctgctgaaactgccctaagctgagatgatgtaccctaaatactcaacactcttgtccaaaccggcattttttttttggttggcatacaactggtgttgttgcggccgtctcaaaacatcttccaagtgatcgacatgggcttctaaaagaggagttgtataccaggatgtcatcaaaaaaataccagcaaattatagcgaagtaagtccttgaaaaattgcattcacgagagcatgaaacgttgatggatcatttgtgagacaaaacggttgatagaataattctagattagaaatattatatcagctatttcccaaaataaatattagtaatgaatttctcaaatgatttttattctgaaaaacaatcacgaaattacaatatcgagcttttgcgaggctcttctctccaaattcccaatcttttgggaggattggtctctccacaaagagtctactcttatctaattctaagctaccacacaaatgaatccttcccccttaattataggcactggataacataaaatagtgtaactaggaagtactaaaaataagacaaaacaaccctttaaaataaaagccaactagataaaaataaaagccctctatcctagcttatgtgtccttctattatatccaaaatgtataggaggcttatcaatacctctcgaaaaaccttcaccttctcctcaaggtgaaaagaaagaaatggttttgtgaacaatgccttgtttctccgcttgaagagtctttgccatagtttttaaagacaccagagatcggtcaagagaagaatcgcctctaattgttaccctccgcttacccagctgaaattccatgatttgttccttccaatccgtctaagtcattcctagtgtaatcaaccattgtaaaccaaggataatgtcggcactccctaagtaatggcaagggcaagaaatcatcccaaatatccactccttgaaagtggatattcaaattctcacaaatgccttcacatttcatagaatcaccatttcccattgtaacctcataagccttggtcttaactatcgggatgtgaaacttagtgactaaggacttggaaacgaaaatatgagtggccccggagtcaataagaattaccacttcctatgtgctgagttgacccttgagtttcatggcggaattgtgataggaatttcctatcatttcggtacaaacagtagcaa

SEQ ID NO: 388513 - DNA, 1080 bp, Cannabis indica
gggtttgggtggctcgccagagatcacgagggccgagttcttgtttgcttcagctgtggctcatcaggttgctgccgaacctgttatggctgaagccataggactcaagaggtcctgagttggcttaaaactaccgattacactcaagtggtggtggagtcggattgtcaagtgctcatcaatgctattcaaaacaagtaactatgtattctccttttggtttattagttgttgattgtgtttctttgctgaatgttttaaggagtgtcactcttaattttgtgaaacgatctgcgaacaaggcaaccaactgtttggctaggaatgccggttcttatgcaggtcgtagttatagtggggggcttgtccctatgtatttgcaagctattattgtagctgatttgcagtaataaaacaaccttttttcaaaaaaaaaaagaagccagatccctgaggctccaattcccgtatcaaaatttattacacgaagaaaggcataagaatgaagtaatcaccttgtgtttgtgactaaatcatcccaagaaagaaagtctcacaaaataaatcataagttatcattacaaaaaaagttgtgaaaatgactaaagttaccatcttcaacgagtcttggtccttttctggataattgaggttgagcctagccacctccacagctgagcagatcttcttccaacattggacggaaatgagagttggtatgagaagttgacaccaacatagtatgcatagtagtaaaatggacttgtggcaaagttggcaccatccaaaaatgcagttataaagtatacaaatgttccatagagttgacccaatgaaatggcaaattgaagaatgtaatttatggctttcttgtagctattgcatatctgcacaatgcaaaatcaccaaaaccagtttcagggtaagagacacatgaatctaaatgcatacatatactgttttaaatgagagtcttgagtaagtttcttatattacagaaaaaaaattggaatcccatgtaattttagagcaacctacatggtgttacaccttaatattagtctcattagtataattaat

SEQ ID NO: 388514 - DNA, 990 bp, Cannabis indica
gagttcaacccaatattcaaatgaagcttggacaatggaatacaacttacagaagcttgctttgaagaacagttgaagtcgcagaagagaagaataagaagaagtatagtagttttttttttaaaagccaaagaagaagaggttgtatggagagatttaaaacgattagaatttggtactataagatgctatttaaaaattattatattaaattagacgggatttataactaatagcaatattaatacataatgagagtccaaggcaccacttctaccctttatatttctctagacaaaataataattgaaaaaaaattaaatataaattttaatattgtttagtaatatttttgttttctaatattttaattataaaattaaagtaaaatttttatttttgatatcatttttattttattttaaaaacaaaaaataaaagtgtgttctgtaaaattatttttatttatattttttgattttttttaagtcgggtctctaggttcgggactggattcgaattcgggtcaaaggtcgagtttagcgccaggaccgtggagagatttggatccaagcctggtcgatcagagtctaaattattaattaagaaaaaaaatatttaaaaaaatattgaaagtgcactttttttatttttaaaattttaattctcaattaaaaaattaaaaagtgaaaataattttataaaatatgtttttaaaaaatatttttatttttttaattttaaaaacaaaaattaattaaaaaaatattaacaaagccacttttattttttttatcaaaattattgtatatttatatagacgtacaaattaataccaaacataataattcataaaaatataacataaaataattgaataaacaggttcagtattttaggaaaaaaaattaaaaactaatttctttttgtttaataaattttgaagtttcattaatttaatttatcattaatatttcacaaaagaataat

SEQ ID NO: 388515 - DNA, 679 bp, Cannabis indica
ttttattttactttattcgttactgcttggccatttaacacttgcacagttaaccaagtcttaagaaacgcgattactaggagtaatgtcaccgcttttaaaatttatctttaccatgagagtacttacatagatgtgaaaattttttttgaatgttcgtgtaacatgttgctctcgtataacataacataacctatgtgccccaagtgatcttagaagtgccttcattggtcacttgccatagcaaatcctcatgggcattcttaatcatgactcttgagtgttgttacatgtgtgagcactctccacttatctgatcatttgcgggtggcattgtttaactcacttaagaaacaatcggagctatctcatgaccaactcacgagctttactcagcgtttagagagtgtcgttaggtctatgagctgtaattgattagtttaaatgaaatgccaaaaaaaaaactttactcaattctttttctcatcaaattaagtataactacattattgtgagctaagtttaaagaaacaaagtacactttgatgtagtggttgcagaatttcttcttcatccaagcttagttgaagtgatcctcactatactaatgccttgtttgaaaatttagtataggagccataccttagcgattgacctcttaacctagggacaactttgt

SEQ ID NO: 388516 - DNA, 2302 bp, Cannabis indica
ttatataatgtatcatacacttcaactaacaaaattgtagacattatattgtttacaatacacttaattttacttaaataaaacttaataaagtatttcaatttttatttagggctcttgaaaagtgtagaccctaagcataggcgtctaggcacgggcctagctagcccacctttgcttaggatcggtcctatattttaggtagaggcataattttactttatataatagcatgtattttctatttagatagttaaattttataaaaaattctaaatttattatggtattgaaaataagattcaaataattacacacgtaacattattagggtttctttttattttctctagggtttctctctagaagttcttagtcgccttttttttttcttttgcatgaccagggctcgtccgtccatttctcggccttacggcgtggctttggtcggatcttgttaatattcacactatttgctgggttgttgccaatagcagatcaaacatagactagaaattaattttaatattaattttttttatttataatttagtccattttttaattcgtattacatttatatttttattttataaatatttttatatttatactttcttttttttttacttctatatttgaaatggcttaagttcacaaaatgttaatatgagcgtaaggccaaccccaagtgtcaacttgacgttgggccctattttttgtactataaggaagtgttgtttttcctccaaaaggacacattttcctgtttttgatgaagacgaagaagatgtaaaagtcagatctccgattggctactaggagggcgtgcgctcagattggcagattgtcaacctgggcactgggtgctcaggccccgagtgctcaaaaatcaacttgctctgattcatattctgatgcctcatatatgtcagtggtatgtctagttgatgtctcaatgcaagttttgaccattttgcactacaacggtctcggaaactgaaaccctaattgaggatgtcaatttgggcttgtctttcgggttgcaggttcgtgtgatttcagctgccggaccttggattaggttgtcccggcccatgtcttcatagtacaaaatactaaaagatagtgggttggattcaagttattaaagtctaaacttctatcccgaagtcaacctgggcgtaaggctagagtcccctcctaggtcgactgctatgactcgagtttactaaactccatgacatcatcctttatgccacgtataaaatatttatgttcacgtcacaaaaaaattagagattgaaatgcaatttatcaaaatgtcgataacagaaaacatcttacttaaatattttcatatatattaacaaattgacactattataataatctcattagaagaggaaagttcaaaagcgcccataagagtgtttttattacaggtttgttttgttctcttaaatgcaagtgagaaagaactaactagaatcacttgaactacagtattttaattacaaaaggcaacattcctaaagttttcgcttatttcaaaatttgacgtatgacattattataataaacagagttaatatatatatatatttttttttgaatattgtgttttgtcatttgtaaaaattattaattgaattatttcgttaactaataaaataaattttatattgtctaaaataatataaatagaactctaaataaattttgaaaaatataaaattcaatttatcatttaataaaataaaagatgtaatcaacaacttttacaaaatataaaatctaaaataatatttactcataactatatcatgttagatacatgaaaataaaaataaataaatgaatcaataatgatattaaaggagatgaattaaaataaaatgacagtggtggatgactttggtagcttggtattaatttattaattaatatatatatctttgttgatggacagttaaataatgaagaattgttaggttaagctacactacactacactacacaccacacctagctaaatcacactactgaataggctattcactctatacttaaatgcataaaaataaaaatgtaactatgggtaataaaggcccattaataataaatatctgcaacacagattgaactttaaagataataattgaagaaagacaaattaaaaatataactagataatagatatggccatgtttattacttttaatttattaatgtacttttttacttcttcaaggaaaggcaaaggcccaagaagttttttttttttttttagttttttagg

SEQ ID NO: 388517 - DNA, 1724 bp, Cannabis indica
ccaagaagaacaaaggtggaaatttcaaacaaggtcaaccatctactgtatgaaaagaatcggggaatcaagtgcaaagaatgtcacagatatggccacattcagggagagtgtgcaaacactctaaaaaagaagaaaagcccctgctgtaacatggagtgacagtgaggaataaaaaaactctaactgctagtgaaagcacagatgaggacaaacaggtattagcgttcatggcccaaagctgtcactcagttgagtctgaagatgatgcaatatccactacatcagaaggagacagcgagagtatacaaaaaatgcttatgatgagatgtttgcccaatgggagtacatgactaagcagattagaggtctaaaaagcaccttggagcaagtggagactgaaaaaggtaagttagaggacacagttaagaacctcaacagacttcctgatgagaagcacaatgagatatataaacttactgcagatctaattagactaaacaagcactgcaatttattcccccgggcacagctgccattaaaaacgccctacaactctagaaacccttatggtgatcgtacctacatagggtacaaaatgttgtccaaatagggaaataatttgtttgttgaggattcacacacttcaactgttgatctgaccaaaaaggatgatgagaaaccacacatccctactatagttaacgtattagattcctatatgagtggtcaagttccatttggacccactaagttgaagttcgaagggagaagaatagtccctcgacttctgtcacaaaatgaaaaattcatcccaatatgtcatttctgcaacaggaagggtcacattcgccccaagtgctataaattgtagaactacttgacagcgatgattaatgggtaaataccattttggaccaaatgttttgcaaaagttatcgattggaccctgtgttttgttaaatgtcaaaatggaccctgtattttccaaaatggtaaaaataggatcctgaacttaatttttgacaattttttatataataatcaacttgaaaacaattcctaatacgaacagatacagaaaatgtaaacaattttatcatagcacttttagatcaaattataattaaattttattttgataaaaaatcaattcaggatcttatttgtactattttagaaaatatagggtccattttatcatttaataaaacagagggtcaaattagtaacttatacaaaacacagggtctaaaatggtattgacccatgatttatctaccaaatagctttccacaaccaaataaatctcaagggcgcaaaactcgtctggaatggaaaataaaatctgaccttaaaccaaatgtttgattggtggctaaggtgtctctgtcttcttttgtggagggatagtggtactttgacagtggatgcttgcgagacatgactggaaataaaaaattattggttaattacaaagaggaaaatgagggggctgtgacatttggtgatggaaacaagggaaagattgttggaaaaggtgatgttaacctaaatggtgtcgctcctttaacagatgtcgtgtatgttaaaggctcaaggccaatcatcagcattggtcaactatgcgacaacaacttctctgtaagtttttctaaaactcagtgtttagtttcaactaatgggtctgttatctttacaggaaactattgggttttatgccc

SEQ ID NO: 388518 - DNA, 910 bp, Cannabis indica
ttgagactgaagataagaattgtgatttgccatggaacattgaaggtctgtgtttgaagttcttgactcggatagatatggagtggaatgagttacaaaataatatgcctttgttacgccacctggaggagattagccattgttacaagttaaaaaatttcccatgctctgttaagagccccagattctggtccaaaaagtaattaaggaaacttgtgggaatcttgaaaggtgatatttgattgttacatatttgtgtgtgcatgcatgtagtattcaaaattctacattattgtgttatatatgaatgattttattattactattagtactatttatgctagacagactcggagatttgtgtgatgagatattaattagtacgttggtgtgtttcaaataaaatattgttcaagtgtgctattttccttcttttcatgttttgtggagtgtactatttcagcttgcttttgtctcatttctatttcagagatgtatctgtatttaattgaaaataataataattattataatcaaagtaaataaagatatggtaatatttactctattttcttttttatatttactcttttatttatattgttaaactctttaaaaagaattaagttcataatccactcttatgattcagtgctagtaactaggattactataatccccctcacgaattttttctcttaattcaaagtaaatgtatatatgtaggataggctagttttaggtgcaatttataaaatattttagaggtgtgttttaattgtttatatttatttttgtacggtaattacacttgtgttttaatttattttaggtttaaatggtaaaattcataatataaattgaaaaatgaaaaaaaaaaatgtaaaatgagatgaatatgatgaattat

SEQ ID NO: 388519 - DNA, 2196 bp, Cannabis indica
aaaaaaaaaaaaacaaaatttacggtgaaactctcttatatttaatttttatatacttaattttttatttttttttggcaaaactcttttatgtttatcgcactctatttaatgtttttgtgaaataggtgacacaataaatgatagactataatattaatgaaaatatatttgaaatgtctagattcaacttcatctagagaagtaggaaaatgtccatgttgagtttttatttgctcttttttattttgatggacttattccctttttttttttctattattattattttaataaccaaatattccttaaattttaactgatttataaagaaaatatttatataataataaaaataataataatggtaataatattaataacaataatcattattttttttttgtttcaacaggattatcggtccacaataacacatatgcaaccctagaccttgctcattgcaatcggaatgcaactaacatcgttgcaatacccgcgaaccaattaatcttataccatcacgagtgtcatataattgggcaacaacaagaatgtaaggatgagggaaaaacaaatcatgcgccgaaactaccgattgaccctgattatccaaagctcagttacagtaggtggcatccaacgtgcaagcactgcttttcaattcactccttaatgacagttagtattgtaaattcgtgcgtgtgtctcgtgctagcctgacctatatttttttgtgccttttaacatataggttgggtcgtaccataaaaaaaaaatgtgggttgtgtcgtgcttatcatttaaagggtacgcccgcatggcccgtaggctcggtatttttgtgtcgtgttcagattcgtgtcaatcgatttttcttaaacaagcccgcccattttttatgtgggctcgaattcgtgctttattttttgggagaagtagaagaatacccattttttttttatacattaaccaaatttacccctaaataaaatttaattcaaatatatattttcttatgagtattataccgaaattatcctcacacactcacataactaagatataatttcaaacataataaattgtgttctttgtaaatagatgtgtaggtttgtagaaaaattggggtaaaattttgattagagagtaatgaaaaattatcgtgaaatgataggagtaaaattggtagaatgattgaaaaaagagataaacataatagattttgaaagagagggtaaaaattaaagacatcaaattaaaagaggtatgtagtgtaattttctcttatttttttatattttttttttgcaactaataagctaattactaaactaaatgcattattttatagcttaaattatatttatataactttttaataatatttaacaattatatgaaaagaaaattaggaaaatttacataaatatacatcaaattcaaaataattacaaaaatatctcaagaaaattaaatattaaaaaatatcatgccacatcagcatatatatacatgactcaaagttaattattccagaatataaaaaatcagaaaaagtttcaattcccgattttctgggtatttcatagtaaactttttggttagtgatgatactaataatatactaacttgttacttttttattaaaaaaatatttttcaataaatctatacatttgattatttttatatatataatctaatatagcaaaaggtattaatatatataagtttgattttatattttgtaatagttttaattatagaattataaatattcaatgtaatagtttataaatattcattgttatatttaagtttattattattttaatttatttataattgacaaatatgtatctattattaaattaaataaattttgaatgtaatgtgtttagcgtgtcatgtctttaagactggtctattcaaatttacatgttatgcttgttgtgcttaagcatatatttttcatgtcatattatgcttaaatttatactttttcatacttagtcgtactcgtacctcttgagctcatgtcagtttcatatagtgccaaaaagtctagcatttatttatttatgggtaatttttatttatatacaagtaaacatacaatattacaaaaaaatgtgcaaaaaaatataattacataattctatacaattttatgaatatttacaaataaacatat

SEQ ID NO: 388520 - DNA, 2635 bp, Cannabis indica
aaaaaaaagaaaaaaaaaaagccaaagcacaacacctcacaagatcagccaagaaaataccccttttaaaaaagattgatttgcaacttaaaagggaaacatgaaaaaatctctttttttttattcagaaaagagaaaaaaagaatccacaaaaatattatccattaaaccctacacgatcagcccaagaaaaacttccccttttttagaaaaatcaaattaaaatggcaacaaagataactaattgatgacaaatattaaacataccataaaaagattagctaacaaaaataaatgccttgatgaccaagaatattttaaaataaataaataaaatgctaattttcaccaaatctacaattaatttggcccttctttaaattctttgattttttttaaatgataaacgagaaagacaaaatcccaaaaaaaattacctaagatcaatgagcattaccctgtaaaagaaataagacaagcgaaataaaaatagatgttagtgtatgatagagataaaaatacttgtgatttttgaaaaaatagaaagaatattcgagtaaaaaaaagcacaattcagtcacaaacacatattctttaaaaaaaaatcaatcaacatgtaagagtctgacacacattttatttttaaacaaacggtgtagtatttttcttgtaatgtttgaagcattaatgtgtgatagtgtatgcaagagaacattacccatttgacaagaaaatctttttctaaatgtaaaatttataacccatgaagacgttgtcacactacactagtggtagcccttttctatggtagtgtatcctcttcataactccaaattacaatgtaccaacttactcaaaagacggctttcacccgctgatgcaagtagctctattcttacataggagcttcaaacaatgatacacaaaggatgctcaaacattaactattgattgattgactcggatatgtttaggaggaattgattattttttatctcaagtaaaatctctaaaatttgaaaaacacaagtcaatttatctatcagaacacaaaacaatattttcaataagattgccagatttcttaaactagaaataaacatatttgatcaggcatcaaaaataaacttttgacaattaaagagaataaacccccaaatatttttggaagaaataaaagcaaaccgaatcaagagccttagtgaaaatgtcaacaatttatttatgtgtttcaatgtattccaacataagaaataatgacgaatgtcaatatgtttagttcgtgaatgttgcatagggttttttaaaatatttattgcactagttttatcacaaaagatagttaaagtatcaagatcaaacccataatccaacatcatttgcttcatccacaaaagctgagcacaacaacttccagcagcaatgtattcggcctcatcagttgagagagagattgagttttgtttcttgctgtgccatgaaactaaattgtttcccaagtagaaacaacctccactggtgattttcttgtcgttagtgttacatgcccaatcaacatcactaaaacacacaagatcaacattagtttcctttgaataccaaagaccataatcaacaatcccatgaacataacaaatgattcttttaatacctattacatgagactccatgggattttcttggtacctggcacacacaccaacactataactcaagtcaagtctactagtagtaagataaagaagactaccaatcatgctcctatacagtgtaggatcaactttgacaccattctcatctttgaacaacttcacagttgttcccattggagttttggcaatctttgaactttcaagtccaaactttttcaccaaattcaaagcatatttgctttgagaaacaaatataccatcatctaactgcttgacttgtcaacccaaaaagtagttcaactctcccaccatacccatcttacattcctatttcatctgtttcataaaaacctacacctcattattagaagtagaaccaaaaacaatatcatctacatagatctgaggaatgattatgttagatttattatttttgataaatagagttttatctactcctcccatcttgtaaccatgagaagctagaaactgagttagtctctcataccaagcccgaggggcttgtttcaacccataaagagctttctccaatttgtaaacatgatcaggtgcatgaggctcctcaaatcccttaggttgttcaacatagacttcctcattcaagattccattgagaaacgctgatttgacatccatttgaaataacttgaaaccaatcaaacaagcaatacacaataataatctaattgttttaagtctagcaacaggtgcaaaagttccatcaaagtctattccttctacttgtatatacccttgtgccacaagtcttttgttattccgaaaaatcgtgccaaaatcatcaatttttttcttgtaaattattttgtaccaataatattgatatataatggtctaggtacaagaattcgcactttgtttctaaaaaattgctctaactcttgaggcatatctttaatccaaaattcatcagttaaatcttctttcacatttttaggttcaat

SEQ ID NO: 388521 - DNA, 660 bp, Cannabis indica
aattggaaatatttaatttattttaattttttgtgttattttttaaatttaagcaaaatgatgtaaacgaaatattggcattcttgaaaagtggtattcttgcaaagaaaaagaaaaagaaaaagaaaagatccaaatctagtcgcccaaagtgaatcacaaaagagaaaaagcacaccatggaagactaaaaaggaatgacatagaagtcaaaaacgtgccaccatctttcattcatcatgtaatcatgttaattgaacatgtttccttggatgtacggcccagtaagcaactcttcacataggcccaagttctgatatgatcaattgataattccttcaaccaagtcgtattcaagccgaaaaaagagaatggcagtgcaccacgttccattttatttcttgtgtcaatgcatagttcttgtgtgcttgttacgtgaccaatttcttctcagtttttggagccacttcctccactatctaatagctcacttatacacctaaaaagcatatttctcactattatttttttatttctttcttagttttacttattttatgtgataaaaatgagtgaactattttaaaatattagtgaagttagagtgtagctattgtactttttattcttaatattgatattgattcttttgtgcttcat

SEQ ID NO: 388522 - DNA, 1203 bp, Cannabis indica
ggtatttctgtaattattgacaaaatcatgggcatttctgtcacttgaagaacttcacttttgtttaaaaagatggctggttgttatagttgattttatggtctttatcggatcggtcgagttctccgcgctctattcctatatttcctaatacaaagtccttttattcgatttctcaaaaaaaaaaagtccttttattcgaatttctttttcaggctaaccttttcatttgcagactttccaaaaccctactcacctcttccctcttaccacaggtagcttcttttctcgattcgatcacaatttcaaaaccctagtttcaaactcgatctgttcttctgaaggtaatgtacctatattttgtaatttgcagaatatgggcgaaactaaggacgccgatgtttatgacgaagagctcgttgactacgaagaagaagaagacaaggccatcgactctgttggagctaaagtcaatggcgaagcccccaagaagtgagtgttattattttttttttatcaatataattcctcgttctcttttttgtttcttataaataaccgccactttaatttttaatttaaacaatttttggtgtaattttttgtatctgtgctgttaatcatgataaatatagtgattgattgtcatttatacaaatagttcgtttattgactgttgattctgcctagtgctgagcttatttgttatcgttgtttttttgtaggggatatgtaggcatacacagctcagggttcagagacttccttttgaagccagagcttttacgagctattgttgactctgggtttgagcatccttctgaaggtaaactgcttagatcctttttttttattgttgcaattaatgctgcaagcttgtgtgtgtgtgctggccggcccatatttttcagtgcttttcaaaaaacggaacgtgtcttgctgtgccacagccgtagcgtgccaaagggtaggcactgctcgtttttgctcgtgagggccggtatagctatattttatagatttaattatatttatataattttttcaactgtattttacggataattatataaaaaaataaagctaattagtaattttttcccttaaactttgacatgtaccaaactcgtgtccctgaatttttttggccgttaaaaattcccctcgaactattgagattgttaaatttaaggtacttttgtc

SEQ ID NO: 388523 - DNA, 590 bp, Cannabis indica
tccatttgctccatttctagatcaaattgagttactttggtcattataattctaatataggtttgcttgacaactgaagagaaaatattattaaaatttataccctctctttgattgaaacctttggccactagtctatccttataccttatttcttcactcggtaatccttcattgtgcttgaagatccatttggagcctatgatatgttgtctaggtggccttagaactaccttccaggtcttattctttctcaatgatgtcatttcatcatctatggcttttatcttcttgtctttgatgtttatagcttcctcataggtttgtggcttagtgcttttaatctcctctactaaagccaaagcaaatgcagtgcagtttgcaaaacctactctgtcttctttccctgcctcttacaagctaatagtattgtgtaggggtgttcgcagtgcgggtgctgcaatttttgaccattttttcaaaccaacccgcacatacagtttttctaatttcacaaactgcactcgcatcgcaaaactaaaaaatcataaaaactgcacccagggccggccttgagttgaaatggacta

SEQ ID NO: 388524 - DNA, 1131 bp, Cannabis indica
cagatcaaattgaatgtgaagtgaagtagaaaaacaaaccaaacaaaataaataagtaaagtttattattatgtgacttcttttctttttttacaaaaaagaaaaaatggtaatattgcttattcatacctttgctaataaagtgggagattattagtaaaatggtatccaatgatgaaacttgtgttgtgttgtgttgtactttgaaaaaaaagattaaaaatcaattaaccaaagctaaacaaagcaaaagggtttattagttatattattctaacttatataagaatggtttgaaatcgtcggcaagaagcaaaaaccaaggtcaactgattttattataatattgaaatagaaaaatagattcctcaaatcattatttctctacaccaataccaataccaatacccttctggaagggacctccatgtcctatgtttttgggggcaaacgtgcaataatgtatagaataagtttagagggatcatatacatatacatatacatatatatatttttatatatgtatgtttgggcaatgtcaaaaatatcctactttgtctcctaatacacaaaaacatgttacatgtgatatgattaattaaatataacaaagctaagctatgctaaggtaagctatgtagtttggctttggttgaaaaagaatctaattttggtcaaaaaggaaaattcttggaaattagctcaagccaattggcaatggtgatgagtttatgtttatgtttatgttcatagaatagaatgttttgggtttgagacatgtgaatgattagtgtctcaattcacatcaatactaataataaataagtatatttatgtgtgtatatgtatataaatataaatatgttatttctttagtggttgttgaaacaccactatcctttcaacatatatggtaggtgggtagtagcatcaaagattgtctacctctaaactttttttaacatattaattgtaattaaatactatctttatacatttatattgtataatagtgcttttctttcagattttgtacctaattatccttttgagggattctttatgtctaactctaaactcatcaaagatcttttttggttaacacacatcaattacttgaaaattacat

SEQ ID NO: 388525 - DNA, 926 bp, Cannabis indica
aaatagtcaaataaatcaattcttggggcaagtgcacctggaaattagttcaagaaaatatccaaaagttatggtacaattagagcttttgaggcgaaggaattataaaatttagaggagcgcctcaacatgaaaaacccatgtcagggcatgaaaggcttaaaaattagcagagaaggtcgtattggaccaaggcatgggcatgcctaggcattggatccttatacctaggcataaattcatagaatgctcactgcctataaaaaagggggtcatgcctaggcccatgtctaaacaacttggagacgtgaaatttgcaaacacggccgcaacatgggaatcctatgtcacgactcgccccttcaattttcaagtagagtgatttttttcagctttttatctttttcaacttttttcggctataaaaagagtggacttcaatattttttagtaagcaatctaggtttacgaaaattagagagcaaaatcaatccagaaggctttttcaatgaggttttcaacatttttttcttctctatttctttttctattctaaattaatatgtgtgaatttgctacgataaacatgagtagctgaacagtttattagggtttagatggatattgtttgatatcgatttatgattttaatgtgatttaattttctctcaatttctatgtattgtatttcattcgtacttaattacttttaattgcctaatcaccagttaaatgtttatgattttgatgtgaaattagagaagtgagtggcaattatgctatagtaaaatggaaacaaatttcgatataggacgagagtaccatgtggtttggatagcttatagggtttcttgtttaatgtcttttacatgtttaatttatcacgagagtagaaaatttgtatgtaattgagatttatatatctg

SEQ ID NO: 388526 - DNA, 756 bp, Cannabis indica
tgtgatttagttttcggtgaaagttatgcttatttttgttagcagtgtaaaaaacatggtatatttgaaagacacaagttctatgaggatcaaaatatcattatgttctgtccaacaatactagggctctattaggcccaaaaggaaaagggcaatctggtaaaataagattacatataaaccctagcttcatcactctatttcttcaagcagccaggtgtctcatttcttagtcgccgcccaaaaaaacctaactctcagaaatgggacgagtcattcgtgcgcagcgtaagggtgcggggtcagtcttcaagtcccacacccaccaccgtaagggtccggccaggttcaggtctctcgacttcggagagcgcaatggttacctgaaaggtgtggtcactgacatcatccacgacccaggaagaggtgccccactggcccgagtcaccttccgtcaccctttccggtacaagcaccagaaggagcttttcatcgccgccgagggtttgtactctggtcaattcatctactgtggaaagaaggccaatctcgtcgtgggtaatgttcttcctctcagatctctccctgaaggtaccgtcatttgcaacgtcgagcaccacgtcggtgaccgtggtgtccttgctagggcttctggggactacgccgtcgttatcagccataacccggataatggaacctcaaggtatctcaatacttattttttaccctttaaattttaataactagtagtttcag

SEQ ID NO: 388527 - DNA, 1205 bp, Cannabis indica
cgtagtttactggaagcaaagaaccttgtcaaatctgggtgtcgggttgtaataggacctggtgtgggagtgaccattttaaaagatccgtggctgccgaatagagctaatccctatataacaacggtgggtcaggctattgttgacaaaaatgttgattcacatgattttaggtgacaataagtgggatgaggaactggtgagggacatctttaacacaagatatgctaaaataatattaagtatacctttattctcctctgctggttttgataaatggcattggtgttttgataagtcaggggattattctgttagtattgccaataattttttgcaagattagaaaaaagagcatttcagtgatgctaaaactcaattctggaaaaggttttggaaaattaaaatgccaccataatcactgaatcttgtgtggagagccttgaccaactgcttaccaacaagagtgtagcttattacaaaacttgtcagtgtgcaactgacttgtcctagatgttcaaatgcagctgaaactgctattcactcactggtcttttgttcactggcttcatgttgcttgtatgctgctaatttgtcgactggtgctggagcagaatagataatgggcagctggtttatggatgcggctgttagatggagcgatgaagattttagtttggcgataatgcttcgctgggctatatggcaggcccttaataatcaagtgtggaaaggtatttctaggccaactcgttatattttggcattagccaaaggtaatcttaatcaatggcgttatgctcaggataaaaattttgttccctctcaaatcaacttgaaagcgaatgaggggggtaagctatggactaaaccgttaggtaacaagattaagatcaatgttggtgccgctattttcgagagccaaaactgttatggtttcggttgggttgctagaaataatgaaggaagattgttatgggcaagagctcccagcaagcggggaaatgtctcagctgaatttgcagaggcagtgggcttgaaagaagtcttaagttggttgaaggataataaactttctaatgttattgtagaatctgatagcttggtcaccatacaagcaatcagaagctctatttctttcaattcagtttttggtttttgttagcccaagatatgtttccaagagggggggtgaattggaaatt

SEQ ID NO: 388528 - DNA, 784 bp, Cannabis indica
atatcagtcactgaggatgagaaggggaatgatagtaactctaattgtactactaatttcaaagccaagtcttcaaagaaatttgaactagatatgcagatgaagacatcattgtttgttgttttcctggggaatttgaccaccaacaaaagggtttggattggaaggcattgcatatgtcatgcaatcttgacatatgcatgcaatatgaatgagtctcagactagtgcagttcttgcttgtcttgtcttcacatgatacactgcaagagcagagatggttttgagcttatatggggtccacctgggacaggaaagacgaaaatcaatgctacacttcttaaagatcaactacacaactcttatttgtgcaccaacaaatgttgcaataactgaagtggcttctcgagtcttgactgacaccaacaaaatcacttcaaaagtacaacctcatacatactcactcgtagtaactcctaatgtcccccacttgttctaacagaacagaacaagtacatatcatcttataaaaatagaaataattacatatacacttgtgtgtacaaatggatgtgatcttccatccaccaaatgaaaaatccttctcgattgaattgaagtgggtttctttgatataatcctagattttaatcaagtaaaacgatagagaagtaccacgccatacctatttcaaccgaaacccttgtcttgtcttgtcgaaatcttccaaaactctcacatctgcctcattatccccaccaccagtcgccatatctgtttctgga

SEQ ID NO: 388529 - DNA, 2498 bp, Cannabis indica
tatttgtttcttacgcttccatttcttgtatctgatgctgagtgtggcgatggtagcgtttcttcttgggacgctgctggtcatggtcgtcgccggaggcaccaccgtcttggttttcgctaccggatttagttgcgctgtcgaaaacgtcgtcgtctcggccgagacgagcgttgagatcgctttcggaggtggtattctgtgcggtcatgtctaggggatgaagaagctggtgaccacttccttccatcatgtttggctggaacatatctacagatctttaagattccccaaaccttttatgggttttcaatctaacaaaaaaaaattacaaaataatataaaatttaaaataagaataataaaacatattaattaagttttccagaaattatatttgatcatttatattaagagaaaaaaaaaaactgtttttctaggggaactcactcacacacccaagttaaaatactatttgactaattaaaggttctttgaactttggtatctctcttctctggtctagatctcttttggtctgtgtaaaaacaagactcaagagagaaagagtagaagactttttttttttttttttttttgaataccgagaaggatttttcttaaaatacttgaatattagtcatttctgaggccaaacatgtaacacctgtttgtttaagagtgagtatataaacaatgggtttagaaggagaagtggataatttaaaaggtaataaagctgtattataccattatttaaatatatatatatatataaataaagaagaaatcatagacaaaaaaaaaaagaataagatctggacccatcaatcttattaccatgaaaaacatttgtattttagatatttttttttattgtaaaaaaggactattaatttgtcattaaaaataaaattatagagatatggcaataattaaattgtagagaaaattaatatgtatatatagtagcaaaaactgtgtcctgacctgactaagagtaagtcctgaagatgaaccaaacccaccaatatttccattccgtccgattatcgacggcatatttctcgccggaattatgatcccggccggcatgttgaaaaccccagaaaccctaaaatgttttttcaaccgtcctttcttcgaaaaatgagttcactactgcaatattttctctggaaaactatgctgctttcgtactctttatatattatatatagatatttttttatatctttaaaaggattaagtcaaaaaagagttctgactactactttaatcttagattctttgacagtagtagtgtgctactcttaactaaacaaaaaccttttacaaagtaaaatggactgaggtgacaattagtttgtgcttcattttttagggggtgtttggaaaggtaaaaatctctacaggagtatcatataaagataagggttgacaatttggatttggcttttggggaaaaataaaaacattaaccaaacaaataaaattctacaaacaaacaaaaaaaaaaaggctatatatgtaacgccctcgaagatctcggagtatccaaacgtgtcttaacagtagtattttacgttttgcttagaactctatagcaccatgatctggaccaaaggggtgaaatgaaaaatgtaacaaattaaaaattattgtattaaccaataaacagagagagaaattgatagtatatacatatacatataagtatatgtattatactcaccagcatataaatagaaatatttaactctttcgtgccctaatgaaaaaaccccagaaaagatgagactatatcagatctgcttttgggctaggtagctaaagagagtgtcggcgaaccaatattttggggctgcaattgcttgtgaagcttagtttttgtgatagttaagcggttaaagttgagtagcaagggcttgatcagtgaagttattacttagcaaaaaaaattatatatatttagaaagaaaaatataaagaagatgaaggatcaaaggactggagaggaaaaaaggaaggagaaatggaaagcagatggaggaaaatgtggcagcaaggagttattgcaaagcttattgagatggtgcaattgcatttaatggtgcatgggagagagagagagaggtaatttgcattaaatggtgggagtgggagagagagagagagaggtgtaattgctttgaaagagagagctagaagaagagattgagagtagtattttttaagtgctaatttatattggtattttctctagggagagatcagtatatgagatgaaaccaaatgacggctaccaaactcatcaagacactttttttcttcttaacttattatttccagtgtacatatacattctctcatgtttaatatttcactactttttctctatgtttgtagactatgataactcctaaaatataatataaatccattttttctaaggaaaatctcaaggagcgcgcatatatgtatgttcaagggggaaa

SEQ ID NO: 388530 - DNA, 885 bp, Cannabis indica
ctctctctctttctctctctttgtgtgtctctctttctctctcggtcgcaactctctcaacgcaccaaatctggcatatttttcaagttcagggttgtggcgtgcgactgggttctgggatgatcagttcggggtggtgcattgaactatctcagatctgaaaccatctttagatttatttattttttattttttaatttttagtttgcgtcgattattaaatgaagcaaaaaaaatttggtatcgattatgaggtgaagcaaaaataagctatgcaaaaagtaattttcgcacaaaagtaatgttattatatgtcacttaaaaaccgaagtaaaaagctatttttttagtagtgtttagaagctatgcacaaaattaataaccaaaataataaacataataaataatattggcgtgtatataaacttgagtaaattgcagtataactctcaatactgtcatctcgctagcaattaatcctctaaatctaagttctattagtaattagaactttccatctatttttgacagttaactatcaaattggttgtccatgtgtacacagggtattgtttgcatggacacaatgtacacataacactatattttttatccacgtaaataaatattttttttcatcatcatttttatattttaaattaatgtatttttatttttgtaaatatttatttacatatatagtattataattttaggtcatttactataatttatcataaaaagatagtgcttagtaaaaaattaagaaaatatataaaatttgatattttgttttagagcatcttcaatcgttctttgtgtaaagtcttgtttttttggcaagttagttgacaaaatattttttccatttatggtaagattgtt

SEQ ID NO: 388531 - DNA, 982 bp, Cannabis indica
cgtgcgatgccacgtcaaagtgcaaaaattgggataacagataataatttgcatcactcaatagtactatttttctcttctcacttcattaattattaggcttatttatactacagattcttacgttatatcaattttagcacccaattttttaacaaattagtccctaaatatataaatttttacaagttagtcctttacgtttattttttagcatattagtcccatatctttagagttttggtaactataattccccagtattaaataattgttcttttgttttcttttttgaataaaataaatttttacttattaattttttaatgtttaatttatttttttgctcaaatatatatatattttatttttaaaattaatatctttttttttaaatatatattgttaatatatctttattattttctaattattcatatatatatatatacatcaatatttatttggtcaattaaatatttaaaatatattttatttatatgtataattgaaatatgaaaaaaagtgagcataaacactgtaagacccactcaatacctaaaaaggcactagcccctctcactttttttttttttattaacagaaaaaatatatgatataatattttaataattttttaataatatattgtatctattaattatttaaagtatgtgtctcccttgatgataactcttattagtttgctactaacataagttaaaaatacgtaaaaataagatatattctaatattttatagtatatatttgcatgaaattatttgaaattaacacaaataataaataaataaatttaattaaaataccattatttaagaggaaggacttaatgcgttgggttctgtgccctaaagaaaacccatttcaatataattaaatttactaattaataaagatcagaaatcacattatatgttgcatgttcacatgatttatttcatgattgtttaatgtataaat

SEQ ID NO: 388532 - DNA, 750 bp, Cannabis indica
tctctctctctctctctgccatgtgttttctttttgtgttttttcttaccattttatttttgttgtatgcaggtggttctcgcgactacctcagatttgtggtacatttttttaataaaaaaatgttctttaacatttagatctatgatttcttagttaaagcggactctctctcactctattcatcattccccgtcgtcgaacttctattaaaatataaaatataaaaaaacacttatggtggtggtcatttgccaataaccgcctctaaaaggtccctttatgccaccataggatccttttagagatggctattaaaaaataactgccactatagtgtctttttagagacattttttttacgcctttagtgactcctagaacacctatggttgcaaatttctctaaaaccatctttaaagactattttttatagtagtgattggatcagatgtcgaactttaacctgcaccctacaatctccttatttgcctctttatcttgcttacatgtacattgatatcaataccaatcaaattcaacagtgccctcaaagcaaaaaataaatgctagttaggatttttactttcggaactttgacatgtaccaaatcatgccctctgaacttttctggccgttaaaaattcccccagaactattgagattgttagatttaaggactttgtctaatttcattcaattttactattttagtgattgtttatgtactaaaccatgctccccagactt

SEQ ID NO: 388533 - DNA, 590 bp, Cannabis indica
gttttctattattaattatagttaaaaattttgagttggtgtaacttaatttgtcgttataataggacaaatcgtaaaggattgacatccattagacaaacataatagtgttagatctcaacaaataagtattagtaaatgcaacatatagttgtacatccaaagatgacaacttagactagtatttacaatatgaaacaatgaaaaagtttataaaataagaatgactttgactctcgcctatcgggacatcgtgggattcttattttaatcaaaattatcctttatttttcctcttagttttttcatttagaaattgcttagaaattatatcatggacaaaaggtttatacttcatttgcttatgatgtcttcctattttattttatgaaatcgaatggcgcaaatgactatattctggacattctatcccaaaatgatgtaaatccttaatcttacaaatctcctacgtgtatatgcttacttaggcaacctaaacttagagttatattagtagcagtggttgaagcttgaataatttctcattgtatatttggtataaatttaagtctttgactttaaattttaga

SEQ ID NO: 388534 - DNA, 1991 bp, Cannabis indica
tcaagttttttctggttcaattgttctcatagatccggttggctatgatggctggcggacctcgttctacccatagactgtgtcctactcatggatctcgtgcttgagtggcctgtaggtttactcattcctgtgcctccttgatcattgtcacgacgagtgttttctcctccttgaactgattgactatgagttcatgtgtgccccgagctaacatttgtctcttcacgacttgttcttccccattgggcgtggctcatcatgtttctcccactggggtttgtacgaaccccttccctatgggtttaagaagaatatcagtgattcctcagtgacgacctacacgctctaggttgtgtcctaggattttccttgtttctacgaagaattacccgttccctggtttctggttgccttctattctgatttctatgagatggttctggatgattatcaggctgctcatttttagggggagcatcaatttccccaggttgtctttcttgagtgttctagggattcccctgagctgtctcctgcaccctagttcgtgagtcgcgaggtttgtcacgtggtcttctctctccagggtcagggttattttgagtattattttcctatgttgtcctggtagtggctacctcacgctccaacttagcattccgacagtttgcctcctctaggcggcgtctgagttggcgattttccaactcaacaattggtatgtattttgttggatcataggcgtcgtcctgaccaactggatcaggaagaggtctaccaatgttcatcgtaggttcttcatgctttgttccaagattcaaggttatcctgagataagttgtccattcagattgtgagttgaaaggcctccgagaccccattggctcttttctaggacggtaagtggtttcttcatgaggtgtgtcaatgttttctctgttttcagtcatggagaaatttttttcttaatgtaaggagggtttttctgagctattttcacaaaggctctcaatgaaagcaccaaactgttaacgcagattttcgttaactatatttgagcctaagtggtaataaacttgcacagaaattaaaatttggtaaagaaaagataagaacacaatgtttttttacgtggttttgtagttaaaattgtgcatagtccaacctttttctgatacgactctcaaaccttttagatttctgatacaactctcaaacctttttctttgatgatcttttcgtcccatttccaatataacttgccctatttataattacataggagggcagttaattacagtgttgactgatattttacaacaagtatcccttgaaattgtgggatttgattatatcccacgtaaaataagtgcagttaatatctgaaaatcacacagctgtgattggtccgcttttactgggtcaatgtaaacatgtattaaatacattgcaaatcgtatcattcagggacatctcgctgggaacatagcaataataatcctggtagcgagctagagcttttcccacatctttctaaggttaataatttaaatcttgtcgcttctgagcttgaagacataatacttcatctaacaaccgtagttcttggcgacaaggtgaactttaacagccaacatcatttgaatgtcagcttctatccgagagagctgacttgacggaactttgaatctcattgaaagatgtctggagttgattagtgaaggtaccacgagcgtgacatcctatagcaagatggatgcctcgcttttagttgttttggtttacccgactgttatactagctttgtatactgtgtattatacgctaagtgtcttaacaatcattatatctcgcctacgtctcttcaagcgtaacgaggttgatgcctcgccttgcacacccaatgccgtatggtctctcgcagggccggccctaggcataggcgggctaggcccgtgcctagggcccacactttccgggggcccaaa

SEQ ID NO: 388535 - DNA, 1219 bp, Cannabis indica
ataaaaggtccgcagccaaaatgtctgcccgtttgcatcggagatcggttttctatatgtatagcttttaatcctttcaccaattattattatcaaaaaagttgtacctcttgagtgtttgaccctaatgggaccctttggtcagacggttagttggtttttatttcagttctgctttgttgtttgtttatacattagttttcactatgtctctttctcttggttgatgtgataagattcattattggtaggtatatagtgttaattaattaattcaaacttaaactcaattaataataattatgatattatatttactattggttgttgaccatttaaacaaatttttagaagctctgtatgtaaatattctatagaaaaatgttatacaatttaatattaaatttcacacattttgatttaataaataatataaaaaattattaattacttataacatgttatatatagtattgagtacattaaagtgtttaatagcaatgctctgttctataaggagaaccaaaccatgtgattacccaccaactaaattctaaattttctacccaatctcattaataataataataataataattctatcattattaataatgtttcaaattcaatagaaagtgactgatttttttttttaaaaaaaaaagaaagaaagaaagaaaagaggaatcttcttatctactatgacacaagtactatagggttcttagaaatccttagctttgtcatataaatgagccaattagaagcaacaaaaaaattaattttaaagtttaatgaaattaaataattatatagtattagggtaaactaactaacttgaaaatataagaagctatagaatgaaaaaaattctcctaattagataatgtaataactgttaagtacttttttttttagcaatttgtgtcaaaatatttttttaattaatatatgtatttttattgagcatttaaattatttttattatattgattttgtgcctctaacttctcttttcttctaagaaaagattcattctcagctttttttttttaaaaagaaaatttcttgtaagagaaaaacttctcttatgaaaaattgtcaactttgggaaacttgatttttcttttttctaattgatgatttcgattttgcttttattataacaaatcaaataaattttatttggcaggtttgaagtctaaatttgtgatcttgg

SEQ ID NO: 388536 - DNA, 1480 bp, Cannabis indica
ttttaaaaaaaaacaagtttacaaataatatactaataaaaaaatagacatttaatggttagatgcttatagagttaccaaaatataacttagtctaattattaaccgtaacaaaaattaaacttaactatttatttacaactaagaattaaacttagtatttctgctgcaaattactatctatgaattatggtcttaggtaagaatgtatattgtaaatatcaccaactcaaagctttgaacgacactgtcaaaattcacttcttcagtcttatgtacatttgttacaatcaatacttcatgtattccacatttctatcataagagtcaaaagaataaatatatatatatatatatatatatatatatttcttttgcagatgacagagctcaaaaacctaatgacaaaagtgggaacgaatccagcaatactgaaggaggaactagataacacaaaagaattattgaatgaatccatattggaagtggaagaaagtaagaggaatctaaactcgttggttatgcttcgatacgatttgtcgaacaagctccagagtttggaaatggcaaaatcgcaaggtgagctggaattacaaaggttaattgtagagagagaggagatggttccgggaatagatgctctccggcgagagagagatgttttccagcgaaggattaagttttataataaggaggaagaagagaattataaggagataggagaaacaataaggtgcagtttgagggagttttcgggtgaggagatcagattggccactgaagatttttctgagcgtttgagaatcaagtcaggtggggatttattaagtggtgtttacaaatgtcgaattaaccttcaaactgtcgccattaaaatgttcacctcatcatcacctaacaatgcaatagctcatcaagattttcaactaaaggtacttaccactatcattatctactcattcctctactggaatatttgcagcaaaaatgtttaaattattgttgatggcactgaattattatgttggtagaacttaaaattacccaaattattatattttttgcaacgaaactacctactcccatgaaatttgggctgaaaacaatttgtttcacttgttttactagcttaaaataatggctaattatgatttttgtccccctgaacttcgacatgtaccaaatgatgtccctgaacttttaaggtcgttaaaaatgctctcggaactattgagattgttggatttaaggactttttgtttaatttcatttaattttactatttcaataatattttatgtattaaactatgctccccagactttgatatataccaaatcacacctctcgaactttgaaaagtactaaattatgcctcttgaattttcatccatattagacttttttactaaaattggacaaaaatccttaaatccaacaatctcaatagttcaagtggtatttttaacgaccttaaaag

SEQ ID NO: 388537 - DNA, 1148 bp, Cannabis indica
attcaattttgaatatgcacatttacactatttttctgtaagctacatttgtttaaatttttttaaaattttcttgattttttatcttttgagcacttttcataagtgtctctactctatttttttaaaataactactccaaaaagctacgtttggtaaaaccgtataaaaagtcgtattatattaaataacaaataatactatatttagataaaactaaagatgttcataaactaactgatccaactcaattcaatccgcaaagtgtagatacccacacttgtgcagattatattggattagaaaattcaaaatttatatttctgcggattgaatgttaattgacatgcaaaagtaaccgatccaatccaatccacataaatttataaaataatttaaaaaattatatatacaattagcattttaatgtaaataaaataataatttaaaaatttaatacatataatataaatatattttaaatcttaatagatcaaatgtatattctattcttatatataattttttttcctattacatacaatttaaaataaagttaaacctttctttatacatatattttgttagctatgttgaacactcccagataaaatattgtgttgtattaattattacaaccataaattttaatacaatgtaagtcgtattatttaatacataataaatgactcgtattagcttgtgttataatgtttacaaagggtttgggtcaacctcgacgccaaccccagcctcggacctcaaacctggatccatacccttaccataaactcagacccagacctgaactccccgaaccttgaccttggactccggacttggactcggactcggacctggacttggaccttgacccgaaccccaaaccctgaccttggactccagactcgaacccgagtccgggggctagctggggtacggtgttcgggtttagggccaagatttgtggttcgggtgtggattcagggtccaagtcccgatttgggtctgggtttggggcatgttccgggtgctgggtttgggtccgggttcgaaatggggtctgggtccaagtccaagctgcaatcgggttggggtcaagtttattgtaaataatttacaactttacacaacctattagtacaagt

SEQ ID NO: 388538 - DNA, 797 bp, Cannabis indica
aacatcttatgtccatttgccaatgtcattcaactcaagagtgtacatgtaatagaaatgggaaacattctcaaccatactctccccgagagaaaaaacttgatttcttccctcaaaatctaaacttaagaagtgaacccagagataagaagcacattcggccgaaacgtttttggaaaagaaaagatacgcccaaatccctacttttgcctgtccatggacttcacaaaagctttacctatcaagttgcatggcacaccgaatggaaaggctgaaaggaccaatgtaagataaatgtcaaagtgtaaggcagttgtaggcgtcaccctaaggacttgaccccatgaaggaatgggactctaaaaaagatgcgggaaattgtgaaggactttattttacggacaaaggccatcttctggccaagcaaataaccttctaggtagcgaaccaaaaaggcattgcggcacttggaaaggaagagccaaatcaaaaagtagttcctaaatcaactaggagacaatcaagactaaaataaatagggttaaaacactggccattagaaccaggtgtttcaaaaacacaaccatcccctacacaatttatgacaatatgtttccaagaaaggaacagtgaaaagaaatatcctattcaactactaaaaagccccttgcggccagtggagagtttaattgtctctgcagctgaaaaagtatagctaaaaaatgtaaataaataaaaaaaggggatatacatgttggaaattattttaccaggatgttagatctactcacaagtat

SEQ ID NO: 388539 - DNA, 1053 bp, Cannabis indica
tttgaagaaatgtttgtgagtcttttattcttcaaacactacacaacttgtgtaagaaggcaaaaaagttcatagggaataataatattaataaataaaaacaaaatccaaactttctcacaaaggttaagtgtattcctaattggaaaatttttgtattacaattttttttaatatttaaataagttatagttatttaaaatattttgtaaaatattatcttgaaaaaaaaaatactgtaaaattttgtaaaaaattttaaaaaaataaatacaataaaaacaaagttaaaatagtgtgttacacaaaattttttttaatttatacgcgtgtaaaataaattatttgaatattattttttatattttaaattattttaaattttttaaaatttaataaatattttaaataactataagtacgtatattaacataaaaaaaaattagattaaatttttttctttgaatgctgaaataatagaacttctattagtgcacatttttataaggtgcacttagaagcttccagtaatacatattttgaaaaatatcaattgcaactctaaaatattgtttcagtatatcttctatatgtatattatttcatctattttagcaagggagtattttagtctaattttatttttttttacaattgtatacattataattatttataattattgtaattttttagaaaaaaaaataataaatttaaagtgctaaaaataaaatttttaaattctttgttaaatgaattattgtttttttttacacatgataaataattattttaagtttactcttatgtattttaagtaaataaggtcaatcctttggtctctcataggacgaagtcctttacgtgtgagattcatattttagacaagtgataattgttgaattacacaggaatcttgtaattgtttagggtgtgtttggaagtaactgtgtaattactaggtagggtagtaattacacagtttagtaattacactatattttaaaatgcaaggtgtgtttgaatatgaggtgataattacatatgaattc

SEQ ID NO: 388540 - DNA, 1073 bp, Cannabis indica
actagataccttgtaaaataataccaacaataattactaagttatatatttttgtatagcttcaattaatttttttatatataaaattttcaacaattgtttaatcaaaaaaaattatataaaaaaattcattaaaactattaatatttaaatatttactaacaaatatttaaattattattattactatttttaaatataaaaattttaggggaattaccccatatactgtttttttttttaacttttattcaactttacgattttttcttgcgattaggttgcagcgcagttgcaatagggatttctatgtagaattccgtaaaaatacaaaattaaaaaaaaaaaaaactattagtgaagtgtaaaaatgaataagccccaaaattttaacatgatgcgctttcagaatagattatttctgcttagtttcatgtcttttaggcttgtcgtgccgtgtcgtacttacgcccatattttgtgttgtgtcatactcaagtccatatggttcgtgttgtgtcgtgccaatttgtaacttcgttccatgtcgtgcccaagttcacattttttcgtggctagttgtgctcgtgcctctcgaactcataccgatttcgtgtcttatcaaaaagcccaattcatatttatagtgcaacataagataaaacaaattcacttgtagcaccgagttattaactaaaccgaattcaaaacaaaaatcgaaagaaaaaatgtgtttactgccaattatgttttcagtaaactctattttaaggtgagtagagaaaagattagtaggccaaattgtgtttggtcatagctttatttctaaacttatcgttttttttttttgaggggttgtttggcaatttttaatgaaaattagcactttcaagaaaaaaatgggtaaagtgagaaagttaagagaaagaaaagaaaattcgcatttatgtaaaagagtacaaattatgattaaagaacttgtttgaataaattttaaaatgattaattttttttcaaaattttgtttcttttttttttttaaaaaaatacattattggatactagtggtatct

SEQ ID NO: 388541 - DNA, 1100 bp, Cannabis indica
ttaagaaccgcaccagaagtcgctgccatgctggccgagatcgattacagaggcaaaagtaaagatttttgtgtgtgttttatttgttttttcagagttagtttggtgtgtttgtaataaaatagagaagtgagtgttgattttattatatcccaaatccaatgtttgggggatgaaatcctgtttggagtatttggagagagccaagtaggataatgaaatctggagacgaaatctgggatagatttcggaccaatgggaactctcaccttcatttccaaccacgtgtacccttaaataaaccccccaaaaaatctacaccatttatttgtttttatcttccttttatgtaaatcaatataactttgatttttttttttctttctcattaataaggaaccaattgtgaaattatattgttttgtgagaaaatttgcatgatttgctataaactttctcaattataatattttagtattaatatgaaaattacaacttttcaaaaaacatatatgataataacaagtactatatgtattataatatgttttctgggagtattaattggatggaaattaatgttgtaaatttgtgtctgtcgtgctagtccggtctatatttatttgtgctttttaaaatacaaatcgtgttgtgattgctacagaaaaatataaattgtgttatgccttgctaatatttttaaaaggcaagcccgacacggtccataggtctagtatttttgtaacagtgattggattcgtatcgtgttttgctcgtgtcaacctatattttttaaacaggctagaacctgttttcatatttggatttgaattcgtcttgtgctttgctcgtgtgagctcatatttcttaaagaggctagcatattttcatatctagactcgaattcgtgctttaatttttcatattctttttacaattaactatatgtatattttgtagctttagttatattcatataatttattaacaatattttattaataattatatataaaaattataagcattattaaaatttaaatatttacttataaatactctaatttttatatcactctctataaataaattgatatata

SEQ ID NO: 388542 - DNA, 2008 bp, Cannabis indica
actatttccaagctgttgtcccatgaaacacgcggtttaaagattcctccttggcccgtgttaccatgtgatcaccagttggtggtggtgctggtataggactgtctgatgttgtatgcaattcaccagaatgtaagtgaaaagagtcgggtctgctatatcagcagcatttcccctctcattgcctgaaactgaaggtccagaaacagaagcaggtgacaaatcgaaaggagctgggtcttggtatcttacctgactgtgtgttggtgtagaaggtgattcttcaggtgtgcctaaggatggagtcaaggctgttgttgatgtacctgtgggaagagtgaaagaaggcaaaacagaccatgaagagctgtgaataatcactggtttttcttgctgatagttgttaagaaatccaagtttaaagggaaattcaagctcattaaatacaacatttcttgatatgtaaatttttccagtgggagttagacacctataacccttatgagactcactatatcctaaattaacatattttaaggaatgaaattggaatttgtgagcttggtaaggccttatgcaaggaaaacaagcaaaaccaaataccttgagaaaggcataatctggttcttttatgtacaaagtctcaaaaggtgatttgttttctaagataggtgttggtagtctatttattaaatacacagccgtttgaaaagtttcccaccaatattttaatggcatgtgagcttgagctaagagtgtgagacccatttcaacaacgtgtctatgttttcttttggctctaccattttgagctgaagtgtgtgggcaagagtgatggaagtctattccattttcaatgacaatgttttgtaaggcttgatattcccctcccaaatcagtcctaagtctcttgatttttctttcaagttgtgtttcagcaaagactttaaattgtagaaaagcttcacttgcttcagctttggtttttaaaggatagatccacgtgtagcgtgtgcaatcatcaataaaatgtatataaattctaaaaccattattggacatgactggtgagggtccccacaggtcactatgcacaagatcaagaacattggtagctttgctattggaatttttgaaaggaagggcatgtgatttgccaaattggcatgcatcacagaaatgcaacatttcattcttggaaattttaacttgacatgagtttaaaacttgactcaagactcttggtgatggatggcctaatctcctatcccatacatcactttttgacactaaagactctaaaattttggactggtttctactggatttagacttgacaacaacaccagaaaaactatgactcttgactttatttgactcgatttggcttgtgctttgagtagtggttttgaactgaggtgcttgaagttggtagagcccatccctaagcatcccttgaagaaaaaaaccctctgtgtaaccttgtccttcacaacacaaccaatcagagtaaaattccataagaacattattgtcatgagtgagtttagatacacttaacaaatttttagcaatctcaggaactagtaacatttcttttaaaaccaactgctgtcctgaatcagtatataaaatgccattgctaagatgagagatagatagttgtgtaccattaccaaccgtgactttctccttaccaccatattcttgtttttgtgtcattgatgctgaatctgaggttatatggttgctggctccactatcagcaaaccaagtttcactttccagcagctcaggagcagcaacaaaggcagagtgattgttcttctgttgagtgttgctgttgggatctgaacccatgtattgttcatcaaaccgattgtaacatatggcagcactgtgaccatatgttaggctaattttactctaagttttgggtcttattttcggttagttttcactctttgtttctagtttcagcactatattacgcttgattcttttgttt

SEQ ID NO: 388543 - DNA, 3112 bp, Cannabis indica
acaaaatgttaacctaggcgctacgctcacccccaagtatcaacctaagcgttgggacccaatttttccccttcaaaaattttgttcgatcccaaaaaatatttgaatctcaatattttctgaagacagagaagatgcttgaaagaaatcctgaaaaactccattttaatggcctaggttgacaaaatgtcaacctaggcgctgtgccctgctatttgtgcccaagaattgttgtttttcctccaaaaggacctatttcaaagtttttgatgaagaaggattcattgcaaaatttggatcttcaatcaaacacttggatggtgcctagatggaccgggtgttgggtactcgaggccccgggtgctcaaaaattaacttgctccaattttgattctgatgcctcaaatatgtttgtggtatttctagttgatgtccgaatacaattttttaccactttgcactacaaccccaaaaaatgaaaccctagttgagaatgtcaacttagacgccgagtgaaatcctaggtgcccaggttggcttccggggccataggttcgtataatttcagctcccgaggcttggataaggttgttccatgtcttcatggtacaaaatactgaaaaatagtgggttggatttaagttattgaagtccaaactttcatcctgaagatcccggagtcaacctaggcgtagggctagggtcccctcccaggttgactgctatgacttgggtctactcgactccatgacatcatccttcatcccacatgtcaaacattgatgtccacgtcactagggattgttttcgagttaacatttccccccaagtcaattttacacttgtctggagttgacttgatgatgtgaaccgagaccgtttaacttgaaactaccaaatgggcatcaattttgacatgattaggtacttgtatctgttcttcaagcattccaattgaattaggactttgaacactttttattagtccttgggaatttttaaaattcattagtaaataaaaagagagaaaatcttatctttttttttttcacttatcttttgtctctttcttctaaaatttgaaaatttcttattttttattatggaattaggattaattggattggaatcctaatccttgttggagatgccattcaaaattagagatagaaaggaagaagagaaaagacttttggtcaattgcttatcatttatctttttcctttaatttatttaattttttcttaatcccaatagcattaggaattgttgttaccttttaaattttaggaatttgaaattagatttaaaaaaagagaaagaaaaatatataattatatcttttacttattatttacctcttccttaaaaaatttaaaatcaatagactccaattaactttaggattaagatattggactgagctataaataaatgagttgagaactaattttttcacaacttctcatctctcctacatgcctatagcattcagtgagaaccttcggatttcatcttcatcaagccttaaaaccacttcaactcatcgtagaaaaaaaattttttttttttaaaaaaaaacccagatttttttttttttttttatttttcttcttctcttcctttgttgatcttattccaaggactcttcgacttgtaaaaaccgttgaaacaattttccaaaccttccaaaaatccaaaacaccttctttgtgccttgaagaattcctccaaactacttcgacccttttcaactaaattttgactttccttgagttgtaagcaacttgaattgttgaacttgagatggctaggatgaagagaagcagaagattgcgccatgtggctcagtttattagagttaagttgactgtgcctaagcctaagaacttaaacaaggtgcgtgatggaaaagtgatggcaactaagcttctcaaagatgccattgagggtgatgatccaatagatcgagtctttaagcttaggcctcttgtgtctagtaccctcattgagctttaagctcaaacaatttgggatgattactgtctttctgaaactattcttcagaagcctcgacatggtgctcccaagggttcctataatacttgctgtcgtgcttggtcaagattccacatgaatgcagggtgcttacttgcccttgcttccatggtttatatccatagttgacttcttctgtgtttgtccttaccaaataaacccaaatggctataggattctagccaccttctttatattttagtgccttaggaactgacctattccaacttctcatgagataaactttctctgtgacttgaaaaaaaagtccaacctgcagagatcaaggctattaccacttctttcaattcggcccattcatagaactcataaccaagattaattgtggcctttactaccaagagtacttctatactcctgttcgtctgtcgagacacattaccttctaaaagccagttctttcaaaatacctgctcctctaattgacatgaagaggagagtcgatgccatgttgcttgaaattgatgaatgtgagagagatggtcgaaccttctttaaaactagaaatatttggaaaattaggttgatcttgtcatgccagagagtgtatagtgacactagcttccctgacaagtcttggatcatgcgactcgagcaaagtgatgaagatgctcagagtgctactatcatttcgtctcaaactgtgacagaagaagtgacctttgttcaaaatgacacaaaatattcagggagaatgtctgtgttcttagatcggatgacagagaagttacctctgctaggactgcctagagaacgataaggaatcatcaggttgctgacgctccatgttgtgttcttaacttgttatcttgtttctctttattgtaccaacctctggtctttcttttttgcagacaatatgagcttcttggatgctatggcatcttgtttgaacttgaagaggaagattctaatggtgaaggagactaagccttcgacaagggaatggttcaaggcattcctactgcctcgctgtttcatagaagaaggtcagaaagaggggtagaactattgatgtcgctcttcctgctca

SEQ ID NO: 388544 - DNA, 874 bp, Cannabis indica
ccctttttataaaataggttgaacaaactgcctctaaagtccataattgtagtagtgtttataatttagtcattctgagttgtaaatattattttctatatcagggtttcgtgttattgaagcaaactacggagaaatagaaccttagaacctaataaggaggcaaaagaagcgattgtggcaactcggatcaagatcaccagctagttctttcttttccctttttatttttcttgtgtcaatttttgtttcaagtttaattatggatttgcacttagagatcgatatgtaataacaactttcactaatgtgtcgtttaccatgaagggtttatttatatcacagcaatgattattagtagatcagtctaaatcttgagtatacatgaactcctatttgtgttcattgagttctttgattcactcgttaaagtttctcatagaagatgattcttacaacttctgttttgggagcttaataacatgagtgactgggaacatgttatagaataatagaatccaagttttcttaacggatcgaatattagttcccttatagttttaattctatgagtgctaacagttggatccaaatctataatgttcacattgaattaatggtacataaggagccaaaaaataattagaaaggtaaaatgataattttgaccaactctaattatgaactaataaatggagggcaaactacttatattaattatattaatggactacaagtaagaattttgtaaatatgattttatattgttaaagagtacaattccatatttatagtagagtaataatagaattaataaaccagattattctattgatgagatcgataataatcaagtgtttattggagcttcaaa

SEQ ID NO: 388545 - DNA, 2025 bp, Cannabis indica
acactgtaatgagcattgtaattaaataaagtaaaaagtatattgataaaaatatccttaattttattatttttattatttaaagttaaataaaagtaaaaaaaaaaggcaaaatatgtcttttctaactatgtaattaccattacattagttttataatgtaatgagaattacaatatatgatgtaatggtcataattatattgtaaagttattataaaactttaaaagttaaaacaaacaatgtaatgatattaataatttcattacaattctcattccatcaaactaaatatattcttaagtgtgaaacaaaagacaaatatatataattttgtcaacaaaaatatatttatatataatataaataataatttatttggccgacttaattatttttggaatggatgatcacatttttctaaattgaccagtacctcttattaaattcattattacttattagtttaggatcgaaactaatgtagtactgaacaaataaaaaaatggtattggttttgataatcttttaattactattattattattatcattatgcagtgtgtacgtaccatattattattgaaaacagtacatactgtcatgaacttatatatatatataatataatctatgtatagctagagctagctgcactaattttgttcgtggggattgataaaacaaagatagaatagtgttcaaattaatataaaatatatcataataaattttaattatatgtgtatatctagatagaatagaagattaatattaaatgaagttatattatcatatattatatatatagtttatattattattaatttttcttctttacaggttggaactatcatgcaccaactatatatatatgaaaaaccctatattatatgagcatgccccgtacctggactatatattaattaattcgtaattatttatatatatatatattttaacaacaaaatttatatatatgtatatatatttgtgtacaggatggacttttatataaattatcttcaaccctttttttaaaacttattactacataaatttcttaatcgtacgtatatgcattgttacaaaattctattggattttgtatatatatatatatcttaatttgtattttgatatgatttgacataataatacatatgaatatagacacaatctatagatattttcttttaaaaaaaaatatgtcgatacactctcttcactcttgtattaatcattgaattaataattggataaattggatagagtgttataataggtttatatatagtttagggtgctctacttattttggcacagaaaaattttatagcctatttttatattcacgtacgttatagctatttaaaatatattataaaattttgagaattttgaaataatttacaatatagaaaataatgttcaaacagtctattttacacgcgtataaaataaatagtcacgcgtacaacatactgtttgaacgtaatttttggcatattaaacttaatccttaaaattttataggatattttatataactataattaacactaaaaaattattttaaatattaaaatagatatagatatattggtgcattccttttaaagggtgcattatagaattttcctataatttattcattgcctaataaaactatcatttgttgtacattttatattaatatatatgacaagactatagtaggacttagcataaattctctagcggtaggaaatttttttgaccattgattttagatcatgtggtcattaagatataaggtgtatactcttacgataggactgcttgtatacaattaaaactttatacatattataatatatttacttatatatttattttaaaaaataaataatattaataattaatttttaatttaaattattatttttttttcaaaattaatttaaattgttttttatataggtatttattttcaaaaataattttacttcgaaagtttgctatcaatttttttataaccttatt

SEQ ID NO: 388546 - DNA, 671 bp, Cannabis indica
atttcgactctaaagtttgaaatcaaaaagtgttaactttcctattaatttctttttcattaaggctttgatattctatatgttaaaatattcagtaatttaaattaattggatattctaacttttccttcgtatatcttgtattttaataaatctcattcattgaaatctttatagttctattggaaatcatgatttgatttagaaacactattgttcttatgaggaacaatctagttttgttaaaatgatcttgtattttaataagtagtataatcccactaaaatattttattacttctgaatttaattgatggtcatgactattaaaatttaattttaacttttgaaattttccctttttaattatcatatattaagatttaattgtatgaactttttctatcaattgttctcaatcttgatgtggtccaaccacatccattaaaactttatgtatttaaatcatatctcatattgatttaaatagttagttacaatctgttacttttaacagatttaacttctgaatgtttaaatattagttaatttcaattagacatctaattgaatatacatgtttctactgatgattacttaatgaatcattgattatactgttatataaattaacaattaacccaagatctatttgtatataacatagaaca

SEQ ID NO: 388547 - DNA, 1525 bp, Cannabis indica
agagagagagagaaaattgtatttttcaaccctaattgttctttgaaaagtcacacttaattcacttgttttcactttttaataattcattggttgttattctgatatatatcacatataatatggctgaacatcggacaagttgattgagtttcggatccgcgagtttcaagttcacgggtttcgagtccaaaaaaatgaacctaaacccagacccgagataaggtcaggttgggcgggttggcgggttacgggttgaacgagtcaacaagttgacccaatcaactcttttaaaaaaaaatcaaattttatatggtcaaatggttatttcttttactttatttatttactaaattaagtatatataatataaagccttattctttagattaaaagaagaaaagaagtattaatttaaattttaaaccaaagtacaaaagtcaatctaacaaacaaataacttattcatcaaacttcatgctcaggaatcatgataataaaagtacaaactaaaatatttcaaagtctatagtgcataaaaatccaaagtccatagtccatatagtccataaaatccaaagtccatatatatatatgtaaataaatgtattaaaacattcagaaatatatatatatatattgttcaccggtttggcgagcgggttcgggtccaacccgaaactcgatgatcataaaaacctaacatgtgaactcgcctgatagagtactgggttggactcaacccgcttgaacaatttttttaaaaaaattttgtgggttgactaggtcaagtccgggcgggttaaccgggttcgaatcaaatccgctcaaaatgttcagtcctaatatataaggttataaacaaataatatttaatttaattcaaattcaaatatgaatatcatataactgattaacagaaactaattatattcttttatttaaatattattttataattaaatagattatccaataatatatttaattaaataattaaaagataattaattaattttaataataaaataatcatccaaaattgtcatggacctttatatgtcaccctatacgtgtaggctaggccctacaagtgtgccatattttaagatctaaaattaatttctcaattttaccacaaataagatttattatttattttgccaataaattataattaattaattctcattaatctcttatttctctaggattaaaataaatattattttcactaaaataatatatttctactttaatattatttaagaataatattatatttaactaattaatatagttttattaaaaaaaactaaatagttaaatactattcatatacacaattcataattgttataattatttaaaataataatttccacaaattactattttgcccttgagaattatttctcgtacaaattaattctcactcaatttttttttatcaaattaaatcttacacttacttgtatagaggtgacttggggaccatggacctatatttcaaagctccaataaa

SEQ ID NO: 388548 - DNA, 1176 bp, Cannabis indica
ctctctctctctctctcttgcggcttgatgttcattcaccaccgataaagtctcgccttcagaaatggaggccaccataggcctccacgtcgctctctagagtctaggccaccatggcctttgtcgagtttcaaaccacgagctccgaagttctcgtagctctcttcgccgttcagttgccgttaagagctagccatagtagaaatttttggatccgatttagtcgtattcgagatccattgagtaaagcgactttcaaaaacttgttctattcgtaaagatattttagatctagtcgatggttttcgcaagcttcgctgtcgacagttgacggccaccgtgcacggtggaacttcgattagctcggggaccaaagtgtggctggagatggggggtggaaaaggggggttggggtgtgggtgtgggtgtgggtggaggaagaagacaaagttggggtgttgtggttggaggaaaaaaatgatgtggggtggtaggggtggactgctggaggtagaagacgaaggaaaaaaaaaaagaaaaaacgaaaaaaaattatattttaaaatattttttaatttttataatcttttattaaaattattatttaaaccaataatagttcaacacgtgacaattataaataatttaacagatcctttaaatttaggactagcaaacttataaaaaatttgaccttaaaaattattgatgctattttttgaagttaaaaattaatttatatcaaagtaaactttttaagaaattttaccgtaaattttccatattaatattaaaataattagttttagttctagatgactgcccaaacgaaagattcccaaaagcgactttaatcgtgttagaaagcaaaaaggaaggtctctccgacaccttatccaaaaccattgccaaataaccccacaaactcaaccttttttctttttcaatctctctttactgcatttaaattaagggtaaatggcggtaaaaccctcaatactttcgttttggtttcactaaaccctcacaacccaaatttctgcggtaaaccccccaatactcgggttctgttagcaatttaacacttccgtctaaatttagctgttaactgccaggttggattgtccacgtggacacaatatacacgtggcacaattttattggtccacctaaaaa

SEQ ID NO: 388549 - DNA, 1108 bp, Cannabis indica
tattttgaatgctgaaacaggtagggatgcatcagtgcactcctttaattacaatttttcaaaattttaatcttggtaaaaaataaatgaatattacaggaaaattctaatatgcaccctcctaaaaggggtgcaccgatgcgtctctatttgtttcagcatctgagaaatttttttaatctaattttcttttatggtcatgtacgttgtagtcattgaagttatcttgtgaaattttgagtaatttaaaaaattttaatacactaaaaatatggttcaaatagtttgttgcacatgtgactcttttattttataaacgggtgaaatagactatttgaacagtgctttctatattttaaagtattccaaatttctaaaacttttacagaatgtcttaagtaattataacgtacatgactatgaaataaaattagactaaaaaattctcctaaatattaaaacaaataaaaatacatcagtgtacccattttgatgaggatacattataaaagcacttaatattatatttgctgcaatatttattattttgctttaattaatacatacagtaatattttaacatgcaaatgataaaaaaaagtacaaaaagtaaagtatcatgttgtaactaaattaaatatttgaataaatagttaatgaaaaaattattaatatatatatattaaattgtatgatgcatattaagaaaaaaatatttttattaataattaatggtaaaattataattattctcgataaaaatttgatagaagaatagggtaaatagtgacataagtacccaaagttttaagtttgtaagtggcataatcccaaaatttatttttagtagcataactacctaatgtttataaaactgtaatttttctctaattttgtcagtacaagctttattattttcttaaacaggccacatataaagtttagattcttgatcattgggtcaagatagaaacatgtactatcagttacttccaatggttcttttaataaattccgaacggagtctgtaatgacaaaactggaggaaaattacagttttacaaacattgggtacttattgttggaatatgttttaccatgatctaga

SEQ ID NO: 388550 - DNA, 866 bp, Cannabis indica
cgtatgacaaaaaaaaagaataaattgaactcgatgaacttaagagtcaaggtataaatatcctcctcacaatatgaagctcatgcatgttcttctaggagtaaaatgatatttgcaatattaaatacgagacaacatatttctaatatataattgaagatgttaagcttgccaaagtatttaagaatattcctggtattgacattattaataatgataggcttaacttgcttaagcttgctcgtgctcataatctcataaatacaattagtatgttatttgagaaatatggacctaaggcatgcatccaaaagttgacaaatttcttgaggacattacatcaaacaattaagtgtctcgacaactatatgtgacaaaaaataaaaactaagtgaaataggacatatattttatttaaaataaaagcggttgcatgctatttctcacatattcgataaaatatgtgaaatgtggggagtgttcttgtttcataaccgttgtacaaattagatcaaataacttatatatgggacacaacttgatagtacaataaatttagggagaaaattactaattattaaaaaaatatgtcaaatcttatgtgaataaaaaaaataaaagaacaatattctatgatgatatccgtacttttggcacctataaatgatgctcctattgaatatcgtcttaataagcgctagtggtttccaatactattatgaggtgtacttcttacaaataattagtgatttttatataataattattaaatgaaaatatgtatgttgcccctgaattcgcccaaaatacgtggaccagtcgaaatgggacacgtggatcagataacttgtaaatatttgataagt

SEQ ID NO: 388551 - DNA, 924 bp, Cannabis indica
tcaaactacttcctaacatgtcacgcattttcatccccatacttgccataattttgaaaaacatcattggggaccgaagaatgagcaacatactaactttaactatatgatatttttttcttttctctttgatcctataacctacacctttttgatagtcaggtctatgatgtcctactagtttaggcgctctacattgttttcttaattactgtgaacacctttgctaatcaaaggattcgttaaaaaataagattaatttaaaactttaaacaaacttaaactttaatgatttaaaatgatttacataatttttgaatccctttaaaagtttacaactattttcaaaatatattttatacaaaagttgttgtctagcgactaataaaatatgagcctaaactgtccagaagacccgtacactccaagtctaaccatcttaatatgtacaaccttcatccaactctagactcattctagttcagtcttggctctgacctggacatgaaaataatatctgtgagtcgacaaactcagtaagtaaatcataaaacataaacatataactgacagtaaccagatgcccatacacgtacttatatgtctaaaactaggccaggaacgttcttgactaaagtataactaaccccgaatccagcctatacttggtactctagtcgtattgatgtggtagtaaatagttcatactttctgaaaggctagcatatatctgttgatatcttagtgcagctctatgtacacttcacatatatcctgatatgctaatatgatggccactatttttcttagcatatatctattgatatctcagtgcaactctatgtagactccaacaatatcctgatacactaatctaatggcaactaaacatgcccgctaaacatgtatacatatatggatcta

SEQ ID NO: 388552 - DNA, 1573 bp, Cannabis indica
ataatctgaactggaacacttcttgtttgagacacctgggaacctagaggccaggatgacctagtgtgcactcagcaccccaggttgacatattattaacccaaggttcttccaacaccatttctaaagatgtttctcaagtatttttttttgtcttcatccaaaatgatgaataagtgctttcgagaaacaaacgaatcaacttggaggaaagaggacagaccaaaagccccggttgacactgggcttggtcaccaacgcccaagttgacattttgtcaacctaggccatgcatttctatcgacaaatctaacaaagtcttccaagcatattctatgttttcatcaaaaattaagatacgagtgctttcagtaaacaaaatgaagccatttggtggccaataaaaggacccaaggcccaatttaacttggggctagggttccagcccctaagttgacactttgtcagcctgagaagcaaacaagatcatttggggtctaaaataaggatcccagacataggttcacgttggggctagggctaggcctgcaccgaagtcgacactgaacctagcgcgagtgctttcgtcacttagatacaaattttgttatggacattcttcttattttagtccaaaaataggggaggagccctcatgtgctgactaaaatatcatcaaagtaccaatacggctctcggagagcccgaaaaggggtaaccagtgcccaggttgacatgcaacccgacacaggtggtttcaatcctccaatttcaattttgtaagaaaatctatgctagtctccatcgtaaacaaggtgtagcaattatggcaagtctaattcaaactttaatatcctttgtgggatatgctataaccaagaaagagacatggtatagatctgtattggagtctaacatgattacatggtcaaagaaaaccaaggacactaagagtggagtaatcaggttgtgtgttaacaaaaacctcaagaggagacttgaaatgtaaatatggagtagacatcctatttatgagaaagacagcagtcttataggcttcataccaatatttaagtggtaaggaagcatgagaaataagttctaaaccactttcaacaatatgcttatgtttcctctcagcaataccattttgttcatgggtgtgaggacatgaaactctatgaactataccacgttcttgtaaaagattggtaaaagcttggtattctcccccagtcagattgaattttcttattttaaaacctaattgaagctcaacctgtgttttaaaagtaataaagggttgtgaagcctaacacttggttaattctaagcatgtagatccaagtgtgccttgagatcgaaggcatcaacaaagctaatatagtacctgtaaccactagaggaattaataggtgcaacactccataaatcaaaatgaagtaattgcaatagtatagacaattttggaattagaaaagagaagtttgtgatgcttccactacaagaaatgtcactttgccagcacatttttgtgctggcaaaagttggtattgcgctggtaaaataaaat

SEQ ID NO: 388553 - DNA, 3244 bp, Cannabis indica
ttaatatggaaagaatctattgacaagggtaaaagcgataagcgatattaataaatagcaataaacggtgttcctgaaatactcaattcaatttaatttacacaatctaataaaaattttaaaattgtggattaaatgttgattcacatgtaaaattaacagattcaatttaatttttaaatatttatataaatattttaaaaaaattatatatacaattaatattttaataaaaaatataaaattttttcacgtctatacttattgagtaaataattatatattagtgaaaaaataatatactcaaatcctaaaatctattattatatatgagtccatctaattgtattattttgaataaaatattacacactctaaaactactcactatcaccaacagtttccatgtacataattttgttaaaatttacataaaaatcaagaaagcaacttttattataattttacctctataagagtagaataatttttatccctcttttttattttatttatcaaaatacattttgcacactcataaatacctttaaaagaacctttactgcgtcaagagagagaaaaaaaaataatcaataagtgaaaagcaaccaaagaatgaaaaaaaaagaagaaaaaatattctataggaattggtatcatgataaattcaaataaaatcaccatcttgagaaaaccatagaaataggaactacaaaaacttgtattacaccaccaataaaagaaagataatataaaatattgcaaaccattgatccagctatagcaatatcagatgacttaattgtaaaaacaatattatgaaatcagaaaagcaatattatctagatcaatttcaacatatatgaagattaaacagaattgtcaatgcaataagaaatattttagaacttcatattcatgtgtcaaatataatattaataatattttatgtttctgtaatattttagatatgacatacaaccttaaaataactattatgcaattgataagtttctcattgaaaatgaggtattgttggttgttgttgtgttgttggctatgttcacacacaatggatatattgtgaagtcgggttctttcaatttttgttgtatgtaaaagaataggctcggatcgtcctttatcctcaatggttagtaaccttatttcacttggtctttcgattgttgttaagtattttcttggttatattccagcacttgcttcaacttgtgcacaagttcttcatttttgcaatcccttgagatgaattcgccactaatttcataattcacataatttattatttgatcaaactgcccattaaattgtatgagaaatgagattgattttgtttcttgaatttttgaaaaattcaaatatggtcagctaactataagaaaaatgtaaacaaattgaaacgcaacagagcattgaagatacatgtacaacatcagctatatatatagcacatataatgtcaggcatctatttgacaacttaaaaacaactattgagtttcctctatacgagtatgtattgtcaattccgaatcctgacttattacataataatatttttagtagcataattgttaggcaactgataggcatcgtagatacaactatgtatgaacaatttgcttggacatcgttaagaaaaaatttaacaaagtattattacattgatgaacaatgagttgtagtttaagaatatttttgtgagaaagaactttaagaagactatgaatcaacacgaactcaaccaatgttaaaatatgaacacactgactatattggaattttttttgagagccttgtgctggtttgtgtatatgaaagacctgcaaataagactaaaaacagtgtagccttatcattgcgttattattgatgcatcaattatcagggcgtcaataatgcaactacatagaacaataaagacaaaaagaagttgacagatttatgacacgagatgaatgcaaatttagtttatttgtcactattggaattgcataaatctaagaccaaaatttcaaaaaataatgttaatgcaacaattagaaaaaaaaaaatgaaattatacatgatttggattgatcgggaactcgagatctgtttcttaaaaatctacatcttattgatctgtaaattgaattgggaggattagttgtatagaatttgaaagacttttcagggttgagtttaatttcaaattagttttttatgcaaaaacttccatcaatcggtaatggttgattcttggttcgatactttattcttatcatgtgaatttaccagaattaacagtgtatcttaatctaccagtgtcgattcatcattgcgatcctccttcaatcgcaggttgtctctggttctctagtgcgtggaatgtgcagcttcaaaattagagtaagaggtatttttgttaacttttgtttggttgggatgtataaatgttgattaagacagcccataatatatttgtaatattatctcttttttgggttataatagaaaaaaaactttacaattaataccacattatactagttttaaagattgacattatatatttatatatatgttgacctcagattgatcaactgatagtaaagctttatttataattgacaatcaccacatgtaaatgataaaaaaaaaataaagagattgacacaacgtttacagaggttcaacccccttattttacgagtaatgacttactcccccctttagttgtattgattctagagataacactacgcagattataggtttttaccttgtaatttctaactatgactctttttgaatgtcacaatggtaagaactgagtgcatgacagattctgaacaagtgagatgagaaaacaaactaagtgtctagtgcttaggagatcatgtgagagagagagaatgagagtgctctagggtttctaggacttagcattcaggttccttttcacttagcataatgctttttatatagtttaaacttacaaaaaaatctatattcaaataagctaatatcactcaaaaataggagatattactcttttatcatatatttaagttacaaaaataactaactaatattcctaaaagatagatagatagtttgagactgaatccctattttcgtaggttgttggagttttctcgtagctgaaaccgagttgtaacctatccaggatgatggtcgtggaccccatgttggaacttattttactaggatcttagatc

SEQ ID NO: 388554 - DNA, 510 bp, Cannabis indica
tattgttttaatttgaaaaataaaaattgattattattttgtaattgagttattgatttaatttaaaaaattataattggttcactaaataaatgtcttttttataacatatataagagcttttcttattctttattttattttcaccgataattgatggcgataattaactctatatgattgatacttttttcttttcatcataatgagtctcttgattttcttttctatcatcaatctgtccacctagacataaaaaaaaacgttaataaatactgtagaaagagtaatggaggtaggggtgttctaaaatagtcaatccaattcaatccgcatgatttaattcaatccaattcgtaaagtgcggatatccgcacttatgcggattgaattagattggaaaattcaaaatcaactgattgttgacaagtaaaagtaatcgatcaaatccaatctacacatatttatatataaaaaaaaattatatatacaaataacattttaatataa

SEQ ID NO: 388555 - DNA, 511 bp, Cannabis indica
tttttttattatttttattgttatataatgtagataaaattatgagagcagagttgcgaattaatcgtggtgtggtcacaatcgttgtccccagaaagccaagacttgaatgtggttgaaatttgaaccatttaaggaaattatttttattttactaaatttctatctttttttaataaataaataaaaaaaacagttgatgtgaacgttagtgaaagtgactgtcggcaacctaagtgactgccacgtgtaaatataaaacaccccactttctttttgttctatactatttttggatggtttgctcacacaacgtggtgacactcagaatcaataaccttttattattataattataattatttatagggtcctacttattttcattatatgatgtttgagaatctaatgtgattccacctagctagatagtttctctaaggacatcttcaaggataaatattaaatttagtattaaattaatacaaaaataataaaattttaacactaa

SEQ ID NO: 388556 - DNA, 912 bp, Cannabis indica
cgcataccaattttattaaaaagactttcggtattgataggcttaaattattggagcacattcacgtaaatattttagaaaataggtatggtgatgcaattaattctttatttgtattttgtaaactttcctagtttattgtcacttgtcagagtatgtcgcactcccaattaaagtaaaattaaacttgtgttttttttcttttttaatggaaactaaaaataaacttggaattgaaactcctattactatactttctaaagatttatccatggatatcctctcaaacccagttctcttctcagctttggctttggttttaacccttttcacaatccaatttctaagaaagaacaaggcaaagaagaagtacccaccagttgccggaactgtattcaatcagttgctcaacttcaaaagattgcatcattatatgactgatcttgcaaccaattacacaacatataggctcctcagccccttcagaaatgaaatttacacttcggatcctatcaacgtcgaatatattctcaaaaccaattttgagaactatggcaaggtacgttaacaaacaaaacaaaaatacgatttttgggacttaggacagcaaagactaaatcactgatggtgtgttaacaagaacagcaatgaaaatgaactgaaattaagtcaattctttaaggaaaaagttcacaaactttgacacccttttatccattcatgagaagaaaagtaagctgttaaaaaataagaattgtgacatttaaaaaagtaattgtacttgtagagctgcagaaggtgtttattttaaacaggagcataatattttgctcacaaaaactctgctataatattttttaattatatttttcccaaacttttgcagggttcgtacaactacaacattcttaa

SEQ ID NO: 388557 - DNA, 1124 bp, Cannabis indica
tatatagcaaaatgaatttgggaaaaaagtaaaaaaggcaagtgagagataaaggtgatgatgataatgcatccatccatgtgtatgtgctaaaaatggtgtgaagattttcatgtgaaactgaaaccaagaaaagcataatataaattttaacatcatgagatgattgaatgaaagaatgcatgagaaagagagagagagatagttgttatatatataaatatatataaaggtatagtatagaattataaagggctttcaaaaatcagatctttcaatcaaaatcaagctttcactttcacaagaaaacgtgaagagactaaactctcacaagtatagatgatgatgatgatgatgatgccatttttcatatcacttttcatagttggccagagttctttgcctcttttattcgtcctttctataccctttgggctccacttattttgtatttttataccctataataaataaatttaaatgagtaattctcagggtaaatatttaagtttaactttcagttataaataaatatttaagtttaatttttacgataataatacctatgttatatttttgaaactttcgtcggtacctgaagttattatatttaaaattaatattgaataaaacttaatggcctggactaatagagattgtcacgtggtaatttacttgacatttaatagttaagtacctacagaagttccacaattataacttaagtattattgccgttaaaaattaaatttaagtatttatttgcaactaaaagttatttatgccacaaattactcaatttaacttatcctttatctgtgtcgttgtatttcgtttgattatgttagagagttttatattgataatgtgtggaaactaagtaccatagataagatgtatatactcctgtcattgttaattgattttgagatgaaattctttgcatcttacaactctaacatggaatcagagttaaaccaaattttaacgagtattcgatctaaatctaaaaactagtccaaaaagaaaagtcgaaagagtcactttatccggagatagtgagccaaaaaaagagttgttgtgagccaaaagagccactcatgattgagtcgtgcaagattggt

SEQ ID NO: 388558 - DNA, 1573 bp, Cannabis indica
agtgtgggtcactaaatgtttttgttaatttttagtgacacgcattggttgacagtaaaatttaatatttatgttatatgatgtgtgtcactaaaaattatttattttaaaacataaatatatatatagtgacactcattgtgcaactctaaaagtattcagaatcacacaatgcgcgtcactgtatacttaatgaaaaaattatatataaaaaggaatttataaatattaatttaaaaaaaaaattaaaatgaccctaccaatcccacttttttagcctttttttttcttccttactttttaatcagacaaaaaaaaaacaagttataaaagatagggtaaataaaaggacatttcacaaaccctagttttttttattcagttattctttcgctctctctcacctctctcgttttctctctcggctgcatagctttcctctggcgactgggaccaaaaatccaccccgccatcttccctttttggcatctctccgactcgccatcttccctttctggcatctctccgactcgccatctctcctcctcgcctgagacaattattaacctctataaatgcttatcttagatccacaacccctaaacccaaaggtcagcacttgttctcattttcttttctttatttctcaacttttcttatctttatctctctcactctctcgctatctctcttgtgcaggtgacaacattcgagctcgtggacgtcgtcgttgacctcgatcgtccgtgttcgacggagcttggtgtttgacagaggttttcggttcctgtatgtcagagggaaaatggattgatttttttaggtttattttgcttcaataatatttttttagttaattaaaaaaaaacaatttttatttggtgactatgtttttacatgaaatttgttttaattttgggcgagaaatatgtatagatgtttggatttatgggtaaatgtatatttattttttacctgtatgttgactgaggcggtgggatggttcatattcattgaagttgtggctgggatcatggttcacaaaacaccaatgatgtagaggctcttaggacttgtaaatttatttttttgatttcttattttcatgattgataatataatattttccatttagtttctgtatttaaaaaattgctaaaggaaagctatatgacaagagaaattaatatacaaattagcatttattttgatgaatgaaaattaattgtatgtgattttattattatttttttaaaagaaaaaatatgatatatagtgactttaaattgtataacattattattgttatattacattgaaattgtataaaattaattgtatgtgattttattattaataaaaatattattataacattattattgttatattaaattttatttgtatgtaattaataaattattatttataatatataaaatttgaattaaatcaaattaaatattatttttttagaaaaatatttaatatagtggcactttttgtgtgtcactatatctttaagaatattaataaaacagaaaaaaaaaatgatatagtgacacttcatgtg

SEQ ID NO: 388559 - DNA, 1059 bp, Cannabis indica
agttatgcctctccaaaatgggagtgtcccttcaaagcaagagaagtgtatgtcgatcaattgtctcacatgttacatttatatataatctaataaaatttaaagcacgagaattttctacgattcctactaaccttttcatgcaattactttaaattaccaatcaaaacatgttattactagtttaaaagaaaatacatgtcattactagggtgagaaaaaaaaaagattcaaaacaatagtataaatctattaaatgatttttcaaaggaaaatttgaattcctatacttacattacccaataattttttccctaaatgcaaagttattaaaataggtaatatatgaccattttaccaattttcctaaacgacctctctcatttgaaatcagcttctctcttcctctctcttcgtctctctcagccgaacaaaccccaaacccaaaagaaaaaacccatctcagcacacactcggaccggaccaactcgcaaccccaacgctcagcacacactcggaccaactcgcaaccccaacgctcgcaaccccgacccactccgacgaactcgcaaccccgacccactccgaaaatgtcaaaggtatgtggtttttttttgatttttttttagaaagggtttagattgtttgtgaaatattattgtttagatttaagaattttgttgtgaaaatgggattcggatccgtgaaaatgagattcggactgtgaaaatggtgaaaatgggactgtgtggccattcggatctggggaagaagctctgtccgatggttccagcttggtccgatggtccgatgggtcccttggctcgggtccgatggttagatgatagggtccgatggggctggggttagggtgtatgggccgatggtgttatgggccgatgggtccgataggtaccctatcgggccaatcggacccaagttttttttttgttttttaaatataacacaaatattaataaatcaatacaaaataaattaataataataactaaaaaataataaataaattaaaaaaataaaaaataaaaaaaattctac

SEQ ID NO: 388560 - DNA, 1079 bp, Cannabis indica
aaaaaattaaacaaaataatatagaaataaaatttatttatgattttttaagtttattattttttatctatgataatttatcccataatttaaattttttttcttaaaaaatataatataatatatagaaaacttttttttttttccatatttgtgtaaatatgctttccgtaatacttgagtttttgttttaaaaattttacttgcaaacaactttagattcctaattttctcacaaaaaaatattgtttaaactctaatgcagatcgttgtctatggaaacttggcctaatcacctcttactcgacaacaagggcattgcacgttataatttttttttctttttgaaagagcgtacgttcattaactaggaagaaaaaatgggaatcacattaacttcgagccagttcacccactggaaaaatcaaacaacgcttaaaaaaataaaacttataattgttgaaaacattaacttaatctaaaagggcaagagagacatgaaaacaccccagagcacacttaaagtttagaaaaagccaacacagctcggagaaaatagagatattgttgagaattatgggttcatctcaaaaccaattgacaatgattggagtagctcatgtcatttaattcacgtgggacaatgttctgcaatagatatcatcccaattcccaagccattttatgagccgaagagagaacaagaaagatggcttgtacttgggcttccaaagcagtagcagaagtgatgcattgggtgatataggcccaagaatgatcttcattgtttaccatggtggcagcagtaaaaagggaatactttgttggttctatcctggtgattacaggtgcctccctcaagcactgagttcgacatccaaattcatcgtccagggaatattactccttgagcatgacagcaatgcatgcgcttcttccatagaaaccaatcagggggtctgcccttaatcgtggatgtgttaataattggatgaaatcaacaaagctcaaaatcattcactttatacgatggcaacatcaattaattaaccttgggagaagttgaaaaatgtctcttt

SEQ ID NO: 388561 - DNA, 1197 bp, Cannabis indica
ttataatcgtctgttcaatagcataaccgaataattcaagaagaagaagacagaagagcaaaactacttaatgttaatgtgttctttaatttttaaaataatagaaaacttaattaaaaccaagcaaagagaatcagtttatagtagcaacaaagggtggtacttccctttccaacagaggacgagcaacattatgggacgcagcccaagccaccaaattgtgagccactgagttagcagaatggggtagccaaaaagtactactattaaccacaagagaagacaattaaacagatgcaaaaaggaagaagagagctgccaaaccagaatcacagactttttaatggcattaaccaattgaaggcagtccgaaaagaagttggcctccttgcacccccacttcacaacagcgaaaaggcatggcaaatagcaaacaacagggaaacgatgacaactattgacaaacatgagaaaaatagcaaatgatagtaagtattccattcgaggaagatccctcaaccaattctactcatttttattgccaatttttccaccattttcttttctttttaaactcgtgtgagggagaatcttgtgaggataatatatatatgtacaaattaaaatgcagagaaaatgagttcgattaaagcgtgcctaaacacatatcaataaatttgcagaataatatgtcaaagtggactgtaaattacacattattatatcaatcaagaagcacaccaaagtgatctatctaattctagactagaaaggccagttcaaacatacaccaaaacaaattctacttctgtaaaatctcagtggatccatcaaaagtaagaggctagttcaaactcacacgaaagcagagtatttctatatgattatcttgcgcaggttctgcatgtgctttgggttgtgtcctagtataattaagaagcaaactgatgagagacctggtgggcaggaacctcttttgctcaacaatttataactaaaatctttaaaaaagctcataaacccaattattaaacatagattcatttgaattttgttggatttttgagtcagtattagtcaaattgttattttttttaaaaaaaatagctaacgttggatgcagaggtttatttatcgattcatgttctgtgttttcttgttcacaaaaaattttaggaagagatcgatgaaccgctg

SEQ ID NO: 388562 - DNA, 1400 bp, Cannabis indica
ttagtacatgtcaaagttaagggagcaaaaattataattaaatttttatttattatgtgtaataaaacagagtatacttttttatatgtgtttctttagttaatcttttctttatataagaaaatcatgtatatttttttgcgtttaaagtttttttcacaaactaaaaaaacaaagtctcggctcttttttttttaaaaaaaaaataaataaatattttattgtattaaaagagacataaaaaaaaaaaagcaacaaagcatacaagtgattaaataaaaagaagagcactaaatttatgcacccgaattatacagccacaggcaaaataaaataactaaaaatgatatcaaactaaatttaaaccaatctaaaaaaaaaaaagcaaattctcaacggttttgagtttgtttgttatacataaatatatatttaaattaatctttttggtataaaatttattgtgctcattttgttgtttgaaataaaaaatagtaaagaaaatataatagcaaaaattggaaagtttttaatgtattatttaggttaacattagagaaagacaataaaaaagaaaaaacaaaaacaaatccacttgtaacattgaaatcataaataggtgaaatagatgaaaaatgataatatattatttatatttatatatggtaatttggctttgttttaatcgtagaagatgatagtaattttaaatatttctgtcataagaaaaaaaaatgaaaatgaaaacttgaatgtgagcttactaaaaattggagataaaaaaaactgctatacacattatacaaaaatgactatacatgtatttatagttgaaatagaaaaatttgaaagcaaaagtcctataataagcaaacaaatcaaaatcatcagattcaaagtgaaaggctataaaaatactcttatgtataatgaagaatttgcaagtgtccataggttttagtaagaggaatttttaaaaatactattttttaatgttttatttataattttatgtcttaattttttacatttgtaaagttttaaatttataaaaatatattttgttcaataaaaaataaaaaatcaatctcactaaatctataaataaattataaaataacaaaaaacaacttaatttttttttttaatttttggcttatgtagaattttcttttattaatacagcagctcatcaagaattttttctcaagttgtagtcttgaaaggagcattaaatagatggttcaagatataatccaatattactttattcatagaaaagacatataatatattcttaatgaatgagtgaatattggagaactaataatattagggtaaatattattttgaattctgtgttttgcaaaagttactgattagatcatttattttgttaa

SEQ ID NO: 388563 - DNA, 1069 bp, Cannabis indica
tttttttttttttgaaagggaagctttgtagccatttaatttgcttgacttccacaatcaagatataaataattattgctctatgaatctatgtcacataaaaaaaatcatatatatagtgggagtattacttttttatttgattatataatttataagtaagagtgtatttgtttggtacacatgaagagtagtgagccacactttttagtagggcaacaataaaattattttgttaaaagaatattaatgaaaatataatttttatagaggtaaaattaaaacttaaatatatacacatatcggagtgggttcagggcgggaatctattcccccgccctgccctgaacccgactcagatatgaatatttaaatccatacccatcctggccccaaaattcgacccccgcccccactcccaaaattcgacccctgcccctgtcccattaggggccggttgctgcgggtacctaaactcgcgagtataatagtcatccttattaaatactgtattttaatcacaagaaattttttgctgtgactaaaagtcacatttagtcacaaaaaattatgttgtgactaaaaattacgtgggataaaaataaaaaatacaaattttatgaaaataaagtaaaaatatggaagggtataaaaaaaaattaatttcatgtggcaacaaatagaatatttatgagtaaattatagtttaatatgtttatgtgacgatttatatagtagtaagagcatacattggatggttatggattttttttaaaaaaaaaacatcatgtaattttattaatagatatctgctaaaataataatctgcaatctaattgtgatatcttttttgttagaaacacgatcataattagaattaaaaaaatgggtaaaataatcattcgattaattcttagatcttttgacaaaaaaattgaaaataaaatcagattaaaaaattacgcaacatcttacagctcagaagacacaacagtagaaattgttgcagcatattcattcaacctcgtagcttgaacacttaattattgtacaaggtacgtaactgcac

SEQ ID NO: 388564 - DNA, 1121 bp, Cannabis indica
gttgtcgttattatattacatatctaattgatccaacctatacaactcatataattttgtgtctagaatcttaatcctaatccgacctattgtgtttccgtactactaacacatatcatgctcatgtgtcgattatatttagattttgatcacatatttaatttatatgtataaatatatatatatatatatcaatttatttggctcatgtgaataatatagtaaaaatatatttatataaagttgcattttagttgaattgatttattaaataatttataatgaattatatataataaataattttttaatattaagtataaataaatttatttattgagtttttcaaaaagtaatataataagagcttagaaatagtaaaatacaataatagaggagataaaaattttacgtggttcaggcgtcaatgtgccttagtccacaagttagtctattggtcttaataggcttgtatgatatttttacagtgcttatgcatgaaatcctaactctgtactcttagtttcttttgaagaagaaaaaaacttagagtaattttaatagagcttcagctatcttgaattcgatcctcccttcatatggaaatagaagggtatttataggttgaagagcggatatggacacatacctatgaaccgcctaagatttttgcaaaaagcccactaatagggtacaatacatgcaaagagctaattattgggccccttggaagctattgtgctcgtgcgttgaagtagttggatcataggggaccaccattcatacaggatgcatgtcgccaaaaggtttaatcctttaaaagtaaatgtctggaataattttctggataaaaatcgcgtactaccatggcctgtcataggagacaagatctaattgtgtcagaaaagcataattatcgctaggtgttgtgctatagaattagatatacgcaagtgcacgtagtcacaaacaagtaatactatgataagtaaaagagtatcgtctccacagggattgattagaaattaattattcaaaaatcaatattaaacaatttggttaaaacaaccaagaagtgataatttgaactaggctaaaaactaaataagaaagtaaataaa

SEQ ID NO: 388565 - DNA, 867 bp, Cannabis indica
ggacaaggtgaagtccgagctatatccatctccggggagtatggttgctgaggtgagtgtgttacccgatgctaagaaaggtaaggtagtggtggtagatatgtcttctacgggtgtggaaaaagtctccactagtttgaatataaacatgtatgatgaggctgaacttaatgaccacagtaagcaacggctgaataaagcaaacaagggcaagggaattatggttcattcatctcgggatgaactttcttttcgccaagcactccaacaaacatttgaaccactaattaaagcgcaaaaatctaagacatggaaacggctcaactcttctaatggtcgtggctctaaaggtatgtctgagccgggctcttttcttattagcccaaaattatccccatgttatagtggctaatgctaagaataagttaagtcctaaagcgggtggaggtggtaaacgaaaaatggatatagaagttactaatgaaagtgtgaagaagggaaggaaggatgagatttttgaagtggcccccggtgctgtgaatacaatattggcgaagcctgtggagcaggctcgctaggagccatgagtcttttatgttggaatgcccggggcttggggaaccctggtgcgttgactgccttacgagcgattgttcgtaagttttccccaagtttagtttttttgtttgaaactaaactttatggtggttggacggaaggtgtacggcaacagattaaatttgcaaatagttttcatgttgattgtgttgggagaagtggtggtctgttattgttttggaacgatgattgggaggtttctgtgaagtcttatacggctggacacattgatgttggaaattattttac

SEQ ID NO: 388566 - DNA, 1430 bp, Cannabis indica
tttttaaaaaaatattttttaaagcttctttagaagtaataagatgttgattgattaattgatattcaaagatggtaaaagattatgacatatctcattcttttgttcatatctctaaaatgaagcaccataaactttatttttttttattttttattttttttttcgcttttcgacaatttttattatgacaacaacatatgtgctaacaacaaagcttgtctccaattccagttctttcacggtgaaaagcttcacccgctgctcattatttagaagagtaagtaatagtcattttcagtaaatttggattattattcgtgttggtgttattttgttatttttgatatgaaatatagcgggatctaatttttttggtgagatctaggttttttttaatgatatttcaataatttatcaataatatctcgatgacgttttattgatgataagcatactaagattagaaataactcttatcaacatattttcaatagttttgagatagtttttcatactaagataatgtcttgtaattaattagtaatattttataaaaatcatatattaaattatgttaaattcaataattaattgtattaataacaaaataacaccttaaatagtactaaatacaactagtaagtatcacctctcaacattatttctcctagttttattatgcaaaacatcactatttttttatgtgagaaaacatcactaattgaatacaactactactttgatgggctttctaaattttgtattagtgtaaaatttgtaaacaaggaagaagattaggggaacataaaatacaaaatttgaaccatggaacatgagagagagagagagatggatatgatggtggattttggcatatttaatattgtaacatgtcagaaacatgttgtgacatcaaaaccccacaactaagattttgttgaaacattgcccccactattacctacctatgcctaagccacctagttttctcctgggtcaactgagttgactcacccttttcatatctttcaagaccaatgtatattatatatactgagaagcactgttttatcccaaaaataaaatatatttttgtgatgatgaactggcctatttgtacaagtgtgttggccctaatttggttttgttttattagctataatttatttgctttctagctaatgaattctctttatttttaaacatttgtgattctatatgatataattaaggccacctccaatgtgattgcatatatactgatacttatatttttgcacttcattttctcttccaactaatccagcatctgatatgtaaatgtagtgcgttttgctagtccactacaaattaattaccaactgcatttgcgttttttgtattttaaatactattaattttatttttttttaaaaaaaaatttacac

SEQ ID NO: 388567 - DNA, 751 bp, Cannabis indica
acaagaaacacaaggatgtctaaagtgttattggtcgaattaccacacttagtatgttcatttcaaagtctacggataagtgtataccgttcttcattgtgttgcgaggcacaagaattttgaatagactgaagagtgcgaagtagctttcaagaattgaaggagcatttgactcaagctcccattttttctaagcccatggaagtagaagatttgtaatcgtacttggtagtgtctaatcatgctattagtgctgcccttgtccaagaggtagaaagaggtccagttcccggtctattacgtaagcaaaagattgctaggtccagaatgtagatatccaatgatcgagaagttgacaattttcttattgactgtgtctctaaagctgagaccgtacttccaagcacatggcataaaggtactaatgaatcatcccctctgctaggtgtttcacaagctagagtcctccgataggttgctaaaatgtgtaacggaacttagctaatttgatatccagtactagccgtgggtatctattgaaggtaagccctttctgatttcatagtagagtgttctagcctaaataatcttccaaaagatccaatcctggaactgcctacctggaaggtctacatcgacagagcatccaacgaaaagggtgttgggttttatgccctaataaaactcatttcaatataatcagatttacttattaatataggtcagaaataacatttaatgttgcatggtt

SEQ ID NO: 388568 - DNA, 3122 bp, Cannabis indica
gaaggatggggaatccataggctgttgacgctccatgttgtgttcttgacttgttgccttatttctctttgttgtactaacctctagtctttacttttttgtagacaatatgagcttcttggctactatggcatcttgttcaaacttgaagacgaagattttgacaccaaaggaaattgagcctttagcaagggaagtggttaaagacattcatactgcttctgctgctttgaaaaagaagatcaggaaaagcggtagaactactgatgccactcttcctactcaaaaatctagtagggagaagtctaacaatggtggtgctgatgaaagatctccaattaacctctctatggatgattatgaacgtgccactatgaactcaggttcgaacttgatggagtgattgcatgagtaaggtgcctggctccttctgaatagtgaggcactgatcggtgctagggctgagaacattctgttgcagtggttggttagcaccaagcctttgcatacaatttctcaaagatgcttcaccaacatctttgtggtaatagctttgtcttgactctttctaactttagctttcttttcttttattatcacctgacacagttttcttatcttcaagcttgttttggttatgcctacaccatggacaatggacagaagaaggtagtggagcttactaagaagcttggggttactgaagatcatgcagtcgatgtcgaaaaccaggtgactactctgaaggagaatgttatttcttttaagagtgaagtgaccaagtttgaaaaacaatgcccagaaggcatcccaggtcatgttattcaggtcatgaccttgagacacgatctcccaccagatatcattcaacacggagtagtgtcggtttgtcacctagagaagcaaagcattgaggtctaagggttaaatgccattgttgacaattctcatttttggttggcgcctatttacaactttcttaatttggaagagcttctagcagataaaggcgcctctaggaaggtccaatattaggctccccaatatgtgacatggatggaaagctttatcgtcagggactatcaatgccatatttgaggtgcatcactggaactaaaattagtgtcgttatccatgaagttcatggataattctgtagagatcacgcctccggcctgagcctattagagaaaatcctttatcactggtattttttgacccatcatgaagaaggattgtgttgagtatgtttggaagagtgagcaatgccagaagtacgccaaggttccacgtgcaacaccaactaaaatcacactcatgagcagcccttggccttttgcagtttggggcatcgatttggtcggatccctccccaggggaaaatgagaagttaaatacgcaatagtcagggttactactttactaaatgggttgaggcagagtcaatgaacaccgtcaccttaaagaaggccttggactttgtcatcaagaatattgtgtgctgttttggacttccatacaagattgtctctaatgacgggaaacagtttatcaacgaacacttcaccaacttctatgcctaagtacagaattgtaagaagtttctcaattgtagccaggccgcaagctaatgaataagtggaggttgtaaacaaaattttgaaaacaacgttgaagaagaaactccaagcgtgcaaagctcattggccagatgagctttcgcgagttctctgggcctataggaccatagagagaacttcaataggacacacgccatatgtgatgacatacaagtgtaaagaagtaatctcagtagaggccacgatcccctctcactaccgagatacctacgatccttcccagatcactccctgctctaaaaatcatcagatttaaatgaggaactctgagaacagtcacatgttcagctcgaattctactagattaaccccgtgagtggtggtctacatctcagatggaacttttgttacctggatagggttttctctaaaagttcccacatccaccgttcttctcttgttcaagaagtcacacatgtatcttggtcttctaggtcattcttgctctggtcaacctaggtcttatagttgtctccagacgaaggggttgtgaaggcaactctagtgagaattctagaatgaactctgggtcatcttgggacgacacgctatgagagtgttcattcaaagcgttgtaatcactacttccctcaaagtagtcttcaacaagatcataggtgtggagagaatttaattggttgctcaagtttaattcttctctctgaacttgagggaagtactcgtactattgtctatgggcaaagtaatggcacaacttacctctttcatctcgaaaatatttccaagtataaagtagctcattggtcgttacccactggatttcatagcctccaattttgaagtagcatctcctactacttccttcaagttgagcaggaggtccctttccccttatagcgtctctaggtctggtttcttgagaacattgaggaggacttagtggaggaatcctatcgattctctcgttatttcaaggtcattcaacatcaggtggaaagcccattggttggcgccctcgagcttgaaccctcttggactcttgatcgaagttaccctccttctgggaggtctctgcacctggtgtttgcctagtgcctgctcggttactaggtgtagcagtggtgttccaagcattgagggttttttcttagacactagttcccacgtgacgaattggtcaacaaggtatctcttttaccaactcaaaaaaacctcttcgagaagtagttttgtgattagagcaataagcttctctaatctgttgagacatgttagctctttgttgttcctgctcatcgtgttggccttcaatgttcttccagttttccccaaatcagtgttgaaactgttcgtgttgcttatcaagagaattttgtagctgttgtcgcaagtcagccatagtttgactgagctgagtgacctaaggattggtctcctttttgggttttatgccctaaataaaactcatttcaatataatcagattacttattaatatagatcagaaataacatttaatgtt

SEQ ID NO: 388569 - DNA, 1130 bp, Cannabis indica
ctacaagatctaagagaaaataagacttttcaatcattaaatgttcgtccaatagaaacagtagttgctagtggaagtagtacgagggagacctactcatatgtgagggaagaggaagttatcgggagagaggatgaaaagagagagattattcgaatgttggtggaaatggagtttggggaggatgtgtcattcattccaatggtagggattggagggttagggaaaaccacactagctcaatgtgtttttaatgataatagagtcgaaaaacattttgaacaaaaaatgtgggtgtgtgtttctgatgattttgatgtgagattacttgtggggaaaattgtaaattctaatgcttctaacagtctagaaaatttacaaaatgaacttagaagtaagctaagtgaaacgaaatacctgctagtgttggatgatgtttggaatgagaatggtacagaatggaataagttagagacgttgttgaagtgtggggcaaagggtagtagagtcttagtaaccactcgtagtgaaatggtcgctaagataactaagagtaataaagtcaacccaattaaagttgagggtttgagcaaacatatgtcctggtccttattcaaaagaatgacatttaagaatggtaaagagccggaggagggctcaaaagaaatgaagctagggatggaggttgtcgaaaaatgtaagggagttcctttagccataaaaacaataggaagattattgcaggaaaggttaccggaggatggagataaacaaacggagtacttgtcaaggtttttgaatcgtgagtttgcaataatagatcaaaataaaaatgatatcatgcccaccctcaagctaagttatgatcatctcccttcacatttgaagcattgttttgcttagtgtagattgttcccaaaagatcatgaaattgatgtgagggagttgatacaactatggatggcacaaggatttataacatactctgatgacaaaagccaatgtctagaagatattggttacgagtattttaaaattctacattggagatcatttttccaagagccaaaagtaggtgaatttggtgatataatgacatgtaaaatgcatgaccttatgcatgatcttgc

SEQ ID NO: 388570 - DNA, 460 bp, Cannabis indica
gaatttcaatcgacttattaaagaactaattgagtctacaaggaagtattattccagataatgtggagaccatgggcctatgaaatcaagctcccaataagtagattcataatttactaagtaaatttcttgagttattaatttctccagactcaactatagatttagaattgcactcttgattacgtagaacactctgtataccaaatatagctatgctataattatccattgtttcaatctaaataactaatgatgctctatagaaagtttcaattgagcaaggaaaaatttatcgttttacccttccatgaattttagccttaaaatatttttcttcttgtaaatgatatttcaataaactattattgttatcctaatactttatatctattattttcaaaattctatgagtttttcttctcaaaatttgtggtccttggtgttggaaatattttac

SEQ ID NO: 388571 - DNA, 2620 bp, Cannabis indica
  modified_base (45)..(45): a, c, t, g, unknown or other
cctattagtggttttagatatacgactaattttttcgagtttacncgaccaagaaaaacggtaaaacggtgtgccattttttaatacagaaacacaccaaatctcataatttcttcctcaaagtaactaccaaacttaaagataatcacagagcacttaattagggcctaataaacataacccaaacattaaaagcagctataactcagaataacaaaaattaccattgttgaaccttgaacttaaacttgctcaataattcaactagtcctcgaattcaacctaaacaagcttataaaacaaaccaaaaccaactcagaaaataacacaagttaaccccagcttcggacaaaaatctcttcttactcttgcatgcttaaacttaagaaaaatcttcaaaacccaaatagaacggtgttaaagatctacctctagtttgaactacttaaaaaccctgaattgaagctcaaatacacaaaaattgaagaagaaatcctaggctcttgctggttcttttggtcgaataagagagatactaagggattggtttgttcttttggattttgattaacttataaatgatgcaaaatcatataattgattaattctaacataataataatcagctatggagttatctacattctcataaaaggaaaaacttacctcttggacaaaaagattaatttgccctttactccaagtttaaacagtattaaagcttaaaggtaaaatagtcaaataccacaacctcgtctaatctcgatatttccaatatcaaataaatataccccattaaaagaaaggttctaaatcattatcgtgtgactctaatggacaagtcgtcgcatttctatcattaccgagcaaaaatcacaaaaataataaattacatacataacataaataatacatttacaatttaacaaaatctccggaatttaaaaaatataaccctaatgcctacttcttgaaaataggcccacaaaataaaataatcatatatagccatataatataattaattaatgctaattgtcttactaatctatattctaagcatgtggtcattacaatagttatattttcctcctcgggacaaacaccgatgggaaaaatacatgtcttttatagatttcctcgtaagccatcttggtccagtttacaaatcttccaaggtgaccactaggatccttgcaagataccttggtcctgattataaaccttccaagatgatcacaggagcaagtctttggtaaatattgcctctcctcagaaacaataggtataagtttaaacattctcaactaagagtatcatatgagatgaccttctcttaaggaacaactttccttcttttacccaaggttgttggagatactttaacttattacgggtcactttagctgtggtgatatttcaacccgtacctatgtctttcgagaggtgcatggttgaatccgaaccttttaatgcgcggagtcaaatggttagttttgttaattgcaagatttgataagcgtatcatacaatgcacccatttattaattgctctaaatataagtataacgattcattgtaattattcataaaaattaagagatttatcattatattattgggaaaaaagggtaaaaataataaataagaaaaaaaaaaaaaagaagtttactagcttgataaaattaccaaccctacaaagaaacatacattacttataactttaaaactacatttttgtttctttctcatctcaccacattataaagtcacactcacttttcttttcacaactcaacactctttttttcacacaattaacaattgaaactcaaaaaactacaaatttataaatatgaaaataaaaccaatttgagtaaacctccaacataaatgtaatatgaacagctcaattatctcccttatatgcatctagaatagcatagaaggtttgtaagaaggtaagaacaagtgcaacaaaggcagcaatgactgaaataagtgcccaagggtgtttgaaatagtcacgcttaagtattcttcgatacttatgccgacgctgtctacaatactcattaacttcactcgtaagactgtagtaatagttttccttaacataagtatcaatgtagagcctattgaagaatttggtagcatcatcaacattcaaccagttatcaattaccttattcttctcaagtacttgaatatcagcactactgtcgatgagattatccaacagaacagcataacatgtgattatgggcttgtaattgggacaacactgctccaaacttatgaggtttcgaaacactgtttctgtggtttcttgaataagaagtggtggaattgatatgacacctctttttggaatgaatgaaatgtccaatattgactctgaattgttagcctcgaatttgatgccagagtcccttagagcagtagctgtacgtatatgctgccaatcatgaacctcgttactcttttcttttgcaattatattagaattgtaaatcaaagagttcctcaacagatcaagaatgtgttttgtttgtggtattttattatcagaaagattcaagcgaagggatttcttttttataaggctaggaaagaactc

SEQ ID NO: 388572 - DNA, 1149 bp, Cannabis indica
ttttttttggattaatgtgtttataatgaataaatattaaatctattgcttgagatgggtttatatttattttttggatgctcttttttattttttccattggagaataacaagtttggagatgttcatcaatggtagaaacccattttcggatttgtgttttatgggtaatgttttttgtgaaaaatagatgaaatggatgttggaaattgatagagggttagaaatggaagaaaactcccataaaatccgatgaaaacagtggttggatgtgtcaatttcaggtggctctggtttcgggtcctgtcgacccagttcgttgacctgcgcgcccggttccaaggtcagggatgacccgtgccaaacgacgtgtagttcacgtctctaagggtctcgtcgttttttgctgaaacgacacgtcgttttacgaaaataacatgtcgttttctggacaaaaaaaaaatcaggggcacactttggaccctttttttctattttttcactaaaattttactactctataattacatactattttgcacaagattaacatatgggttttattttttttataattgtatttatatttaatcttttgtgaataaatttagttatttgttgacaataattatttcttatttttttgtccgtcttaagaataagcatgtaaattctttggtgatgaggaacatttaaatattaatttatttaaattttgtatcttcctccaaattttattaagatacttataagtaattagttattggttgcttaatatggtgaaaaaaatttattaaatattatgaattacaatttatctatcctttcgatagcaaattaacgtatttgattataatatttaatagattgttcttacctgtgcatgaattctattttgttattttgtctaagaactctagcatacatgatgatcatctgtaaattttgcgatcattcgtttatgaaaaaagagcacaaataacatgattttgttacaacatgcatttaatggttattgctcttgtttctcattcaactttaagcattccaagaacctctgccatgttgacgctgaatggaaccaaccacaagcagtgggttgaatctctcatgctgaatttgactcttatgagagtggacttggccttg

SEQ ID NO: 388573 - DNA, 613 bp, Cannabis indica
aaaaaagatagatttgactaagtgcatacaaagtatagtgccccatacttaagatgacttaagccactgaaagaataccccaactggggcaacgtcccactcccaaagggttttcttcaatcaattagaaaatctctactagatgcagcatcctgcttccaaagagctttctataattgatgatgcttttattttgtttttgatttttgtgatccgaggcggaacacttgcgctatcactttagatttataaacttggacgttatattcttgtgtgagctcaggtatttatatcataatagtacttaactgtagcgtgcaaataatctgtatgtgcggtttgttcaacttaatgaatttaccagcactcgcactttaagattaaaaaactcagttactagggataacgtcaatgtttcattaaaccaaagaaatgctaattcaagtttgcaaaattttttaaatgccacttcaacccttggctcccttcatagacatgagattgattgaaataatacttaaatattgagaaaatataactatgatttgatcatagcctagaatatattttacaagaatttataagcgtcacataaatattgtaacaaaaattt

SEQ ID NO: 388574 - DNA, 1463 bp, Cannabis indica
cgtagtaggaattcaaggattaaaggaagctttggaagaggagctatggtgagccctagaactaatctttctctaagttttgaaagttatgtttaaattatgatttagctactgttttgttagggtttcaattggaattagttttgctagttaggtttgatattctaagcttgattaaactattgttgttggctgattgaagtttgagcaagcttgagttcttggaactcaacttggctcaactatggcataatgtgttttagtgtgttgttcttactgctttcacttggagtttgtcttagaatgatattacaagtatcctggagaatatggttgaatttgggattgaattggtggcatttttgtggagttgggtataacctgcaggagaatcggttaaccgattttacagaatcggttaaccgattcccaggtaggctggaaaaccactcaccagtttgggaatttcggtctgccggttcttgtaggcccagaaccctagtttccatattttactcgaagtttagtgcaatattaggttgtttgtctttaaggctaccattggttataagtttaaggtttcgagaaaagtctactcaaagttatttacctatttacgtatatgtgactagacatccattcaatgcgagattttctatttaggtcgaccaactcacttaaattcagagacgagataagataagcatagaacgtattatatatgctgttatgtttgtgattgtatatgttttgggtgatatcatagcagccaactattgagtcggtttggctctacaggcaccgtattggttaatagtgatattcaccccaaaaagtattaattggcgctattatagcgggacaaccattgtgtcggtttggccgtacagacatcgtacttgttaagagtgatatcttggccaattgtactttcgggtgctattgatgctatcatagcggtacaaacatagtgtcgatctcgcagtgcgattatagtgctggtagtgggtgatatcatggtcaatattaccaactgttaagaacgttcttaaatatctgatagccttgcaaataggtgtatgggcacctaaatgcaagtcgatattatagtatctgttgtatctttttcttattgagtcatttgactcacagattctactttcatgtgtaggtaatgaaaatgcgaaaactgaataggagtgaggatctgagttcgggtgatgattgtacatgttgagacaacgcgacttgaagtgttcggtctcgagacatcttgagatatattttgtagtcgttgtgtgacaagttgtaaaaatattttcaaaatgtttataaaaatttagacacgagatctcaattatgtaatatatatacatatgtatgtttataaagtttattaattttatttaaagttttaacttgacaccatttttgaagaaaaccttttactagcaaggtagttt

SEQ ID NO: 388575 - DNA, 1359 bp, Cannabis indica
atatatataattggctaaatacataaaatgaaactaatgagtcaactatttttgttgaccatgtccttaattatagcaacatgagttaatgatgctcttatagattgtgatcttcttgtttgtccttcaaatgctttgtatatcgcgtcaatcattggaaacacgtactttaataatatatatatatatatatatatatatatatatttatatagaacacatgcacatatattatatagactagttctaataatattataacaaaactactccacttgtaatactatatatagaggtgttgtttattctttttattttcaataagacgatattattggctacaactttctaacatcatttcttgtcgaagacacaacaaccttatttatataaaattctggtaatatatattttattttatttatataaaaaaatatgagtgaagtttcaacactcacccactcatcacttggtcaaatctccactatatcaccaactctaaccaagaaaagagactgaaacgtcctaccatattatatatgccttattatcagttaccctctcctcgtagctagcctgcatataaatatactcacatcacaaaccatttcttgtatcctaagaaacagagaagagagctctagtctagcacaacacaaccaatatattcattattcattcttctttcatctcacctctctctcacacctacacctacatatacaaacgaaactaacacgtaattcgttttatattcattcaaatgggtagtctcggcgactttgagtttccccaaagcaacgctcttttaaacatagccggtcgtgcaagcaatgataacccgctagaccctgaggagttccggcgtcaaggccacatggtgatagatttcatcgccgattactacaaaaacatcgagaaatacccggttcttagccaagtcgaaccgggctacctcaaaaagcggctccccacttcagcccctttctatccggaatccattgagacaattctaggtgacgtcaaggaccacatcgttcccggaataacccactggcagagccccaactactttgcatacttcccttctagcggtagcattgcaggcttccttggagaaatgttagccactggcttcaatgtcgttggattcaactggatgtcgtccccagctgcaaccgagctggagagcatagtcatggattggcttggtcaaatgctcagactccctaagtcatttcttttctctggaaatggaggcggtgtcctacaaggaaccacatgcgaggcaatcttgtgtactctcgttgctgcacgagatcgaactctcagaattattggaaacgacaatattggaaa

SEQ ID NO: 388576 - DNA, 1642 bp, Cannabis indica
aaaaataaaaataattatagaatatataatttttaaaaaacaaattctacttatatttttgtgattaaaatattaaaaaaatgactatccttaaatttaatttgaaatcatatatgaattgatcattgatgagaaaaattaaaataatataatgatgagagaaatattgaaatagtcaattgacgggtagggagtaatgatacggtgggagggttcacatgagtttggtgagatttgattcatcattacacaagtatggctactttttatttttcgagttggatagagtgctaaaagaacagaggatactacttttaaccagtttctcatgattaattgtaacatttttttaaataccatatattattcacacacaatttaagattgtgaaacttgagttggataaatattatagaagtgctaattaaaaccttttattataatcttttagttaatttttacgtatgaaattacatgtcaaaataattttttaaaatttttttttatagttagtattcgttatagttacaatatcatccttgtaaagttttaaaaaattctaaatagtttatattacagaaaacagagttcctgatattccagtttagcacgtgtgtttaaaaacatcaaacgtatttttggcactataaactatttgaaatttttcaaaaatttacagggatggtgttgtaagtataacgaatactgccgtgaaaaaaaattgaaaaaaaaaatatttcgatatgtattttcaggcgtagagattgactaagaggttggcattagcactcctctaaatattatatttggtgtgattttataattaaaaaaaaaaacttagtgtatatttgtcatacattattcatgtgggagtgtcaataatatgtggtatttatgctactaaactataactctacaataacattttaataattgaataaaggctatatttaatttgattttattaaaaaaaaaagtgtaacaatttttttaatcaattttgaaagaggggccacctcacaatcagcacacaatttgtcattttcaaaattcgaaaaatattaaatgatgtcaatagtgtccaatctatatatatatatataaatatatatatatatatatatatatttagagaagagcattgctattaggcaccagtggtgtctaacaccctcttatgtgtcaatatcgctattggtccaactaagtatcgggtctcatatagtttaatataatagcttttagggagtatcgctagctaatcgcaacgcgacatgtcgcaaaggtactagacatgtgtatcattgtatcttgtatttgtatcttgtattcgagacgttgttggctcgcattatagtattaaagttattcaggtgagcgactggattcgtagtcctatcttactacgagacgtgtggatttatgaaattgctcggtctcctcatggttcttgaacctcggggtcccctggcttactccaggatcaggttgattctgagtataagttccttgatttgccctagccgctgcagcctctctttccaactcagcatttcgtcgattagattcggctaagcgttgccggagttgtctattttctaattccactaatggtacatacctagttggatcatatgcatcc

SEQ ID NO: 388577 - DNA, 1073 bp, Cannabis indica
gattggatcggttgagtccaaatccattagatgtgatccaataacaccctttttatatatatatatatatatatatattatattattttctagcaaacatagtattaattcttttagttaattaataatataatatacatatgcagtgcacagatataaaaatagcaaaaacttaaccacataattatatatcagcaaatttccaattttgtatatttgtaattaattattaaattgtgtgtgtgtctgtaaaattgatgcaccaactctaaagagtaaagaactaatttgtgtattgggaataaaatcgagttggaatggctgtggatttatatcaaaacctaattaataataatctggaaagtggaaaaagctactttataatcttaattatgagtgtatataaataagaaaataatgataatgattaagtaaaagttataatattctcctggctagctaattctttctttattctataaattatatattccttttttcttcatctaaaatgctaattattatatatcaataattatcgtgcatccaaattctatcttctacttccttcttagtactgaataagaagtttataacaattacaattaattaatcatttgatttttctgatgagcaatcttagtctacctcctcttatattattaattaatcattgtaatttaaagttgacatgttcaacaatttagactcttctagctaaaacaagatcactctcatttctttttcatgatttttaatgttacacattggtgccgtataagtaagaaaaattgtgtgcatgcatatataaatttattttatatatatatactaattactctatctatctaagaatattctctattcaaaaataaatctaatttattataaaaaaaattaagataataagtaaaaaaagttgtgtgcatatatgcatacatgtatattataatatcagggttggccctacagtataatagatgatagaaaaaaaaaatatttctggatttttatttaaaaaataatgtaatattttttaaaattaataaaaaatatatataatttttttaact

SEQ ID NO: 388578 - DNA, 1244 bp, Cannabis indica
agagcttatataagcatatttatgaccaaagctacaaaagttaaggggttgatcgaagaaggaaggctgaccgcaatacttggggcattaagccagtcggagagttgtggaaggacatcaaaaggctgatcgtggggtcaatggctgaattttaggatcaagcagatggattcattaagcttgaagaagatattcggcgcgtggatactgttggacaaaagaaaggccagcaacatcccaccccggcaagaacatccgttaagaatccacactaccctagaatttcaaatttaaatgggaagagatctaataacgctaacaggcagggtaatagaaagaaagtcatatttactagaaatgccaaacaacaccccatggaaaatgcctcaaaatttacttccttctcaatcctgacaaacgacctagagacaatctacgtgacaactcagtctatggtcctgtacaagaaaccatctcccatgaagaaggatgtaagtaaaagagatacatccaaacttttatcgttttcatgcgggctacagccaagacaagaatgaatgtaataatctaaaatgggaaattgaatttttgatcagaaagaataatttgcatttataaaagtatgtcaaggctgaccagaactaaaaagccgcccaaggagacattaacaagaaccagttgatgcctccacccgtggacaggcatttacaagtcattattgggggtccacatatttcttaagactcaggcaaagatcgagaaaagtatgcccgagctttacagtatgagcaaaatgaaacagttcgtgccgtggaggagaggaagccaaaaataccacatctaggggagccaacaataaccttcactgaagcagatgccagtcacgtccatttcctgcacaatgacctcctagtcatagaagtgaaaattgcaaataagactttggcacatactatgatagacaatggagcttcctcaaacatcgtgtttaaaacaacttatgagaaaatgggactccggcttaaagatctgacccccctacacccagcttgtatatggtttctccagccagagcgttggagtctgggaaaaatctacgtacccgttactgttggacaagctccgaggagcataactgtgatggcacaattcttgataattgatgttccattcgcttttaacgtcatgttaagccgattggccctatatgacttaaaagttgttacatcagttttccacctgtg

SEQ ID NO: 388579 - DNA, 959 bp, Cannabis indica
ctaaaaaaaaaagtttacaatgaattctgatctgccttaattagagggtgcaattcatgtttattaatataattaataatattgtaataagatgggacatgcatagctagcaagactaatcgaaaaaaatcaatattcaaagctaacaaggccttgtgaggtaaaacaaaactgatggtgcgatctattgtagtaatgtagaactgtaatatatatacctattaatatatttataataaataattgttatgtgatcttgtcttgttgttcaaatcctgtactagcgatcatgtttcaaaacgtacggatatatagcttcaacttattactatatatgcacgtaaatatacatgttggatctgttagacggataatatattagaacagtaataagactgtattattgaagacaattaggacagtacttatccacatgcccacacacatgcataatactaatttcagtatgtataaccataattaatatatattttctcgcaaagtaccattttaatatatttatataaataaatttgtagaaaataagaagggatcctatgcaataaattgactaattacaaattttcattaattaattatgtatatcttgcaaagtacaatatgtatatggtagttatggttataagtttcgtcattccagaaactagttgttactccggaaagaagttacacgaagtttggtgtccatcactggaagctttgttcaagaatttgtggtcagttcagatggttaggcgtgagcatgggttgggttggccgggttgaggctattttaatgacccaacccaataacatcggcctagaaattttcaacctaatgacatcctgaattttttctaacccaacccattttttccttttatgggttgggttgggttgggttacaacccttatgtcatataaaaaaaaaatcagattttcataaaagttcaaacata

SEQ ID NO: 388580 - DNA, 1587 bp, Cannabis indica
aaaaaagacaacttcctgtaactgtaagatttaattaatcgtaaatatcaccaaacattaacaaataagaattcttcaaattcaataaatttatttaattaaaagttattactagtagagatattttggtaattttggagttagagtattccagaaaatttatatttataaactgcttttttactttctaatttaaaaaaatcagaattaaaattttgaaaattttaaaaattataaaaaaccacttaaaattttttaaacatatatttttttcttaattatagttaatttatattttttcacccgaaccctaaccaagacttagattcggacccggaccccgaacgtgaacccaaacctggacttggactcgaacttgaacccaaactcgaccccaaacttggacctaacccaaacccgaatctaaacctgaaaccgaacccaaagcccggctctaaacctcgggccccagacctagaccccaaaccgagatgcgtaccttggcccgggacccagaccctatacctaggcccgaacatagactcgtacacgaaccccggaccctggcgtggaactcagacccgaacttcggcccgaacccaaacttggacctagacccaaaccccagcctctagcctaggactcggaccccgacctaggacccgaactcggactcgaatcctagacccagaattgacttaaataaaaataaaaatgaaaaatgaaatttacgtaacacacttgtattttttgtttttaaaattaaaaaataaaagtttgtcacaaaacacatatttgtttttcaaaaataaaaaatctatttttacttttgtgatataaaaaattgaaaaacaaaagtgctactaaacctcacttataaaaagaaatgaaaataataaatgacaaaggtagctcttttgataaattttgtggtgatcatctaaagaatggtaaatggtgaacgagagagaaagagaaaaggttagaggattaattttggggaaaaaattaaaatataacatattttttagagggtgagattttttatatttgtgttaaataaagtatacataaagtatagaaatccaaattttccaattatattaatcatgatttttttttttttgaaaaaattaaactaaaatgaatatatttattataataatacatttatatatccaatatatattttacatgtaattacatatattatattaaatgtgattatataataaaaagtggtgatttttttttaaaaaaaatattacaattcaaatttaaactcactataaatatctctcttatcttttatcttatatttaatgtagctatataacttaatgtattttttcaacattgcaattcaaatttaaactcattgtacatatttaaaaactatatttctattatcaattttttactcaattcacatatctaaaaaatatcattatatcattgttttctttttaaaacaaataaatagacaaaaaaaatgttgatgcttcataaagaattgctattgtgatgtcattaaatattgcaattacaaaaaaaaaatatatatatttctattattatttaaaaaaa

SEQ ID NO: 388581 - DNA, 952 bp, Cannabis indica
tttttctttgggactggagatgtagagtaactttttcctttacctctaagtttaatttagggttttggtttttatgtttttagttttggaggagtaatttttagtttgttgagagcttctcttttgtatttgttttttttaatcttctttttgtgaggaaatggaatattgtaaagctaaaagcttagatcatatagtgtaaagatatacatattattcactatacttgatttcattaagccattttcagaaagccatgaagaaaatttgaattgggtgagcatgttgttgctttaaccattcattcctttgaacatgaaaagtatatatatatctcaatgacaataatacacataaaagaaatatatatatacaaatacaaatagtagaaacctaaagtcgatatccattttgcccatctttggctgcatacgttctcgttgcttttgcttcaacttcttactatcctctttttctatgtaagctgttgaaaatagttggtgcaaaaaatagaaatgaactaatttatcgaattaaaacttgggttgaatcgcggactagatcactccttttaagacatttgtggtactgttcataattgtgcaagtagactgttagtctcgtcatctcaggataaaacaacacagtcaaatacactgtatcgaaactctattacattatagaaaaccgtcaaaatatcacactcaaaaaacgtacaactgctcgttatatatcatatatgttttttcaataagaaagggagatatctttctcccgttaattctaatgcattatataggcaatgcacataaagtagtaacggaaagaaacacgttactgaagggaatgttagaacgtgggatagcgtggaatcgaggtaatgatgctaaaaataaaaaaaaattatgtttaccaattaattaaacacgtaaaaattgttttaattaattaa

SEQ ID NO: 388582 - DNA, 627 bp, Cannabis indica
gccagccacaaatgttaggggcaaaaatttttttggataaaatggcactgataaataaaatataatattttttattaaaaaattcaaattttatagaggcaaaattagatacatgagaagaaatataaagcatgtgaagaaaaaaatgaaaagtataaatttattatgacaaaattataaaatgtgatgacaaaactagaaaaaattaaatttattgaggcaaaaatgtaaatacataaaaaaagttatataaaaaaggaattataaaaagttgagtggggttatgtgcccccacataactcatattcttctgccagtactaatacaaaactcactcactactgacctatttaaaattagttaataatttaacatatcattaatatattaatgatctgacatatttaaaaaaaaattctatttataaacaaaaacaagttattcaggatgtgtcgtgtcaacttgcttataaatagattgcgtttgaattttatttttgacataattaccaaataagttgtattcgaatcaagcatatgcttataagttgtatcttaatatgatgtgaatgactttcgaatacgaattaccacccttaccaagaatactaaaataaaaaaaaaaaaa

SEQ ID NO: 388583 - DNA, 531 bp, Cannabis indica
gtaatttaaaataaaaataatatgaaattcaataatataatttttatcaaaattaataaattgaatgaaagtaaactaattattattaattataatttcagtggaattttataaaacacttgctgaaaaggttgttctagtatattttcaatctatttcggtattttagagattttttagtataaatatttttatgattatgtactttgtaattatttacactaatactaaaaaaggatttctcgactatttaaaaaaattgggtaatgttattgtcatcggtctctataattaacgctcagggccgaccatagggtgggactaggcctcaggccctacaattttggagaccctaaaaattaaaatttatattatatatgtatagaaataaaatataatatataaattttagtttaatatattgcaatattgtagtacaagtcattagttaaaacttaaaatgtacatattgatgttgggttcttaggttcaatcctcgccattgtcattttgggttttttttttaaaaaa

SEQ ID NO: 388584 - DNA, 1814 bp, Cannabis indica
gaggttatagtttatctaatatgtgtaaaaatgtataatttaagataagaatatctcacgtacaataaactatttaaatcttattttaaacgtattaaatattttcaaatctcttcaaattttacaaaatattttctataagtaaaccactataaaaaaaattatataacaacaacatataaggtatctcttttcaagggtgcataggagaagctatcactttctaactaaaaatgacaccttaaccaaagtaccaaatttactaatatttttctccaaaataaagtacaaaactctacttcacctttttcaactctctctctctctcttgacttcttagcttccactctgtgtctgtcttacaattttgtgagctgtaatgggagaaacccaagaaatcacactgacccagatgaggaaatcggttgagaagcttggttcttccactgaggtaattaaagatcaaacctttttcacaacccaacaacatatgagttctcatatatggctaatttatttgttttggatcttaaattgcattttgttgtacttatgtctcgtttttttttttttttttttgtttggaggcagaaacatggtgatccaacactgatgagattcttaattgcgagatcaatggacccaaataaagcggcaaagatgtatgttcagtggcagaaatggagggcttctcttgttccaaatgatttcatttctgactctgaagtaacagaagagttagcagccaaaaagatttatttgcagagcttatcaaacaagggtttcccagtgttcatatgtgaagggagcaagcattttccttctaaagaccagcttcaattcaaaagtaatacatgattcatttcttttgacaatttcatcacattgcattcactagcaatgggtatttagcaatattctataatagttattaaattagagcattgttattgggtaccagtaatgtctaacattttctagacgtgttaccagtaatgtctaacactttctagacgtgttgccttgaaattagttaaagataagcaccaaatgctttctattaaattatggagcattgctattgggcacttgtggtgctgagcaccacctttcataggtggagtcctacgatcggttagcggtactccctaaaagttattttattaagttaaatgagactcgatacttaattacactaatagcgatatgacaccgaaggaaggtgctagacaccaatagtaatttttagtatttttctattaaatcatgtacacttaattaatctaatacccttataacatgccttttagaatatttctttcattgatgccttttgataaaagtttgtccaattagtggtgggaccattattgaatatgtcaacaacaaaatagttcacatggtagaattaatgatttaggtactttggttatattatagtgtcatacttcctttattacttgttatgtggcacctaaccatataataagggacctcaccttaatgttttgtgctgattttgtttggtcagtttgagtaaaatttatattcaaagaggtcagcttatatgatcttacttgtctttttatatcatataaatttagtgtagtctgcacacacaatttcataagacttgtcacataagtgtgtgtaatcttaaggtgtaatttgtatgtgcacgtatcattactcataaatttatggctaattagaatttttgtcccctgaactttgacatgtaccaaatcatatcctctgaacttttaaggttgttaaaaattcccccggaactattcagattgttggatttaagg

SEQ ID NO: 388585 - DNA, 1419 bp, Cannabis indica
ctaaataaataaaaaccctcttcactctcatcaagatattagacacgctcaactttcttcttttctcattttcttaatagcacccactcctcctcccaccatcactactcaccaacaatagttctcttttctattttcttcttctcaacttctttctcttttttctaacctaaacgggtttgctcttcttcgaacccagccacgatttgttgttggttttttcctctaacccacttcaacgccgatcttgaacccaggcccccgtgctatcgttgttgtcatttgtagtcaccaccgacagtgtgggtcgtcccaccaccgacctcagatccctcccccgattctcactcccttatttcttctcgatctacttggatagttggtaatttttcaaaattttatatttatttttctgtattttgccctaatttttcaaaattttaaaggatttttatttgacttaggaaaaatagggattgttgtgtgatgttgtggtgtggaaattttcttattcttactatgattatctctttgatgttatgatggtggtgataatgatgtgatggtagtagttatggtggcagtagtggcgcctcactctgtcaatctcattctctctctctgtagctttaacgatcaaagatggtttttttattttaacatttttgttaaaattggatcatgtggtggtggtgataatttgattcttagttttagtttctctaaactaacaattaacaagcttctagcattatgtttagaggataactatatgtttcagattagtttactggtgatataatatgctctattttggtaaagttccttgaactgctagtgtgaattgggcaagatgtctacttaaatgaggcatgcattcttttaagacttgtatatattttaactgagtgccttgtgagtattactaaatttgtatcatacatatatatttatataatacatattaatgtgctaggcaattgtaataatggttttgatttttgtagatcggtatatttcttaatgtttttcgttcgattgtatattttaattttatatctaaatttataatttaattttatattagtattatttaataaaatactatatttggtattgacttgtatcaatagattgtattaaattataatatattttcaataaactcgaccccaatactaattacaagtcgagtccgagttcgagtctaggtcccgagtctaggttagggtttgggtccggtatctaggtctgggtccgggtcaaggtctaggtcccggatcttgggtcccgggtctcaagtcctaggttcggattcaagttttgggtctcgatcctgcttcgggttcagggtccgattttgggtcctgggtccccattcctaggttcgggtttgggttccagttcgggtccgagtcc

SEQ ID NO: 388586 - DNA, 1332 bp, Cannabis indica
ttttttttttagaaagaaaaaagaagaataagatttttaaaaatgaaatagggtgaacttagatatgagtgtaattggaagattttttttttaacccattggaagatttcatttaaagtataatacttttgtttcgatattagttaaaattgttcccaaatatcaatatttcataatagaaaaaatatatcaagtatatgtaaagaattaggcggattgatttggttgaacctctagcgagaattataaaaattgtgactaaactggagaattattagcagttcagattgaccaaaccattgacaatgaattcatttggtctggtttcgaatgcttttggtccagattgattgtgattttgaactacagattacaaattctatgaacaaccctaataaaaacttcattaagcagccaaattgactaacacaatagactgaagggcaaccgaagcaataccctaggtaaaatttcaacctgaccataaatgggaatcctaagcaagataatgtatgactctattagtagatcgtttcacaaaataaatttgaacattaacaagagaagataataacaatttacaattaaaaatcactaaagtaaacacaaaaggcatctggatcgaactatccaaagtttgaagagcctgaagacaatcagtcgtctccaccacgtacaatatctttccaattcttccttttgatccaacttaatgccttctttatgtcaatgatctttgctgactcgagttggacacaacctattttatttattgtgaaagcctcaaccaatcaaccatggtgatctcgaacaattataccagctccagctttattctctgttagtgctaatcttaaggttttacttctgttgcctcaaggacaacgtatcctataaggttgacggatagtgctttgcatcaagctgttagagtgtttggtcaatttctcttttttttaaaaggaatatgtgagtaatttagttttttcttattgttgtaaagttttttagctatgttttttttaagagctagataaaaaattttggttgagcttcggtaccgtataatcatgttgtgctcatgttcatcttcttggaatatttttaggagtgttatgtaaaacgtcacttcactttgaaatttcacacatttcaaatgagacaaataaaatttttctatggcaaatctcttttttactttctatagctgaattatacatatatagaaggggtaagttgaaaaatgcctcttttattgatcaattaaccaaatttgcctctaattttatatttatttgaaacatacctctttttatatgtattgtacccaaa

SEQ ID NO: 388587 - DNA, 1072 bp, Cannabis indica
aataaaagtgaacaataaaaaaaggatataaagtgtaattccttcccaaacaaaagaaaagaatataaaagaacattcacaaaatgataaaaagtagtttagtagttgataattattttttattatataaactaaatatatttatagtaataaaaaaataaaaaatgaaaaatagtgtaatttcctccacctatttttctatataaatatatgaaattttttatagtaaatctcttaaagggtcgtggaagattttctatttattttggtatctaaaaaattattttaatttaatttttttttcatgatcgtgtatgttgtaattacttaaaattaactgtaaatttttagaaaagtttggatagttaaaatgctgaaaataatatttagacagttacttacctgcgtataagaaaaaaaacagtcgagcatacatcaaaatatgtaagacttgttttcaacattgtaaattactcagaattttttgaaaatttacaagtggtcttaagacttaaatagttataacatacgcaatcatgaaaaaaaattaaactaaaaaattctcttaaataccaaacaaataaaagatctaccaaaacataatgtactatatttattttttaaaaaaggtacattaggaagggacatttaagattacatgtacattgcaccatagtgagttagatatgattagattagattagatgcttccatcttctttccttcttcactgaaagggacagttgagatttgtctgattgggccgacggaagtcggtttcagagttcactgggcccatttgtgtggattaaagataagcccaatattagggtccaccttctttgttttcaataaagatatggttggtagtgtagtagtagtacttagtcgttgagtcttctcatgggcctcattcacttaagtttccatatctgacagatctactttagttacttaaaaattactatattttaatattcatatagggaaatttgaattaatatgcttaaattacctaataatttttcccctaaatgcaaagttagtaaaattggtcatatatgaccacttt

SEQ ID NO: 388588 - DNA, 2225 bp, Cannabis indica
tagagaaattacctggcctagcagaagcatttgagacattggcaacattattctttaaaccatcaaccacaggggtatgaacagaggatgaaagttttccttgagaagccagatcaagaacaactttagaagagaagttgttcagttgtgaagattgcgaaggcagagtttgaactaagttgtcattagagaccataatgcctttgccctcttcacgagtggtgattgagggtggcaaagcaggaggttgtctagtttgagggatgatagggttaattgtgttgcgagtaaggcatgtaataaaaggccaaggtcttgctttagagaaatcttgcctgtatcaattgtatcctgaactaggcagagccgatccttccatccaaggtccataagggagatcaaggtctccaccttcatcaatcttttcaaaaaaaaaaaaaataaggacaatttgtcaaaaacataggcctataataccacatttatattagaaatctagtagtctttcgtaacgatattcaagccatagttcatcagctatccatgtaacagtttttcccctctaagcagaggcttggagacatctatggcagctctgatccttagaaaaagaccccatccttcattgagagagtcctcatgaacatcaatgaatgatccgatcagattactaataacttgtgcaagagtttcagatttacttaaaaacggctgacgatagacttgtatctagaaaaaagtagtggtgtatgcttccattgaagcattctacagaacacttgggaggcaaagaatcatatgttggttatggaaatgccatggttttttggacagaactcttctaagatctccttcacagccaaaggagaccatatatcaaatctttgtttccattgagtagtgatgaaattgttgaattcctttgggttgtagccttttttggaaaaaaaaccctgcaaataagttggtgggaaacaaggcgtggcggaggaataccaatgttagtaagattaataacttcacgctctctaactgagagtgcattggacaaatcgggatgaaaggaatccatgaagaaaactaagaaattgaaaaaggactaaaggaaagtaatggagagataaagaaaaggcaggtgatagtcaatagaaataatgaaataaagattgaggagcagttatctacggtggagtatggtgactagagaagttatggacggtggataaagaagttatgggtggagtggaaataaacgtgtcaataaacagtttaaaaagataaaagagaattaactgccacagaacaaacatcaagggcaaacaatgcttaatttcctttgtaactcatatggaataactcattaattacgtgagtaccagagtatatttgtaacctgtagactgtaaggtcttaagtgaggagctaatatacaaactgatacttaacatattaacgagaaaatatatgtcgctgaatgcaagtgaggcatcaaagacagtatacattggaggacaaaaacaatatatatcaattgcaaaagtccttagtatacaaactaaatgctactaacgtatcggctcaagactaagtaagcgaggtgcctatctcgttatgggaagacttcatataacttcatcccgttagcatcagcaaggctcacaatcctggcgagccagaggatgacattcaaatgagcctcgaagaactctttaagaaccgtggtcattacaatacatgcatcgacgaccccggaagaaaaatggtcccaaattgctattgagatcagtggaaccaaccttctgtcgagacatctccagatacaacaattaaagacgtgtttaatacacgattgttttgagccagtaaaagcgggaaaatcacagctatatgatttttaaaatcataaaccgcatttacactacgtgatatgtaatcaaatcccacgattttagggatgattgttgtaaacatattacaatcaactttataattaacagtccactatgtaattataaatagtggcagataagatcaaaaaagggacaaaaaaactcataaaagagaggccctgaaaaacaatcagaaatctaaataagattgactcgtggactatgcagaattttaactgtaaaaccatgtaaaaaactctgtgttcatatcttcactttttaaagcttttactttttcagtgtggaattacaccgtgaggctcaaatttggttaac

SEQ ID NO: 388589 - DNA, 997 bp, Cannabis indica
gccagaatgtgggccctcttggacaagacaagatggaagaaggaccttctcaaccctcaagaattcaaaaataaaagaactgggagctaagccctatccggctcccttcaaaaagtcccttagggaaatcctagagctaattcgaaaaggaacaaaaagacttgagatccgcaaaaagtttgttccgatctcccttaagggaaagactagtcgtcaggatcggggagatcagaggagcatattcataaaccaagagcctggggaaagaaagggaaaaagccaaaaggaccatccagtcaatttaaggcagaaaatcaatgccaaagactgaaacctcaagactctcttagaacaaaaaaaaagccatacaaatttcaagcaacactttaaatgaaggaatcttggctgaactcgctattctccaaaaggacatagctaaagtctcgcaaaggcaaaagggagatgattcagtatatgactgcgaagaccaggagccttgcgccagcaatgtacttgaagcagagctcaaaagaactttaaaattcctgaaatgactctatatacaggagacacagaccccagtgatcacttgtcaaggtttaatcgggtaatgacagtcatgagagttagtaatgacacaaaaggcttgtatttcccgttgacatttgggggatccactgaagaatggttcaagaagctaaagcctagatccatggactgttagaacaactgcaagttaatttcaaaaggcagtttgtagcagccagaaagattaatctttaagttagtgttgtgactaacatcaacaaactactagtggagacattggaaaacttcatcaaaagattcaaggaagaggcctccaaaaccaagaaagtggatgattgacaataattagcattgtaataagctggtatccagacgggaactccctgttgagttttctgtcctaaataaaacccatttcaatataatcagatttactaattaataaaag

SEQ ID NO: 388590 - DNA, 983 bp, Cannabis indica
ttcctagagaattcgagagagagtgtgtgtggaaagggagtgatttattttttaggtttcttctaaattaagtaaaaattagtaatatatgaaaatttaatttaaaatctaattattatcctcaaaataagttcacaaaaagacaaataaaaaaccttagcaaaatgactattttgtccctatacataacccaaaggtttagtgataaccaagggtaatttggtcatttatagaccccaacaatttcttaatactttcaatgtctaataataatgtcccgctatctataacattctaaaccatatgaaagcgtgactctctattgacccagcatcgcgttccaccgctgccgaacacaattacgaaaaaataagaaattcacataaatagcataatagatatatattgaatttcaaacatctccacaaatataaaatcattaataataattaaatcacataaataaaccctaattatttaatgatccaacgtattaaacttaggcggtctttacaaaaagaactcaatattaaattattcttcaacaattaacactatatatcacataaaatataaaaaaaactaactttcctctatatacatataaaattaagaaattgagattcagtaacatatcttgatccttctactagctctccaattgactaatcccaaatcctagcttgactcttaacaaaaattggagggaaatgaagaagaaaaatttagtttttccaagtgtggggttcacccgagaggtggaacaaggaaaaggagagagagggtttgatttccaaatagatgcttctaagttattctaacttaatcctagaaaaaaataatgtgtatctacaaactaagagcatctccaaggaaacatcaaatttgttgttacagtatcactaaatttggtgtcaaaaagtatttctactccaaccataacaccaaaaattacactaaaaataatattccttattattata

SEQ ID NO: 388591 - DNA, 1030 bp, Cannabis indica
agagaggaaatatataattaataagtttacatcttaatcaatatttataagagagaaaatttatctacttagttgaaaaagattataacatacaagagccatgtgagtgtagaacataatggaatggtaaatagttgtagtatttttctaataatatgaatggtctatttggacacgccattaacaattggacttagcccattgaacctcaaacactctataatccaataactaagcccaattctacataaagtccagttatgcatagagtgagtatagaatatgatcttttagtttggtgtcgctggttggattttcttaattctctagaactactggttcaaccttagttagtagtaaagatagaattggagaaggtgctcttataattttggtagaaatataaagtaatgtgatatgatgtgaatataaaaggaatatgacataacctttaatttataaatatatatatatatgtctatatttaaaatagagatatttatatggagttcataacattcaaggtacttaattagttactttgttcttattcaactgaacacaatcaattagcaaagatagaaaagagactcaaaagcacaatattttgactcatatcaaccttaatctatatataaatatatatatatatatatattagaataaagttattaagtgaggagggggttgagtcccaagtaagtaccaactatcaaaatcatcccaaacttgatttttacacaaagaatataacaaaagtagacagtaatcacatcagactagatcattgtcttcttagataaagctaagactgatgaacatttttcaaatacaatgaaagaacattatttattttataaaatgattaatggttgagtagtaacaatgaaatctgaagcacatatcatcgatcctctgattaaaagttgtttctcttaaacattgttgctcactccctaattataactcccaaagatacatataggaatttacttggtgaaattccaagtttaacctacaccactcaaga

SEQ ID NO: 388592 - DNA, 869 bp, Cannabis indica
aattttatagagagtagaacataagttaataggcctgaagtcttttggggtaaaagcactagattttttgggaatgagaacaataagattatcattaatggatgagagatcaacagtaccattgagtatatcaagaatacccatggtaagatcctgcccaatgacattccaattcttttgataaaagagcgggttaagaccatccaatctaggagatgtatccccagaaagctgagagagagcttgttgaacctcaatcacagagaaaggagcatcaaaaaaattcatctgctgagtactcatagttctatcagaaaggataacttgtgtagctttaccatcggaaacttgagatttaaaaaggttgttgaaataattgcagatctcatggcaaatgtcagagaaagaggaaactcttcttccatcctcacatttaagacttcgaatataattactctttttccttaaagtggctctacgatggaagtacttagtatttttgtcaccagcctgaagctagtgaatcttagacttttgcttccatagaatttcatgcttataaaggaggcagaccaattaagatggaaggtgggaaatcctcttaagatcctcatgagagataggcaaattagaagtaagatcattgatggacctttctaaagcattgatacggtgagacaggctattaaatgataaatttgataggcattggcatattaaataaaaagggcataagtgtaattgtaataggggtattgctattatatataggactcaatagttaaggaaaatgtgtgtgaaaaatttggttttagtttgtaacttttgggagagaactagactctcgaaattctgagttttgatgaaag

SEQ ID NO: 388593 - DNA, 769 bp, Cannabis indica
ttctttttttctttctgttttttcatctcaagttttgaactggattcaatgtgtttatcttttttctttctttctctgtttcttttattggagagttactgaaaaaggttaagacataggtgtgcaagaatgagcttaattgttgattttgtgatgaatttggagaattaaagataaaagagaagcgatatgtcgcaattatgtaggcaacatgtcaaaaaatttgttaaaattgtgaaaatgatatcaggtgacatatcacttgttaagtggcaacatgtcacagttcgtagcttcatatgacatattgaagcatgtcaacgacatgacgtctgttgcagcgttattgtgcggacatgtctaacttgcaacatgttgtcataagggatatgttgcaattatgtaggcaacatagtcaaaaatttattaaaattgtgaaaatgatataggtgacatatcacttgttaagtggcaacatgtcacaattcgtagctccaagtgacatattgaagcatgttcaacgacatgaagtctgttgcagcgttattgtgcgacatgtctaacttgcaacatgtcgtcgtaagcctttttgatgcaatataaacacgattaggagaaagaatttttattaattttgtttgtctatttacagcctagaattgatattaaaatcaggaaactaaattaatataatctgatttcctctctatcaacactccccctcaagctaaactatagatattgatgagtccaaacttatttataaaaa

SEQ ID NO: 388594 - DNA, 971 bp, Cannabis indica
acttcgtacaactttagttagttttttttttttttttttgtgaaaaacaagtcatgtattatagcagaaacaatttacaacctaaaagcgcctaattaataaaaaggtctttcaatcaaatatctatacaaaaattgttaattcattgaatatatcctcattttttattttgcctttgtcaaaagcacttaagctatttagttgtcactaagatattttttcatcctgatatatatatatatatatatatattatattcaagtgtaaaattttggttaaatatactcaagaaaaaacctcaatatacatagagtttgtcatttttagggagattagaggttaagacttcctctaataatgtataaaatgacatatatatatatatgagcattgttattggatattagtagtgctagcacttctagatatgtcgttttgcgattgattaacgacactctctaaaagctattatattaaactatatgagacctgatactcatttggactaataataatattaacacataagagaacaccattggtatctatacatgtaatattgaaaatgattaaaagatagagagtactgaccgcacaatatgcaaaactggatataagaaccatccaaaaactacccatgaaagtatcaacaatgaatttcagaatcaaaggtataatgtgaactaaaccccaaaagacattgacaatagcagctgcatgagtgaagcttattttccacacatctgttaggtatgccatcatcaaccacatcgcatagaatgacagtaatattgtcatgattattaattagttatacattacaacttattcagttattgatctgatctaataattacacataatatatatatatatatatatatatatatatacctgtccagaacaagcagcatacaggctgaaaattttttgtattgatactaaagttctctctgaagctttaaacatga

SEQ ID NO: 388595 - DNA, 1573 bp, Cannabis indica
tttatatattcacacacaccaaacaaatgacatccagtccacagatcatagacacgtacaataaacatatatatagattcagtaatatagcacataatatataattattacatatatgttatttattagttatgaaattcaaagttaacttccccagcagtcctccacttcagtttcaacccctcattcaaacgttccttcaagtattcattacttgaagaagactcttgaaactcattgaacttcttaagtaccactttgcactctgccttttcattttcaagctcagccatcttactttgtataaatgacgaaatgtccataccaagtaacttactaacttcttgacaaaagaaaacttgtgtgatcttctttagagacacttccaaaaattccacttcaaactccataatctccttggcaaatattatgtagaaataccaatctcgaagaagatgtttattgatgtcagcaaccaaagtcaaattcatttgtttgagcattttacatgtgaagaaaatgcctaagctcttcatagctggggagaatttcgaagactttccgccaatatcaccatacttgtcaagtatactattcaaaacagagcccaaattcaaaggtataacctttaaaatgaacaactctcaatgataaatctgtggatttcatttcgaactttgttttctgaaaactggaacgaaactcataaaaaagtacggacataaattgttggctcccagtaaaattagaaaatcgaagaacctcttcaatgtcggtggtacgttcattagtagctaataaggttttgttcttattatcatcccagtgaaaatgatctgcgagccattctttctcatcttctgatacttggtatagtaaatccattaaggtcgatactgaacgacctttctctttttgttcgacccaaagtttgtttaattcatcggacaatttcatctccccaacagtatgaagttccacattttccagatctccttctaacacattcataatctgatcacgtacagtcaaaattatttttgttttagtaggaattaaaagtaaagcttcaaaattattttgtggtaagtttggcacgaatatagaatataagttttaacaacattcataaaaattgtacacattttttttaataatttgtatttaattgctatcatagataaatatgtacatcgaaactactattaatattatttattagaatattattattggatatcaatagtaattagtagtgatattgacacataagatggtactaagtaccattagtaccttttaacatttctcttaattagtatacgaataatgattgtaataaatacacttaaattgcacacatatatacttagggaatattgctagctaatcgcaagacaacatgttagaggtgctaggcacctttagtgcccaataggagtgctcaaattgagaaatgctaaaaggcatcaatagtgcttagcacattcttgtgtcaatatggctattgatctaattaagtattgggtacaagaattaccgtttttaggggcggaggggtccgctggtaata

SEQ ID NO: 388596 - DNA, 1362 bp, Cannabis indica
atagtttaaaattgacttaaaaaaaacatcaatatatcttaaacaataaaataatataacatagcctaaaaattaaaaaaatatctaaacaataaaataatataacataacctaaaattaaaaaattaaatcatggttttttagctaatcaaaataagtaactagatatgtatgagataaaaaattatcttgaaataattttttaataaaaaataactaattgatatatcacttgcatcaaaagtaaccaaaaggttgcttcccttcaaaacttacaaaaattaaaatttttagaagtgagatttttaaattttttatattctcagtaattttttgaattttagtatttatgcacattggtatttgtgtaaatatttttgttgaaaatatttttgtaaaagattatttttgggtataatattaaaaaaaaaccctttaacttgtactatcagatcagatcatcaatatacaccactaccagcagcactcctagaaggctgaaacttatagacaataattgatgccctttttattagccctattcactcttttgttctaatgcactttcatgtgctacatatgtgaaaatatgcaaactttgttaaaattgatacaaacagctaccatcgtcactccttgctgtgggatcaaagttagcagctgatggatcagtgcagccttctttgataggaatgtgaatctgttgagcagctttccctgcatccaaacaagttttagaaaagaaaaagaaaatcctttaatatgacacatattgccaaattgttatgtccaatataacaatcttaataccagatgatgctggtgatgatgagagcctataatctattttattttaggtcaaggagtacttgaggaaaatctaagattctaaagctctaaccatagaagtttccggacttgatggagtcatcatttgcatctccaagagctgcctctttcaagtacttgtctgacaactgaactctcttcacattttcttgctcttcaacaagcatgtttccatactcaagaagcttctcaagagtcatatttggctgctcaaatgttggtggtccttctttcgagttcacaagtctctttccaatgttctccactccaatgccagagatccatttcctcacttcatcatcataaactctggctctcactgcaccaaagaagtctgcaaacacaaggtcacaaatggttttcacttactatgctgaaatgcacaacagctctggcttagattctatgttagttagattatcacctatgttattaccatatgaaaaatgctgttaagttgagtaaaggcaaagtcttaccaatggactgtcctgggaattgtcaacaagcttg

SEQ ID NO: 388597 - DNA, 1112 bp, Cannabis indica
taaaaaaaaaaaaagaagaaatcctctttctgttctctcttcactctccctctgtcattttctttctcacccaaccgatcaccacaaatcaccccaaaattcaccaattgcaccaccacccacgaccctccctccctctggttctctatggtgcggggccgaagaccaatgaccctccctctctcttgttctctctggtgtgtgatcgacgacccatgactaccaccgtcgaacgaacacacgaacaatctgtgatttctttgtatttttttatttattttttggtaaaaattgagtttttgtgaaatttgcattttttataatttttttgtttatggtatggtagtggttcgataggatacaatggtgggtatgatagtagtgcaatctggaggttagaaatgaatgtttaatataatggtccaatggtggtacaatgattgataaaatacacgatatgatctgatagatgtttaaaatttaaggattatttcacaaatgcacaaaaaataacaacaaaaattacaaaactacggttgtacgaaattttaaatatttttacgattttttattattttatttacagaaaatacataatattttatgtaagtatatttaaaatttatgcttttagaagaaagaagaaaaagagagtgagtgaggagatatgaaaaataaaattacattgtcaatatataatgatttaattttaatttaagtggttactttttgcttaatgtagcaaatttatcaaattgtccatatataatacaaatattggatttagtatctactagaaaaaaaaaaaaactttgaatttagtcatcatttacggtaagaaaaaaaaaataaatctcgttcatagtttgaaggacgaataaaaatattgttaatatttataataattttttaaaaaatatagcaaataattccataattatggatcgaatcccgtaggacaaatttaattctattttttttttttgaaagagagagtacatcgatgtgccgtgacgacggaaaaatcatcggtttgcaatcaaggcaaacaggcggccattcttcagagaacgacccgacccgaattcacttgagagcaaaacctcattctt

SEQ ID NO: 388598 - DNA, 1973 bp, Cannabis indica
agacaagacaatcagacggacgcagccgtcaaacgaacaccaaagagcagaagacggcgatctcttggaaccctagcagacggcgacctcctagatccctagcatacgacgacctcctagaaccctagcagacggcgattgcctggaaccctagtagacggtgactccttggaaccctagacggccactccttgggacactagacggtgactccttggaaccctaatgattattaaacaagctctttcattaatcataaagcaaaggggaattttgaatttttttttttggaaaataagcattcattgataaataaaattagacctcacggtcactacaaaataaatcttgcggaatagaagagattcccaagttaccaaattgtctgtgggtaaaggcccacttggccacattgtgagcggcaaagttacaaaatctgggtatacaagtaaacacgcagccatcaaaacatttggagagtttccaacacaaagaagaatagttctcaatctcccaaaccgaggacacttgattaagagcatcaatcaccactcttgagtcactctccacgatgatgaacttgtgccccttgagctttgtcgtttcaagagctaaacaacacgcagctgcctcgccaccacaagcatcagagaaatccaaccttgtcgtattatcccaaaccacctcaccagaatggtttttagccaccaccgcaatgcaagagctttccgatgccactctaacatcacaattaagttttagccaatcccgaggaggagacaaccaaacctctctctggatcgagaaaacaacaggaaggaaagcaccatttaaatcggcataagaatagcggatatcatcaatacattggttcacattataatgataattattgtgcaccttttcattcctgacgcgccaaatagtatccaccataaccgaagcatataaaaagacttcatccgtattgatgcccttaaacttgaagccccatatgaacttgacccaatcccaaacacggataccagaggacaccgaaaaaataccccacggagaagagcgccaaaggtggaaagccaagttgcatttaagaaacaaatgttcggttgattcctcctccatcccacaaattgggaagttaacataatccacatggaatctcttattgagaatggtcctcagacgtaaagcattagaaaggatactccgccaaagcaccttatgcctctccatgattctactgttccatagcttattccaaaagggagggaacacctcgcaatgaggggctcttttaaatgcttgaataaggtatgctgatttgcacgagaaccgcccattatgctctttggtccatatccatttgtcctttcctaggccagatgggttacctcctttcaaaatagcaaagatggtatcgttgtcaaaaatactcttcaacttctgtaaatcccatttcccattgactgataaaaggtcagacaccatgtgtaaacccttagcaggtcgcccgttagaactaggataaaaggatttgccatgtgccacccacggatcatccaagattcttgtacttctaccatcagacaccactttacaagctccttctcttaagatctcattcgcttttatcacatttttcaaaaatcaagaatctgagtctttgtatttgtagttaagcagctcttttcctctgagatacttggctttcaagatcttacaatagagagattgattgtcatttaacaagttccatccccacttggccaagaaggtctgattcatctcttttgttttcctaaaaccaagtccacccctagacttggggagacacaatttatcccacgctttaaggtgaattctatggttatgggaattgagggtataatttacttttttatggcataaataaataaaactatagggttatggggtttttttttattattttttatatttatatgggttttttt

SEQ ID NO: 388599 - DNA, 1025 bp, Cannabis indica
caagactcgaaccccaaaaacccgaacccgcaaatccaaaaactcgaaaacccgacctgtgtgcagccctaacgtcaaggagcaattgcagattgcctattgttcctaaaattgagaacacttgcaaacaaaatagatgaagaaaaagattggaaaagctgcaatagagattgaacaggaagtagatttggttatccatgggaaggatcgtatgccatcacaaaggcactacaatctggatcgtacaagttggcatgctatggccccatcttggatctgataccagtaccaaggtattggaacaaaaagcatctatgaagatattaccattaaaatcatactattcttcaacaatagtccacttcgatctataggaagtagatgagaagtcacccattgattcgaagagacccaatacaatctctttctatcgatcaatggaaacgataattaaattgacggtccttattctgttagtcgaacatggcataaatatagtagatatttaggctatttgaataaacaaggcctgtgtagctgcatcatttatgttttttcaatttcgccaaaagcctgctaattgtcctctgaccttatgtaattacatctgattgttaatacataatgaataaagcatttgatttaacacttttttggtacttcattatttaactaatcgttttctcctcacaaccagtttggatatgtgtttgaatttaatgccagttatctctttagtgagtcttaacactgtcaaattatgaatctttggacaagttgttggaatatgtttcactaggatctagatttactaccatgtatattatttaacatcctaaatgtgaatatctaaaacaatgtaaaataaacacatataaagtttaggaaaccttacattgggtgcagcagaatattaatggctccttccgctcagatctctaacccttatatcatgtctgtagcagagtatcaccaagatttgagcccgaatgtccttctcttgattctggattcttcacagcctt

SEQ ID NO: 388600 - DNA, 2433 bp, Cannabis indica
tttgagtggatggtaagtaagtccggcactgatggtgttttacattacttgcaaggataaaaattgtaaatggcgattaagggggaagaagaagggacgttgtgacatgtttgaggttactgtgttccacaacaaacacacatgtaatctgaatagaaattcttatcaccgtactcaagcagcaccgtgggttattgggtacattattaagaataagtacacattagatagaactaactacaaggaaaaagacatacagagggatatatttaatgagtatggcatcaagatgagttataagaaggtttggaggtgcagagagaaggcagttatgtatgtgaagggtacgccagcagaatcttatacgaagttatatggttacttatacatgctggaatagaagaatctgagtactattactgacattgtgagagaggatgatcggttcaagtactgtttttggttactcgatgcttgtaggaagggacttaagttttgtcgtcctatgattagtattgacagaacatgcttgaagacaaagtatggggaacaatgttagttgctattgcatacgatgcaaacaaccaattatttccagtagcctttgtaattatcaacagtgagaatcataactcttggaagtatttcttgcgaaagttaaggggagccattggggaggttgaaaaccttatgttcatatcaaataggcatcaaagcattgaacatgctcttgaggttgttttcccagaagcatgccattgtgcatgcttcaagcatattattatgaatgttgttcacaagtttaagactgatgtatgtaacaagcaaatatggcttgtagcttatgcatggaacaaggtagaatgtgatagacattttgaggtgctcaaatggatggatcttgcctttgctacatacctcaagcaaatagggtttggatagtgggctcgtctttattgtccaagcaatcggtacaacatattgacaaacaacagtgccaaaaacttcaacaaggtgacagaagaatttagaaaatatccaataactattttggctgaattcatcaggttcgcacttcaaaattggtttgttgatcgtctcgaaaaagcaagtaagtgcactacccctttggctactacttttaaagaagatttaatagcacaacacaaagatggtaggttcaggagtgtccttcataatggtgagcaattatttaacattggtatgggtcctgaaggtgaaagaggtggtgatgtggacttagtggagagaacatgcacttacggactgttctaatcgctcaaaatccattgtctccatgcatgtgccacaacaattagtcagaatgtgagcctgtacgcactttgctcctcgtattacataaaagaaacatggattaagacctacgatgtgacaattaatgttgttggcaaggaggatgaatgagtactaccgaaacacatcaagaacataagagttggggtaccagtggagaaaaaactagtaggtcggcctaggaaaagcaatacgggtagaagaccgacaaagcatcaaacctctgttggtcaagtagtagtggatcctcatcattgttcgctctgtggtagttcagggcacaactaagctacatgcgaagctcacgtttcaaccttttctctaatagtttattagctatctatattagttgcaaacatcgagtttggatcagatttatgtgttatattgttggttgttgtttaataggattgtgtgaaccatgttgaatatttaataggggccatgtatttttttttactgtttttacgctattgtgtgatatttctacagcatttgtgcgatgtttatgcaaattttattttataaatgtgcaatatttgtgcaattttatttcaatattttataaccgaagttttttaaaaagcttagattatatgtgatgtctttgcgatatagtgcgatgtttgtgcgattttattttctattttttattactatgttttttttacaaaatttatatcatttacgatgtctatgcaatatctgtgcggtatttgtgcgattttagtttccatattttatgaaattttgatatttttcatttattgtaatatttacgatgtttatgcgatattgtgcgacatttttgcaatttaattttccatatttagactaaatattttttattgttttcatattttacaatatttgtaatttctaagcgatatatttttataattgtgcgacgattgtgatagttcaaacaaaagattatgtataaatgaagtaaattacaaaaataatattatcgtaaagtaatcacaaaaaaatattatgcagtcaactaccaggtctaattctggtaaaataagtgttgggttttatgccctatataaaactcatttcaatataatcagatttgcttattaatataga

SEQ ID NO: 388601 - DNA, 1619 bp, Cannabis indica
gaacttacagaatagatgagccaaaccacaattgaactgggataagtcatcacctaattctttggtaatctgagaaacaagggggaaaggagtaagtaagtaagataatcatcatgattacatacacaagaacatagaatagataccttaggggtgatgaggtgacagccacggcggagaggaggcagagttatggtcttctgggcccacttcggagaagcagcagccatggaattggaattggaatcggtggttggagccgagtagagtgcggtgagtcgtagcttaggaggaggaagagaggagaagactgagctgctatgcataatggctaatacactcttttcctctccttcgtttcggtccaatcaaccaaaagcccaccccactcaacccaattaatatttttcacttaactaatttgtggaataaatactttaacacctaattgtatttaaatacttttaagtttaattttttgtcataataatatttaagttgtatttttagaactctacagctacctggctatcaaatacaaaatcattattcatatgttatttttttatgagtaatttatgacataaatgtttaagtttaacttccaattacaaataaataattaagtttaatttttataattaataatatctaagttatatttttaaaacttcagtagatatctgacggttaaatgtgaagttattatccacgtgttattttcttattagtatattcaaactattttttttaaaaaaaaaataaaaatttaatgacctaaattaattaaggattattatatgtcaatttatttaacacttaacagtcatgtatctatagaaattttagaaaatatattttagatattattactgccgaaaattaaatttaggtatttatttgtaaccagaagttaaatttaagtatttatgccacaaattactttttttcttattagtatattgtaactaattttttaaaaataaaaaataaaaatttaatgacctacaccaattagggattgccacgtggtaatttacttaacacttaacatttaggtatttacaaaaattttataattataaattgggtattattacgactaaaaattaaacttaagtatgtatttttttgtaaccgaaagttaaacttaagtatttataccgtaaatttttttttttttagaaattacaaatatagaattttatactactattaacttttatttaagatgatattaaattttattttatttttttttataaaataaatatttttagaccaaatataaatatatataattttattagatgtctaaattattattagaaatcctcatccaagctaatttatgggcccgtttggtacgtaggactggattagattagacaggttaatttgtctaatccattatttgggcatgttagaagtctggataactaatccagctaacctcatctgtctgggattatttatcccatccttttttttttttgaaaaatgcatttacaaataaaattgtaagttagacctcatagtcattacaaaagatattaagaggtatagtagatatctctaccatgcccgtaacgttgttggcaaacacccatttggccaca

SEQ ID NO: 388602 - DNA, 1066 bp, Cannabis indica
gaatagttttctaattaaagttttatgctgtttttggtttttttcaggtggaacttcagtatttattgagttaggagcgttgtttgaagatgttatagctttattgtctaaatttccgggggcagttttgtcccatgtggctcgctctgagaacttagcggcccatggcttggcaaagcatgctctgcggttagacgatgagctatcccggttcgaggaggttccagcgccggtggcggacgtgggcgtcgtaaattcacgagtgattctaatcactttgtcaaaaaaaaaaaaaaaaaaacgataattatttattttgtattggctttaagtagagaagtgatgggatcaacaaccccatttacctccaattactattggtgttttcatcaaatggaaaaatatatttttaatatagataaaggctataaatttaattggagatagttaaatttaattgctttaatatatttttttaattattataaatataattttattttaaatttaattatttaattttattgtaattttgagtgagggtcatttattacattaatctaaaggaatatttgacagaaaaagcattattatttattaatctttattaaaaaaacattattacaattaaacattcgtaacattcaatactattgtaaaataattatcattgtcaataatcaatttacaacactgtaaattgttcggtgatcatttttaatatactgaaaaatttagagacataataatacatatatcatggttataggcaaaaaattttaaatatcttaataaaagaataattatgatttttattccttgaactttaacgtaccaaagcatgctcccgaaattttgacgtaccaaatcgtgtcctttaattttttttaaccattaaaaatcttctccaaactattgatattattagatttaaaaatatttgtctaattttattcaattttactaattttgtaattgtctatatactaaatcatgcccctcgaactttgacatgtactaaatctagctactgaactttaatttatgttagactttccttactaaa

SEQ ID NO: 388603 - DNA, 938 bp, Cannabis indica
acattcttgattctcacgttagagtgtagtctttttgatattttaatttgcatggtagtttaggatgcataatgtgtgatttcttgaagaacacgaagaacacatttgagtcttcggaaaaaacatattttgatccattgcacaccctagccggcctagggagtcttatttaagacctggccagcccatgctgtttgtcatgggagctagctggttttagggcttatcctatgacggtccagatccagttgggctgaggttgaccaacttcttttcctcttgcatttcataattttggggtttttcttgtcctcattgtttttttctttctggttatttcaggtcgtgttcggtgatcaggatggagatgaatgaggtagtgattgtcattctcatggctatggtcataaacagtcgaatccaaaagaggtttgaatttattgtattggatttgatttgatcaattttaatttttttgaatctgaagtttgatttgaaaatatagtttttgtagggtacgagtgatcataggcaagaaaattggcctaatatggattcaagacctctaaggagaacccagaaggttagttccactttcatagaattgaagtttttcttttcttttttagatgtgtaaatactttagagcaagaaactaaaatgatttttgataactctatgaaaataacgttatttatatctttttggacattaaattagttttgttctcaagtatttttaatttattttagtgattttatttaattttacttagttttgcataaatattagttttagtatttttagatttattttagttaatttttgtaatattttaacaattttatttagtttcccattttaaaaatattattctcaatattgtgtatatttgataagagatcaaatgtaaaatttggacttattaagtgtcaaaa

SEQ ID NO: 388604 - DNA, 3055 bp, Cannabis indica
taataataataatatgtttgacatataccttacttttgcgtatgtcacttagcattgggcttttacttcagcccaaattatcttgggcagtagcacatgccccatgcatcaaaaacaaaaatccctttctcatttttcacttacaatagcgcatgctttattgtaggcgacagttcatcaatttttttcgtccataccgtcttccaacaacagtcgatacacaatattgactcaagcattaggttggtgcttccttgacagtatcatttcttgatgaacatttaatcctacattggtattctttttatatatatttatttgaaaactacttgaatagatttaggatggtatttttagggtttatgtgaaatggttgagcattatttttatttgctcttgacatttatttatttttgttaagaattctgaaagtgtttaaagagatatgtagcttgtgcttgtgaggtattgacatatttatatatatatatatattgaagagggacgaattttgcgaatgtgttctaacaaattagatttttgatcctgattagctcttgaaaagagagtttatttgtgtttatgggcttgggctcttactaggaattttatattgggcatttggtaaaatattaaagaataagaaaatttatttttgaatgcttgtgcccatccttgaatttttgaatagcaaggaatgtgtttattgtgttcttcatttgtgtacctatctcgagatttatggaattccgaagggggataccatatttcctgatagtattgttacttgcattgagtagtggaaaagggggtatctctcatttttgtccctagaatatggttgttagatcggcataatccgatattgatagtggtggctgacaagttgtggtccttacgggcatggatggtgattttgatcgagaggttctggatgcctcatctcttgttcctgtcaccgtcacagaagagtactatggtcaggatgtagatgaccatgatgcgattgggttagcgatggacggggaggaagtcccagtaatagattatgccttagcccaattagtgaacgaggatgatggactgagtctcctaggtaaatcacagagtattttacgcattaatcccagctctaaattgatggttccactcctagctcaaatgaggttggcttatgacatttcttgtaatataaaaatgacactacctaggagggaggaacgaatagattgggatattcctgattggtgtggcaagtattcatataccttttttcgaggcttcaggtttcctttccaccttttgtttcatcgatcctgaattggtatcagattgctcctagccaactgatgcctatttcttggagatcgcttttaagttttgagaggttctctgaggtatttgagataagtgttgacttagtagaatttcgtgctctctacaccgtaaaagaacatgataaagaaaaggggaggtatagttttgtaagtcgaaatgaggactaggttttgatttggaaaccaaaataagaacagagattggaaagaattttattgtttcttccatggagaagaaatgttcacacctggagctgataggttccctactagttggagggtgttaggtgggtgccacacattaggccactatattttatagcatcttgcattttgtatgtgattcttgtgtttcttatttgtttgcatttccctattgcaggtggtgaatgaaggaccgttcttgtatcccaaaacaagcgaaaggtgcgggagatttttttcaatctctcaagaggataggtggtggaaaaattattgaacgacaaagatttgccttcaagttttctttggagcaaattcgatgggcggacagaaggtaatttccttattcgaccgagtggtcgaatttctattttcttattgaagcgagctttagagttgaatggtgccaagttttctattcttactcatttaacagaggaagaacggattctagcagaccagtacactaagaggatgtctttcataatgccgtcctcttctgatattttgggaagagccaagaaggctacgactcaaaaaattggttccaaggggcaatcatcaattacgggaccttcaggcacttttgcgtctccgaagggtgttgtcactttgaaaactaatgccagggaagatccaaataagagatgtagagttgacttggggagcgatgacgaagagggcactattattccaagaaacgtttttgtgcactcgaatccgtctacgattgaaggacatgttgaggctctcttgagtcctctagatgagaggcgtttaaatgagcttggacgcgctgcatcttttgatgacttggtctcttcaatatatcgagtaagtatctttcaaagcttctttcttattgaggtttttatttgttctgatgtttgtttgttcttgacaggctctttccgatgcgatttttatttgtcgagatcacaaacagctcgacaaggagaacaccatgcttaaaaagtctaacaaagtgcttcaggagaaaaacaagaaggtcattgaaaagcttaacagttgacagaagaagattgaagagattgataaagagcttgtaaacgaaaaggagaaatcagctggtttgtatgctcagctagatgacattgcatttaaagctacgtgtaaatctcgaatggagttgttcaccaatttcaaaaaacgtaggtctgctacgtggaaggtagatgaggagttagaagtttataggaaaatctttcctggttcagttgcctctggtgacgaggaatgtaatgcttttgagtttgacactggtgctcctgaggctgaagaagatggaaattaggttgtcgagttcgacaaaggtaccattgaagttccggttgattcttaggcggctcattagtatgttatttctacttgttttatattcattttatttgagcgatgttttgtcttagttatgatgtgaaccttgtcgttttttggacttttattttatgtgtaatgctctatgtcgagctcttttgatgtgggtttatgct

SEQ ID NO: 388605 - DNA, 1119 bp, Cannabis indica
aataatattgtcatttaacttatctattggggcgggcccataagctcttcagtcagcccaatttcattggcatagatgggccatggaaaatgagttggttcggatgtttgtggggttgcctagaaacacatagctccacgtgaggcttttcaaccatttcattgtaagtaggtcccatatggcccatgatagttgtaataacacctgcatctctagctgtaggtaaaggacgagaggagtattttttttattatttcctccatagtctcaacagctatattttttcccttctgatgattactcaaggaacgaggtgagactgacttggctctccttccttcagaaaccttgttacccgatttctccccatctatcatacttgagacggaataatctctttgcctgtaggattgttgtcgacaactttcaaaactttccccgaaatggcttctgttgtttctccctgcacccttattgcctttttgcttaacttccccaaagtgtcctgccaaccctgctgcttcccctcgttactagggagttatccttttcctttgtcatgcaatgttgtacctttgctcggagcatgggcagtcggagtagtgtttcctctcgtgttgtcccggaaaaaggctagttggttcctggtattgaaacaactgattaccgccgattccgctttgatccatggcctgaacgtaggaaccgcatcgccctccggagggtaagcgtaaggcgttgatcttatccagaacttcttatcatgacccagttaaccacagttgtaacaaattttcggcaacttaaaatattggaattgcatccattccttcctacctctgtaagtgtcaagaaagaatctcggcgaaagctggtgtttcgtagagatttccacctggaatttcagaaaccctcgtcgaacaataactttttgatccacagtatcacatcctttgtaatcccctgcctttgctgcaatgtgggagtgtttgtccggttaaggtagggggttggtagtccagtcgctttgacccaaaaaactgttggaaattattttaccaggatcataacccgattttttcgaaacttcaaaaaatcataataattcaaattaaatcg

SEQ ID NO: 388606 - DNA, 896 bp, Cannabis indica
tgatttgatagatatcaaagtctcgggaacagggcttagtacataaacaatcattgaaatagtaaaattgaataaaattagacaaaagtccttaaatccaacaatctcaatagttcagggggcattttcaatggccttaaaagttcagggggcatgatttggtacatgtcaaagttcagggggtcaaaatcctaattagcctaaaaaaatacctaaatataattttgggtatttttgctgtcgtttacacttacacttatcacctatgtgagagtgtgtactcacgggaactatgaagggtcaaatagtggacttacccccctccaaacaaaaaaatccttataaaaacatatacatatacaaaaattataaatatatataggactcttctactgcggagaattttctaaatgccctatttgtagggaattgtaatagcttgttctaattagataagtacattgttatattatggtcttgaatgcaatatattaaaattaggattaattaaaatatttttttattcttttgaaaaaaaaaaaatattttttatccagatctattttctaacatttgctatttgattaggagaaaaaccttgcatcatcttccataccaacatatggttgtataattgatcggattatatcaaattccataccaaccttgatattgataaccattcttaattacatgacataaaatttgttttttaagaaatcaccaaacatattaatcaatggctatcttttgtttgtgtgttcttccaaactcgaaaatctataattaatcaatggcttcattttccaacctttatcaaatttttgtatgtaaatgatactatgtttggtattgttttctgttttttgttttaaaaaattgtttttaaaaatgag

SEQ ID NO: 388607 - DNA, 2123 bp, Cannabis indica
tagggttttattaagttttgagttgaagtttttttttttgaatctgaatttgttcgtggaataggggtgacacctgcatgttagatcagctgaggtatgtttattacttatcttatttgattatgtgttgtttcaagtttatattattagtccatatatgtgtacgtttatattaataagtttgtgcatttacacatgaaggctcttatcttgcccgaagaagtgaagagggtatgtcgttctcctttggttaattgggaggatcttagagttcttactgaatgtgaacttgagagggaatccgacttgagagatgctttgcggtggatttctccttctttaaagacactatctatagcaaaaaaggcacgcttacgtcgttatcaagtatcttatggatgttgttaaatttgctcattgctagataagtgtttttgagactgtatttaccttttatgtagtttaggactaatgaatttggatgctatattgatgctatcttgtagtttagctaatttgctgaattgtggtaaatggtaactttaaagttcatgatcaacttaagaattgcgcttgaaacattctatggcttcttagattactgtactgattttatttatgcattttcatattgtctaaaaacttcagattgatattttactgtgtaggttgatgcttctcaaatctctcgatattagtatatacctgaatctctgtttttcaatgaagtgagaactcaaagtgaaaggaatatatcaaacaaattcaaagtcacatattagaggccacaatacgcatactttatctatatataaatttttggtccctagattcaagttgtgtattgtaattaaatgagttggtttgttaattagtttgtgaaatttgtcttgtgtgatttgattggttcagcttagtcaataggaaatgttgtgagaactgaggcatatacaatacaagattgattagtatatcccattgtaataagtccctgtgctgttgtgtactctttcttgttctagcaatttataattcaactgtattttatggtgttaagaggaaaaataaacttccagttcaggtgagatttattgcctgagcaatctagctcatgatggagaccctttatagtaaaaaacttgattgaaaccttgttcttcttggctatcttgtttatacatataaaaggttaaacaatcataattctatttaattacggtttactgaaagtaaacaaattatgaaaattgttaatctaatcaataagctcctgttacaaagttgtagtcttttttctctgtccagacatgcttgattattactatttactaacatgaaaattggtaaagaacatttaattgagtttttatataaataagggtaaatagcggtataagtgcttaaagttttaagtttgtaagtggcataatctcaatgtttatatttagcgacataagtacccaatgtttgtaaaactgtaatttttctttaattttgtttgtacaaaccctgttattttcttaaacaggccacatataaggtctagattcttgatcattaggtgtagacagaaacatgtagtatcagttactttcaaatgttctttgaataaatttaaaacggagtttgtactactgcagagaaacttttcattatctcgtatctttcaccaaaagtctatgaaatgatcattgttgaattgcttcccattgtcgaatactatctcgtgtgggagactatattggaagatgaaacttttaatgacaaagtctaagacctttttgaaggtaattgaattcatgggttctgcctccacctgtttggtgatgtattccatcgcgattactgcgtacttcaaccttcctatttcagtaaaaagggatcctattagatcaattctccacacaacgaaaggacatgtgttggtcatcaaagtgatttcgttaggcggagccctgtgtacatttgcaagcttagaatctttttggacaagctcgcacccatagtgtggtcttcataaattctttcatggacttcagatgtgatggctgttaggctatttttagcctaggtttcggatctattctatgtgcgtttttcgctgtattgggacggaattacgc

SEQ ID NO: 388608 - DNA, 2117 bp, Cannabis indica
tactttggtggagtttctctaaccaattcctctcactcaaaagattaaatctttctattggtgagttccctcttaagttccttgggatccctctaagaccaacaaaatggagtctagatgattgtgggttgatcttgaaaaaaaaatgaaacatagactccattcttgggctaataagcatctttcttatgctggccgaatgcaattaatccaatctacattgattggattaaggaattattggatgagagtcttccttcttcctcaaagtgtgataaaagagattgagaaattgtgtaggggttttctttgggggttgaaagacaatcggactagaactcacttgataagttgggagagggtgtgcctcccaaaagcctttggagggcttgggttcaaggatggttctaagttgaacaaagcttccttagctagatttttatgggatttgatgaataaaaaagatttgcattgggttaagtggagtaactcaatttatctcaaagggagtgatatttggtcttataggttgagcttggatactagttggtattggaggaagctttgtagacttcgaactactttttccgaatctaaaattgttgaagtaggtggagaaaagtttaatgtgagcatgttgtacagaagcatgctacaccaggatgctttctcggctgctagtgcaatttggagcagtttaaatgtgccaaaacatgtgtttcatctttggcaagctgctcaatcgaagcttctgacaagggatatgtttcgccgtttgagcatccctatcccaaacaaaaattgtgtggtttgtgacagtgaaaccgagagccaccaccacatcttttcccaacaggtgctgtccaagctccttaattggttggggtttaatggttggtcaaggaactttgatagttggactttttggttgggcaatacaaggccgaacatcgtggatagtgtgagaacacttttattggcatccgtggtttaccacttatggagcaaccgaaacacttgcttattttatttttattctaactctatcatttgtatagtgagcaaaattaaaagtgatgtataatataggctcttgttgatcaaagataggaaaggctctagagtggagaagaatttactacaaatattgatatgtaattagtaggctttgtggttgtgcttctctttgagaagtgtatttgtttatattggcgagttgattaatgaagttccttcttcttcttgataaaaaaaaaaccaatttttttcactatacgatggtctgatcaatctcaactgcaccgcgaaaaatattttattattattgcataatttaattttctcattaagcacaaatagggtatatgttagattgtgggaccggtgagtcttcgagtggcggaatcaccgtgagcaggttgagaaacattaccaacgagaattttacctccgtcgtgaacataacgaagctcaaacaaaacgacctggtcctgattctctccactcttcgctacatcccataaacttttgcccgctaattctgttactcgattcttgtgtgatcaaaggcgaaaagtaccttctgaagacatcgtattaagtatggaggttcgacgaaggtgataagtcttcgatgttcgatcagattgtggaaggaaccaaatgcggtgtgttggatacgtaccgaggactatgcaaatgggcaagaactcaaataaattgaggcaatttttcaatttttttggaaacgtcattcgatgtttgccgttcgtctcaatttttcttataaattagggaagagctcgattaaccttaaatgtagataccaggggaagttaacttcttaaaaaattaatttatatttttttttctaaataatttatttactaatatttgaaaacattattctttttattgaagaaaaaatcattattttttattatagaaaaaaaaaatttactaacattttaaaatgtcattaaatttaatctattttatcatttttacaaatgttgttatatatataatttactaacacttttaaatgagattatttcacaaaaatataaaaactacaaaagattacaaaaatacggtttcacggaattttaaatatt

SEQ ID NO: 388609 - DNA, 875 bp, Cannabis indica
caaaaaaaaaaaaaaaattgttgatcaagtaatttttagaacataaattcatgatatattattaaaagttataataagcttctaaaataatatttataatttttactattttttcaaaaagaaaacatggaaatgaattggtttaccaatattagataggataaattacattataaatttttagtaaaatatgtgtgtcatttatcatgttttatataattttagtaatatgacttgtctaatggactgatattatgaaaagccaaatatgacaaaggttgaccactggtcaacctgacaaatctgcactcctaaataattagccatctaccggtattacctacgcttaattcgttaactatcaataatatacctttgaaatacgaacactatatccttaattgtataccaacaaagtaccaaaaagaaaaatacatatttcatctttgtatcactaataaattatatataaatataaattgaaaagaaatggggattttgaagagaaagtacgttatgttgattgtgagtgttgtggtggcgatgatgttaatggagggaggtttaagctcgaagattgggtatggggctattgagcatggtggtgagcagaagccatgcaagggtcctaaatgccttcctggttcttccaacggctacaacagaggttgtgaaaaaggatctgattgcaggaagggcggctatcatcgactacatcatcactaattaacttttttagataaaattatttgtaggaggagtaattggatattgtttcaagatatatgtacattctcatctcacttcattatatgtatgataaatattttagtttttataattttatttataaaatatagtatttttatgttgta

SEQ ID NO: 388610 - DNA, 862 bp, Cannabis indica
ttttttttgcccaaaatctctaaaatgcatggttgacatcttttttatggggcttgcaaattttcatatacataatgatatatgcattaatatgggtgcattttttttttagctaattaggattttttttctttctaaattttgacatgtatcaaatcatgctctctgaatttttcttaccgttaaaaattttctctgaactattgagattatcgaatttaagaacttttgtctaatttcattcaattttactaatttagtgattggcatgtactaaatcatgcttctcggactttaatatctatcaaatcatgcccctcgtactttgacatttatcgaatcataccccgtgaacttgcattcatgttagactttccttactaaaattggacaaaattccttaaatccaacaatctcaatagttcaaagagaatttttaacgataaaaaaagttcaaatgacatgatttagtacatatcaaaaatcggaagacaaaaattctaattaatctttccttttttagtaacaattaatgtgcatataatttatatatagaacaagtgtctttttcattatttgtattgatttttatattttagtgggaagttgagtgtggtgtaatagtaagaagatcaagggaaaaaaaaaacaaaaagacaacccttttatttattgatgttgattttaaaatggtttgcacttttcatgctttaatttgatgaagatgactttggttaagtcgtggataaaataagtattgaggactttgaattggattcttttcatggtgatacttctactttctttgccttttacaaaattttttttattatttattatttatgtttatttacaactttac

SEQ ID NO: 388611 - DNA, 674 bp, Cannabis indica
accaaggctgtctctaagtatatagcagcttaaatattgcataaggttcttaattaaaatgcatgactccattttttatcatccttttatatatataatataatatatattcttttttaatgtataatttacataataaatatttataagagacaaatatgcatttaacactttaaaaaaaaaaaaaaatcttgtggtcctaacacaaataactctaaaattattgcctattttagaattttattaatttgtttttttttttttgaaaattaaattacatgaagtattgattcaaaatttttttttaataaatgacccaattttaattttttgtccaaaactcctaaaccacttggaccggccctagtttcacctcccaatgtattggaattgtaaataattttaaaaattgtattggaattgtagtgatttttctttgatattcaataattgatagaaattagaatttttaaattatcttttcaataaaaaaagcataatttagtatttttgaataaagtttaggcacaacaaagctaattattcatcattattatgtttaagggaacatttttaatatggtttatatatattttcatgtgcacaataatattagtgattctataatgcaactcccgaaaaagggtttattgatgtacgttttatttgtttca

SEQ ID NO: 388612 - DNA, 887 bp, Cannabis indica
ataatataatatataaggtaatgagaaagtcggtagtacatgtaagagtaaatctatctagttcaataagttgtagtatacattattatacaaaataaaaaataacataaaaaaaactcatctaataatgttaaaacaaataaaactgtttatttgatgtggatgtgacattcagtataagtactaagtaggtagctgtcttattaaaatagatgattaaaagaaaacttagtacaaattgatcacggaagatacagagcaataagataaaacaaaccaaatcacatgacaccaccattactgactcactactaaggtttgtggcttgtatcggaaaaattatataaattgttattttttaaaatatttctacttttcttatatatttatagtattttaaaacaataataaaactgtataaaaataatatgaaaataaaataaaaataatataaaaattaatacacaaataatatgattacaatataaaaatatatcaaaagatctatttaatttaaataaaattttaaaaatcgtaaaaatatttaaaattttgtacaaccgtattttttataatttttttttgtgttaatttgtatatatatatttttttaaattatccctattttttattttttaaaagtaaattaggtaaaaataatgtgtaatgttttatttagaaattttattgttttatttttaattgtaatacaaatttaaataaatgtaattatttatatatcatattttttcataattttaaaaataaaaataatatacattatttttttttttatatgtgagcttagcacacttttcacaaaagagatgttgaattggattagaattggctctcataattacaatgagaagggtgagtaaagtaaa

SEQ ID NO: 388613 - DNA, 696 bp, Cannabis indica
caaggatagaacattcttctgtcataatatttgtgattagacgcaagtgcaataaatacttggagaccttcccaataagctggatccttacgatttttcatggtcacccaagtcttatcgattgtcatctaccaaaaatttacaataaataaattataattcaatttgtttgtgtgacacaaattttatgatttatgtacaagttgaaataatggtgcttttattttattttacgaaatttttaaacttttatttgaaatagtattttcataattctaaatgaaatatttagatatttaaatttataatatttatctttcttttaataaaacttagatattatataaatttcaaaaatttattacattaaaaaactaattattcaataatttttttagaaaaaaaaacaaaattaaatattttttagttaaattacttagtttaaacattaaatggattgaattttaatatgtttatagtaaaacttagatattaaatattttttttttaaaaaaatcaaattaaaatctaattatttataaaaattaaaaaaaaaacaaaattaaacttttttattacgttgttttaaaattaaatgcattcaattttaatatgtttataataaaacttaaatattaaatacattttaaaaaaatatatcaaattaaaatttaattattttaaaaaaaataaaaa

SEQ ID NO: 388614 - DNA, 701 bp, Cannabis indica
tcttgccatctaaggataatctcctcgatgttttcttttttgttccttctatttcttgaattattatttatctaatatgtttgtgcatgttttactattaatttgattttctacaagtaccatgtgcaattaattatttatttgacaaaatgacaaagtaatctttttgtatctaattgaattatttggtttgattctattctttgattttctacaagtataatatatgtgaattttgatgataagaaatcagattgtctaactaaaattttgaggtgctaaatcttgtgcaatttttcattaatgatggttgtgatagtgttgaattctgagcatgatttgtgaagaagcgcttttgctttgggtaattattgcaatgaataacttagtttggtggagttcttggaacactatagctgccatttttcctgttaatgaaatttgtctagttatacatttttgagagcttggaatgatcattgagatattgactattagcaataatctatttatttttttatcaatttcaagcagcattattgaatttagtaggagacattgaacttttcaagatgaggaattcatttaattctatttttgtaaagcccgcttagttaatttggaaattagcagttatttatgttaatcaggaaattattatagccatttaaataatttattattgatatttatggaattca

SEQ ID NO: 388615 - DNA, 985 bp, Cannabis indica
attcacaacctaaagctcaatccaagcttaaaacagtaagaattaacactactcaacttcagcaaatgaatccaaattgaattcatacatacaacccctaattaaacttaaaacaccaaaatataactccaaaacttatatagaacttgagtaaaattactaaagagatataccttgatttagattccaaaacaagctggaaactctctaatttcagcaagaaattccttccccttgctggtttatgggtagcacgaaagagagggagagagagacttctaggtttctcactaaacttctcttttttttcctttcttcctttctaagcttctttctattttctattttttttaaattaaggaattaatattaatattaacctttgtaaaagatgcaaccatccacttctcacaaaaaccaaaagtcaacataaaaaaaatgacttatttgcccttttaacttaagccaaaggttaaacaataccaagggcattctagacatttataaatcccgtccaattcacaacacctctaatacctatcaataataccccgataatattctaaattatatacaatacgactctctaaaggcccaacatcgctttccacagcttccgaacacaatcacagagattaggtaatttacatataatagcacaaaaacatataagatatattaaatatatttccaaaatgtaaatttcataattattcatttaatctcattcaaaaaccttaattaattaacatttcaaagcattagccatatgcggtctttacaattatccccccgttaaaaggatttcgtccccgaaatctacctgaacaactcaggatgctgagccctcatatcagcctctaactcccaagtggcttcttccactttactgtttctccaaagtaccttgaccaatgatatggttttagttcggagaaccttttccttcctatctagatttgcactggttgttcatcatatgata

SEQ ID NO: 388616 - DNA, 535 bp, Cannabis indica
taagaaaaaacgtaaaaatgactaaaaatagttttataaaaaaaaaaattgtgttcgatacttttaagaataatgcaggtaattttactaaatattaattttactttcccttcttgtatatcaaataacaaagagagaaatatgctttcatttctttctttctaattttttatccctcttaaattttctttccatcttattttctttccttgctgccaaacataaattaaaagttgggatgaagatttgttttgtgatgttttttaaaataaaaaaaaatgagagatgctaatattattttgggaatccctttaagtactaatgaggttgatgattcttggttttggactaaagaagttgatggaataaagattttgtaaaagtgtaaaataattatttgactctaaaaatgctaaaagtttgtcaaaaatagtattttatgcaaatttattacaaattatgttgaaaatataaaaaggggtatatcaatacacactttttaggatctttagggagaattataaaaacatcaaca

SEQ ID NO: 388617 - DNA, 1425 bp, Cannabis indica
tatgtctagtatcaatctacaagtgaggttctttctgtggaagaagtttgggctcttttaatgtctcgtgaatcaaggctcaaaagacatacaactatgatggatacctctactaagatggccaccaattttactgcgggatcaagaaatggactatatagaccttataatggctcaggtaaaggtaatggcttagagaatttatcaagattctgcaatagtggtaatggctcttgacgttttaataataacagaactatatatcaaatttgtatgtgttttgggcatactgttgctacatgcaattacagatttgatagaaattaggtgactccaaatgcttcatcagctcagcctcaagttaatctcactaagtaggttcttgattatgatgcccatgctttttgttgctcaatcagtctatgattttggtgatgatgtagggtggtatgtcgacactggggctaccaatcatattgcatattttatggaaaatcttgacacaactgctccttattctggccatgaactattgtcgtttctaatggtaagaaaattgtcatttctaacattggtatgactaccattccctctaattactcatctcttttgaatttaaattctatcttgcaagttccctcaattactaaaaactttgttattgtttctaaacttactaattacattgatgccttttttaaatttcataaatcttattattttgttaaagatagggaaataaaggtagtcttactcaaagggaaaattaaagatggtctataccatctaggaaatgatagctctagtcttccaacattgctctgcaagttcatcttgacaccttagaagttcagtgcaagccttcattttgtagttcccaatcttgtaataattattgtactcaaactgttaatttagcttccccttgtactgaagatattagaaataaaaattctctgtttgattatttagatgtctctagtcctattatctattttctcaattcagcatctgatactaatgtgtggcataacaaacttggtcatcttgcacctaatattctttgtaaaattttaactaaagcaaatgtatctcattctcttaaaaacctacacattttgtaagccaaaaatcccatgggcaggagaacccaccataaccttcaacgacgaagatggtgtcaaaatcaaattttcacacaacgacttgttggtagtggaggtccagatggccaacaagatggtggccagaactatgattgataatggagcctcttccaacatcttattcaagaccacataagaaaatacggggctccaactcaaagatctaaccccctgtcttcagcctgtatatggtttctccagccaagagtcgaacctttagggcaaatttgcctacccctcactgttggacaagcttcga

SEQ ID NO: 388618 - DNA, 1094 bp, Cannabis indica
attttaaaaactgaaaactgatacagccaaacagactcctagtctgtaatttaaagagatttttttttaccgtgaattaaaaaatatttagtaaaatgatcatcaataacaattaggtattgacaaatatttaataataatatgataatattaaggaaaaaaaaaacacatatattatatattatatatttagtactcattactcgataatccatccagtgttatcttctaactatggattattagtatcatggtaattaatttgctcattttaaaaaaagcactatgtaattttaagaagaagaagaagaagaagaaaaaaaaacactaagaaacaattttgatgggtttacctaaaaaacacgtcggtatgaatgagacttaacattcaagattgtgactactttgtaacagaacttgtaaacatggaattggacaatggtttcaatcagattttcagctcaatttgtctctattatgtatcgattatagacaatttccacgttaggagctaataaaacattaatttaatcaagcagtgaagagaagacccaagaagagtaagagtgagtgagagagagtaaacctcttcttctttcggttgtactacttcactttattaatgtaatgaaatgtaaaattaatataaatatttttttttgtctttttcatgtacaaacaaacaaataaataatgaaaccattcatctttaaacattggtcaccgcctacgtttcacaaatacaataaagtatgttttagtgcggacaataacacaaattttaagcactcttcggcaatttaattaaaatttaaaatttataaaagtcaatattttgtactttttttgcatttcaaattgaattgtcattctttaaaaaaagaaaaaaaattgaattgtcattcctcatcacaatttacatacatgcatgaattctcccaaaaaaaaaatttccttaaaaacgacaatttacttaggcgacgtttggtaacactttttaatgagttttctatttttaaaagtgaaaaagtgacaatatctttcaaaaacatgttttataaaactgtttttacttttcaattttataattagaa

SEQ ID NO: 388619 - DNA, 602 bp, Cannabis indica
acatcaaattaatacgaccccgctatcagctagccacttttcgagatcaatagtaagttcttggagctcccttcttgcatatgtcttgtttgtgaagctatcatagagactcaccaacacctcttctttgattgtctctttataaagaaagtcatctctgagataaatgcttggttgggtcaaattcaattgccttcgaacttcaatgagtagaggcagtggagtatgaatcctcactcaaacttgaaggaatccatttgtaatgccactatatttgtggtctattactctatatggtgtaattgtaacaagtatgtcttcaagttttcttgtaattctgttaaagttgtgagtgtttctattaagttaaccattaaagctagagtcttgggtctgaaccttgctagattaaagaagagggatgctcatgattagacattataagagcattcacaacagcttctctaaaatagagaagctttaaaaaatttgggtacgtttggaaagccatgatgtaattggatttgtgtgtaattggaggtaattacactatttgacatgtttgtctgaccatgtaattacactgtaactgtgtaattaga

SEQ ID NO: 388620 - DNA, 524 bp, Cannabis indica
ttgattctctccctaagatttcacaacatgtattcttaaaattatttttaaatgcacattcttcttacttgagcaataaaaaattttggttatcccaatgtggccacccaaaaatataacatacaattttattttttatttcatagagaaaagatcatcaaaatttctttttattttatacatcatgtctcatgtctaaactctaagaataaaagtgattaattaaataaatgaaacaaaaataacatcaataagtcaaatttggcactttctttattaatacagtattatgttttaacaaaaaacttacaaatacacattgaatttgaaagggaaatttcattttttgcccctaataaaacccccaatatcaaaatttagacccttcactaatttgtataaattaagggaaattttatttacaccccaaaaagttttaaaggcaccccattttgataatttttattttatataaaattcatatttttaattgtactaatttttttaacttttttcttttaatt

SEQ ID NO: 388621 - DNA, 1481 bp, Cannabis indica
attaatatattctattacagtagtcagatatctcaatgtggaaatattaattgcttagaatatgttattgttacatagtaattatccaaagttattattaaatagattttagtttttaagttaagtaactttagcaatttttttctctacccgatagtttcttagagttatggacgtaatccagaatagtgtatatattacttaagattatattttcgtgtcattaaataatagcatagcaaagtaattttatgcttgaatgtttatgtgactaggtgacacccttgtaagatatatataagttatattatggtaaaagccacataattatactttatagttttcatttattatataacataagagacttgaagaagtagatatatttgtgggactaatggagaattagttaagtggcactaaaggccactatttcatttcaaggagtagagagataattcctagtaaatggtcaactttgagagaatgaacgaggattaattagtatgatttatttgtagtagccccaagagatagcaaagagagcttatctctcaacaaactcccaaaccaacttagatatgttaccacttcgaatgatacggaacctacttgactgagtagtgtagtacacgtgggagcctaagagaattattatctcaacaaactatatttcaagactatatatcagtttattgaccgagtgatataggaaatttagggagttcgttatgatggaagtgaattttagcttggtaatttattatttatttttaagttaactgtggttagtaatgtggttagcagaggaagtggatgtggtcagtaaaagcactatatatgtagaaccttagtcttgcattattcactcattcaaatccaagctctaaagattactctctctctctctctctctttatcgtctttgctaatctctcattttatctacgctctcaaaaccttatatctttcaaccaacacaaaagacctacacatatatatatacaacagacactatttccattcacaagctcctcaagctccattgtttgttaccaagaactctattagggtgtgccatagccaacacaagctccaagatcatcaccatcgtgatatctatatactccattgtcatattcttgttctttggctgaggtatacaaagtccaagtctccattcaaattttcgtgacatatcatctgagctctaagtacgcatcataggcttggctaggggttattctataagctacggtatgttgatttgttatcttaagttggtttaaggacttaaggttaaggttatatgtatatatatcatcctataatatgttctaattaatatatatgaaatctaggtttttcataagccaaacattggctctcaagaatcactcttgcaatcaaagctaggactccacattcgaggtaaggaaattaagtagaaaaacataagttttctgtatgtaataacattc

SEQ ID NO: 388622 - DNA, 515 bp, Cannabis indica
ggctgtggtatgataggaattcatttttatttggtaacaaacagtcaagattagatgttattccaagattagttactaaccatctggctgaatttaaggagtatggtcagcgaggtctttatttgggattggatcctgcaaacccagttgtaaaccgagctactcgatggatgccacctccccctcaatctttcgctcttgcgacggatgcttcggtggtttcggggaggggctttgtcagattggggggaagtgctacgggatgtagagggtgtggtttggttggtgtggtcatcaggagtgttaggggatttctctactaatgtgacgaagctatttgcccttcgtctgggtttgactcttgtgttggtttcagtatctccattattaatagtgattctactgtagcaattggttggattaataagctccagattaattttagtttcagtcgattttattagatatctattctttattagctgttgttggtagtggttcttgtagcgccattc

SEQ ID NO: 388623 - DNA, 1180 bp, Cannabis indica
aagaaattagtttggggagtcaattaaaaaaatgatttggagtaattggtcaaaaaaaataaattgaacactattattaacgcagttttttgttaattaaaattaaatagcctttcaataataaatattttacagaaattaataagcaataaaaaaattatgactccagatatttttacgtgattttgtagttaaactctacatactccttgagtccttattattagggatcttttttatatacagagtacaattttaaaattagaataataataattcacactcaattttaccgtccactttctcatgaaatctatccctatttataggagtataggttgatagttatcctttttggaattaattcaaatatgactatttatgaaacatggataatccccacgtttcattcaaatcataagtgagatattactaagtaactactcagccgttccttgattttatcctttagatggttattgttgacgtggaaggttacatcttctctgatttgagttatcttccttgtccgacctgataagaaaatatgctaatgttgggaaagttcccaactcgctacattctctttgtgatatttgtaatgcgaggtgatcttgttgctgtatgaagtgcgaggcatcttatgttgatatactcactctgcttgtatggatgaatgatctattttttcagtatattctgaagcgtgcatatgtctcattaatcttagatcaatagttactattcctgtctcgctattgactataaagtcaatgaattttgaatattatctatttaattaataaacgagttatttaatgtgcatttaatgatatcgttatatcattcagaattgtttcgtatttcttctgttggagacgtgtcaacttctgaagtgtagccaaatttcgggtataacaattgcccctgaaaaggtactttttaattgaaaagaactttttaaatgattataagggtatttttgtctaaactcaattttaaaaaattacatgcttttggtattggcgattcagaattttgaggtgcatcattagcatcaaatgttccgtctcttccaatcttcagtgctcctatccattagatcaatcttcttttattctaacggtgtgttgggttttatgccctaaataaaactccatttcaatgtaatctattttat

SEQ ID NO: 388624 - DNA, 800 bp, Cannabis indica
ttcacgcttctatatattttgtttctctcattttatttaaaggataacaacttgtataaatacaaatatatttcttttatatattatataagtatgtatggataggatattaggatatataaaatagatgatgttcgatatgttatagccatatctgggcgactatctgcaaaaaaactttttatagatccataagcttttgttttcttcttgaaatattaatatcaccattttattagtctctctctattctcagctaacaataccaaattttcttattttgaaatcctaaatatctccactatatatattgtgttgattcatgtttaacaccaaaaatcatgtacttaagcaacgtaaaaaaaaaattaaccatttgattaatttgtatagaaaactcttcatttcttaagacttttgttcaaaaaaaaatgtttacttaagctatgaaaattaaatttaaagatatattacaagtgttgactcctaccaaaagatgagggtttagattaacgataatactagttttattttcgatctttgaattacttataaaagttactactttgtaagggatttcatgatgactctaatagaaagtgattgtaggtttataatggcccccctaaagaaatgcattgttgttaagagttatggcaagtggaactaccatatataactcccctaaagtgacacgtgagactatgactgctaaaaatctaaaattcacaaaacataattaaaatacttaaaacgataccaaataacattacttatataagcccaaaaataaataaata

SEQ ID NO: 388625 - DNA, 1049 bp, Cannabis indica
gaggtagctcgggtgctaccgtttggcaattataatggggaaggagaacttatgtctgaagcaagtgatgtcttggaagttagtcgggactacgtcgaggaggagtacaccgaagctcgtcctctgagaagaaatatctgaagggagattgactgatttctacgccacccatcctgaccatgaaaagattgactaatcttttttaggatggtgtcttacggaatgtcgaatgcttcctttgctcccgaagtcaactagctaccgaccttggagagggttattgtgcttggttgagagcccacactgatagggtgcgatgctgcctctattcccatacataaagaagatgaccaattattatcacatcagtccgacccaattcactcccaaggtccccaagaatctatctgccctatttgtgttatacgcctcgcaaggatggggcaagccatcccctcatgataccaactggttgtttaacctaaattcaagccccaagcaaaacaggtcagagtatttctacttctttcaaatcgaggagtcgtggctgacgggcaccacatacattgaggtgacaaaaataggtagcttcatggaggactactttttgtcaaggggacgaacaccaattataccagtttctagcatatcccatcttattgccgacatccattcacactggaacttagtaatagggcctaggaaattctccaactctgtctagatgagcagaacatctctctcctggccactgacgctaacgttgtcgaatacaaactctattcgactgatttagtaccaaagactaaggagacagtaggagaggttgtgcccagacagaaggctcagagtaagaagaagaagaggaagactcctccaagtggccaagtacccgttgagtggtccatcaggatcaaggttgctcaaccttccacccaagtggctggaaagggaaaggccattgtggtcgagcaagatgctggagcatttttctaatggcaatctatataggctttttgacttctagacataggttttatttatctaag

SEQ ID NO: 388626 - DNA, 2679 bp, Cannabis indica
ttaatatgccatatttgtgtgaatttaaattctaaatcccatatttcatgtttgctttatttgtcaaaaagcctagtccaaaattattagttaacgcaaattttcgttaactaataaataatttttttttataattaatatactcaagaattaaatggataattaataataataataataataataataataataataaataaataaataacaagagaatttttaatgtgattttgaagttaacttttcatagtctacaagtctatcttattcagagattgataaattgtatacaaaatacaataaattattttacaaaatagatgacatatataattctctttcattctccaattggtcgtccatatttataggagtctaagatgacagttattcccttgagatcttatcacttgtaaccgttcatgagacgtagacaatcctcacttttcatatttatacacatgggataattacaagtaacttctcataaccgtttttttaactttatctataggaaattatgctgattatgtttcattcttctcgcaatgtaacaatcctcctctagacactttatcataaatcagcgtttaagtatatgtcaagtagtacttctctcgttctcccattgacgttgagtaaggtataagcgagacgattatcaccatctgacaattacgtggtgaatcatgttaaaggtgttgcctttagtctttcaacatactcacgagtatgtgggtcaatgagctgcaagctctttagattattcattatctaccctttctaaacaattatattgtgtattatgtatatcccgatatggaccttctttgttcgtttcactagtctcatcagtcagtagttattatttgtggctcaccattttctttaagatggtgagtttgaatacttctaccaactcatgtattttctgaggcaagttatttgaacatatctactattgtataattcaggttggttcatattccagctatattacatgtgttagcaccatattgttgctcaaaatataagtatagcaattgccccctaaaaagtgttttttaaaataaaaaggactttttgattgctttaagggtacgatcgtatttttcccatttaaaaattgtatgctttattttggcagttcaaaacttcaaggtatacatcatttcggcatttattacactaacctttctttttttaatagtttccatctgttcgatcaatcatcatcgcggtcgaatgattttcattatttgggtataaaacttgaaattccttctattctgccattatcattctcgaagctcctagaactcgaaaaaatcctcaatccactttgcttcctaaaactccttgccatcattatcccttactttttttcttcgtgtatcaagtgatttcacttctcaaacccagaatcaaggacgtccaggttctctgcaccaaggatcttcaacaaagaattcttcggaacccaatttcttgctccaaactagtaagtggcttctctttccctattcttcttatttctttatgttttgcttcctttatgtatgttcctttttattttgcaccatttattgttggagagggttttatatgaatttttaagtaatctagggctagaaattttaaggttatgtaattcgcaggtcttgagttttaactgtgctctgtttttctaatcatttttggggcattatactttgtgacaataccatgttcccattccaatctagaacttgcacactcagaccctttgaaatcagattatcctcaatttcaggctgtagtttttaaacctcaaattcataaaccccaatccatattcaaaattaatgatgaaaaaaattagaaaacacatcattaggaccaacaagaagaggtaaccacctactataggcgattcttaaatgaagtcatagagggtagatgtcgttgtctaggagaagcagcttggtctgagacgcctatcttagcaaatatttccttagtaaagctattatttttaccataagtcattgttgcttttccaccaggttatttggaattcgacatcatgacttctaaagctcacaaatctataatgtcccagaatcccactgttacattcgagacagaattgatcgagtctatggctagatcaatttccccctatgtaggggatgttttaaggtcttgcgatattaggaatgaaaaaggatatcatattcgctcagtcgcgcctcgcgaatttagttgtttttcccccagaatgtgttttgaaggacaagggttacaataccagtgaaccttcaagaataggagcttggagtgttgaacacattagagcaggggctgtactcccccttagggactattttaaagatttctacaattacctcgggattgcaccctttcaacttgtccctaattcctctagaatcctcgcctgcttgaagtcgttatatcacatcttaggatgtgagtgtccaactctccttgagatattgtactctaactctatcaaatcatgtcctgggtactcactcattcactcaaggctaaaaatttagaagaagaaaagaagagcaaaagtggcagctagaaattttctctgaaggaatgagatgcatcgtcttttcctgaagccatcactacctatttataggtaaccacctaggtttaggt

SEQ ID NO: 388627 - DNA, 677 bp, Cannabis indica
aaatacaccctaaaatttataatgtcgcggatggaattttatagtggaaattgtgtttatttttttcgatatgaaaaaaatgtaatttttcccatcaattcaatcgcattatatagatgaatggattgaaataatataacggaaagaagatgtatttttccctactgcactgaaccgtcaaatacaccctaaaatttataatatagtggaaattgtgtttatttttttcgatatgaaaaagatgtatttttcccatcaactcaatcgcattatatagatgagtggattgaaataatataatggaaagaacattttctaaattgtggggtgtaattagttgaacgtgtcacattaactgatcagtttcaattaaacacgttcctcaattaaattaaaaaataaaaaataattattttataaaataatttttctgttaaaataataaagtgtcacaccacatcaaccagcccagctcggacagacgacacgcacgcacgtatggtgggtcaaatgtgcgagtcctcacccattcgaacaaaactaggtaccccttgaagcccaaacccaagtgccaaagttgcagcctatactcttgtaaacaaaggttcatatcccatgtaggactctttccatttcacactagggctgtacaaaaaaatttgtaaaccgcctaaacc

SEQ ID NO: 388628 - DNA, 2001 bp, Cannabis indica
tttcatcactttgttgtgttaaatgtggtagatgatgaaaataatttcaaactactttactgacttattttttttttagattatagtccttgtactgagctcttttatttgcttgttgggcgtttaagaatgcttataattaacgcatttaataatttttttagtgcataaatacttaatataagactgtaatttccgtctaatttcgtcaaaaaagactcggttttgaattcatgttaagaatagaagtgtatggttgaggaagtagaaacatgtgagtgtttggtaagatacatggggtttctctcgaaaccaattagcaataagaggagcggcatgcatctcatgtacggtattaagttttcatatattatcaatgtgagactctaacaatttgtattacagagaccaataataatttaaaatcttggtcttaacagaatttggactaacaagatcaaaattatattttattaacattgagtatttatggccttaaaaaaatattaagtttatgtcttttgaaaattcaaaacttataagtaggtctatcactatttaaactattatctaatgaattattctcttccataataataataatatgataagcttctacaatggaataagtaatgtgagggaatgagtggcttgttttcaaagtcaacatttaaaaatagttgattttttttcattaattacttaattaatgtagtagaaatgttaaatatggtcaaatgtgttttctttttaatttataaactatatatattccttaattaagttttcctactatagtatttgctcatgtactttggggtctatattggttatgagccacgccaagaaattgactcaattggtacttttaatggttctactattatctgtgcaactatatgattctcattgtacgacatatgtgttctctccacgttttatttttatagataatcttcctcaagtgtttttaacattgaagaaaaaaagatactatagaatcaagttcaaatataatatacatatgttaaagtcgtatattaagtcactaaatatttcaataatttaaaaccatgaaattcaaactatatgaatactaaactttattataccagaaacaaactatgaattaatgccacaattaattcataacaacacacactatagctacttataatatgtaataataatcattgtaaattgtattaattaattaactaataataataaggttctaagaattacactattcaaagacccaatctcaagtccaatgtaatagtattagaagtattagtagaataatgatgatcaaattctgatgaggaagaagaagcaggcaagttcaaatcaagaacaccactaccactaccactaccaccaccaccattgttattattcatggaagaagagctcaacaacgttaatggctcctcctcccagtgacacctcatgtgtccacccaaagcttgtccactaccaaaaactttaaaacaaagactacacttgtgtcctccaccactactcgatcccaattccatcatcttaatattcttcttctcttcctcctccgaaacgacgtcgtttactatttcttcatcaccaatattattggctgctatggcgaaacatcccttgacgttcttgtgactggctctgtgtcctcctaaagcttggtgagatccaaacactttcttacaactcgaacactcgaaacaagaagaagacgacgatggtggttgtggttgtggttgtggttgtgctggtggtggtgacgtcatacacagatcgtgaccgtcggttattttgggtggaccgttggctagcaaaagaagacacgaagccacttcgtattcttcgacagaaaaataaatcgatggtgatgatgtttcgtactcgtcgtaacggttatgattgggctttgatgatgatgatgatgatcttcgaacgagatttgggggtggttgatccctcgccattgacgctcggggtgacaacgca

SEQ ID NO: 388629 - DNA, 1344 bp, Cannabis indica
attataatttataatttatagtttggcactttttcttctcacaaaataaagttcacgagttcaaattactatatatacaaaaggactttctcattaagagaaaaagtatatctttatggccacactacttttattttcatgaatttttttttattttcagtttggtcttattgttcaagatgttaggaatttacttttagttttatcttttgttgaattatgttttgttaaacgatgtgcaaacaagttggctcattacttgacaagagactcttgtttctctacaagttgtatacttaagttgaaggattgttccgctgaagtacgttatgttccgctgaagtacgttatattgttttgaatgagtttattcattaataaatctcctaattttcttcaaaaaaaaaaaaaaaaaaaaacgagtatttaacttctaaagattatttaagtggatgttataaattagggaaaaaaatgctacatacattaaaaatgaacaaataaataagtagtgttaaaggtaaatttttattttagttttggtcttttttattttgtacaatcaaattgagaaaaatacttaattattaacacaatgaaatttttttgtaatatcttaaggggcgggtcctaagcataggcgagctaggctcgcacctagggcccactcattttaggggctaaataaaaaatatattttaaaaaatatacatatttttttaaataatttataaaaataccatttatctttatagtaagggcctaaaattttttttttacttatgggtcatttcaactcaaggtcggtcctaattttaagtgagcaaagttaggtctaattttatttaaataaaatattttttcaatcaaaacacagaaaataattattaaaaagaaataacacaaaagaaaattggtggaagctataattactagagcaaatgacggtaaattggtgttgaattttttttcataagcatatttttattaaatttggaacaccccgagctctcattaaagatgaagggaaatattttgtgaataagcaacttgatgcattattaacccgctatcgagttttccattgtacagttttgccttatcatcctcaatcaaatgggcaagctaaaatctcaaatagagagatcaaaagtatttttgagaacagtgttgactgctctagaaagaaaaattggtctaagaagctagatgatgtgctttaggcttacaaaactgcgttcaaaacaccaataggtcaaggccggtcctgaaatttagtgggctatagggaaaaaattatttttaggcccttatttagaaaaaaaatggtatttttcaaaatca

SEQ ID NO: 388630 - DNA, 1202 bp, Cannabis indica
aaataattacttaatttttttagtgattgtcccttaaaaaagtgtttttaggaccgtcgcgaattctgatttttgtaatagtgatacttattggactaaaattaaattataacaatttgtgtctaaataatatgtttagtcacaagtaatttttttattgtaactaaaaatcacatttagtcatgttttttttattgtgactaaaaaattattgttcacttttttctttgttgtcacaacttaaatttcttttaattaacttgccaacaacatgtatatatgtaaatgaaaaggacctacatcatatttttgattaaatgcttgacagtgtacaattacccacatcacatgcatggtgcagtttgagagattttaatatttataatttataacaactacactatttatgatgaagaaaaccattgattgataattaattgagtgaaaaattataatcaattggtgtgtgtttttatatatatatagttcactcatgtatgaaagagatctcaaaatattcagtgcaatatttagtagttagcaatccttttctatgctttaattatggtatataactaaataattatatagtatgttattagccctcgcaacaaacgatggtgttattatataatatatatatattgttgagacatataagttacgagtttaagtataaatagagagatattaaaaatttattgtagtttaattactttccctaatacaatagtaatggagtttatttagaatttttactgctcaagaaaaactagaaagagatgttctagatttagcagaatatgaaaaataagctagtaactctcttttataagcaaggaggtacattacatattaataaaatattatagaaaatatataaaaaaaaatcactttggttaatgttcttttttattaaattaatttatgtacattataaatattaaaattaatatattagttaatgtttcaatttgtatgtgattttgtttcaatttgtttcctctgatataatatatatattttttattttaataaatttgtgctactgagttgtttgtatattattttagctatatgtatttatcttttttgttttgaattgtaaggattataatgttaaaattatatgttgttatgacttatcataaattatttaggaaattttaaaaaatatgcataccttaatattttatccctaa

SEQ ID NO: 388631 - DNA, 696 bp, Cannabis indica
atcatcacatgtattatacaatgtaattatcatatattttgtattaaccctcaaaaccatatatcaagactacatgtctttctttaattctcaccatgaaaattataagtaaatttctgaaaacatattgggagataatggattggactcattcgagtataagaggacattaaatatcgatttattatttttatttttctatgaaataaaaattttatttcaagaaataccctaaaaaattcctcacatgtcctacaaatattaataaataattttgaaggacaatgagttgttacactaaaatataatataattaaattttattttattattggtgtatattaagtaataagcatttcaatttttactgagtaattaaaagtgtttgaattaagtgtaatgattatataggttaataattaaaaataataattatataacatgtagatttagtacctacatatcaatttttattttattagagttagttccacattgctaatgtgtggaaataaattgagatatataaaatgaatgggctactcctcccattgccaattggttttgagatggaacccatgattctcaatatggtatcagagccatatcccttgcgggcaagtgatcctatccgatccgcacctatacagatagtgaccatgtccactctaatacggttcaagattgatgagcaaa

SEQ ID NO: 388632 - DNA, 1778 bp, Cannabis indica
aataaactttttgtcaatcatccagacaggttggttccttttttatttatggtgatcataaccatctgtcatttatatgcgttgtgtaagttgaatgactcatttatatatttagagtttatggttgttgtaccatgaaactcaaaatttggaccattgcattctagtggcaggtttaggcaatatggactatgggacagatacacacaattgtatcccaatgatgatttggtttacactgttggtgttagtgactacaccaaagattggttctttgctcagattcctaggtgtgtttctctcaacattggttgctatggaagctcataattgccagtgccttcgtactttctacattcattttcccatgcctaacttcatcttttttgcgagtgctgctgagtgaattaccaattacgaggctgtgaaatgtgtaatattgaaatgccattattttgtttttcttcctttgattacagaaagaaggatgataacacacttgaagggacaacatggaaaataaatttcaagcttaataatgtggttcgaaatggtacatacaaacttcgagtggcagttgcttctgcaactcttgctgaaatccaggttagttaataagcggaaccttacttctttgtttaattgagttattaaaatagaagtaatccttcttcctcatgaactctctgctacataaaagagtcttttgtaaattcaattaattggggcgccttctaaatcatttaggttcgattcaatgatcccaaaacacgacgtcccctttttactactggattgatagggagggataactcagttgccagacatggaattcatgggctatactggctgtataacattgatgtacctggggctcaacttgttgaaggggataatactctctttctcactcaaccaagaaacaccagcccttttcaagggatcatgtacgattatatacgcttagaagctcccccatcttgttaagtctaaacataatatatcatattatgcgctagcttatatatatgagtggatctcaatacgggtgttttgtatacatgtgtagtaaaatgcactattcataatatgtaatgtcaactttcaataaaagtttcaattacagccttggccacattgtaattgtattgtgttgtattatcatcatcactataataatcatcttttattttggttgaattaggttaagtgacactttttgaagctgaactaatgaaagcctaccattctgtacaatttttttttccacttctgatattaccgttctgtactaaatttttgtttgcaaatttgcaatttgtaaaagctaaacagatacagatatttagcttggcattcttgctatctcaagaatctcaaccatatctttccaaattctctctctaaattcttccatgtctttctttcattggtaatttgcctccaagaactggcactttaatatatataagtatttatataattaaatttctgctagtcatctcaaaagttgactactcttttgaatgtgagatagaatttactttacatttccacttcttcgttcggttaagtcaaattcctctgcttcttgctctcaacatattaaataggagaaaagtaataaaagaaaaagaatgtgagttagtggagtggctatgattttcattgttattttctagactttaagacatgggaatctattaccaccttagttttattaagtcatatataattagaaagagtgctagttgaactccaaacaatgatgtatatat

SEQ ID NO: 388633 - DNA, 526 bp, Cannabis indica
tgaaaaagagctttggtaagaagcgggttctgaataaggatttgtctagcttgttgctggttctgctcaatcaatgtctacataaagagaacaaaaacattcaatccaagagaacaaaaatcaaaactttcattacgctaggtttagtagtagcgagcgaatcagtgtttggaaaatgagaaaatgaagaaaaagaaaaaagagaaaaccttcatctgagacatgatgtcatagagctgtgatttggtcattccagcaagattggatggtaagccatcgcctgagatttgccttcccgccattgtcgccactcaccggcgagagagaagagaatccgaaagagagctttttttgtggttattcgttcgaatacgaaccagagattctgcgaccgataagggcctcctctaatgagccttattatgggctttttaaagcccaccaatactaaacgtacaatattttggaaaatttacatggtatactaacttttgtcatttttttacaaaaatactgtaaggcggta

SEQ ID NO: 388634 - DNA, 692 bp, Cannabis indica
caatctcttaaatttacgggcttttaaatagatggggttgaatgaaaaagacttgcgactagtgacgtcgagcatctatggcctcactagagatacaatcgaactgaagggaatgataaagttaccaataactttagaaacaacacccgttactgccaaatccatggctaattttgtagtaattgatcaacatttcgcctataatgcagtgataggtcatcctattctgaaagagatgaagatagttacttcaatctaccatctcaccatgaaattccccacccccactggtgtgggatcaatgcgaggagtccaggaggattcaagagaatgttataatactgcgttaaaaatcgcagaaaagaagaagtcagtaaatgtcatttatttgctcaaggctcctctccttcgacatgaattttttagaatcgaagaaataccgcatactgagaaaccagacctggatcctaggatcctcgactacaccaacattgcgcaagccgcagaagaaacaatggatgtacctatcgattcttctaataatacaaaagtattcaaaattagttctaaattgacttttcagtagcaagaaaggcttgtcacttttctcaaacaaaatctggatgttttcgcgtggaaacattcagacatggtcaaaataccgcctgaggtcatgtgtcatcgcttgaaca

SEQ ID NO: 388635 - DNA, 792 bp, Cannabis indica
ttttttcagaataataaatagaattagtgatgttgaaaaaatacttttacaattcatacattgtctcaatcacccccttataacaataatttaacccacacacaattaatcttccccaaacttatttctcagctaatggtataattcaagggacaagaaaaaaaattgctagtggatgcaaagttaatttcatatagtggttaaaaaaaataattgaacaggctaaagctcaaacaatcaaactagggatagtaaagataaaagtaaacttaaaaaggccaaacgatccaaaaaaaattgcctacattattttccaaataagtattgtcaagaatttcgactcaagaaataattcatgcaagttctattctattcaatcaatcttaccacaaatcaaagtaaaataattatgatacaatctaattattgacaatttacatcgatacacaatttgtacaagcatttaaattaattcaaagagttaaggaatcaagcaacagttcaaaattttaattcattccacaaataacaatagcaacataatcgatattagcttaattaacaactaaaacaaacaagcaaaattgaacactaaacactaaacaacgaaaaaataaagaaataaaattaaactcttcccaaacttaaaattttacattatccctaatatgacataaaacctcaaagataagacttacctgatacttgttaggctaaaattagtctaagtttcgggtcgtattttcggttagttttcactctttgtttctagttttagggctattttacgct

SEQ ID NO: 388636 - DNA, 716 bp, Cannabis indica
ctaaatttttaaaattttacatgtattaaataactataactttaaaatctataaaaaaaaaaatgttggaataaacaatttgtatagatacggaaaagttgcaataaggtgtatcgtagtatcaccttattttattttccttaatttcgtgtctgctttttctatttttaatatatatatttattttatttatttattaaatggatttgaattcttgtttcaagtccggtcagttgggggcccacgctgcttagtcaatcacggcctttttcttttctttatttctttaaaaggagtttggctcggctcggctcggctaaagcagaaagaaagaaattgatgagatgagatgagatgagagattatttcggtgtgtttgtttggtgggaaaatgagattctaggtgggtacaagggtgttttcggtacaattataaaatatatatatatttgtactctaaaaatttaacaattattataaaattaatatatatttttaaattttttttcatttatatatttaaaatatttttttttatatttatagaaaaatatacagagcaacataatttgtagtttaaatctacttcacaacccatacaacaactaataaaacaacttatactgtagaaataaaaaaaatattaaaaatagtatatagaataattttttttattgtgagtttttaatatatattttatttgatattaaaaatta

SEQ ID NO: 388637 - DNA, 1411 bp, Cannabis indica
cacatcactagctcttacaaaataaatactatcactaaacttgtctttgagttttggcattaaaatacttaagcttaaatcttggattcttaactttgtcttaggttaaaatttgtgggttttatgcttttaaccctaatcttaatgaaatggggttgagtaatgaaaaaagaacaatcattatgttctttagttagacttttttgtaagtgaaaaaatattaaatcatttaatagactttggacatgtatttatagaaaaattctcacttaaaatgttgtcatacattaatgaagaaaagtgtaaaagaacaacaatgctacaaggcacaccaccataacatgtcgttttgtgaatagttaactattttttataataattattaaattaaaatataaaatttagtatttaattatactaataatcatgggcggtaaccacatgtagactaagttgaggacttaaactaaatatttttctttttatcttttatacaaatattaatctagtcagtattatcaaattatattatttggtgtattcgtaaatctatatttaaaatttaatgagtattataaagttcaaaaacatttcactttactttttgtattattatttagatttgaacttaacagttaattttaaaatgtaattatactaaaatttattttaacataattatttattattttatatttttattataatcatttctataatttttattaaaatatttaatgtacataatataacaataagcattactaggtcctataaatagttattagctttttataattattattaaaagtaaaataagtgaaacttgatatcaaattgcataaataatttatgacacttcataaaaagtatttaacaccataaatattgttagcatttcactataaaaataaataatcaccctacctaagatttaatttttagttttgccataataatatgatagatctagtaatattaaacaatactagtgttatctactttttcaaatattaacataattaaatattatactttttgggacaagaattcaagaattgttgcttggatagtaggaggaggatccctaatttctttttgtagggccatcaatctcattcattcctttaaaactctctcaaagttttcaactttgcctttagataccttaccttctcatagttcataagtccccacactcacacaaccccaaataataactcaattcaaatcaaaccccactttgacatttttgtctcttgaaactttaatgagtacctaaatttaagttatattattgtctcaaaattatcatagaatttagtttgaaatcccaactattaagtagcaaaacagaaacacttgaggctagctcaagtggctatagaagagtgcgtgtgtgttagaggtc

SEQ ID NO: 388638 - DNA, 1720 bp, Cannabis indica
aaatttttaaattaattagtaaaaaaatttagaattaactgtaactacattatttttgtttatgtttcataatttaaaatctaaattttatatgtaattttgtttaaaaaactatgaagctagatgaaaattaaaattttaataaatgataacattaagaatttaacatttttttaaaaaattattaaatttatgtaagttatataaattacctgcaaatgtcttaatatataaatttttataaaattagaattatttaatatactatttatttattttttaaatgattttgcttgttcaggtaattttatgtaggttactataattatgatttaaattattttatagatttttaatttttttatgtaaattttcgtgaaaataaaaaaaaaatactattttaaaatatgaaataatttgaattaaaggccgacatgtaataattctgagcagccattttaagcatgtttctttttaatcttagtatattccaatagtactgaactcatttgtccatttcttttattattattaattatctcaaagttatttaaatattattaaaaagaaagaaaaaaagaaagtttaggccatttgttagattatgaaaaaaaacattacagttggatagtgggtgccgacttaggcacgtgtttatttatatattaaagaaaagaaaaagtatactatgaaatagtagttaaagtaactcaagatgtgaaacctcaaaaagaaaagaaacaaaaataatttaaaacaagtattttgatgatcaagataaagtatactaacactcattttgtaataatcttttacaattcaaatcattttttttattcttgtaaaaattatagaaaatatttttttatttgtattccttgtaaatatataaattttataaggataaacaataaaatgttgttaaggactatgttccatatatataggattcgtttggtacgttgtataaggatcgtattgtattaaataataaataacactatgtttgaataaaataatatattatattaattattacaactaaaatttttaatacaatgtaagttgtattattaaatacataacaaatagtctgtattagcttatatattataatatttacaaagaatctgggtcaccccaatctcccacccaaactcggacccaggacccaaacttgaaaccagacccgaacccaaacccaaactcgaggcctgagacctaggcctggacttgagacctgactcgggacccacaggacccaaacttgaaaccagacccgaacccaaacccaaacccaaactcgaggcctgagacctaggcctggacttgatacctgactcgggacccacctggacccgaaccacgagcccagacctggacccaaaccaatagcccagacttggacctggaccaagagcccagacctggacccatgacccaagatccggacctgcacactgacctgggaatcaggatctagactcaaatccaggactcgaacccccaccctaaccttggacctggacttgggcgttggcctaaaactggacccaaatcttggacctggaccccaacccggacctcgaccttgacttggactcgaaccttggacccgaagtcggaccccggacctgagacttgagacccaaacctgtaccttggactcgaccccagggtcgaaattggggtcaagtttatggtaaagatagtataattt

SEQ ID NO: 388639 - DNA, 1254 bp, Cannabis indica
acttaatatttattcaagccctcgctcagtcaaatttctgacttcgtcactgcatctaaggatatacatttagtaaagatactatttatagtttgattatgcatgattggaccaatatgtattaatatttttaatcaacatttagtttcggtattgccatgctatttattgatagagaaatttttagttttgagttaaggtcctcgtagagggttttagcaagttgtttatccaatttgtgtgattatacatagggccttcttctgcacgtgaatttctattcaggttgactgacacgcttgaatcaggaaacgagataagattagtataaaatgtgtatatatatttgtgtatgtatataaattgcatgttgtgttatgtgatttgtatactaccaacactagttcggtagtgggacagaatgcattggtaaagtatatgatgttcaagggtacgacacggtgttactaacactagtatgagacaagtacacaatgcatatggtacaacactcagtggtacttgaggtgtagttccgccatactaacactagtacaagatgagtacttagtgcatgtggtacatgggtcatacttctgttaggaacgttcttaatgcatgtgaagccttgtaaatatgtgtatacgtgcctagatacaagttagtattatgttacatgttttgtcattcatgtggtattatgttttgtgcttttcttactgagtctactgactcacatttgttgtttacgtgtgtagataaaagaaaggaaaaggcttagcaccagtgggtccagggcttaaggatgattgtacgtatcaggatggttagacctggagagttagtctcgggacgacttaggtctttattttgtagtcgcagagcgacatgtttataaatatatttttgaatatgattataaatttttaaaatgggatcacgaattttatgtacggctttatatttataaaattttaaaagtttaaatttgataaaatttttgagaaacccttttgattagcaaagacgagcacaataattagaaaatcactgtatcatgcctaagcaagtaggtgttacaattgttgggaatattttaccaggatctagatttactaacaagtatgtgttggattttgtgccctaaataaaacccatttcaatataatcagatttactaattaatgaaagattagaaattgttttatgttgcatgattcacatgatttatttcatgattatgtttaatgtata

SEQ ID NO: 388640 - DNA, 702 bp, Cannabis indica
ttactatttttattttgttagaaaagtaaatttcactctcttaggtcttgttaggagcttagatcttggcgggaagataatactagggaaaatgtgaggaaagaaaaaatgcgggaatggaaaataaatattttcttaagtctgatatggaaagctaaagggagtggaaaagaaatattttctttctgtttggttgtttgataaaatgagagggaaagaaaatgaattctttaaataaaataattttatgtatataatttattttcattttttattatttttttaataagaaacttataatagtgtgtatattatatagctttattttaatactaggaaacaaatgtattttgtttaataataattaaataaataaactatataagactttaaaatttaataattttatataattttcttactaatataattaacaattttataaaactttcatttttgtaaggctaattagcaatttttcctctcgaactttgacatgtactaaattatgccccttgaattttttttggtcgttaaaaattctccttgaactagcatcaaaaagctgacctgtcacaatggaagggcctgcattagggttaactccctttactcgatccaacgttggacctttacttttatgaatctctcttcatattatttcctttgtgatctaatccttgcaccctcaacagtaagggt

SEQ ID NO: 388641 - DNA, 1117 bp, Cannabis indica
aaatcctttttttccttttaattatactcttaaatatatcggttcggtacccaagatcgaaaggggtttgctcaattggttaggcatgtggtttggtttcagaaggtctaaagttcgagtctttcctcggtatctacatagcaattgttatagttttcaaagaaaattagcatttcttttcttattttttcgagacataattgttaaaatattgattgaatgagagtgctaacatcaggggtcagatgggtttatcagaggaagaacaaaaggaatctcagtaccagagactccagttaaacggtgaaactaatgtcggtaaggacataagtgagttggtacaaacacagagagctctttcaaaggatggtgctatcatatcctcgggcgatattatgagctgctgtcaggaatacggaagcacttcatgttgtcaaacccctgcaatacccgagaagaagtatagtttcgaggatgcaaacaacgagaaatcaaagaaagttgttgtggtaactgataagaaaaagagcaaccgaaatttactctctaggatgaatagtggcaaagggtcttcaacacgaagagtttgttcaatgccgacatggttggagagttgggagcgtgaagatacatacgcggctttagcagttgcttgtgctgctttatcggttgctgttgcttatagctgctacaaacaatcgagataagtctacgaacctcacactttatcagagcgatcattgtttcgaaaagtcgagatagtttacaaaccttacttcactcactggtgtgctaaaatattttgtaatacaccaatagaatgaaagaagtatagtgattatggaagaaagataagtttttttttcccagaaaatttaccacaggtgttgtaaaatgtggggcttggcttgggggatgtatttggtttgttttctctttcttctgttctttttttgttttcctatgtattgatagaagtttgtagttgtgaatatatgaatgttttttccctaaacttttacatgaattccacttattcttttcttgaaaagttttgggttttacaatttgtttggttgagagaaaagtggtgtgagaaaattagagtagaaagtga

SEQ ID NO: 388642 - DNA, 1351 bp, Cannabis indica
attcttcatcaatagaagttgcatctaaggctagagtaacactagtggtcccagtattagaagtttcctttcaagatagatgcagtcagaagaatggggcacagtcacactggtggcccgtgtatctgagcccaaaaaagaccatgttctcctaaccttgtcggggtgagcactagagaggtagatgaagaaaacccccttcttcgaataagttgcatgtcacaacacgctgctcatatctacaaaacacacaaaagacaattattaaaagagtaatggtacacgagttaatagagtaatatgataataagatgaatgacaattatcactaagtgagtcactccccctaacaggccttttctttgaaggcctagacttagtatccaccactacggcatccatattctccttctgggattctaaaagttgcaatttttctttgttttctcttatttagacaaaagggatggtgataaagttgaacccaaaatcatccaaggcacaaaaagaggtcaagattgagatatccttcttatagccaggcaattgagctatcattaaagctctctcgtacatggccatggtgggcgaaagtctaacaaattggttcacttgttggacattggtgtatctggacccaatgtctttcacgaggaactaaagggtcttgaagtcacctttcttagaaaacttatctacacctctcataaactcgataactttgtgtgcgtgttggaacccttagtagcttgaccgctgatgagtgtggttcagcctcaaattgaaaaggtagtgtattttgtggcatgtaggccatttccatctcatcaatttgtataggacaaaaatcgttgtaagaatcttcatggccattggggagaactgcccaggactaatgcaaaagtaatcagccacatctttaaaaaatgttgagggggagcgcccccatgaaagatgtgatgatgagaccaagtgcacaacacctctctgggattatgtgctaattggactttggaggggagcaccaaattactgtccttgccattcacaatcatctcttttaagtgtcggaaatgggtatcactaaggctattaggaggagccacacggatgagtaggagcttctttgaggactctcagagcaaattctttttctttgagagtgaccatgccagagctatcagttggatcctcctcggtgtcatccttagcaaagtagttttttgcttcattctcggggcccatttctcaaatgctttgatgatttcatccataagatcttcatcagatgaccaagtttctgttgggttttatgccctaaataaaactctttacaatctgattagttatc

SEQ ID NO: 388643 - DNA, 596 bp, Cannabis indica
aaaaatttatattgtcactaaaatattgaatccaccaaaatggaccaaggatttggttttgttagccattagagctgtagagtcattaaaacctttgaaggtctcatgtataagtctaaccaagttctcattacctttacaaaaaattatcaaatcatccgcaaaataaagattcacaagatttggggacttacaaaatgggtgaaaactgaagcccttcacctatgatctttggatcagcagtctagtcaagtactccatgatcaacacaaataagagaggagacattgggtccccttggcgaatgcctttctcacctttaaaagagccttgaagtcacccattcatccaaagggaatatgatgcaccatggaggcaactcaagatcccagtaataaatttggagggagagcagaggccctgtaaaagattcgagacaaagatctgatgaaccatatcgtatgccttgcttaaattaattttccacatacatcttgaagagatgttcttgcgagagtagcctttgagcaaatcttaaaaatttaagatgttatgggcgaaatgtctattcttgacgaaagcaccctggttgtcat

SEQ ID NO: 388644 - DNA, 807 bp, Cannabis indica
tccttatcaaaggatacttattcaacgatcataagctttggactatcaagtttaagagcacagaaaccatcacctcttattttttttttattcaaagcattgatacatttgaaactaataagagcattgtcggttataagacaacctgggagaaaggtactttgctcatccgaaatgatgtgacccaacacctcatgcatgtgattagtcagagtcttagtaataatcttgtaaaagacattacaaagactaataggaacaaagtcaacaaccctaataaagttgtcaattttaggaatcaaataaataagggttttattgatacctttcaaactagagactccattgagaaaatcaagagcgatcaaaataatgtcaggcccaaccgtactctaatttttttgataaaaaccagccgtgaaaccatcctctcccagactttaagaggggtccatctgaaacaaagcttctctaatatcttccccacaaaattcttgaatcaaatgagcattcatgtcctcaaaatatttctaggaactaaattaataactttatcaaagcatcaacagtgggtcaatccaaggtaaacaaattggaaaaataatcttcaaagatggcttgaattcttttttttttctttcttctttttttgtgaacatctatctatctatctttttttctttttatttatctcactcaaatacatccaagctagtttttttaacaataatctcactctttttaacaatacttgttgtgactaaaactaaattagtgacaacttgtatctaaatactatattttagt

SEQ ID NO: 388645 - DNA, 856 bp, Cannabis indica
agagagagagagagagctccgtgcgactcttttagggtgtaagaaaactgtatcgttcaattttctatctcagctatatcatatataattaccatcaaaagttatatcttcgtattatgtatacatcatatatataaacctttaaattaatccaataaaataaagatatattattatcctttatttgaaattcaaatataattaattaccaagatttttagaaactaaattaagtaagagctaagagattaaatgattgtttaagtaaagtaagacagagatttttacgtgattcaggagttaatgattcttagtccacaagtcaatgtattggccttaagagacttttaatgtattcaaatggatctttacagcttgaagaaccctagttcttgctctagtatttctcctctaggtttctcttaatgaagaagaaagcttagaaaagatcttctaatttctccccctttttcacaaagaaataatggggttcatataggcatagatttgggtctgggcgtacctaggacttgctagggtttatgtgcaaaacgggcccactatttgggtaaatacattaaatacatgaccttgaggcccacgtcagtattctggctcgtagggcaaacctgcctgtacgaaggagagcttgtgcaatatggataagtgtcatgcatgggtgcaactacagtagacaggaatgttagaaggaagttgttggacaaagggaatatatctatccttgtggtaagctcattaacatgtcctgacataggggacaagatctaatttggtaggtgttaggttatttttagtattaattttagattaagtttagtatatttttaattgagtt

SEQ ID NO: 388646 - DNA, 817 bp, Cannabis indica
aatccaactcaatgctttcttttattttacttaagttaaccaataagaaaaaaggaaaaagaattatgtataacaaattagtttgacattagtgccaagagagagcattctttcttgtcccctctctataaaaatattattttataatgtcatataactttacttacaagcaccaatatcaactctcttaaaattggtctaataatctaataaccgtcattttctattttgtattgtcgttttcactaaaagctagtatagttaaaaaatcaagttttaacatttttaaaccaatataaaaatgaagacctaataattaatgtagccaactaggttttgcctgcccacactcaaaagcaaaaaaacataatcctttagaaaaagaaaagaagcaaaatataatagtgtcatcattatcaaaacgtctaaaaacaaaatactactcaaaatgataataattttgatacatatattttatataattattattttttcaaaagaaaattgaaaagaatatcaaattagtaaaggtatgggtaaagtctaatactaaaagtataaagtataaaagtataatgtaacctccccgctttaagtctctattgggcccttacactcacagaataaatgactcttatacacgagtacgccactctggctactttatggactgacgactgaccctacagaccaacacaagtatttccagcgtgctttatcctcactcacacgcttcttgagaaaactttccagaaggttatccatcctgaaattgccccaggtcaagcacacttaattgtggagttctttcgagatg

SEQ ID NO: 388647 - DNA, 1075 bp, Cannabis indica
tgtgtacacgtagatgtacacatgtgtagttcaacatgacacttaactcttaaaataaataagaactgtaaattgttaatgtttttctaatattaggagttttactattaaaatttgagttttcgagattaagtgcaagtaaagtaaaaagattaaggattatgccgcaattaactctaaatataatgaattacatcaactatagagattatatgaaatattttgaaggaatataaatagaaattaaaaggggttcaaaataaattgtgaagaactaaagaaaaatgttaaaaggacatgcattttagtgtgaatttaaaggcaattaagatttttgtcccccaaactttgacatgtgtcaaatcataccctctgaacttttaaggtcgttaaaaatgccccatgaactattgagattgttagatttaaggacttttatccaattttagcaaaaaaagtttaacgtggatgaaagttcatgagctatgatttagtacatgtcaaagttcgaggggcatgatttggtagatatcaaattctggggagcatgattcagtacataaacaatcactgaaatagtgaaattgaatgaaattagacaaaagtctttaaatctaacaatctcaataattcggaaagaatttttaatggccaaaaaagttcagggggcataatttaatacattttaaagtttagagacaaaaattctaattagcttaatttaaattaaaatggcacatagaaatatagcatatagtaatggttggaactaaaataggagtatactttcttgcattcttctatccccttttatcatgtactgagttagaagttgaagataatggtttataggcgaaatttaatttttatattttttttggtaaaagaataaaattaaaaataatatattttaaggtaactagttacctccttagggatatttaacatttttatagttttttaaattttatttacataaaatacgatattatgtatttttatgttgtacttttgttatttaattgttgatttttgttatttgtacattatcttttatgttgttttcttattattt

SEQ ID NO: 388648 - DNA, 981 bp, Cannabis indica
taatttttttttggtttcaatatgcacctagaaacagcataaattgagagagagcactttagttttttttttcaaataatattatttggttttaaaagatttttgatacaagggtcttagaggttagttttaaaaagtattttttttcatatattatttggtatatcatatccattttaattttgagttatattttctatgtgatttgttcccattttttataatttttattttcatttcttttaaatcatatattaaattctagttgttttcattttttatgatatttatttctatcttcacatatatatatgtgattaaatactacttgtttctatttttaggttaaattatttctatttgcaatttgatttgatcccattttgagtgtgagttgtttccattttttatgatatttatttctatttcatatatatatgtggttaaattctagttgtttctattttttatgttatttattttcatattcacatatatatatgattagatattacttgtttctatttttaatttgacttgtttctattttcaatttaagttatttttatttttttatgataattgtttctatttcccacatatatatgaggttaaattctagttgtttccattttgaagtgaaaattgtttctattttcaatgtgagttgttttcaatttttatgtaatatgaggtaaaatgcttgttgttaactctattttggggttaaattgttttcattttcaatgtttttcaatgttagttgttttcatttcatgcacacactcacataatactagttgtttccatttcacacacacttaatgctagttgtttccattatttatttgagttatttttcattttcaatgtgatatatttctattttttatacgcttcaagaaaatgcatattggtgttcaacatattcaatcaagtgtcaatcttacaaacttattcacaaagttattaccaacatca

SEQ ID NO: 388649 - DNA, 848 bp, Cannabis indica
aaaacccctagatggtgaaggtttaagcatataccttgtagtgacagaacatgcggtcagtgcggaagataaggtacaacacccattctagtatgtaagcaaaaggttgatcggggcagagtgtagataccccctcatagaaaaattaacctactgcttactcttagcatctcagaagcttcgaccctactttcaagcacaccccatcatggtactcactgaccaaccattacgccaggtgctacaaaaaacctgatacatcaggatgcctccttaaatgggcaatagagttggggcagtatgacataacctatcagccaaggtcgactatcaaagggcaggccttcaccgactttgtagctgaatgtaccgaggttcaagatgttgaaattgagacaatggcgtaagagggcgaccaaccagcaacaacaagtgacgccaaaaggcctgacctgagcaattcatccgaacggcatgttcccaactccgagaataatgaaaggaaagattaagcaagtgaaactttgaagctacaagttgatggttcttctacagatcagttgtaaggagcggggatcaccctaataaccccagaagcgcaacgaattcatgctaccattcactttagtttcccttcctcaaataacgaagcagagtatgatgcattaattgccagtctgaaactagcaaaagaggtgaaagccacacacttagacatttaaagtaactcccaactggttgtaaatcatgttttgggtgaatacacagctaggggagaaaagattatggcttacctcagcaagatacaagatttgcttgcccaactggtgctggaaattattttacca

SEQ ID NO: 388650 - DNA, 978 bp, Cannabis indica
taaatacaaacacagataatcatatctaacatttattcaagaaattaaaacacttttttctagtaaaaaaaaatagagaaaaaggattatgataattattgaatttggatttattttttgtattttatttcttttgtgtttctttaatattgatttaaatatgagaaataggtgtgttttgttggtaatgatttggatttgagaaataagttacggtgctctttctcatggcatgaaattagatttgaaatggtctttctctttctcacacacttactggagaataaggcgtctagctccgtcggatagagaaggagacggacgatgctctattgggtggtcaatggtacaatggtgttccgatgagagagagagcgcgaagtttttttttcttgatagagtttaagtgacaaagaaatctagataaaaaaaaatgttggatgaataaaagtgtgacacatatgcaatgtgttcatgtagacaatacttaaaaattctaatatgacaattaacaataaaaagtaaataaaaataaagaattgctaacaaaatataaatttaaaagattttagggttaaaatattaattttaagaattagttgcaagtgtaataatttaagaaattttgctgcaatttaaatttaattgtaagaaaaattgaagaccaatcaaaacagggctactcattattatgtgcagaaggtaatggtatgattggttagaaaatagaacacttatttataatattttccaagcaaaaaagaaaacaaaaagacaatcgtggtggcgttgatggataaggacaaagacaatgaaatcaattaagggaccccaaaagacatcttctttcaccgtgtttccatgaaattaaagtaactttttttttttaattcaaaaaattaaagaaacttagaacatgtttgtattgttttctgtgtttttgttttcaaaaaaatatttttagaaatgagaacaaaa

SEQ ID NO: 388651 - DNA, 2383 bp, Cannabis indica
gcaaaaactttccaaaagaacatgatctgctacatcagattcggatgctgacgaagcagatctgcccagaacgggaaacttactaaaatcaggtccgatctcttcaatgcttgatcctgccaaaaacagattagatatctgattgtatcaagatacaatcgaaatcaataaggaaaaggcaataacaaagtttccctaaaaaagacaactttccaaaagagaattccttctcttttgagaagttttcaacaaaggaaagttcagctgaaagtgcaactttccaaacaaggaaaagggcaactacaatccgaatttataaggtaagaaatcgaatatgaatgcacaccaatcttaccataaatggaaaaattattttgtcaactaacttgccaaaaaaaaagactttacaggtaatgtttgtctatgtattgtcataagactaatttaataagaggatgaacatgataaagctgagagagagaaaccgtgtttaactaattcaccccaaaactcaaaaaaaaaaaaagtaaaggcaagattttggcccctttttcaatatcatatataactttatatttatttgatgtaccatgcatattttaattggtccaacgcttatatatatttataacatatgtacttaagattttagtattattgcatattattctaaacaattctaaattcaacaatgccacaatggcacgtaagtggagttgacaaagattggcatatccatatatacatatattttgtatttttaccaagcaaaaaaaaacatatatatttgtattaattatttagaacatatatattatggtgtgtgtggcaacaagatgcactatcatttgataagaaattgtattagaagaataaatatataaaaagaaaaactaattaattcactaatcaatatatatagttggtaaacgttgaccagcagattactcaatcattgatcaaaaatttaagctaaaagagatgtcaatgaagaagaagaatttaatcattatatattttgatgttgttgggctagtttggcacaattttttaaaaactaaaagctacttctcaaaaaaaattgtgacaaaaaggtgtttggtaagtagttaaaaagcagcttattgaaaaatttatggaaaaattacaactaaaaactaaagttgatacaacccaacttttagaaaaaactgctttgattaaaagactataataagttattttttattaataattatttaattatttattatatattacaaaaaatataaaaatatttttttttaaggaaaaaatatttaaaataaataattttaaatttctaattttttattttgttttaagagatattttatatttatatttatactattaacaaacaatatcaacctaagtttcttttaaattataatttttttacaattgataaaaatataatttaatcatattaaaaattatttttgtcaaatgcatataaatttataccataaaaaaagaattaattaaaaatattagaaaataaaaattttatataacatattttttatatatatatatatttgtgattttaatgaaatcgattaaaatattattattataatcgaatcttactaacttgcagcattttaaaatttttaatttaccaaacacttaggtcaacttttttctatagttctgctacaactgatttccctacatcacaactgtttttccccacatcacagttgtgccaaattggccaaatgtaagattagtattcatcttaattataaaaattaaacttttatgtaaatatcatttggtgtttacgtagcgcatgacatagttctcaaatatttttggccagtttaatttgacttagtatgcttaaattagaaatagtatatctatacttttaataccttttcctctgaaaaatacccttacatttcaaaaaaaattctctctctaactctctcactctccggcattgaacctcgacccagatgccctacaattgaacacacagacctagaatcctagttgcaagcccccgtcattgtcttccctcatagtctctctcgttttatgcattttttttcttttggttttctaattttttgtaatattttgtaatatttagcgatatatttgcaatgatagaccaaatcggaggttaggaataaagtttagcgatgattactgatatttgacggtgttttgcatatttagcgatgtatttgtgatatgagactgtaaaatgcacaacattgctaatcatcatgaaaatttgagtgtggtttcgcgaaatttggcgatgttgtgaattagagatatttagtgatgtttcgcgatatagaaacatttagtgatgtttcgcaatcataaaaaactaagaaaaaaa

SEQ ID NO: 388652 - DNA, 640 bp, Cannabis indica
tttttttttgacaaagtgattattactcattaatttacgatgcaaacgtccgccaccgacactcgaacttcctcgaaccaaaatagtttatcgtctaaccgtagagcatactttaccaagccatgtgggccgctaaaatctcaaaacgagctagaataaatcatcgtctaaccgtagtgttaattaattatatgtattttgaaaattaagttgtagtcagctagagtaagctttactaagaaacgacaattatttcaatgcatgtttgaagtagagagaggggaagggaattcaacatgttgggtttgaatatttgggagaagcagctgggaagttcaagtaaagaacatgcatatgttatatatattagcacaaggtttgaagtttgaatgggttggtggtggtcttctctctcaccaactaaaatagtagatatattaattaattccaacacacacgcaaccttttatggctacttgagttagtctcgtgagtgtaactttttataaaaaatattagtcttactagctctatatttaaatttaaaatttacaagttatataaaaacaattcaaattaactttaaataataaaaattaaaattaataaattttttaattattaatatcattttattttt

SEQ ID NO: 388653 - DNA, 914 bp, Cannabis indica
ggctatatgataatatatttgtggtgtgtatggtatagtggtggctaggataaataaaagaaggaaatgatggttcgaaagttgtgaaattgtgaacttttcagagtgaaataaattgaagataatgggttctatttatagagctactacactacacttcatcaaacctagttctctattcataccgtgatcctagctagataacaatatataacataattaatgaaataaaagacttaacaatttcattaatattcggtcaacaagactaacaaagataacatttttttctcttaagtgtaaccgaacaagacttatcccaagtcttcacttgttgatcaatgtgagctaatattcctcaatggcagccatgtgtcccttatatcaacaaacaattcaaattttgaattgtcttccacacctcctaagcccactcgtccaagttacttactaccaccattattatgtttgtcattttatacaacaataactatccgtcgaggccatcgacaagccgttgacatatcatcaatataatattgataaagtgtggcctcaattttctcctattcacatattattgccaacttatcgacaattaatcgacattatatcgataaatgcacattgagtgccatacacgtgtacaattacatatttaatgttaattaattttttttcacctttccaacttctgttctatctgtcgaggccatcgacaatctgtcgacatataatcgatataatgtcgataaagtgtggccttaattttctcctatccatatattatcgacaacctattaacaatgtattaatattatatcgataaatacacattacatgctatacacgtgtacaatgacacatttaatgttaattaatttttcttagcttcccaacaagtattctgctct

SEQ ID NO: 388654 - DNA, 1363 bp, Cannabis indica
tgaacatgttgcttagaatcttcaataacttcaacattcacaaacttctttctccaatgtaagagaatcctaccttcaattttattactagaaaaaaactcccagtgagtaaaataattcgccatcattgtttgaagcctcttccctttaacctttgtttcaaccaaagctccaacccctattttattcattctccatacttccgcaactttttcttgtttcttttttattcaaacccctaacattccaacattatattacaaaaatccatcaatcacaaactgcagtaccttactccccctatatcttcaatttgttcccccgttaggatcgcaaaagagttcctaagaaccttctcactagaatccaagtctttcctagatgagcccgagcccttggaagatcggttctttggagctttccattccccatcattttccttccctgtagttacattgttctagccttctgaaacttttctgtttccttcagagataactgtattgttttggtcatcttctttttgagtttcattgactgtagcggtattggtagtctcctcagttacattattagctactgtaacagcttcagtagttacttctttagctactccattcactttagctttccttttcggcttttctaccttcctacattcagccataatgtgtccaaatccaccgcaatgtttgcatttcaccggcagccactcatactcaatttcctgctctaccaattgcccatattcattaacaaaccaaaaagttcgttccgatttatcagttatttccatttcaacaagaacacgagcgaattgaactcgggttcggtccttagtgtgcttatcaataattatcggattccccacagtacttacaagagcgctcacagtttttttaccccaatattggatcccaagattaggtagcctaatccgaagaggaaatgctttcaccatcctaaccatattcaaattcgcagaccacggtctaacaatgaccgatttcctatcaaattgaatcattccgttctcaagcacctcatctcttgttgcttcatcattaaatttcaccattgtaagcccctttgtcattctagcaatatgaattatacctaaatgcccccaaattctacggataaaaccttcaaagaccaaagctggaacattagcacccagcaccatacatataactagagatttccagctttcctcttccaatttcacctcctccaagtctatgtgagcaattttcctaccttccctaatcttcggttcagtataagaaagtttagcatcagagtttagggccttacctcctgagaactgctgccaatggtgttgctgttggaaattatttta

SEQ ID NO: 388655 - DNA, 1362 bp, Cannabis indica
ttatttttgtattataatatttatatataatcggttcggctattaatttattaagggatcgggacataaaattatttttgttttgtaatatttataataataaacatatactagcaagagacacaataaatacttcatgataaaatttagataattagataaatgcatgtgtgattgaaatttaataaaaaaaaaaatgacacaataaataacatatatagtatatatataattatataattatttttttagtccttatattattagttttataattaaattgtaatttatcttttattaatacataaaatctctaacaatgattacatgcagattttgctgctaaaacttttacataaggatttaagtgtaaaaaaatgattatataagaatttttcaaccaaaaatttgcaccagaatttaagtacaacaaagtgaattatataaatatttatgttgcaattatcattaatttaataggaaaaataaattaaaaagaaatactataccatatttatatattgaaacacagtagtagaaatatctattttttatttaaattgatatttgtatataaactttatttgtaggtacttcccggatggaatagatatctattttgacaatgttggaggcaaaatgctagaagcagcattggctaacatgaacaatttcggtcgagttgtgagttgcgggacgatatctgagtacactgaccctaacaataaagtaccaccaaatatcaatatgcatgatatgatatataagagaatcatgattcaaggatttttggcaactgattttttgactatctttccggactttctctcagctaccatgaatctcattcgcttagggagaattaagactcttgaagacatctctactggtttggaaagcattcctcaagctttggttggactctttcatggtgccaatgctggaaaaaagattgtgacattggtagagaattgaactatttttagactcaaatatgacaactctatttatgggtagctaaatgaataaatagaaattacaatagaatatagaaaataatgttaggactacttgcttttcaataatatgtcacaaaattaaaatttgcaaacatattaaaattcaacgacacgttttattgccctatggccatgacctaataatatgtcttgtgatattatatgtaatttttcaatttaaatgatgcatttgttattttatcaaaaaaaaattcttttttcaaccaaactaatacaaattcactactacaatatgggcttttagtttcccatttttcaatccattttataaaaagggaagctaaaaagtgtgaaaatatccgcctgattcgaaattgacatt

SEQ ID NO: 388656 - DNA, 3797 bp, Cannabis indica
cctcatcttcagcctcagaagaattagcaggactgacctcgccttggtcctccatctcttagacttcaacgtccccagcagtatcttcctcttcagtatcaggtcgggcctgctcagtgtttaaagtggcatgacaggcaatttgtgggttggataatgaagacttccgcacaattttcttggtgcgcgccatcatcctaagcctggacggaaccttgttggtatgtttatcaatggtcacaacaaatgtagcgacgggtttacctgcagcagcaagatttggacagcctacgggcaaggtatcagcggtattcggatgaacaatgtatgtccaattggacagaagatagcatctgaacccctttctaagctccaaaatgaagtgtctgtaaccttgaccctcgatatggccgggataaaagtggtgttgcacctcgggttctggaaaaggtgtttgttcactgcttatctccaaatctttgaagctagaattggaaaggctgtcattggatgaggacagactagcataaaggcgaggatggtcctcgtacaagatgagaatttggtcgggataacaaatgaaaacttgttaaattatacggaccaggtttgattgtaagatcaaaaatagaaattttgcataataatgaagtttgcaacccaaaagctcaaaatttgaattaacgtctgattctcactaaaccccaaatgggtaagtgaaaatgagtgtcgtggggttgaaattaaaatgcagttatgatcaagcaacgcgattaagcataatcaagatttcgaattcttaaacctaaaatttctatggttctcctagaacaagttcaaaaaaatcaagtttcccaattaaaaactaagaaaattaaacattgcaaatgtataaaacgaaggaaatgaagaacttactcacggattcaaagcttttgatttgtcgaacgacgctggctggtattttctgaggattctttgaaggaattgaaagaaaaaagatttttgctctcattctttaagagtaaaaatggctaaaagtgatcaattaggattttcaaccctatttataagcagataaaaaaagagtaataatttcaaattttaaatgtctcaaattccccccaaaagtatacgttatgcactcgattatttgtagaataattgtcatcacgtgtaaattttgaggcatggtttaaggtaaaattatcaatcagcattaatgagccgaaactaaagagactctttgtcagagtcacatcaagttatcaatcaacaccacgaccacgtgccacccgttcggacaagaatttagaccgagtgaagtccacgtgcgaccaagaaggtcctgcgcagacttgggcggcaaatgttatccaattttttacacaatgacaaggcagaatacttaggtgacacgtttcctacatttcttgtatctgggcaaaattgaatgtctcgaacaggctccatattgtatgtgaacctgcataacattttcattacctgagcaggatgaaagatagatcatcctggcaggtataaatctggcttgccgaactacttattaggagttaattacttcagaatgatcttgtgaagtccaaacatgaagacaatccctacgatcgtgggattgaattagagaaatatgacaacctattctaatttcctaaagtaataaaaaacaccagaatttaaagaggttcagccccgtgagtgtggtaatagcctactccccttgagtggtattaacttgagagaaagaacaaagtgtttttctccctaaaagctcttacaatgaatctctgagtaattctcttagatctttctctgaagtaattctttcgatccctttcacagtgaggctaagtcattatttatagggtcgtaatgcatgagggaaggttttccttttgcctacaaagtataaaataggaaattacatttattacataattaacactcttaatcgcttattaattgactcactgtcattgactaaaagtgaggtcaataaactagttatctcatatcgtagtctcactttcaatttgtttttatttttacatatgatattttattctaaacattaaaatccccttttctaacttttatcactaatttttgagtaattgaataaacctaggcctcgtgggatcgacccttacttacaattatactgaaataaggtattagaattaaaatattagtaaatttattgtgacttacaacacgcatcaatattatgttatttttatttatataatcataaaaatatttcgtattgttaattttgaaatttaattaatatttttaatataatgtttcttttaataatataaaaattatcatagttttttttattataattttgaagagatttacttattgaaaaaaatcgatacaccatatagttttttttataagtttcttcaaaaatttacaacataattaaaattatttggtacacattatagatacacattgattaaaatttgttaaaaataaaaatggtgtatatagtgttgatattttaatttttgttaaataattaaggatattaaattttgttgatcgaggttttcggcaaccaattaaataatatatgagaagagttgtagaaagtttaatgcaggagatttttacgtggttggggcattaatgagccttagtccacgagtcttttgtattaataagagtatttattacagagaatgttcttggtggatttctctcctattttctctctggattccttcaataaaatcgatcgaccccttttcaatttgtttgtggggtatttatagtgtttttctaggcggatccgtaggaatggataacttttctttctgtgtttgcctcataggggcgcatattcctgacagatacaaaataggaaatacatgacctacaccgaaggtatcttaggagttaggtggatataatcttttatcccctcttgactgatgtgattcctcataaagtatccgtcactagactcattgattgttgtgtaatcaccagaaaaagggggtttacaccatctgctacgtcttttatggaagttctaatacgtcttccccatgcagcattaaatgcaaagtgattgttcaagtaatctctttacctcccgaacatgccttctcatggccttagcctctcggagggcagagatgtgtcttatgctctcctccaggaggcaccttccctgaggtgttccttttttgtttaagacttagttgattttcgtgagtgatggttctttcagacccacgtgtcacccttatccgtgtccacgtatttgtggaaaaaaaacaaaggcaatatttacgccacaagcctcatttagtgaagagtaagtgaggcttgcttgatgtctcgtttgatatagcggcacatgccgtaagcgcgtgggctgcatttatgatggtcatcattaatatttatttccctttgcaggcaacgattcgcttcccgtccattgagaaatcgtcacatttaacccgagtgtcagaaaagtactcaaacattttcaactgccctggcacccatttatctcacccgttggatttgaacaatgcgaatcgattacaatttctaccatacgatggtgtctgatcatagttgccttgaattcgttgacaccagccttttaatacatgcttttactagggcagaattagatcgtcagggtaggattagttttattcttttgttcttgcatgcatgacttctcgataatgttctaacgcctttatttgtccatgtctttaagcagcgaagccaatggatga

SEQ ID NO: 388657 - DNA, 750 bp, Cannabis indica
tctaatagcaaatctaattattacacagttctttgtctgaaatgttgacgcgatgataaaacgacaataattttaccaaatcgacactcggtgataaaacgacaataacatcacaaaaactacacacacaaaattgaagtgacacagaaatttgacagcatcattttttttattatttattttaaaaagagttattagggacgaagccttttatatttacacactcaacaaattgcaaaactcattcagtcaaaaaattgttgcaagtcgttatttgccacaaatcccttaatcttaagagttttttggcgtctgggtacaggcttgggtcgaggtccgggttcgggttcaagtctttcgttcgacgtagtcaagtggggtccgggtcctggtcggggtccgggccaccatcgaacttttgtcttcaacctttactcattttaacaataagaaggcatcgatccactgatagaaaaaaaccatgcccaaaactcagatctggtcgttttcaaccctaaatctaacaagaactcacagataacagacattaatcatacaatttattcctttgacaacattgacgatggagaagctatggtagatggtaaagtcgttggatctgcgttggtcattgggtccatgggttgttgggtttatggtcacagtggtcgtggagagagagtaccaaggttgtgggtcaagtccttgaggtgagtttagagagaaagagagagaaaggaggaagagaga

SEQ ID NO: 388658 - DNA, 1568 bp, Cannabis indica
acccaaaaactaatttagtaacaaagttaattagtggcactaaatctaatttaacaatagaaacaagaagttgtggaattgctaatagatattcattataaattaacaaatccaaataccagactattcaacaaaaataaatttcactcataatatatttaatttcacaatagtaaagttccaccactccctcgataacattaacgtgcatacttttcattcatacattacaaacaggaacaacaataatagtgatagacaaaccacatctcactgttttgtcttcacttttgtgtcttcatctcttcatttagcacatgataaagtaaattccctacaaacagcaagagtagcgacaccacctaacccttcacaggtcttgaacactcaaacctgggggaaggtattgcttcaacttgttagccttctcaacatcaaagacacaaagtgtgtagaggtactttgaccatctgaccttgaattgacaacatctttggtcctcttgatttttactgaacgagcatccttccttcttgcagtaagaaggaaatccttgatctcatggatttgcttaggcatggttgagatcgatggagctcgtgaggtaggcggagttgaaattttataataattagtaaattaaattatgcaataacactaatacttaattacaggtatccttttagaatttctctttaacttactttaatactttttcgcattctcttgactactaataccgtttagcatttgacgtcatattacctaataacaatgctgatttcttaactaatcaaaactacaaacagtttgttggttaataaatcactgcaaaagaaatccttggacgtctttgaaactcaacttgattacaaaaacaatacatagtataatgtaaagctatcattggacggtatactataaatgatttctttatatctatatatttgtggtttttgttggactcaagtgtttgcatataataaacacaacactaatttgaaatattcactcactcaacattcacactaaatacaacacgaactgaacgacgaccatcaaaccaagtaatcgatccaaaattgtagccactctgagcatctttgccagaaaatgaaacccgaaaaggaacacttttcacacccttagagaaaaataacttctctggactaactttgaccaccaagccttgtggagagtgaaccttggcaatgtaggtagaattgaagggtccaacattggttacacttcttttgatgaccttagcaccatggtgtctattgagttggctgatagaaattgatggatagttgatgttggagatgagttcttcgatggagagttttggacaagtgaactttgtgtttgacatggatcttatgttcttctctgtatagccataatagcaaaggaattgcagatagtcttctagtgttgtttcaaacactagccctgggttaagagctttcattgggttgatttctcctacacctgtttcgtgtggactcgctatggagtttgagttgtttgtcaatggttttcccatgttgttgtattcacttgctgca

SEQ ID NO: 388659 - DNA, 856 bp, Cannabis indica
gggtacgtacgtaggcccgacatgacctgtagacccggtattttcgtgtcgtgctcgaattcatactgtgttttgctcgtatttctcaaccaggccgtcagcctattttcatattcggatttgaatttgtgctttaatttttttatgtttttttaaaattactaaagtatatgtatattttatagttttagttatatttatataactttttaacaatattttaaaaataatcatataaaaaaattattagcattattaaaattcaaatatttacttataaatactcaaatttttatatcccaccttataaattaatatataaatcttaatttttttcatatttaatgattttaactataaaattataatttattattatatttaagttttattattttttaattaacttatttacaatcgataaatgctattaataataataataataataaattataatatttttaatatatcgtgttgtgttttttgggcttgtgtaataacgtgtctttcgagctagtatattcgtgcttatgtgtcgtgcttttcatgcttctcgtatcgtgccatgcgtaaggacatatttttgtgtcctatcgtgtcaatatattttgtaggttattttgtggagggtttacaattacagggactttactcattactttaattttaaatataatttgtttgattttgattttcaaccgtttatattaaggtgctagtatgttattactagccaaagggtaatacggctagttattcttagaaattttttgtttttttttttttttgttttttagtaatgttgagctagtgatatgagttgcgtgttaatttctaagtttgtatattaatt

SEQ ID NO: 388660 - DNA, 1178 bp, Cannabis indica
gtaatcagttgatcaagtgtttggtttgcagagaaactaaagtggtttatcctaataagtatcagtggccaagactcctttattgattgaaaggtaatgtatttgtttagaaatttcaagacctgaaagtctaaattctgaagctttatttaggttcaagtctttgtcaatgaaacttggccacatgctttgctttatttggtcaaaggacagtagctacttcctttgaaagtcaactgtggccacttaatgaattcacacaaacacttcgaatatgtatatgttttttccacttcagtaaatttgaaagtcaattgtggaacaatgatgtcatgtttcaaagagaaattttaaatttagtctattagagagggacacttaataggatttccctttgagtggtttttcaatatggctttaagaaaataatgaaattgcacagtagaaaaatataactatcattattaagaggagaaaacaaaaccataatggatataaactaagattctggaaaataataataagtaggggaatttttattcttttggttattttttttgggcaaattttataaaaatatggctttaaaattactttacacgaaaaatttaaaaaactgttaaaaatataaccagttacttagcaatcaggtcatgacccgttgatttgactacttgagattttatggatttgacatgatacgaaagttattcgaatcatgttcgtgttttataaataggaaatttgaattaatatgcttaaattacctaataatttttcccctaaatgcaaagttagtaaaattggtcatatatgaccacttttcctattttcctaaactacccctctcatttgaaaccctctctcttcgtctctctcagccgaacaaacccaacacctaaaacaacccatttcagccaccacggttagcacacagcccaactcgcaacccactccgacgaactcgcaaccccaacccactccgaaaatgtcaaaggtatgtgatttattttgtttgagattgtttgtgaaatattattggttagatttaagaattttattgtgaaaatgggattcggatccgtgaaaatcggattccgactgtgaaaatggtgaaaatggccttcggatctggggaagaaggccagcccgatggggtgcaggtcggtccgatggtc

SEQ ID NO: 388661 - DNA, 670 bp, Cannabis indica
acatttgatctatgtggacaatgttctccaatagtataagactcgttaatttaccccttgaaatataacttttacaataatgtgatccttacattatcggatagtagttaatatatgaatgcaaatttaaatatcttttactatttttacttaatgaattaaaaaatataatgtataatataattattataaaaagaaaatcttttatctattattcattaacgtaaaattgtgaagggtatttaatttgcattaattagtcaattatcattcaccacttcactcagttcacgataaaattgaataaaatatgatagaaggactatattatatgttaattattcttttttcttcttactcacatttctagtataagaaatgtatattttgataaaattactatattaataccccatatttatatatcaataataatacaaatcttaactattttcatttttattgtttgtatttatgtttaatatttttatttgtttcatcaaatatatgtttatttgtttttaattataaattagctaatttcatattgtaattctttatcactcatataatgtactatattaagattaaatttcacacacaaaatattacatattattataagtgtataaccaaagatctaaagtccttgatgattcaaagagtagaa

SEQ ID NO: 388662 - DNA, 775 bp, Cannabis indica
taacacttttttttcttaaatataggcaaaccttgagataggagaactttcaactgctctagaaacttttcagaagttccaccataaagacaacacttggcgcaacgaatacgcacaacaggcttatataagtttacctttacattaatttctaaatatttcttccaatttgttttgtattcaaattagctatttaatttattaatttttgttggagcaaatgattgaattggctgcaagtcaaccagcgcccacttatgatcaacttgatgagactgatgtagatcttacacagtattctcgagacttggttgctatgatgcaagtacttagggagcgatctcgacatctaagaggctttggccatctttccagattgaaggcagttggggcaaaagagcacctgccacgaattcttctaccccactgactgttactatggaatagtacgaggcctttacagagaaaagtgaaggacgcatagcaggcaactcagtatacgagacaacaatataaaacacaataactctacctcaggcaattccaagatcagtttgagtatctgtcttgggttgtgccgagtttcaacttgtctataatgaatcttccactattctccactactcttggtgctggatcgttatcgcatcctcccgagactcagaacaacaacgatgacattacccatctttagaacattatatattatataccacagttagaattttgcttttttttttcgaacatcttttaatattttgtttatttactatta

SEQ ID NO: 388663 - DNA, 967 bp, Cannabis indica
tgtcgagaaagtgctaggcaccaataacaatgctcctaaaaattctaagaatagtggtaccttgcgacacttttagctggaaaatgggaatgcgagacaagccaggagagttggtgcgcttatgttgctagcgtcaggtacgtgggccatgacatgggagttggctggacgaaggagctacatcacaactaattgaactatggtgttgcaaattggaccagcccataaaatatctttttgataacatgatgactttagggctccaaatcattaacgtgtttgccatgttgtattattgtacaaatttgagaagccttgacatatatgattgaaatttcgggcttggacgtgtcactctaagatttgggattatcactcaatttcatttataccattttgcttaaatttaaaacataatatagaattaagtaaattaaatattttccataaaaataaatttaccattaattaaaaatttaatttatattaattttatatacataattaaggacttagaatgtataaatttgagtcttaatcacaacccccaactagcttattgctagtctttagtaattcaagcgaagaaaaataatgtcaataaaataattttaggtcaaaatttaaaaatgacacaaatattcaagcaaaatgttagtaacaagcgaataaaaactatacaaagttaccttgaataaatctaaagttgtgagtgtgtgcgccaaacttaaaccttcttaccacaaaccataacacataaaggctttcgaaaatataccatgtagaaatttcaactccattagcctcacatgtatttgaaaatatttatttacggctaaagatttcactcatggagttagaaatttaaaagtgagcacttcaaatggatagatcaatttaggacaaacatttgaataaacattgaaacgaagataggttataaattatttggacaaactaccgtaaa

SEQ ID NO: 388664 - DNA, 1189 bp, Cannabis indica
tttaggggacaaaaatattaatttacaaaaacacttctctattcaaacgacaagataggacgaaactttacaaagagactaaattactataaatataaaatttgaaaaaaaaaatattagcaattcatatattttaagaaacacgatctaattggatcttacaaatttaagaaataaaaatactaattattcttaaaaataaccaacatcttaacccataaaatatttttatgtatttagcaacatatattatagcatagcatcctcatttccactaaagacatgttccatgcatttttaataatattattattattataaaaataaataaatcaataaattaagatgctcatccggaccacatttctggttgcagctagatttaaagttatgccttatcttttacttttttttttcccaaaagttatgcctgatctctttgacaaaagttaagtttaaatagtatataaatttcaaaaaattaaattaaataacttgaagaatgaatcgagaggccatcttatatgataaattcacgtttttaatttactaattaaactttcatcacctataaaattgagaaattagactaatataaggattgacatcactctccaaccgaatataacaaaagggaagaattagaaaaggcatattaaaatttcagcacaaaatgactcaaaaatagtacttaacaacaaagagtgattctataatgattagtctattatgaaataaaataaattgataatatgactgccacactataaattcagagattgtgcactgaccattctcaagtaaaaagaaagaaagaaaaaaagaaaacaatatgggaggagggtggtcacaagatgaggcatctcagagtcagtttcatcaaacaagtaaggaagaaagtaaaaatagttcaaaaatcctgaaagaaacaaaacttaataatggcaataaggctattattaatacagagaaatcacctaataaatccatacataaattggatgagatcataagagatgcagatgtcaccatagatcactcatctatggagaagctattgcctcagctccaaaatgggatattattgaaccaaaaacacaggtacttaattatttggaatatcaaactatagatgtatgttgtttgcttcttttattgagttaactcataattattactaatttttttt

SEQ ID NO: 388665 - DNA, 1665 bp, Cannabis indica
ctttcattacttcccacttactatttcacttttgtaacgtgttgtggttaagtttaaattgcttaactttcgtttttatttttggcaggaatgatgaagaaggagaatgtgaagagtcacaatcactttattacttgcttcatgataattaagtaataaggggataatttaagattcatttgtatgattatacaaaattatggttttcaatattttaatattataaaataatacaatgaatatgagtatactccgaaccccccaaaaaaaatacatagggtcaaattttattacacattagagtaattatactctattttaaaatagagcattgatgtaaggcacagcgtaacatcatttaaacatagtatattgcgattagttaacaatattttatagaagttattttatatgagattcgatacttgattgtagcatgttaaaagatgttaagcaccttttaacaattctccttaaaatacaatgtgtgtttagatgtcaagtagttacatatgaattctcatttttatatttggcaaatgagttagtaattaaatagtttaataacattaattatctacaaataataatatattataattacacataattctcatagaaggccatgaaaattaatgaatgtactgaaaacccctacattatcttcaattagatgattattgtgtgattacaattggacaaatatgttaaaccttgcaattactctaaattacattcaatttcattccttttttatcaaactttcaaatatattaaaacatgctcaaaactaagcaaagcaggaaagttctagttggccacaagagcaaccaactcctcaagagacagaaaaccaaaataagaaaaattaaatacccacttagcaagcttgtgagcaaactcattctatccacacaacatccacatctattaaaaggtccaacacccataatacattcaatttcattaacacaacacctttcaaaacgccccccaaatatatatatatatatattcttttgaataaaatccccaaaatgttacttgtaactttttttaatttttcaactgtaaatctattaatatttccattaaaaaaaactgtaaatatattaatagaaaacgcctagtgttggcctgtgtaatgtaagtttaggctatatatttgtaaattaaaataatttgtactgggaagcatgtgcgtaagggtgtcttcagacatttacgagtgcaagcttaattaaggcatctactatttattaggcgttagtttttacgttaaccccacgttcggatatgtaaggtacgttagaagacaagatataaataacggtaaggaggggtgaaattatcataatatatttatataaataagtcaacttaaaattgtagattggggctgtggatatttattggataatattcaataaatttgaatccaaccgatttaatttaattatttattagatattatcaagcgatccaatcgaaccaattgagtcagccgatccgattcaatccaatagattcattagattagatcgattccaaccatttgatgcattaaataattttttattgaattgaattagattgtattatcccaaaatttgcactctgacgtggcatcacgagaatggtgacacgtggagtccacttggaaca

SEQ ID NO: 388666 - DNA, 1154 bp, Cannabis indica
tttttttttttttttgaacatgaatactagtatttctaattgattaaaagtttaagtgtatctaatattacttatttatctgtaaattattatattgaattgtgttagttgttttcttttcgttttttttaagcaaagtgatgatgttaaaaaaattgattatatataattacataaattatttatgattaatacttagcttcgggtcgggttaataatcctacttagttcgaattaataaccgtgttcataatcaatttcattttgtttttggaattgctttatttaatatttttctaaaatgacgccaatttgcaattccaaatttactaaatataataaatttagaaagatattagtaattaactgttcatttccaaaattagagttttatttatttgttaaaaaaaatgttagttcatttatgacaatatacattactctttcatattaagttaaatccattaaaaaacaatacaaaaaaaacgataatcaaggcaaatgagatatgttaaggctaacaacatgatatactaacagcgcctttaacaaaatttccgttagagatttttggggtcgtatcacctgatacgtttggtagtctctctgtttttgagagtttgttctgagttttagtgctatttttgtttggttccgattggtgtctaagttctatgatggcatccagtagtagtgaggaaagagctttagacgcagggagagaaacgattcctttggatgaggaagagacagaagttttacgcctccaaggtatcaacacagaagaagtgtcgattgacaccagatggtgcctagtgggtaagcttttaactggcagagtctcagattttaatgtgtttcaaaacatgatggctttcctttggcagccgggaatgggaatgtacgttcaacccgaatttgtttctttttcaattctatcatgagattgatatacaaagggttattgatgggagcccgtggacatacgatcgtaagcctttcattttcactaggttgaaggaaggagataatccaaggctggtcgaaattaacaatcttgatatgtgggtgcaaatacataatttacaaacgggaaatatgactcttagtgttgtgatggcgcttggaaactttattggtacgttcattgaatc

SEQ ID NO: 388667 - DNA, 1387 bp, Cannabis indica
gaacttttgccagcataaataaaaagccctggcaaaaaagacttttcccagcgtgtaaatgtgctagtaaaagttagattttagccactgcaaatgtacgctggtaaaactttgatctctttgcctgcgcagtttgcgaaatccgctggtaaaagttacttttaccagcacagtagcgaactgtgctagtaaaagtgatatttcttgtagtgacagtggctatttttgctcaccaatcttgaatcaccttatcacaggccatgccatttgctcgattatttttgttcagatctcaagcatctttgcacgatctgatctcgtgcggctagctaaccatttagataggtgtgcatcgaaagccggctagggatatggctctgataccatgatgagaatcatggggttccatcccaaaaccaattggtgatgagtggagtagcccatgttctaatatatggcttaatacttttacatttaatccatgtgagacaatgttctccaatagatagaaatattatgataaattagtttattagtattgaaatataattaagagtgtgtagaatttaacttaacgccttaaaagtagaaatttcttagtgaataagatattataagatcgataactattaataaaaaaatttgatattattattattattattattattattaatattattgttataaacttatcagaatctaatgataagtttatatatacattgtttatgttttaaaacaatataaacaaattgaaattcttcgtcctttgaaatcgttatctctttttatccatttcttttattttcaatctgaaacataacaattcaagctctggtagtagcgggataacaaattcttgaaaaagggaaagcttaaggtaaagattgatttctttttatgctaaaatcgattagttttacgtagttgttttgtgaattagaatagttatggaggttctaaccttatagaattgttcttgggtagccatgggactagctcaaatattttcttgttgaatttgaggtgattttgagttagaaattgagtttggaaccttttacagcttaagtccaaacattagtggcgttttccatttaagggctcaattttaatttttattatgtaagaatagttgtacttatagtatatgtgtgccatgtgaagtttgaagtgattaggatgttgggttttgtgtcctaaataaaactcatttcaatataatcaaatttactaattaataaagatcagaaactacattttatgttgcatggttcacatgatttatttcatgattatttaatgtataaattctattaattccagaacatatgtatttgttcatgattatagtgtcgtcagcacagtggaatataatcatgat

SEQ ID NO: 388668 - DNA, 771 bp, Cannabis indica
aatctctaagttagtcataaccttaccccttgccaggagctcaacctctagggtattcatgtgttccaaagaggaccctcaagagttgccatgcgaaaagctaagctttataaacgcctaaaaataaaacgaggtcgcgattagtgccagaaaacaacgttagccagccagcccctctatggtgctaccaagacttaccagcctctcaaagacacaacaatggttgaccagcttcatacaataggccctagggttggaaagcctacaaaaaagaaaaaagtgagaaaagttaaatgtgaacttattgagccaaactcttgaagcctgacagaaatgagcctctctggcttgctgtcaccaagctcctaaagctaattatccatagtaggaagcctttgtcgagatgcctgcaggctacctccatggctctcttgcccatggctaaacacactcatctactaggcttctgatttcccttgcttgaagaccgatccctactgaatggagggtcaacactcatgggctcccaaaacggcacatgcccaagaggaggaggaggaggaagggatgaccctacagcatccctagaataggtggtccgggtcaccttggccctcaggtgacccaaaggcttgtctgaagttccacctccaaaacctttgaatctggaagacatatttgttggtattatatttatccaggaacttagatctacttacaagtaagttgatttaacaacctaataatgaacttctaaaacgatgaactaaa

SEQ ID NO: 388669 - DNA, 950 bp, Cannabis indica
tttagtattatattagagaaattgtggagctacaaaaacttaggttgtactctaaatttgtagtatttatttatttatttattaataatattattaagagtattgagtatgaaatgaatgagtttgatttgaacgaggaagaagctacacactccaagccctagacaagctacatgcacaaacaacattgtattctattattattattattagtactaattaaactataaatagctaattatatgtagtcttgtattgtattgtatgtgtagctcgacaacaaagaaagttctatttgtacttgaagttgaatttggttaatatattttcaataaaatttatatacattttgtttatttttttttgaagtaacatttaagttattattggcaataaaattatttattctttacggtcgataatagtaattaatcccaatagtttgtagcacaatcatcttcgttaaaggtaagtttttttttttttgcggttgttagtatatttgtactagaacttcttatttgtaagaggtagtgaccccaaggacggaagcggaaaggaaatatgggagtcaatatgtaaatttataaaataaaaaattataagtaaaaaaattgaaaaaaaaaaaaaaatagaccctcatatcacctattacaattttctctttaaaaaaaaagaatatttaaaattaattaaacaaaaacaattattttttttaaaaaaatagtaattaaaaacaatcattattttatttacttactttttttttttttttagtaaaatagattatattttgttattttattcaagaggttttatttatttaactagaggtcataacacttgtaataaaatttagtaaaaataaaagacaatagtagacttgtcaaaggtagtgttattagagttaaaagacataaatgtatgttaacaagattgatgaaaaacaa

SEQ ID NO: 388670 - DNA, 906 bp, Cannabis indica
atataataattcttgtgatcatttgtcaggatttttcttgactcaattcaaggcaacataggcgtgtgatttgatcactttcactaattaatataattcaaccatatatgtatatataaattataaggttttcgttacactaatgaggacacaaaatgtaaaatcaatggtttatgtgtatagtttaagtctttaagatcgtaagtacgtacgtaggtccttgaaaaatttttccacaaaacatttatagagggttttcatttaattgtctatgtatataatatatatttatatatatatatatatatattggctatgaggatgccagcatgaaccaattgatattaatgttatagaatccttttttgaaatgtttgaagtgtttatttggattagattatcttgtccttaattacttatgtttggtattttctttgaatatgaaaaaagagtgttttgtaaaaataaatttttattagtaaaataattttaaaaaaaagaggaaaaaaagcctaaccaattaatttttaaaaaataaatatataattttttaacatagtatatatatattatattttaattttgtttaaagaatgattattattttttatatatatatattaaataatactataatagataataaatattacgtacgtatatcattaattttattgaaatattaattttttttttagttttttgaaaagaaaaacaatagtaaatgagcattaattaaaatattgtatgtattcctaattaatggcgattaatagtaggaattgattaaggttgttgggttgggtagatatataaattaaagaaaacatatataagagtacaaaatatatagaaatttttacatcaaaaatacaaaatacaatctttattacaccaataccacta

SEQ ID NO: 388671 - DNA, 640 bp, Cannabis indica
attgagcaaatggatgtaaggacgtttgctttcttacatgggaatcttgatgagaaaatatacatgaaacttccataagggtatgaaagcaaggaccctaatcaggtttgtttacttaataaatctctctatggtttaaagcaagcacctaggcaatggaatttaagatttgatgaatacatgaagaaaatagggtatgtgaaaagcaactatgatccatgcatctatcacaatgatttaatttacctattgctatatgttgatgatatttagatatttagtaaagaaaaatcagagagaacaagcttaaattacagctcagtcaagagtttgaaatgaaagatctagaaaatgctaagaaaatacttaaaattaacattcaaagacccatatcaaatgttataattctgtctcaaaagagctacctgcagaaagtgttaaataagtttggaatggacagctccaaaatagtttcaactcctcctgctcaacattttaaattatctagttcccaagcaccaactacagatgcagagcaagagaaaatgagtaaaatcccctatgctagctgtgtagggagtttgatgtactcaatggtttgtacaaggcctgatttggctcatgccatgagcatgacaag

SEQ ID NO: 388672 - DNA, 1616 bp, Cannabis indica
taaatgtatatattaattagtaattaagacttaatatgctatttaataaagaataatacttttttttgctgattgtgtcaacacgtgtattggatcttctacggtcataattctttaatgaatttcataacgtagtattcacattgtttgttgtcaaattttcaagacatataagagttatccactcagtaggtctatcgggttgtcttgtcatttgattataaattgtgaacaatctacacacaaaagtaaaattagcatataaaatttataaatataaactatgcttgcatattggagaacttacttggaaatgatgaattttaaatcatctagtaggtcgccattgctcaaatccaagtattccaccatctgcatacttagttagatgagtataaacatctagtaaaacatatctctgcacaaacaaatatgtgtaaaattattaatacatattatgaagagttataaagtatgaaattattgattttaaatctacatacccattattataggggcaataatccatttatgtggattggtatcctagtcatacgagtgaatagtgcttgacaacggggactgtcaacccctagttcggtggcaatcgcactcggatttagaaattcatatactctattcagtccattaatatccagtaatatattgttctttcattggaaataatattgcatccacaaacatcttacggtataggatgcaatcgttaggacatgcatgtattttcttatattgcatgcctaaggaagaaagtgtcttctttgcctcgtagaaagacgaaggcatcacattaccttatggtaataactctactaggaaagctagtaaattcgtaaaactcttatcactctacccgtgtttgggttttatattgtatatataatttaataagtgttgataattacctattacaattagggtaaatatgctccttggcatcctctacaaaactttgaaactttaatggatcgacatttaatttgaattgtacgtctcctatcatttctagaatgtgatcatcataatccaaattaacacccttaaacttgttagacttaagatgttccctcacccaaaactcttttcttttccccatggtgaacccaaatcttataactcttgtctattatgtacctaaaaaaacggttttttttatcttaataatgtccatacgctccatgttaccacatttaagacaaggacaaataaccaatttaggatttttggcctacttctgacaaaattataagaaatggtcaacacattgactatacttcgctgataatctatttgcactcatccaatttttatccatttcgaaacttctataaaaataaaactgtattcaattatttatttaaatatgtgtagtaaataattagttaaattaattaccacacatatataaattttagtgaaatttattctaattctagcaaaatttcggcagcataacagttgtaatcgaatgtttccaaaaattttaaacatgtaaaaataataaacaaaacacataaaacaatacaaaaataacaaaatagcattaacaatgcaaaaattatcacccattcgaccgcagtacatgtattcgcaga

SEQ ID NO: 388673 - DNA, 2128 bp, Cannabis indica
tatcaagacggttagaccaagtgttcaaagtcttcaggacagtttaggctcacttttgatactcacttggctacgatttttgttatacaaatattttgtaaatttatgtaacttttaaaacgggatcccaatttatattatttattatatatttatgattaaagtttaataataaaaattttaattattcatgtttttttaataaatcttttttgttttggttatgattattttttaataaatcattataaaaaaagtgcacattaattaaaacaagataacatgctaatttaatagggggttacaaagcagctacattaagtaagctctcacgtcttttttataatgctaacttaaaaactcgacgaaggagttctaaaaatgcaatgttagattttttatttattagtgcagtgtacatgactttcactttctttaggtgcccgaaagtataccaaattaaggagccttttctcagttgtgtatagttccatttaaaaatatatagctcatgtgattgcagagacaacaacagctcgatgtggttattagaggtattagttaattcctagaaaatttcacatttaaaaattcacaatgattccttagttatatatatgaatgttattgccattaagaaatatggctttagctttgattttgtcttatactaaaaaatgcgcttatagcaaattgtatgattaatcctgtacaatttatatgcgtatatagtgaatgaaaccaaacatcattgattgaaaatttggaattagataaaaataattacaaataacactcaatgtgtttggatagtcaaattctctatgtattaaaacattattatgcatttttttaagatttcttttgcgggacattaatttaggttattaaagatactgatttttgagataaggcatttagaagatcttaaggtaaagtatatattgatgttgccaatgcctgccctgaggtgttcatcaaggcctttgatactaggcgaaggttacatgatttttatacagcaatatttaagtctctcttcagtgacaaagggcattactgctatgagacaacatatcatccacacctgttagagctgatggtttggacagttagttagtaactgatattgacagttagtttgttactgttattgtgagctgtcatgttagttacttaactaactgattggttgttatgagttgttataactctttaatcacgtttctattgtttgttcattgtataaatactccttcattgcccattcaataaagtgactctttcttctacctttggctctctcttttctctggtttctttctctctgttttgttcttgcctttctttatgttcagctatggctagaaggtttaatatggtatcagagcagttcccgcctctcatggcaaacatggcgctgtgggtaacaatggtggtgctgctgcaggagtcactgctgctggtgcatgagtcaatggagctcaaacactcaacaggcaacgcactaatcaagatcctgtgtttttcaatcacagcatctcaattcgattaaacgatcataatttccttctctggaaacagcagatccttgctgctataaaaggaaatcgattgatgaatttcatcaacgagccacctccagaagagttcttgaatgaaggagatgctgcagcaaatcgtgtcaatcctgtgtatactaattgggaagttcaagatcagctactggtttcatggttattatcttctatgacagaaagtttgctaacaagaatggttggatgcaacacttctcatcagatctggaacgccttagaaaaacacttcactttgaaggtttcatcgaagatcttggagtttaaagaaccaagttacagaatctgaaaaaaggctctctaagtctgaatgattatttgctgaaagttaagcaaactgttgatctcttagcatttgtgggagaagtgctgagtgatcgggatcatgtagctaccattttcaaaggtcttcctagtgagtacgacacacttgttatctcctctaacacaaggatcgaaaactatactgttggggaaatagaagctctgctcttagcttctgaattgagaatcgaaaaatcaagcaaagaaat

SEQ ID NO: 388674 - DNA, 1413 bp, Cannabis indica
acgtttttttttttttttatctttatatattgaaaattaacattctatttttttcttcatattaattagggtaaatagctaaatatatatgttatttcattatgtgtggcactagcaaacttaaaatccaaaatttaaaaaaaaaaaaaaaaaagttagatcaatgacaaaacttcataaatatttgtgtagaatattaaaagttataaaaaaaaaactttagaaatttgttattgggtgtcaaacaaaaaattagactattactcaataaaaaagaatttgattgttgactaaaaagaaaaaaaaaaaaaaaaaaaaaaaaaaaggagaaaatcttggcttaagcaaaacactggaaaaaatgggggttctaaaaaatgggggttctcaactttccaaatcattagttgagagagattatatatactaattagttatttccatattttaaattttttattcatttttccagtttttataaaatttctttatttctccatatatttctaaaccacttacaaaaaagccatatttataaaataaacctagtatttggtttttgatttagattggtagaatctcaaaattgaccaaccaatttataatttgtcttaaactacttaaacttttatttaatctgtttaaactacttaaattcaacctttttttatgatttaatttattttataaatacattattttatatattttataattataactatataaattaatgttcaaaaactaattatcttattattttaactttaatattaataaaataataatatactattattatatattatcaataactatactacataaaacaaaaaaccttaataaattaatatatatataacggtcggttttgattttttcgatcggtttattatctaaaaaaaactgaccgtagttttaaccgttagtgatttttttaatttttagttcagttagtttcaattcctgcaatgttcaccaggtcaatttgaatgatttttttagttttttgaatttcatgctcagtcctacatattgtgttcgggtcatgttgagatcttaaatttattgaagagtttgctggctcgaacataatccgtgatactaaaaatttataaaatataaattcgaacacaacccacataaatttcgtgtagtattgaactcgtaaaattccgagttgtattcgtgtcaaattcgcatgtcgtgacataaattgtccctcctagtttttgtaagtgatgtacgacaataaatacagagctgaaattagtatacgacaatgtgcaagacaaagaattcataaacgacaactttttttttatcaaaacggcaaatattttttcgtgatttagaaagagtaatttgcggtgaaaatacccaagtttatctcgcagttgcagataaatacct

SEQ ID NO: 388675 - DNA, 928 bp, Cannabis indica
tgtgggacaatgtccacaacaatatgaattgcatatagaaccaaatagagaaattttataaagtttatagtacactctcgtgaataaaaatttcgggatagacctgctatctgtttgtgcatctaaaataactttttagtttatttttattcatcattgtgaatgttatagttataaaggatcacatataaattttagaaaattttgaatagtttacaatatcgaaaaaaatttaaatattttcttgcacgtacgattatttttttgatgcgtgtagtaagtaattgtttgaaccttaattttggtacggtaagctattcaatttttttttttgaaaatttataaatggtcctaagtagttacaatttatgtaatcatgtaaacaaaagaattaaaattttaatttttatgcctaaagagaatataagtataccaaaagtttctaatattatattctaacattttaattacctagtaaaagatatacacaatcaatttgagaccattaattgaatttgagtagaaaagattcccttagttattttaattttatttattggttttttttttttactattttaggattcaataattatattgctactatcaaaattgtactagatgttgaatgctttatattattttggaaagtttgatattgaaggattctaattaggactgaatattctgagcgggttcgacctgaacccgagcaacccacttgaactcgattcggtcaactcgtaattttttttaaaaaacaatgttcgggcgggtcgggttcaacttgatactcttcgagcgggttcgcgggttaagttttaagcaccaccgggtttcgggttgaacccgaactcgcccgccaatccgcttgttaaatatattatatatattttttatttttttattacattttatatatatatat

SEQ ID NO: 388676 - DNA, 1004 bp, Cannabis indica
tttcaaaaaataacgataatagtcttcaagctcaatattcttgtaagtttattggtccttattttaacagattcgttagttactcaaaaaattactatgtgttgatattaaattacagtgaacgtccctaaaaagtttactttgatacagataagttctctattaccacaattttttgagtattgaagatttatctgcatcaaattgaactttttaaagacttatccctaatttattatcaacatgtgatactttttgagcaactaatatgtctcttaaatgaggaccaacagacttacaagaatgtcgagttttgagactattattgctattttttgagggttgggacttatttgcatcaaagtgatatttttgggactttcactgcaattttcttatcaatatatataaggtataatggtttgtatgtgtgtgattatttcaagataaatgatattgggtaagtctacagtacaacttaaaaaaaagtgtttcagtagattttttatctgttttggcatatagaggaacttttagtcaatttttttcatgatcgcatacgttatagttatttaagatcacttgaaaattttcagaaaatttcgagtagtttataatactgaaaaataagatttatatattttattacacatacgacttatttttttcttatacgtgtggcaagtaatttattaaacctaattttcagcattgtaaactattttgaattttgtaaaaatttacaagtgattctaaatagctacaacgtacgtaatcataaaaaaattaacctaatttttttttataacaaaatagatattattaattaggtaatgaagaaatatactattcggtgatagtaaattagatgaatactatattattaattgccatggttttgagtttgaattgggcaattaataatttttagttttcttcatatcattaattaatttttaagaaagttaggtatattgcttatatatgcatatataatatatata

SEQ ID NO: 388677 - DNA, 1166 bp, Cannabis indica
actttaggaaatatcgataatcaatcatgaggcgcaacctataaaaggtgttggccaccactagtgtccattaacaatactttttgagaaactaaaaaaaaagaccccaatccataacattcgcattgtaaacacttctaccctaatttataatgatccttctcctaacctagaccacatgcataaagttgtacattcgggtgacccgacccaacccggcccgtttttataaagctcatttttgtatgtaggttcggcccgacccatattataaaaggggtcaggttgggcctggccgatattttgaagtaagctcaacccgtctcataaacacatattatttgtattgggtcggactcgtattgggcctaaatgcgccagcccgtttttatgaaattgttgacccatattcatcaaatggctcctaaacagacctatagaaatttgccattttttttatacttttcaaattaatttctaattttaaagcacaaacaaattgtttcaattaaaatgagctttaaaattataaataataataatatctataattacaattataaatttaataactaaaataatatcactataatagtaatccattaataaattttcacataaacctttcaataatatacaatataatctctttcaacaaaaaaaatgttcaacatattaaaatgtgctaattatgatcgctgattcataaaatgtgttagcataatttagaatcttcgcctagcgaaagatatgttaaaagtacatattaaaataatttaattttttagaaaatatatatttttaaaatatttaaataaaatatttatatacgaaagagtagatgaattattaaataataaattattttatgaattttaatcgtgttttattttgtatttgtgtgtcgtgctttcaaaatctgtatttacgtgtcgtgcttattgtgtcgtgttgtgccgtgatcaagctcatatttttcgtgtcgtacgagaaagctaagttcgaatgtacacctttacacatatatgtgtgttttttttttttagattaatcaaaccaaagttaatctattaaaggtcactagaatttatagaaatgtcatgaagcacaagctaaataaacatgaccaaaaaaaaaatttgtgtgttattcttcttcttctctag

SEQ ID NO: 388678 - DNA, 1538 bp, Cannabis indica
tctaaatgaaactaaaaaaaatataaccatgatgattacaataaaaatataaccattggtacctcctccatatatatatatatatatatttcttataataaaaatgtgattatctaatagaaattattgattttaaatcaatcaattaattattattattaattttgaaaaaaaagtaattttaaatatataaatttaaattatttattaaaatatgacttagatatatttaaaaagtattaacaaaattaaataattatttttataacagaacatatctttaaattaaacattgaattaattaattatatatagctaatatatatctaatatatatatatatatatatatgaattttgaacctgtgttttgaaacgatgtcgtgctgagttggaatctgaagctcttaaaagaacataaatcttcttcacatttggttgactccttaaaattttctccacaaagacttcatatatatatacatatatattcattaatcacacaaatataatacactcgtaatttaaatatatatatatatatatacaactgaattaatttattataaaataggtaatattttgattaaagaaaagttattgatgaaagtgatatacatacttttggcaacaaagccagctcctccagttattaaaatagtcttgttctcaagatattcaaccaaacctccaaattccattgaaaatctaagagtactgatatatatatatataattatatataatgatctcaactttcttttttcttttactttaagaaatatttttggtatatgattatatgatcattgcaacaatctatcaatctatatatataaaaaaatatatacagtccaatggtagaaaactttgagagggagactggaaagttagcttgcctagagagaaaacagtgaattgaaaggaaaaaaatgtaaaccttctctcattttgaggcacctaaataaaaacagtatacattacaaaaagtcttacttttaattacaacaaaacttttgataattaagggtgttcgcagtgcaagtggtgcggatttagggtattttttcaaaccaaaacctacatatgcaatttttataatttctaaactgcaactgcaccgcaagaccttaaaatcgcaaaaaccatactgtatactatcatcattattaaatattaaaataaaaagtaaaagattagcctaataaagttttaacaattaataaagaagaaaaaatttatcttatcaaacttttaacgtcataatatatatactaatcaagttattgtattaaattgtctctacaaaattataatatatatatattatattatattatattatatataataatatgttaacaataagaagttagaaaaaataaaaaaatgagaataatttatacgaatattttttaaatttaatacatagcttgagttttgtaagcatatgttctttaataaaaaaataaatcataatataaaaataataatatttttgtaacatataatgtgtatggtgcggtttgaactacgatt

SEQ ID NO: 388679 - DNA, 767 bp, Cannabis indica
ttttgtctcgtgcgattaagaccaccaccacgccttcaaagatcaagactttctttccaagctcaagttcactttcaaagatcaagattcacctttgaatagcttagctctgataccaattgttgacaatacgactgatctcgatcaccacggacactcacaagaacaaacactaaaacacacacactttacacaatgtgtacttacaaaactcgaacacacataagcactttaatggtgtttaacacttggaaattcttgaagctcttggagcattttatctatcttaacaattttattacattaagggattaatagacttgacctcttacaacaatatcagttttaactaaccctttaactaactgctactaaccgaatagcctgtcaactaaaagctaacaagtgtcaatatttaaatacaatcaacatcaataactaccttgtaaaaaataacatcattaactataaaattggaaaattaaataaaatatcacaaagtctaaatttttaatcaaatatagtttaattattgaacataatttatgtaaaatattatattatttaaaaaaaaaattgaattcatttgggttatattaggtaggttgaaataatttacaacctacccaatttattaatgggataaatacataaagtactattttttgtaaaaatattatatttttacgtttaatgaattaatttttatatttttacggttttctgtaaaaacagcataaaaacaaacaagaaaactacataaaagt

SEQ ID NO: 388680 - DNA, 1190 bp, Cannabis indica
tgtttttaaaaaattaattttactgtttttaaaaactaaaaacaagttttttagtttatgatagccaaacatgctacaaatttttataaaatgtaaaaatttaatagaaatcttaacaaactctaaattttaagggacagatacaatattattaaaagttcaaagctaatatttaaattgaaaagagacatgggcaccaaatctaatgcaatatttaatttatcagtgactttttgtttaccccactccaacgggttaccttgaatcatttacccctatcttaatataataaaatatgataggcctattatttagttgtttccaatcttaaccattcatctactattgtaatacaatctaaaggctatcattaacaacggcactagtcatgtaaaattgttgtgcgtgacaacatcaacatccataatatataggcccccaaacggagctttaaaatcactcttggaaaaagttttggaaaaagttatgactgtttattaattttttaagttattcttagcagttaataaaaaaactattcttagcttacttttttttaaaaaaaaaaaattaaataatactattattgatgtttggggtaaggataattttttttattttaatttaaaagaaaaaagaaattaagagaagctaggcctaggattgtgtttattaatattatatttaagttttattattatttaaatttatttataattgataaattcgttattattttttagatgaattcatatcttattattagtattaataaattataagttttttttaatatgtcgtattgtgcttttttgggtttgtcgagtgttgtgtttttttagactaatttatttatgcttacgtattgtgcttaaagatatatttttcgtctcatgtcgtgtcaatttatagcattgtgttgtgccgtatcacttgtattttctcgtgtttagtcgtgcttgtcccttccaaactcatgtcaattttatgccgtgtcaaaaaaccccgtgtatttagagcatcaccaacgacatggcaaatgctttggttggtgatgaatttttatccaaggtggcagcatatatatatcttgaatatgcagtagatgctacagtccacggtatatatatcgtgcattgtagcaaatgacatacatatctttttttgatatatatttaattaatgtatat

SEQ ID NO: 388681 - DNA, 1798 bp, Cannabis indica
ctcttgtgtggaggcaggcgggttgaatagctagtaattgttatttgtacttaagaattgttgtttttcctctaaaatgacctatttcctaatttttgggtgaagacgaagaagatgaaaaatttagatctctagtcagacacttggaaggcgcccaattgacaaattgtcaacttgggcgttaggtgctcaaagcctcggggcctcggatccaaaaattaacttgctctgaatctgatgccttaaatatgtctatggtatatctcgttgatgttccaatgcaatttgaccattttgcactaagacgatttcaaaaactgagaccctagttgagaatgtcaaccagggcgcgggatgaaactctaggtgcctaggttggctttcgagttgcaggttatcatgtaattttagctctcggagcttggattagattgctccatgtcttcatggtgcagaatactgaaagatagtaggttggattcaagctatattaaagtttgaacttccatctcggagatcctaaaattaacttgggcgcaaggctagggtcccctcccagatcgaatgctatgacttgggtctattcgactccgtaacgtcatcctccatgccacatgttaaacattgatgtccatgtcatcaggaaaatttttcaagttaacatatatatatatattaacttttttggttaaatatgaaataaaatagaataatagaaataagaaaactggtacttaaacttgttttgaaagtaaaattaaaggaagaaaaaagaaaacattagattagtaacataaaccgccccaaacacgttaaaaaaatcaaatatatataaggatttttaagaggagtataacacaaaataagacgatcccttcatatatattacaccatatcccaaatttcattactatttaattaaagctgggattaatatttaacaacgtgagtaataatacgctttaaaaataatattacacaccgcgcgcgctatgtgtatattcttttagctaataagtaaatttaaattgggacacacattcctacaaaaatattttttggtgctggtgtgcataatatatcattaatcaacaaataagaatatatgtttagcaaaaaaaataacaaataagaatatatcaattgtgaaatcaaataataaaataataattaagttttcagataattctataatacaatcggttagaaataaatagaacagcgcttatttatataagaaaatattattaatctgacaaatgaaattaattatttctctagctagctatcatcactcaatatatacagctttgaccaaatgattcgtgagaggaagatcaaagagtactaggctcctataattgttttatatttttatatatataaatatgtataagatatggtataactatatccaaggaattcatgcacatgtttaaattggttttcttttaagtgatttatctctttgaagaaatatatatagcagaataaatatttgaattaatcctatattatatacatatatgcatgtatattatataccagagcaaaaccaatatctaattcatgcatgaaaaggaaaataagaatctaaatgttatatatatatatatatatatatatatattgatagcgcaactgcatcatgataatagggcatgttaattttatttaaaccacggaatgaatgactataatctatacacctctttaaccgccttatgtatatatattatatgtatggctattcactaatacatagacacacacactatatatattatattactgttct

SEQ ID NO: 388682 - DNA, 767 bp, Cannabis indica
acgttaaccaaacctaacttacgttagttttttacgtttttttttactaggtaataacggactaaagtaagaaaagtaaaaactaaaaccgttagtactaagtagtaattacgtaccgtagtactaattaaagtagttacgttactaaattaacaaaaataaaaaaataataagtagtaagtaaatagtagtactagtaagttatagtacgtaataagtaagttaagtaaagtaaaagtaagttaatttaactacgtactacctttctacttatttcgtttgtttttttttttttgaaatgtttctcaatctttttcttataatagttctcttgtggtatgaatggtctataaaagaaaaagaatacttactatgggtttaatataatcatgtatattaagatgcattgcaataaccacataattaaattaaaaaaaaaatagaactaatctccaataatccttatatagaagaagaactgaatctaacaattgactaaattatgtgttattggtgtccaataatcattgtagattccaaaaagattggacatggagttgagatgcttcttaacctttttaggattggttttaaaaattcagcacataagaaattttgttccaccaacttgaatatgattttaaaaagaaggcatgaaaaaattcattcatgatcagctttgcaaatgttctaattgctaaggtgtcgtttggtaacatttttgtttttcagttttttaatcacaaaatgaaagtaaaatttctgtt

SEQ ID NO: 388683 - DNA, 904 bp, Cannabis indica
ataaagtaaagttaggtttccatgcaatattttggtgttagcttctgtatgagtttgagatgttgggatttgaattccaaagctgtttttgagataattatactgttctatgctgattttgttggttgttagtgagttgagttggttcaagtttggagcttttaagctcaaatgtgacgctttaatggtgatttttaatttacaagcttgatgttggatttttcaattagtatatgttgtgtatggccaagtaggtgatctggagcatttggtacgatttggggtaaaattttaggagaaatgagatttcttgtgtttttacagtaaaaaacgaaagattgtttctacagaaacgatctaccatttttagcattataggaccaaaaaacagcctgtcgtttgtagcaaacggcctaccgtttttatggtattttctcaggaatctcattgtttagtgttttcttgatatttagtgcattgccatgctatctatcgatatggaaacttttaattttgagtttaagtccctgaaaagtgatttagtgtatcacttatcaattttacgtatgttgtgacttaggggcctgtagattattaagcagcagtttccactaaggttgaccagcacaattgaattcagaatcaagataagattagtataataattgcatcaatgaatacatatttagcgtgcatgtcagttgccattaaaataacgtatcagggtatgggtgaggtgtacataaagttacaccgagataccaatagatatatgttaggcatatcagtagctgtcagattagcatatcagaatattagtgaagtgtacatagagatgcattgagatatcaacaatatatgctaggctttgtcatacgaacgttctagactcagtacgcgtggg

SEQ ID NO: 388684 - DNA, 1362 bp, Cannabis indica
tttttttttgttattttgttgtaaggttcaagggtgaggcagcagagagacccaatcctaaggtcccccacttaagtttaaaaaatcttttaacaaaaagatcttaaatgtaatttttaatatcatattttatattttactattaatatttattaaaaaatgtaattattttactaaaattatatctaattgttattggtgtaatttaatatcggatctcaataatttttctttaataaatattatagaaaatcattaatcaatatcaaagtactaaacactatgagtattagtattactaatcaatatatggtgagccatgataaaaataaacgttggattgtgtgtataaataaaataattttattttattatatattattattatatggtgttgattatcgtcaaagtacacgttttgcaatctagatcatgtataaaattgttttaagaataggtttatacctcaaaaataaaataaataaataaattgtataagaatagagatatatgtgtgcaagaaagtgatattaaggagaaaaccaagaacaaaatgataagagctaagcttaatttttgactatttttttttttatataaccaacttgaaaataattcctaacacgaatagatacagaaaaaataaataattttgtcataacacctttagatcggattattattagattttattttaacaaaaaattaattcatggccctatttgtactatttagaaaatacatggtccattttatcattaaacaaaacagatgatccaattaataacttttgcaaaacacagaatcaaaatggtatttacccttaataataaggccattaagtctaatgtctaaccaactgatcaggatatttgaagtaatctctttacctgtaatgacattgaaagaatagatgatcatgtttcaagttttactatcacagattgtacacttgttatcaaaacaacctccaaaccaagccaatctttccttggtttgaagtgtctccaagataaccaaccatgtaataaattggtgtttaggcaaacttactctttaccaatactaaattgcatttcaggacaatcttctaccaataccaactagaacaaattggagtctcataactacaccaatcattttctttggtataaactgagcaaattaattcgacaacccaaaggttgtcttttatcaaagcaaggttccaaacatatattctaatagttgcaatcgctataaatttttttaaaaaattgtgactaaaactaaattagtaacaacttgtatttaaattttatgttttagtcacaagtaactttttgttgtgacaaaaaagttatattgtgattaaaaaattat

SEQ ID NO: 388685 - DNA, 1301 bp, Cannabis indica
taattgtatcctacaaatgcgaatccaactaatctacccgagattgtaggagcttcaacaaatcgtaactgcaccctagaatatagggatatttactttttggttactccttttacgaagctgattgtaacaacttttctcctataaatagtgaatgaattcataggagaaagtgtttgaaatcataatctcgcactaagagcactttgctaaatattctctatatacatcttgagactttgagcttgtagatcgatcacaagacaaagaaactatatgagtcaagtgggtctacaagataaaactaaacgcagatggctttatcctaaagcacaaagcaagattagttgcaaaagggtactcacaataatatggagttgactacaacaaaatatttgctccaattgcacatctcgacacaataagggcattaatagctctagctgcacagaagaaataaaaaaaatttcaactcgatgtaaagtcaatatttcttaatgagtacctttaagaagaaatatacgtggaacaacctcaaggattagtggtgcaagaacaggaagataaagttcttaagttaaaaaaggccttgtatggcataaagcaagctctgcgagcttggtatggtagaatcaatcactacttcattgaacaagaattcaggatgagtaaaagtgagccaacactatacataaaaacacaaggtgtgaatgataaactaattgtctctttatacgttgatgatctcatttgcacagaaaataatgagaagatgataaggaagtttaaagaaaatatgatgaaaagtttcgagatgatcgccttgggcttattgcactactttctcagaatcaaaataactcaaaacgaagatgggatcctcattttagaaaagaagtatacagagacactattgaaggaattcaaaataaaaggatgtaagactgtatcaactccattagacaacaataaatcacttaagaaagaagatggctcaccaaaagccgatgaatcaaaattttgaagtctaatcggcagcttactctatctaattgctacaagaccagacataatgtgtgcagttagtcttctatcaagattcatgcatgatccaagtcaagttcactacagagtagctgtaaagcccgcttaattaatttggaaattatcagttaattatgattatttatgaaattatttatagctatttaaataatttattatactgttatttatagaattcagaaatgcatggttatgttattcggtagttttcatatgttgcatttccggtgcccggt

SEQ ID NO: 388686 - DNA, 626 bp, Cannabis indica
cataacaataataaatacaaaaaattatttactgaaaaaataatacaaaaattattcaataaaaataaataaaaacacaagacaaaaaaaaattactacctaaatatcacatgatatcacatcgagaattttaagacactcataacaaataaaaaaaaatatttaccaaaaacaaataataaaataaaaacagaaaatgacaaaaacaaatcattttcttatgaatacattcttcttatgtagtatgatatattatatacacatatttatttaatattaatatatatcattatgtagaagtatcaatataataagctgtttcctcacagtacctctgaagctgcctagaaaattatatatacgtatctctttttttcatgttttcttaatttaaaataaaataaaatataaaaataattgttgatcatgacattataataatataatgatatataatacaatttcatcacaaaactatattttaataaataacaatataattttcccatacaaattactatatataaacggtttcctttcatatatattatctagtaaataatattattagaatttaatgttatttaaaaaaaatgtagtatttttttttaaatttaataaaaaaa

SEQ ID NO: 388687 - DNA, 1153 bp, Cannabis indica
ttttttttgataaattaatgagttgtattgcacaaaactagctttatacaatcatgcgcacccaagaaaagggctgaaatctatgtacataattatatcaatctagaatcaatattgattttatgatttacaaagcaataaaccactctctatcattgttcttaatctttttaggcatcaccctatcaatccgaatcttgagattccactttgtttcttcaacaatacgggtcgggtttactctagccttttgccacacagcttcatttcaggctctccatatgttgtacaccagtcctacaacagcagccgagaggactcctttcctaaactttgacaatttggacttcccaatccacttaaggagctgttgtaggctgctggtttgggcatgccagtccagccaagtcttcaagtcctgtagacactttccagcaacactacactcaaaaaataagtgatgacaagtttccaactgcagttcacacaagctacaggtcccctgcacctgaataccaaaccgcagcagcctatcttgggtcttcagcctattaagcattgccaaccaagctataacactatgtttaggagtgttaagccttgaccatgtttcctagctccaatacagccgtgataatgggggagagaacagtttacaacctgctaaaacactatacttctccctctaaaaagcatcaaaatctaccaaatctctaagttgatctttgagggcaaccatcttcttccaataccaactacagtgtatggaacgagaatagtcccaccaagtctggtttttaatatatacactatggacccatctgagccataagctctcttgtttatttgaaatagcccatatgtacttacttattgcagccttgttccatgctttcaagttcttgattcctagtcctccaactgccttgggttgacaaatactattccaagcaagagaccctgcaccctggaacatggcttgacctttctagagaaaggctctacaaatagcttcaatggatctcaataccttctttggaagaatcattatttcactccagtaggcttgtatagcaatgagaactgagttgattagggtgattctcccaacaaaagaaagattccttgaactccaacttctaattctagcagt

SEQ ID NO: 388688 - DNA, 636 bp, Cannabis indica
atgacattaaatttaatgccactgatattttttaaccaaataaactaaatatatgggtatataaataaaaaatgccataaaattatcaaaaaaaaagaattttcttttctagtccacacttggtaatagcattgattttttttaaagagatattgcaactttgtttgagaataagcttcacccattacaatagataaaagatcagtaggagcattactcttattgaaaatacgatctgcatacaaacaaaagctatgagctagacaatgcgaagctttatttacagattgtttagcaaaacataaattggctaaaagtaatgaggggaacagtgacctacaatcaagcacaagttgaccaaacggagaaggtatatcgaaagactccaaactacctgaacgacaagaatcagtttctatttaatttctaatttctaagtttatatcgatattgatcttttctattatttatcgaattttgatatgctctaaattttgatgaaggtgattttttatgtataaataaatgtaaatttatagatactagaattttattgattttattgtcgttagctccacagtcttgaagaagtaaaaacccacaactgaaaaaatttcactatacacactctattat

SEQ ID NO: 388689 - DNA, 1780 bp, Cannabis indica
gctaaaggaatatcaattaaattttggggttcaggctaggcagcttcttgtaaaaaaacggcgtttaccttcagctatttcttgcaaaaatattatagagcgactgtaaatttaatcttgattggttttaatacgatgatatctcatattttcatcatttaatttgagaattgttttgggtatgcgtatttttggtttgaatggaactatagaaattagatagtagtttaattctaggaattctgggactgcgatttttggaatagattagggaatacttatagatataaccctaatttttggaaagataaaatacgcgttcaaccccaaaatctatgaatcgaataacctaaaatttgttagccctagaactatcgagacaaacaaaatcaaaattacctgaaattactaaataatgcagatatcacgaaaaagagattacgagtacaaaaaaaagaaaaattagtaagaagagaaagtgtacccttactgtcttggttgaaatagctagaaaaattagaacttcgtgatcgaaatctcaaacattgagaaactaggtccaaaagattcctaaaactgtaaacgtgatcaacttaaatgcgcagaaagtatataagagaccatgagggcatgcaagataattttttttagagttcttgtgcaaaaagctcgaaggtttgaagaatgaaaatagaaaaataaagcttcaattttaattttataccctacaatgatcaccatttgattaaaggagatctaatctaacgggtgggagtattgcaaaatgagaatagttagagcattatatgtacctcgaaatcctaaatcgccaaaacacaagacatgcaatttttcaaaaggggctaatacaattatacccctgtaatcatttaaaaagttctttttaattaaaaaatactttttaaggggtaattattataaccaaaatttggctatgtactaaaagctgacacatgtcctacaaaaggaatatgaatcaactcaacgattataacaaagccgctaaatcattaaatgcaatttaattaacacgttccaattaaatgcaagctggatagaaatattcaaactcgttgactacttagtcttacgtgataaaagaataataactattagactgagattgacgagccacatatttacctcgggatagacagagtaataaaatgtacgagacgagacagtcaagaacctcgtgaattattaaccctctcctgagaagagaagaacttatgacactcaaatcgcctcgcgttactcatagcatgatgatcatttcgcatgaataatacaaatgaagggatatagcgagatgaaatattccccaccacttagcgtgtttttctattaagatagataagaaggagatttcatgtttgacgagatacaactttttgagtcagcataaccgtctaaaggataaaaataagaagcggttgagtggttattagatattatcacatgtgtgaataaatgaaacgtggggaataactgtccacgtttcattaatagttgtaaacgaatcaatctcaaaaagaataactgccaacctatattctacaaataggggcagaatccatgagaaaagggacgacaaatttgagagagaaaatcttcttatttcaaatattaagattgtattttgtatccagaaaatatttctaataataaggactcgtggagtatgtagattttaactacaaaatcatgtaaaatatctggtgtcatttattttcatttatttctgtagaatatttat

SEQ ID NO: 388690 - DNA, 888 bp, Cannabis indica
aagccatggaagttcgagcaatcagtgtacggtaacagtggaaacttgaactggtacctccatgatagtgtggacggaagagaggtattttcttcgaaaccctccaagtttgctttgctaaacccgaaatcgtggttcaaacacagatactcaagcgcctacaggccatttacgaggcaaggaggagtggttttcgcgggcgatgagtatggggagagtgtgttatggaaggtggacaaggccgccatgggaaaaactatggagtgggaaataagagggtggatttggctaacttattggcctaataagtacagaacgttttataatgagactaggagattggagtttagggaaattgttggtctaccaatttcttagaaattactgttactttactcatgttttgtttggattgatctttttgtaaaagtttttttattattattattctaaatagttagagcaatagttgctttgtttgacatcattgatatttaagtaatagttgcttgtttgatctcacttatattatagctttcatagacaaatattagtatgatactttgttgttggtattgctagatgtgatatcgcctggccaaaagaggggtggtggtggtggtgaatatatttatataaaagagtaattttcgtcataaaaatacttaatttaattactagttgcaaataattattaagtttaactttttacggtaataatacataagtaaaatttttagaatttaattaacggttaaatattaagtcataatctacgtgtcattttcttcttagtatatttaaattatttttaaaaataaaaaataaaaatttaatgatttgaccaatcaagattatcaacacttaaccatcagatacctacaaaaa

SEQ ID NO: 388691 - DNA, 675 bp, Cannabis indica
tctcatatactctactttttcttttctatttcacctattttccactttttttttggcttttacttacctttttgcaatgataagacaagagaagagagaatatagtaaaatgcatgttgaaatgtgcatgaaaatattaaattttttacttccttgttttttcactggcaatatgaactgtctatgcatggtcccttttccttatcgtgttttataagatatatataaggtttatataatgctgcatccgttaaatttttcatctaaatattcttatttttgtaaaaaaataataattcatttaatatcttcttgggtgaagataaatgtttttaaggagagtacaaaattatttacgaagggaaaaaaaaattaaaataaagagagatttcatactcataccagactcaataaataaataaatatttctatatatttcaagagaaggaaaaggaaccgaattgtaataagtataaattaaatttcaaaaaatgttcattcagtaatataatttgtgattaaatttagggatattggtcgctaaaccgcctgaactttacagtttgtaacacttaacacaaaaactgaattttgggtggctaaactacctaaacactggttccgttttgctctgcacacctccgtccaaaaatcacagttaagtgccacggtgga

SEQ ID NO: 388692 - DNA, 624 bp, Cannabis indica
tgcttaccccgtaaataaactcagccaatttcttcaagccccaactcaaaatcattggagtgcctgcaagaaaattcttcgttaccttattgggtctattggagatggtatatggttcactcactcacccaatttaaccattcaaggtttttgtgactcagattgggccagctctttagacgatagaaaatctacctcaggctactgcatttattttggcaacaatctagttagctggagctctcgaaagcaaaaagtcgtggcacgctcaagtacagaagccgaatatggagcacttgcccaagcctgcacagaggtagtttggctgcaatcgctttttgctgaagttggaattgactgtaaaggccctgctatactctggtgtgacaattctggtgcacgacagcttgcttccaatcccgtttttcactcaagaactaagcacatcgagattgatgtacatttcatcagagataaagttcacaacaaagaagtagaagtcagatacgttccaacacaagagcaagtagctgacattctcacaaagtcactcagcatctctcatgtaaagcccgcttagttaatttggaaattagcagttatttatgattaattatgaaatta

SEQ ID NO: 388693 - DNA, 702 bp, Cannabis indica
tttttggctacggtttctttttagccctttagcgactcctgcaataccaacggttgtgaatttttttttttaaattacctataaataaggatagaaaaatattctgcttctaatggccattttttttagtagtgagtggtcactttgtaaaggtggtgtcttgcgattggttagcgacattttataaaaactatcatatattaaattatattagactcaatatttaattgtactaataaagatatgattgaaagtgtgaagcactaggaattcatgtgcattttaccatttctctatactctatttaataaaactatagagactttcattccaacaaaaaaaaaaaaaaaactagacttatttgcatgcgatttataatagaaactaaaaggctctcgtggtaaaaatactttaattataagaccaatttttatttatgttaaattttaaaatattattgtacaatgcgtaatttcctatttaaaatattatgcattagggaaatattatttacaccccaaaattttttaaaagcacttcattttaataattttaatttaatataaaatttataattttagttatactaaattttttcaacttttttccttccaattcataaacttaaaaaatatatctatcaaataaaattaaattatattttaaatattatgacaaaaaaattaaaataaaaatttttta

SEQ ID NO: 388694 - DNA, 1999 bp, Cannabis indica
gtatttttaggttatgcatgtcaactcgaaaatgacttgtttaataagtacacttgtatattaacccaaaaataaaccaaaccaaattaaaaaatccaaacacatttattacttttatgtgagtttcgagtcatgttattgtgtctggttcattttaccatccctagttgttggtacatatacaattgaatatatatcacataatttaaaataaaataaaatatgtaagaccatcttcagtggatggtgtaaaattttatgctaaatttggctttaaaaatgagttggtgttatatttggtccaaattttataattgtgctccaatacatttggaacaaaattatttttttaaaaaaaaaaaaaatagaattaagccatctccaatggttggtgtaaattttgtgttaactttggcgcaaaaaaaaagagtcaatactatatttgacgcaaattttacagttatgcttcaatacacttgcaataaaataaatcaacaaaaatattaaatctctattgaaagaatataaaaactatattaaatatataaataaaagtataaaaagttatataagtggcaaaaaagtaaataaaaaaatgatatttattattgtgtaaaatttagcccatgttacagcgtaagatcctgaatttgagactttctacatcgaaaatattctcttaaatgagggtattcgtgcttggatggcagctcaagatctgcctcataaaaatcttatgttctctcaaaaggttctaccccgtggaaacgctctttaatggaactttagctttagatggtcgtgaccactagagttcacttggttctttcgctccttcctcgcgaagcggcataccggaaaagagttagaaatttttctccccaacgacaagcaaacagacatttttagggattagcccgctccccattactcaagagagaaaggaagaaagtaagacaggaggcccgcgaataaaatatataataataaatatttttttaaatcattatactcatattcttgcaggttgcgatcttttattcaggtcaatcactatacaaggattagtgccattcgaaatgaataactttcgcttactctccatcggtggatcgctcaactgatgaacaagacgcatacttcacactgatcgaatcttgattctcagttgatgagcaagaaagggaggaaattagaacaaaaaagagatcacgataaagaaaaaaagaaagaaattctgaaacttcgggctcacttgaagccggagaggctgcggcattttctgacttctatgtgagtgccaacttgatcttagtatccattatctgatgaaaagaagactcagctgcccgaactgcctgaactgatgtacaagatcgttatccagtcaacgaggagaaagagatttgcttcctcttcttagcctagccgcttccaggtaaggataaagaagtgaatcccaatttggcgggggaaggaattgaatataacaataacaagtaagaccaatgtatatgaccaaaaaggtctccaatggctagtgtaaattttgtgctaaatttggtgcgaaaaaagagtcaatcctatatttgacctgaattttacagttatgttccaatgtacttgggaaaataaactttattttaataaaaagttgtaaaaaaatcaacaaaaacattaaattttgattgaaaatatataaaaattatatagaatatataaattgtaatattccgtaaatctaattatgagttattaggatttattatatatattatggattaattaggtagtaatgagtagaattatgatcctactaacttaatttgacataaattataaattttgctataagtggataaataagcgtaatttattaattacggagaattatttaaaatatgtggatatgatgtaagttatttgtgaaataaaaatattttcagattcggcgatcctggagattcgattagaggctaaaaatatcacaataatttta

SEQ ID NO: 388695 - DNA, 1331 bp, Cannabis indica
agagagagtgggaaaattaaatgtaaggagtattttgggtagaatttgaaaatagtggaattgttttgtataaattagtaaggggtataaaatttgatatggggtatattattaagggcaaaaagtgaaatttccctttgtaaatgtgtgttgttttagtataaatataatgggctttttcatttttacactttaaaacaaatttttttgtatttttacgaaattttacatagaaacccctattgcaaccagcgctgcaatctaatttgtaacaaaaaatcgtataaaaacatttattgcaactagcgctgcaaccactttagaaacccaatccgtaaatttgaaaaaaaaaattaaaaaatagtatattgagtaatttctctaaatataaatagttgcgttttacttggatttatcccatcgtcaaataaataaataattccattaaagttaatttttgaatttaaaaattctgttaaaatgcacaataatttgttaaaacacaacaaagtacaaagtaagatttattttgtgaaaactttattttttcttctattttaaaactttagaaacttttaaaaaacaatatatttttaagttgagtatgacgtcaactaattatattaaaatcatctttctatcaccacactcattatacattcgtcaacataacaaataagcacgaacttggcagatatggtacccacttcccattcttgcctgtttccatgaaacttcactccaattttctctatcaatcttttacatagaaatccagcttatctttccaagtagaacttgtctcaggctgctatgcttaggtgtcacttccatagcaatatattgttgttaccatatttatggtagcattcaccaaccaatcatatattaattttggccccaaaatcaaattatcttaaagttacaattaaatggttcaaattataagagatttttgactttttatttgctatatttatcaatgaaattatccaatagtttacatatagtaagaattacttctcattaattacatatagttgataaataagctacgtctcttgattatatatacttagaagttgaagtttttcttctataaatatagagctctttcaagaatatttgtaattcagtaaatagaaattcggtgagtacaaattggtacaattaggttcagtgggtaatttgagagagagaatatttgtatatccaaactttgagaaacacttgagagatactattagtaggaaatcttgttggatatattttacgaggatctagatttactaacaattatgtttcattaacatcttaatatgaattctaaa

SEQ ID NO: 388696 - DNA, 777 bp, Cannabis indica
gattgcccattactagtggtagggaattggaaaagttggagtgttcatgttgctaagatttgttatggtcattctggcttttggccactaatttaaggtattgtgagaaacattataatattatgcaaattctgcgttgtacgaatgatgactttgatctaatgatatgtacttggttttttccacattgattcctaccagtacctactacctgttttccattgaatccaactacgtgattcatgtttttccatttttgctttttgagagtaacgtgatttcaacatagacttgcttaattatcaatattttactataaagatacaattaatgatttgtaccaattgacactgtgtctattatgtgtaacatatttaaagccacctaattacaaatgaggtatactgcattgatgtatttaacatttattcaaaccagaaaacatgtagcagtggttgaaacttgaaactagctaatgggcgttcatacgaattgtaatggaaataatcgtaagctctacaattttagttgcttctattggagaatattatcccacatgaattaaatgtgaaagtattgagccatatataagaacatgggctactccactcattgccaatggttttgagatggaaactccatgattctcaacatgatattagagccatatcctagcgggctttcgatccacacctatcaaagagttagccagccgcaaacgagcaaaatggtactcccaataacatggactactccactcattgccaattggttttg

SEQ ID NO: 388697 - DNA, 831 bp, Cannabis indica
atttttcttttgtttcttgtaattgtcttcaccagaaagtgaaaattaagactttgagtggctcaaatagtgggcgggaattaggaatcgttgattaagagttgtaaaacaaattgggaatgaggcggtgtttcatagcgggtcagccgacacacggtaaaaataagagagacgcagcgcagctcaaacagataatctgattctgagttctttgagatctatctacccataccaattaccatacgtgtcatgacacgtttctctatttcacaaaacaagtgcataaacgacatatgcgttttcgaacgacttataactgtacaaacgaccattaatgaaaattggcaaaaccaatgaactaaaatggaaagatagttaattttgcttttctccaagtttcaaatttattacttaattagtaaatataactgggtccgttgaaaaaaataataatttaatttgtgattaatttaaggttttattgtttcccatatttttaaggtgaattttatatgatgtaactgttataatatgaataaaataaaaatattaaattataaaaaaaatgtagaattaatttaaatataatatttttatatttttataattgatattatgtaggatcggttaaaaattaattaattattaatattaatagacataattgagagctatatattttaaaaattagaataatgtatatgagaaaataattattatattttaaaactattaaatttagagttatatattctattacatgtaataacaatataaatatatatatatatactagcaaaaaactacgtgcgaggcacgtatattaaattt

SEQ ID NO: 388698 - DNA, 1005 bp, Cannabis indica
gggcaccctttctcttgcctaaagagaagacaagcgacagtgccatcctcttcttcattagaaacattggcatctcgtttttgaactacctcagcaggaatggaatctggaacctgaatgaaaagaaaaataacaagaaacaaataaaagtttcaaaaccgaatcaaaactctataacaactgtaaaaacaactactaatgaaaaacacaaatctaaaaaaatataaaataaatataaaaaaagcaaacttacattgatttttaaaaaaacatccaaactagccaaacaacttggccatcatcaatctcaagctggcttaagcccttgaaaaaaacaactccctttacatcaacttatttgcccttgacattatcaacatccttggacttatcatcttcactacttgcaacaacatcaccttgaacctccctaacagcagaagcatcagcaccaaccttatcatcacactgattatcatcagcaaaaccatcacaacgatcttcacccgactcatcaccattagcagactcggttttaatattctctgaatctagtaagcctttgtcatcattatcataatcaccatcatcaacatcatcagcatcatcagaatcaggttcatcaatatcatcagatgtctttacctgtttaaaaacagtaatgcaactgaaataaaacatgaaagaaaccaactataacaatgaattgaaaaaaaaaacaaccaaaactttgaaaagatatacctcaatagaaggtcggtcataattgacagtaacttttttcagaatatcttgaacaacattcaataaagacttgaagttaagatcaacaaaacacctcaacgaaacaaaatcttcagccaacgattcctgactggaaataactaatgccaacttagcttttaacatttttatatcgtcagaatcagatttttaggaagacgaatcagtctcaaaggttggctttaatggaacacgatcatctatagatgttgggttttatgc

SEQ ID NO: 388699 - DNA, 1368 bp, Cannabis indica
ggtgcataaataatatacatgttagtgaaaccgactgtaccgcataagaccagaaacatctattgagtgagagaaatggataaaactctaattatatattcttcatttttatattgataggtatcctcattccttcctagattcccaccactacggattgattgtccctacctaactacatcatagtgatctagggagcgcaattgctagagcacaggagaatgaagagtaatgattttagcaagagtagccggacagactactatagttagttcagttactactagagtagagttgagtcaaaaggtatggtataacagccattccgagcgagccaaccgatgaggactgggagcgggtggaaacacccaaaatggagattcctgaagtgaaactgatcatttcaaacacctagatccacaaaacactagaaattggtgtagtctaccccctgtcaacacacatccaacatcagttgactagggagtcacgggcggccagaccctgccctttgcaggtctagccagccatggaagcattgcgggtggcaagaccctacatttgtagggctggccagccatggaggagcaatgggcgcccaaaccttaccaaatataggtctggcaggcgagcgacagcagccaagtgtaggcctggtcggccaaacccaacacccatacctgggaatggccaacctgggtctgcagttcaacacaggtctggctgaccttcaccatatactctcccggggtatggatagcaagcccatatctcttccaaatttgtaacccctcctggccactcagtcaagtcccctcagcaacagatcctttttgttcaagcacacttggaccaacttagggaaatcattcaaggaatagttggtccaaagcctttagaccttgaacttgattggctaaagggattacctttctcggcatacataaatgccttgcccttgcctaagttcgagatgtcgatctagaagatgtatattaggggagaagactcgttggctcacatcaaatacttcgagatgcaacttaatcttcagaaggttactagtgatgtgctttgtcgcatattcccaacaactttatggtacatcaaactcacacaaggaagatgcaattcttggattgagttctcatgagaattttatagacaattctcattgttgagacttgtacaattgcatctagaagcccttgtcgaagtcaaacaatgacaaggagaacctttgaaggattacattaagaggttcatggccgaggcaaccaaagtcaaaggccttacaaaagagggccaatattttggaaatattttaccaggatctagatttactaccatgtatgtttcattaacatc

SEQ ID NO: 388700 - DNA, 1159 bp, Cannabis indica
ctatgttagattattaggttttaattatgtttttttcatatatatagtatattttaatgaaattagcctaaatagtggtaaaatggattggatcatccatgggatccattggatggatccaatccaataccaataaaaaaccagttaaagacatccaatggatggaaccgatccaatccaatacatctattggatcggatcggatcggatgactcaattcaattggatttgatcggatggaaaaattcaatatccaataaataattggattggattggatgggtccaaatccattggatgtgatctaataaacacccctaataattattttggattatactttagtcccccttacgttagatcttgggtccaccatgcatacattatacatattatacttatttttataattaaaaattaaagaaaaatattgattgatctactttaactttaatgtatatttcaaaaatataatattaattattgtactgtcaaattcagtgatgctaatttacataatattaaatatatttattacattaaaatacaataagattatcataaaagtttactacgtacggaatgctctaaaatctatttaaaaagaatgatggaaagttcgagagggactcagacaaatatttatttgttgtccaatttataatgaatgatttttgcacatatctttatttatttatttatttattttagataatttttcttatttttattaagtaatatattttcttctttttctcagttgtatttattagttttttctcttttttattgtttatttgaaaagagagaataacaaaaaaataaaagtcttcaacggtttcaacttaatttagcgccaatagttttttttggtagttttcaaaggtagcaataagatttgacacgtggaaggaaacaccaaggaataattgattaatattaaagaatattaatatagccgattatatattaatatttagttatatatagttgatgtctggaatagattataagtttctcataagaaaatagcattagtttatatgctatctgttgtgttttgtattcttcaataaattgacaaataaatctttttttttataagtaccatatatatacgtcaaaaaaaaaagtaccatatatataaatacatatatat

SEQ ID NO: 388701 - DNA, 820 bp, Cannabis indica
tcgaattttttcaatcactaaaatgaaaagtgaagccttaaccttctagtatccacaactattagtttcttacatataaatttgattatattaaaagggaaaaaattagcgcgaaacctctttagttgcagttatttagaaataaccacaatcataggattacaggcatcaccctttgacttctaagggtgttcaaaaaaattaacaaatttctcaaataaatcgttcaaatcaaacagaataaatcgacaaaagacataacctaaataagccaataaaaaatttaaatcgctcaataaatatagtggtgggttgaatattattatatatgtaacccacctaaatagcctgaatgaaccgaataaattgattaatatatttttactaaatttttttataacatattacacaaattatttttttttgttttttttaaaaagaaataaaaggaaactagaattaccaacaatatttccaaaaataagtcaatctttcaagattaaagacacattaccatataaaagatcaatctttaaatggaaacatatcaaaaataaatcaaggaagaataaatgttgatacttaccatttaagcacaaaatttccttagcccatgaatcaagacacacgcctccctctctctctctctttttttttttttattatttttaagaaaccgaaaataaaataaaatgtgtacaatacatatatgaaattctaaacaagcaatgtaatcaaatatcattgaaaaatgacaaaataaaatacatgttatgtttttaaagaaaataactaatcagtatctcaggaactaatcata

SEQ ID NO: 388702 - DNA, 898 bp, Cannabis indica
aataacaatactcttaataagtatcaaagtatttgaataatatcgtggttaaatattatatataagttttggtgtaattacttataataaaaataattatatttttcacgtgttatattgtcttataattagtggtatcaaagtaatatgagaaagagaaccataaatcaaagacacgaaacaagggaaaggattacgatggaatagtaggactagggctggagaattattacgtatttatttatcaattttgtgtgatccactacaaaaaatatttacttttagtgataattttttagtcataacttaaagtttttgtgacttaatgtgatttttaatcacaacaaaaaattacttatgactaaaacttagtatttaatttagttatacgttgtcactaatttatttttagtcacaacaagtattgtgactaaaaatatatttagtcacaagaaactgtaatatttgtgactaatacttttagtcacctttagtcacaacataggaataatgatttataattagttataatttttttacttttagtcacaagtttgttgtaactaaaaatatatttttttttgtactaatcttatagataaataattagaactaaaattttaaattcaaataattttaaatctaccctaataagttgtgcaataaaatgtcttgattttgtatggtttattaagttattaaacttgcttcatttgtgtctatcagagtgttagagtttgactcaaattatttattttttttctttatttatctatatttgtaaagttgcaatttctttttgggtaattattaattgggaaaaggaaacccttggttgccaagttttgaaaagtcttcttaaggaagctttggaatgtcttggtctccaagttgtctt

SEQ ID NO: 388703 - DNA, 600 bp, Cannabis indica
aaaaaaggtgaaaatgtgaagcaagtttggatggccaagaaagtggatatgggaaaggctcaagtgcaaactcaagaagctccagtgaaaagccagaaagcaccacccgagatagatgaggatgtatttcaattagtgaataaataatgggaaaacctattactagtgatcaagagagtaattaaagtatcaggattcactagaagcaagctaccattcaggtacttgggtattcctattaaaagtgagttattagaagagaaaataacaaaggataaagatttggagttcacgtaatctctcatttgaagggagagtcactttgatcaacttcatacatatggggcaccaatcatgatacttccaaaaaaaaagtcatacaaaaagttaatttaatatgtagggacttttctttggaaaggagcagttgagtttttggggcttggtaaggtgtcttgggaagatgtatgcaagccaaagaaagaaggggggttaggtttcagaaagattattaattgtattggagaatattgtcccacatggattaaatgtgaaagtattgagccatatataagaacatgggctactccactcattgcc

SEQ ID NO: 388704 - DNA, 793 bp, Cannabis indica
taatattgtaaatataacgaatatcgatataaaaaaaatattacatgaaattaattaaaaaattataataaaaaattaatattaacgatatgcatgggagttttaatgaaatcaagtcaaacaaaacaacaataaattaaatcctgtaatttttattatttaaataaaagaattaagttataattatatcagggtcatgtatgaagtacgaaaagatatatgtgaataaataattacatatatggacaaaagtagcagccttttaacatgcaaattataaagaaaccatgcatatgtaaataatataatatatattctattcacaaacgcgtataaatatgtaaatatatatgtgaaaatatgaagtgtgatgatcatgaataattgatatacatttattatgtagcattaaatgtcattatatttaggttgaaaaatgaacagcaatatagtgatcatcgatgatgtgtaaaaaaaatgctaataatgctaataataataattaataggtgatttatctcaaaaaaaataattaatagatgatgatgataaattaattggacatatatactatatataattaggggtgtgcataaatcgatccaatccaatgacaaccgaccgatccaatcacaaccgaccgccaaatattggatatccaattgtaatcggatcggattggatgttatttttgaatatccaattggatcggatcggatgttggatggagtgtctaaaaatccaatacatccaacatccaattaaactacttagtattttcatttagtttgga

SEQ ID NO: 388705 - DNA, 1219 bp, Cannabis indica
ttaccgagattttcaaaaaataattacaataagagttgggaaattaaataagcaataaaaattagagatggatatttttatgtggttcaggtgttagtgaactctagtccacgagttaaacatattgggctaaataaccttaatatattacaatggggtttttacaagattatgaaccctagcttcttgctatagtgtttgcacaattgatttctaacccttggcttaagggtaaaatgatgtatttataggctaggatttgggttcgggtatatctctgacccactagggtttgcatgtaaccttggcccccttaatagggtgaatacacgaaatacattgactgggggcccatagaccagggtcagcctatagggggaggcaatccgtaggcttaggggactacgtaatcttcaactgatgtcatgtatgcatcgattttaattattgtggtctcagaatcgagtcatttgacaaaatagaggttttcttttggtggtgtgcgcactcttaaggtctgacaaatgggacgatcctctaattctatgggatttagtgtgagagggttgctcgtcatcctatatcaggtctccaaggcacctctttgaatgtcccttccgaatgtatcccaaatgcctatccagagggtttcagttacttcttctcatgagggtgggaggcccttccagatctggataagtctggtcacggaggtgtgcctcctaggcctcggatgggcttgaactcgtccttccacacaggctgggcttgtcctctttttagagcttttagccaggccctaattgataaattttaatttaggaatgccacgtgtcccccttgcagaaaaaaatataacatttactcttaagcttctgtgacttgagagttgcggaggcttgtagtcttctctcttgatggctagggaaaagtggagaattcaaaaggagagcacccttttcaacttgtgcattccttgattgaagacgattagggagtttcgattatagctagcaaagcactcgtggcatcaacttcttggtcggtgaactttttatgtgttgggaaggtgtgtgaggcttagggtagcatgttgacgattaaattatgccagcacttgtaccaaggcaaattttatgatttgaaaactcttcaattccaatgttttgcattaaatgctaatgtaacaccctaactaacataggcgtattacgtgatt

SEQ ID NO: 388706 - DNA, 1148 bp, Cannabis indica
atatttaagtttctactataatttttttcatattcaaaccatttgattgtaatatctttagacaataaaatttacttttttccgttttttttttttttacagaaaataaacttctttctaaaataaatttgtcaagcgataaataactatttgttattgtgtgttttttcaaaatataaatttagtaccttatgtttctaataatgatcacttagtacgctttatttacatattctacatattttgtaccatctctttgaatttagtagacctaaatttctggtatgactaaattacccttcatttaaatattttatgtgattttaaatatttttaaatattatatgattttgtaaatttcatttttatttttatttattgattttatataaggcgggtccgaggttgggaccaagggcgggtccaagttcgggaccagggtctggtttgatttccaaagtctaatttgggggtcggagtttaaaatattattaaaaacaaattataaaagatattgaaagtgattttttttttgtttatcaaattttgattcttaattaaaaaattgaaaagtaaaaaaagttttatagaacgtgattttggaaaatatttttacttttttaattttaaaaacaaaaaattaatttaaaaaatattaccaaatgcaccctttgtaattaaagaactttttaaaaaataaaaataaaaaataaattctataaaaagtttaaaaaactaaacataaataaaaatataaaaaaaaatactaaatttgacatctagtgtaaaaatctcataaataacaatttataagaaaaagacaatttatattcacaagtacacgtgtatgtcagactctttattttgtaaaaatatttttttttataaaatataatattatattatatttaatttaatttattcggtgacttgtatgaaaattacgagttttattattattatattattatttttttactacaaaataattattattttaataatttatttttggtagattattatgtataaatcaaattaaggaaaattattctatatactttttgtttaaaaaaaaatacagtttgagttgttccggtagttactatgtgagttattatgtggatttctgtaaccatacaaaaaaa

SEQ ID NO: 388707 - DNA, 1849 bp, Cannabis indica
ttatctacacaactctccacatatatttaactagttatgtcttactcgcatatactcaattaatttatatattgtatggatagatatagaaactttaaggtaataactctaacttacttttctaactaagtattcacataacatacattattgcttacttaatcaaaaaatatactttaggtaataatcctaattcaccattctaaaaatgaacaatcatataacatacaagtgcaccaccatgctatactctatgtgcaaggtttgctttcttacttgaattctaaagtatgaggagaattctaaatccacatgtgatctcgagcaagtgtcggtattcctagtcataatctcaggtttaaaccataatagggttaatccctaatcacatttattaaatattcacatttaggactccaactctggaccaagtaatagagctcgtagtgagctttccaatgatataaagtgttgaccttgcttctagccaacaacagtgagtcaaaataaagtgattaaataagataaataaaagaaagcaaaaacagtaaagtaaaaagaacacaggattttagagaggttcggtcccgtgagaatgataatagcctactccccttgtatttgtattaacttgagagaaggaataaagtgttcttcctctctgaagctcttacaatggctctctgagttattttctctcttagatcactattctctcttgaatgtgtttctgaattaattctttcgtccccctccatagtaagcttatgccactatttataggggattaatacatgaagaatggtttcccttaatataatgaataaaataagaaactatattaactctataattacaatatgaagaataagaaactagggcttaatgcttttatactctgactcgatttcatgattatacggattgtcttcgtgtcttggaagcgacaaaattgatctctagaattgccaacttatatgccttgcttgatatagataagtttgtatcttggtcagacgtcttctcgactatcctgtttggatatttgaatgtcaccgatattaagattaaccagtagtgggcttctaggaatacttccctccgcgcaggtagcaaaaatgtgggacacatgtcatccattctcattgccacgtcaaggtgcaaaaaataggataatattttcccccaagtttgtgcttcctggtcgcacatggacttcactcagctcagagtcttgctcggatgggtgatgcatgtcttcgatgatggatgttgatttgatgtgactctaagtaggggtctcttcgatatctgactatttaatgcctattgaaagctatgcctcaaatcacgatttgatgtttgagcacgcttgacggttatattccctgcaatgagtaataacgtctacttttggggggaaactcaaaaatttgaattttgaaatgattaatttcctttttagatcgcttataaataggactaggaacctttggtgatccttttagccattttaactcttagaaaaccaaagcaaaattttccaaacaagttttatctcaaattcttcgaagaatttactggaaaactcttaacaataccatccgagcagagcaagaaaactttgaatcagtgagtaagtacttcattccttcttttatgcactcgtgatgaaatgcatgcattattctggattttatgttgtgaattttgcatatcttgaactgtctaggttaatgtagaacactaggttaggtttggaaatttaataatgctcaaccctaatagctaatatctgactgcacttcgattttaacctaaatcgttcattcccactcgtccataaggt

SEQ ID NO: 388708 - DNA, 541 bp, Cannabis indica
aacgctgtaaaatgtaaagattttttgtgggagtttgtatgcaagtcatgactagctgaatgaattttggtgagaagttgaaagcttgtagcatttcttctatgaactcccattttatggtgtcttacgccttcagaagattaagtttaatcatgcaatttgactttgttgatatcttgccatagttaggcaggggcctttaatcaacaactagcaagctattaaaagtaaatgtgtaaaatgttcttttgtacgattcttgatcatgtttaatggctatatgcaatattttttaaggttaaaagaggattgagacaaggtgatcccatgtcacccatgatctttgtacttaggatggaatatcttacccggatcctacagaagattgatcttaaataagattttggtattcatgacagatgtgaagctataagactaaaccacttaagctttgcagattgtgacagtcagtagtcccgtgatccgtaagggaaaatacagggtaagctgtacaatctcacaccgcccggggaaggtcaag

SEQ ID NO: 388709 - DNA, 508 bp, Cannabis indica
agagagagagaggggggggggagttggtgtgtgcagttgataagaaaaaaaggagagggggataagtatgtagggtttcaatattaatgggctgagcttttttaaaataataataaaaaattaatgggtcttaagtgatcttttaaaatcgacgagaaatagtttttttttttaaaaaaaaaaaaagatttaaaaattgctaccctctaaaattgatgggaataattttctactgttattaatttgcaagaaattttttttctgtcggtttaaaacacacacttaaatttttacccgtcaattctaaaaaaaaaaattaatattttgatcgacgggaattgtctattttgtattttgtagtagtggctacttctatgtggggattagatcaaaattttatccaaaatttgtgactcaacctcgttatgtttgtgtattatttttattactcttgaattagtttttttcattattcttgattcatgttgtgttcttgttagtccatttg

SEQ ID NO: 388710 - DNA, 903 bp, Cannabis indica
ttcactacaaaaaacgaccacttttagtgataactttttagtcacaacataaattttttgtgactaaatgtgacttttagtcacaacaaaaaattatttgtaactaaaacatagcatttagacacaaattgtcactaatttagttttagtcacaataagtattgtgatttaaaatatatttagtcacaacaaattgtaatttttgtgactaatacctttagtcacggaccttttagtcacaacataggaataataatttataattagtcacaatttttttacttttagttacaaattttgttgtaactaaaattaagattttttgtagtgttttaacattcttaaagaatgctactattagagatactagagatgctcttatatattcttccccttatcatttatgtgaagagaattttggaaccaactttgcttaattctcagccccacatggcatgtatagtgaccctttgtccaattattttcaaattattataattttttattaataaacttttgatcctttttttttctaattaatgacaatttgatcatccgatgatataataatatttcgactaagaaggtttcattggtcagtttttatgtgaccgttataattattgattacatttgactgatcaaatgatttttgtatgtattgcgtagttggaaatcaaaatatcagtcattttgaaaaagaaaaagaaaaggaaaaaagaaatcaaaatatcagcaccaaagggcaaataaatgtatagaccgtattgaacatgttttaagacggttgtagttgtactaaagagtataatttatggaaatttaggtacattagtgcacttttatatttattcaaaatattctgtaaaatttaaaaaaaaaataaaaaaaaaactaacacac

SEQ ID NO: 388711 - DNA, 1283 bp, Cannabis indica
tcaatcgacagcggggtcgtatgaatccgatacttaccacgtgttacaaaaaaagaatagaaagataaagaacacaccaatttttaatagaggttcggccccctatgatagcgggtaatgacctactccccttttagttttattaatactgaaggttaatactattcaaatcagtatatgtgggatcttatatagcacccttaaggatacaaagaatgaatcgggattggcgaatcacaagtggtgagagtgcttgtatggatgtgtgagagaaagtgaagaagaacagagttatcagacttaggcttagagctttaaggcttgtattaggcttaaattaaacttaggtttttaagattagagttaaggcctttatataggaagcctaaaatcctaatttacacttgaaaccctaggatagttgcatagttaattaattaattataaaagaccaaaattcccttgaacatatatattattcagctaatctattgggcttttaaggcctaatttccaacccaaatgatgttgttcacgtgtagaagtgcacagagaaccctgtagagcttctcttggcttgccagacccctgtagggaacaggctggtcagccatggtgtggtctaaaggttggctggccatggtgtagtttagaagctgaccggtcatagggttggccagtggtggccggccagcttctgtgaggaagctggtctgtcactcgatgcccgtttaagtgttagggtctccgtttgcttaggtactgacttggccttcttatttgcgacatgtactaccacatggaactgatttggtccacataagcactgccacgtggaactgattttgtccacgtaagcactgccacataagaaggacaaaaattaggataccatttgtgttgggattttatgccctaaataaaacccatttcaatataatcttaattgttatcaatggaagattagaagtcatttatgattacatgtattattcatgattatgatttgatatacaatttctgttaaatttagaacacatagttattcacaattacagtgatgtcaacatagtggaaggtaattgtgattttatgcttcaaaagattatgccccatgattcatcagtgcactggatttacactaatgtgatagtcagcgataaagtttactcacaccttggataaatgttaggtcctttccaagacattggcaaagtatgctagtatcggatgtatggagtatacaatggactgggaccaatattgtgttggaaattatttta

SEQ ID NO: 388712 - DNA, 789 bp, Cannabis indica
ggtccacaaacatagtggagctatttttgactcgaaagatgaagatccaaaactgtgtgtcaagtagattatcgatactctgctgccacaaatttttaagatgtttcagatggaattatacaagggaaggacagatcgtagggctcatctgtccaaagacaaccatatgatgcaagtggcaagagttagtgatgatgacaaatgtcgttgctcttcattgatgttaaccaaattcattgaggattggtggaagagactgtctgccaaatcaattcgtgactaaaatagttacagtttaccttccaaaaatagtttatttttgctagagattacaacatggaggtctgtttcctaaccaatcttaagaaataaccaggcaagagtctgaagaacttcatccaacaaatgatggaagctacatccaaaactaaagtcagtgatgacatgaagctcgtggccctccagtctagattaactataggctcctttctatagaacgaaatgcaaagaaagagatctgagaccttgttcaacttcatgtctatggtgcaaggtatcatcaatctggaagatgcctatattcaagcatttagagtcactcccatacaaaccccaccagtttttgtcgccacttacacttcgcaagcaactgagtaaattctcttatcttggtgctacacaccacctcattatagtactttgcattgaacgaatcctaaaaccctttccaagtaatcattgaaacattccgggtaagggataccatgtcccaccataccagggcatcct

SEQ ID NO: 388713 - DNA, 1145 bp, Cannabis indica
acttgtggactaaggctcgttaactccccaactatgcaaaaatcctcttcttctttattccttaacttaatttattattgacttgttttttaaaaatctcgataaatattttagtgcatttattgagagatgaggaagatattatccattgttgtcatctacaacaatggttacaactaaaaatacaatcgtcaagcttagtacttgacaagacaatgaagatgttgccgctgacgacgagtcaaaccgtcctccttcaataaacgttcaggttggcatcgtaggagacaaagaaatatcagaagtgggtagttgtcctcttcgaaaaggccaacaacaggagaaagatgttgataaaaatcccataaatgaagatgagcaggaaatgtagagtgaggaccaacaagatgactatgagaaaaactacgaagatgaatactataaagaagaccccgaggtggtgaatttgagacaagtagtagtagaccaacaaaggaaaatggcggaacagtaaaaagctacaggccatacacaagaacaactattcttaacatataatcaaacatgaattcaactatctttcagaaagtaaacctcaagaaagactagttgtaatacgtcaaatattcatcaaacaattacagctcaaacccttcaatccaagctacattcttctccaaaaatcaagaattaaaaaaaaaaggtttagttagagaaggggattgggtggtgaaacttccaaaactaaaaaaaaataatattctatctttagttttagaaaaatgatacgtacaatttattttgctacaattttggtcaaatgaccattttgaccttaagacataatactcatataaataactaccaagggtagttttgttatttcatattacacatataatttataaacccacatatatattatgttatgacataattaaacaataaaataattttggactccgaactcggtttgagctaaaattcgcgattatgactatatcgtgccaacttgttagaattcacatgtagtaagacaatatgaacataccatataataatgagcttttttcataaatgtacaacaaaaataaaataattacaaaaaatgtaaaaaaaaaattatttgaaaaacttatacattt

SEQ ID NO: 388714 - DNA, 667 bp, Cannabis indica
catttaagaaattccatatttattaaaaagccctatttttttatgtggttttaatgttttatataattttataaatggaaataccctctttcaaaatgtaaaaatttcttacaaaaaattaatgttttatataatttttaattttttacttacattttcaggaaaataacaagttttgagaataaatgtgaaacaactattcgaattttacttttgtaaaaaagcatattgtaaatctatatttatgtgtgaacttttttttttttttattatttttttttttttttttatgaaatagttcctaataaaatacgggtttggtgttatctcttctgatattgggcttcttctaaaatacagagatacatgtacagccgctaatgggcttatgttattggactacccctactacttatattgggcttatcatatttgataattagataagggtacctttttacattttaaaatttttttgtacattttttcagtttttcttagaaaaaatacgaaaataacaagaaaactacataaaagtaacatgaaaataatatcaaaacaacaacgacaaattaacaataaattaacaagagtacaacataaaacgactgtattttttgtaaataaaataaaaaaaaatcgtaaaaatatttaaaattctataaaa

SEQ ID NO: 388715 - DNA, 2147 bp, Cannabis indica
gtaacggatccggatcatgtaatgtatttgtatatttaagtttagtttattatagaaatttaactattcgcactttttcagtaaaccctttgattagcaaatgagtgtacagtatttagaaagtgtttgaaccctagaattcgcctgaacaattgaggaatgagatttcaaccctttgcatgggttggtgttcttatatttatagtgatagggttcttctttgttttacactttgcccactgatggggtaaataaagataacatattgactagggcccatgaggtggagcccaatccatgaggtgttgatggtaggctaatgtggatgccacatcatgttgctagttgtccatttcgtgtcctataatcatgaataataaagacatattaaattcttgttactcacttactatctttccatatggggaagatatgatccactggcaagatcttgggagttaaatcatgatttcgtgggagttgataattaatgaatatgatttggagttggaccccggacatgtgttggatacttcttcggatgctccaagtgtttttcttctagattctcgctatgttggaggactatctctcctagatgagttgttaacctgtgatctggaaggaatgtctctacttatgggtccgacccattatcttgcttggacccgccattgggcctaaagattgagctataattggctttggaaaatgcatgtgtcctcatttgaaagcacgaataacatttaccccccaagcttccggaactctaggggttgcggaagcttgcacccttcctcttggatgacatgaggataggttgaggctaaaggtgaaacctttttgaattccaaagaaagattgtttgtggttgatagctttatgctttttgaaatgaagcgacctgtggcattgtatctttgcctagtgggattacttttcttgatgaaacgtgtgcaatggggcttcatgaaacggtggttaattacgtcattgtgcgtatcgaggaaaatatcatcattcagatatcttattcccaagcatcgcattaaatgcgtatctggcaactttaccgaaccattggatttgtcttattttttcttagatgtaatcttaaccattgatttgggatcatgcggatcgccacttttgtgtataaatatgatggaaatttcccacttatcatttttacccaaaatttcaaactgagttcgaacttgcagagagaagacgatgacgaacgagagaaccctagagtactacactaatcattgtattcatcttcttcttcaaatttgttggcgagagaatccaggagcaccacagttctaattgttgattcttcacaattcactgccatcaagaacactagatattcaagcggaggttgaagtgctcctccataagatttgtttgattcagtctaaaatcctacgtctagaccagattccgtcgatggaagtttccttgcgactatcaccttacgttaatgtaacgtcctaatccgtaagggcaccacgtgtgcttttataaattagtttataataataaactaacagtttaaggaaaattgtggattaattaaaactttaccatttattccttaaaatataatttaagcccttttcaaaaagttactgagtcagggatccccttgttataaaattttaccaaagtaccaccatattattttattacaaaatatttgtacacattcaaaatactgcaaaacgcgatccaataaactgagcacaaaggacgacggggttgatatgtacattcaccgaaaaacctttgactcatggctgatctactttcccttttcccttacctgcaccacaaagcacccgtgagtcacaaagactcaacaagaaaagcaaggaataataaaaattcatgaataaagtaaaacaataatcaatatcagtcatatattcaagcatataatcagacagatcattacaacatagcacaatattaataatttaattatttgtctaataagaaaaactattctcgatacttcataaagtatccgttaattctagctttccaaatgagtcaactaatgtcactatcgttgcctaatgagacaataagtaagtaagaaacctaacaacagttttagaatagagttataactcttt

SEQ ID NO: 388716 - DNA, 2719 bp, Cannabis indica
ccttaacgttttagttttttttttttttttttctctattttttattttgatgtctaattctcattattcaagggatgtttctaccatgatcatgaattaaatactttttcaagggtttaaatggagtttcttgaaactttgattgtggtttagtgtaatttcttgattttcttcttcattattatggtctatgcaatttatgtttaatgtttgcaaatacttgatcatcatgtacatgatttaagttattgattcaaaatttgaaaagcgataattaaatatgatataattgtttagacataaatttcaatatttgatgagaatagctatataatttgtgtagtatttatgattttttatgcttaatatcttctacatgtttaaatttatagaaacgtaaaaaatttatatatagattaagatttattaattgtgaaatgtcaaagtggatagatgatgaaattaaaagccctaattttcatctattgaaatatttgtcaattttgttatctcttttagattatgaatttttattatttacttttttgtttttgcttttcttgaaatcaattaattgttaatcaagtagatataggaattaatttttggtagctagtaaatccattttcgtgcgaacgatctttgtttattattgtattacttatttgattgcatatacttgcgtactgaatttatagaacaagctacaagaggttatcttttttctctggctaggccgacaagcataaatgcggcttagtcgggatagtattttgctattgcgattttgaattttttactactgtgattactcttgtctttgtgtgatggttttgagtgttgtagtcttgtatctgtgacatagttttgagtattttagccttttacatgattttgttttgctttatttcgttgttggttcttctttgttttttgatggctcgccatcaaatcgttattagtggttgagagtaacaagttctctgggactgaataagttgttaatagtgcagtgcgtaccttgcataatagttagtgctcaagctacaaaggttgaatgaacttgctgcaatagattcagtattgttgtgtgctaggttgtttttagtattaattttagggttaatttttagtgtgtttttaatttagttctactcttgtttggagcaattttatactttttatcttttatttttacagatttaaaatagaagaagattaaaaaatatcaaaggaataagatggaaaaaagataaaaagatctcacaaaaagatgaactataaaatagagaaaattgtgcaagaaaataaagctaaaacttcaagcataaattagactatgttctgatcagaatttggagaaatttagaacataaaagttctagatctctcttttatcttatcagaacttcttgaatcgtctaattcgaagtaatatcaagagagttatgatcaaaaaactatcagtcaacgtagtagaaaattcactgccccttctaatcttaagcataataagtttttttagcgtttttttttttaacaatttttttggctataaaagaaggacttcaatagttttcaggaggaatttagaatggaaatcaaaccagtcagctgtgtacgaattttggggattgaagccaatactagaggcgtttctcagagtgttttcagcattttcttattctatattttcttatcttttctaaagttaatatgcgtgaatttgctacgatgaacatgagtagctaaacagttcattaggatctggatgaagattgcttgatattgatttatgattctaatatgatttattttttcctcaatttctatgtattttattttattcgcacttaattatacttttgattgcctgaccatcaattaattattttatgatttcgatgcgagatctgagaagtgagtgtcaattatgctatagtgaaatagaactgaaattcactataggacgagagtacctatatagtttagatagcttatatggtttttgtgtttaatgctatattacattatttaatttatcacgtagagtagaaaatttgctatgtaattgagtatttatatatctaaagaaaactacaaattaccttagtaaacctgctattacatagaaattagtaataggaagataatcatattaggccataattagtagatatagttgaaatcgaaagccctaacttttattcattgttaatttgtctattaatttacttgcttcctaatttttattgttcttcttgctttctagtttaattttatctcaaattttattcaaccaaatagaagtaagagtttaattttaacgtacttaactacaattctcaagggatcgacctcactctttgtgagtaatacttgttaaaacgttacatatacttgcatgttgcaattatcgcaacattatgtcttctgaacagtagatgaaagtgaacatatatatgtttttaagattaagtgtaattctgtaaatttttttcatctgattttatttttaattttttgtttaaacgatttgagaattaaatgactgattattttaaacttttttttaatttttaaaaaattttaatcatgaacgtgtctcaaatgaaaagatatctacaattagattgcatggttattattttattcgctaattactaattaataaaattgtataatttattaaaaaaaataaaaataaaaataatttgca

SEQ ID NO: 388717 - DNA, 2132 bp, Cannabis indica
tgaaaaattaattgatgtgtcaagcatagattaatttaatacagtatgacacacaactttttaacatgagatcttgattcgtttcgttcaccttatttgttaaatgattcattgtttctaactgaatataataataagcttggaaaataacaccaacggaatttctctaaaactttatgttagtaatgataaattatatttttgtttatcttatttaagacacgaattttacttaacaagacatgttatttatcaaataagacatatcgtttaccttattttaaacatagagtttacctaataaagtgttttgcttaccttatttgttaaatgattcatctaagtatgaatatttttaatcgagtaataatacataagcttggaaaataaaattaaaggaatttccataaaaaaatgtgtttttaatgataaattatgtttttttatcttatttacagcacaaaatttaagtaataaggcatattatttacttaatttacgacataaagtttacttaataaactgtgtcggttattttatttgttaaaatatcgtgtatatatatacatatatatagaaatgagacttgtaattaatttaaatattttttaaccattattaaataattactaataattaggattaacaataaggagacataagattgttgtttatcttatttaagggtaatcgtttaccatttcaatgataaattattttttgatttacaataacacgtattgtttaccttattgaagatattgagtttacttaataagacatgttgaatatcttattaacagcacgaagtttgcccaataaaacatgtcgtttaccttatttttgtttacctaataagacatgtcgtttatcttatttttgtttacctaataaggcatgtcgtttaccttattttagacatgaaatttacctaataagatgttttgtttaccatatttgttaaatgattcatctaagaatgtgtgtttcttaccaaatagtaatacataagcttggaaaataacaacggaagggaattccttaaaatttatgttaataatgataaattaaatttttgtttacctcttatttaagaaatattatttatgttttttatagtatgaaatttacttaataaagcatgtcgtttactttattttaggcatggagtttacctaatacggtgttttgtttatcttatttgttaaatgattcatctaagtacgagtgtttttaaccgaataataatacaaaagcttaaaaaataacaccaaaggaatttccctaaaaaatatgtttttaatgataaaattaatattttaccttatttacgacatgaaatttatataacaagacatattattttttgcctaatttacgatactatgtttacttaataagttgtgtcgtttatcttatttattaaaatatcatacatacaaatgagacatgtaattaatttgaacattgttctttcattattttataattactaataattaggattaactaatgtgatgacataaaattgttgtttaccttatttaagggtagtcgtttaccattttaacgatatattatgttttgatttacttaataaagcatgttgtttacttaataaggcatgttatttacttaatttaaggcatgttgtttatcttataaggcatgttgtttacctaatttaaggacacttttttttttaccaaatttaaggcatgttgtttacctaataaggcatgtcgtttaccatattttaggcacattgtttacctaataaaatgtctgtttaccttattttagggtagtaatttttgtttaccttatttaaggcatggagtttaccagcatgttgtttacctaatgtaagttacattgtttacctaataaaacatgttgtttgccgtgttttaggcacgttgtttacctaataagacacgtcgttatcttatttttaattttgtttaccttatttaaggcatgtcgtttaccttatttaagacatgttatttactttattttaagcacgttgtttactatattttaaggcacattgtttacctaatattgaatgtcgtttacctaaattaattcatgttgtttacctaataaagcatgttgtttaccttatt

SEQ ID NO: 388718 - DNA, 817 bp, Cannabis indica
tttttttttttttttatttgtatcggagctcatttttcaagtctcattcttattttatctaagaagtgtgtttagaaaacatagttggagatgattttaaaaaaggctcactgatgcatttcttatctgtttcaacatcgaaaaaaaaattcagtctaattttttatggtcatctatgttgtaattatttaagacatcttgctaaattttaagaattttaaaaaaaaattaaacacgctaaaaatgtgttcaaacagtctattttacacgtttataaaataaaaaaaaaatctcacatgcaacaaactctttgaaagctaatttcgtcatgttatgtaaatgaataaagaattttctcaaatactgaaataagtagaggatgcatctatagacctcttttaagaatgtattgtagaaatcactctaaaatattaaccactttattatacgaaaaatactaagtggtgactaacatcacctaaaggtgtcatatagctcttgaattcctttataaattgaaagtaagaaacgaattcttctgtttttcaatcgaaaacttttccatttgttagaaagttttattgtagtttctgcttcataatgagattaattaatgatattgggagtcatcagcctattatcccagcacctttaatttgtattgcgagagccctttcacacgagattcctagatcactatggttgacttttgtctctgttcgaccagtcagtctcacagtcagacatgtttattgtaatatcaagattaaaatagtattttttttttttgggatattaatggtgcgaggataattat

SEQ ID NO: 388719 - DNA, 598 bp, Cannabis indica
aactcaacagttgagtttgtggctcaaagatttaagactgtggcttctcccacttaaggagattcctttttacaactgctcttgagcaaagccaataaaaaatttcaatatgttatgaaaatagctatctcttttttttttgtcaaaaggttaaaaaacaagggagaatactattgatttcagcatacaagttgtaatgctgaaatcgtatatataggtacctataactataaaagtataagcaaatttcaggtggatccttaaataatttaagctcttgcccattttccatttattctctcatttctttatagagaaaacgttcatagaaaaaactgaaaggtgttgggaaagatgataaacttcaagcgcagtgaaataataaagaaacgaagcaaagcaatttacttaattcgataaaactagcaaacccacaaagagagatatatttcacttatcacttcaaaattacatatactctctatctcaatctctccacctaaatcccaatacactctttgcttcttcctcactcttaccatacaacaaactcacacacacttttcttttcacaactcactatttttctccacacaca

SEQ ID NO: 388720 - DNA, 1255 bp, Cannabis indica
agtgatataccatacacaccatgaactttcccatacttgtgctggcatcaccgtaatgtactccttaacattatacactataccaatgcactctgtaccataactgtacaagtgttggtattgtaactaacatataagcatgcatatacacttaacatatacatacactcgcatattcatattacagattatacacagttcttacctcctttctagattcaagtgagttgggtgacctgaacggaaagtctcgtgctggatggatgccctaatcacatattaaaactgagtaaatcacatgtcccaaaccctaatccgggaaactcaaatctacaactcaatgctctgttatattcacaagggatacattaacctaggaaacagggaaacacccaactaaggcactaaaatggaccagaattgagaaaatgagttgttcggggaatctgtcaaaaccggttaaccagttttacagctggcaaattggttaactggtttgcaccaggtttccccaacagctctaaaattcgctcaaaacttatccaatttccaccaaaccttccagagtacctaaaacatccatacagaataattttcaaccaacagaactcaacaaaacccataaaatcaaaacatgccattgttgagccaagtttgagttcttagaactcaaacttgctcaacctaagaattaaactataaaaccagcaaatttatacctaaatcatcattaataaacatcataaaccaaacacacaacaatcctaacttccacagcaactaatcatcaacacttagcctaaaattcaacttaaaaacttagaaaatcaagaggtaaaggtttctaggtttaccttcactttcaataccttgaatccttgctgaattcaagcaaaattacagcaactagggttgatttcttctgatgtgtgggagtcgaaccaaaagaaagagagagaaaagaatgagttcttcaattttggatttttctctttaatttcatattttcttgattttaaacataatgcactcactaaccatcaaaaagggcagctgtcaacacccaaggcaggcaccaacactccttgacaaaaagactaaaatgcaccaagaggcaaaataaagtctaggtgtaaaatggtcaaaaaccataatcccgctcaaactcgatattttattttctctaatatacatcccagtaagaagtaaggttctagacttacccatgtcatcaaactagccatccatcgcattt

SEQ ID NO: 388721 - DNA, 1078 bp, Cannabis indica
actaactgtgattctataatcccaccccctaaaagaggtgcactgatgctacctttacttatttcggcatccaaaaaatatttttagtctatttttttttcatattcgtttacgttatagttatttaagatatactttacaaaattttaaaaaaaatttggaaatagttttacaatatacaaagcagtgttcaaacaatctatttcacatgcgcataaaataaaatagtcacgcgtgcaaaaatttactaaaaaattatttcggatgctaaaataaataagagtggatcagtacatctacacttttagggcgtaatactataattgttctttttatatatatacatatattatatatataccaattacctgtaaagtttccaattaaatacaaaaagagtagcaagccaatgatagaaatagaaatggcaaagcaattctcccaaatatagttacttgtttccaggttttgtccaagtgaactgcaacataatatgaattttttatgatttaattattaaaattattgatcattaatgatagctatatatatatttatataaaattctaacctgagatttctaagtccccaccaaaaagagtagatgaacttttgaggaaaatcgtttgattctaggagaccagattgaagggcttcatgaaatatcccaaaatcaaagattgttgcattcttgggatttattggacagtattcagtgatcagatttgtcatatttcttggttctgattccctaatttgattacaaatatgattattgttaaacttttcacatgattcttttccatataagttacaagctctttcccagcatgaggtttctctttggaatgagtaaaagtaccaaaagcttccaaatacctaataaatcaaaacaatattacaaattaatagtcacatataatcgctcataataagaaaaaaaaatatgtaccttttgttttttctttgactaatcaatagctattaatagtcaattataacatgtatataaatttgtagttggtgagttggtaagaaactagtttggttaaataatcagtacaaaaaatcttacttt

SEQ ID NO: 388722 - DNA, 735 bp, Cannabis indica
tttttttttaatttttataaattctctttctcttattttggatcgatcttgattgtttagtttttcaaaggatggtgagtgagattttttcgagtcggttgacagcgagatgtttcaaaattgtggaggtggatgttgtatccatggatattggagtataggcagcaagattcgatgggttagtgttctgtggatcaacaaagaacaaccccttccagccatggaggttgtacaagtgaaaatattgatactcgttgcagtagtcatcacagtcatgcacgtttggaagattatagcgaaaatacttctacatttcaaggggaaaaatctaattattggcttttgtttttaggttgtgtagttttagttgtactctttataatgttgttctgaattgaaaaatgttaagaagtgtactattaagatttaatgtatgaatcaatgacttttttttttttgttaattcataccatataattaatcaaaagatacaaccttaaccatacaattaatcaaaagatacaacccttaactttgcatcatcaaaatacaaagtttatcaaaagacataaacttgtttcctagaataaagacattcaaatccttattcatatacataacaattttagatagtaagtttctgaaaagacctattacttgtgctttttaaacaaaatacataacatagtttaatggcatccaaaggatggacacaaaatgacatcaagtccacca

SEQ ID NO: 388723 - DNA, 1384 bp, Cannabis indica
ttttttttaaaaaatttttaacaatataaaataaaaatattactaaataaattaaaatttttaagcaattcaattaagcaattttagggttacagtaattgagaaccaagcaaccctaggcgaacgaaaacaacctggctctgtgtgtgatcatctcaccctcttccaacctctctgtcagtctccgacggtaagttttctcttctctctctcgatctagacttgtatatatatatctctatttccatctaaaatttgaaaatccctaaattcgtaaaagtttggagagagagaaaatagaccataaatgttaataaaagtcactaaatatgacattttcaaatgttaataaaactcatttttggtgtagagagaggatgaaatgaagtaagtagaaatgggacaaattgaaccttatataggttatggggagttttttcccaaaacttaatgggtggttattttctcctcaaaagtagtcatgcaaaggagaaggagtccaatagttcgcaagtgggaaaatatgaagccataatgcaaatcctcataatgattggcaataaagttattttttatcataaagatgagtcatctgactgaagagttaaaaatctgactaggcatagttggtcagttatggtttttacagccaaggatggaattgataagtccctatacatacagacatccgcatagggacttggggagcggatattatcctaatttttgcccacttgacgtggcatgtccacatagacaaaactgaggccacatggaatacaacttgttaataggtgaatgaagtcaccttgccacatgccaattgccaagggttccaagcaatcaaccaagatcaagctaggaggaaatggacagccaaggaatcctggccagaccacaccttgcccgaccaatgaggatccatgcgctggccaatccctaaggatagggctggtcggccagcacgtgcaaattgcatccaaaagggtctaaatgaatggtggggtccacaacaagctgtctaaacagttcataacttaatttcagttacggacaactccaacaacccttaagatagagattcaacctcaaatttttttgtatattctttagagatattacttatccgttttttgtaatttaaatacaggggaatttgtggaaaagtccctgtaaagttcaatttcatgcagataagtcccaaacgtcaaaaatagcgataataatcctcaaggtgatattttttgtaagtccattagtccttttttttaactgagccgttactcatttaaaaatggcacatgttaaaattttattggtccaaattacattttaattaaaataattttaaaaacaaaatatcttgtttaaaaatcatagaaaa

SEQ ID NO: 388724 - DNA, 667 bp, Cannabis indica
tttttttaaaaaaaatagtatataacataattcataaaaaatatatataccaaattactccatatcttagctaaaaggttgcaaaacaattatacattattttcgaatatgtcatgctcaaaaaataaaaacaaataattcttaaattatgtctaatcaatgaaaaaaaaactaacaattttaaatataactaatgtataagatatagttttaaaatattatcggccaaacataaaagggcataatttttttttccagctgatctttctatacttatcaccaatatgtacaaatatattagcggacttatatggtgccagaggggcaactccccattgttattatttttctttcattaatttaaatttgtatacatgtgtattttatatttcacatttgttttagtcattgtaatataaatttgaatttctttattattatttgtcattaaattaaaattttatggtttaatttttttaaaattaatatttataattaaatttattacataatcatgaataagtaatactcattattaataaatatttcatatattatcttttggcctattgtttatatgacttaacatatttttttttctcaaaatatatatatttatatagtttaaataaaagagttttttcatttttacacttcaatatatata

SEQ ID NO: 388725 - DNA, 2168 bp, Cannabis indica
taattctctgtattcgcttcacatgattatcttctcaaggttgcaaaacttaattagaaatttgcgtcgggacctcttgctcgtatacaggtctaagaagagcttaagccaccaaaataatgagacaaggacaagtaagaagcgtacctcttgtcgaaaagaaacaatcacatcatctgaatattcttgcttggagaataccttgatagcaacatcctgccatacaaaacaaattattcaaccaccatttactggcttccatctaatttagagaaaaactcctttttttttccaacaaattttattacttgtaacacaggtcaattaagagctgtctaattataatgtgaagttagtatctaaactgaacatagacttaaatttcaattgaaccaaggaaagagacaaggaacatactgatccgtaccacagaccatgatacacagtcccacatgaacctgcaaagagaaagcaaacataaatcacacatatgaactatactaaagaaatcagaagctgaagatcagtgttggcaattacaattaacattactttcattgaaacagtttcatcaacactaccttgtccaatctgctctccaattgttaagtcttcccacaagatttcatagtccaagcagtcggtgtcaatgtccaccttattcacagtactactactggtacttccacagctgctgacactgcttgtgctgttgacattaaatgaggacgaccaggatcctgaagcctcgttatttgcatgttggcggttgaaatcatttgcatggttttctagtttaataataggattcttcgaatgacttgaatcattctcttgatcattttgtaaccaaggccaaacaaaacgtggagtcttaacatccgatgacccctctcgatcatttcctttccatggccacgatagccctttcttacccatccatgcctcagccttcgaagagatcatcttgtggattgcagattttccttcgccctcatcaccagaatctctggagccttttcccggagatctttcatcaagattggaaaatacaccaaatgggagtgcagatatttctcctctaggtgtgcttgctccacttgaattagcatcttcccggtgatcagagttaccagcatctaagtatccatgatcagaatgatagctatctccactcccaccttcacgatccatgttgttctccgatgagcgaatcctagacttgactttgttgctcaccttggatgcctgttttctttggttctaacaattaaacatatgccagactacaataattcacaagaaggaggaaaataattctaacactaaccaaatttgttatctttgaagcaatagcagtctgcaaaggctgctcaggatcgagaccaagtttcgttgtcacagtatttctgggccgaagaccgctttctgatgaatgctttccatcaacctgtgaagccactacttctctaaagggttgtgaatcacttgacacacagataactcctatcaaagcaccatcatcatcatagaatggtgtatttgttacaacagctaaaatcctttccccagccttatttttgagaggaaactgtccagtccagttctcccccacagtgacacgtttgactatattattggctgaagaaaagtcacggggatcaactaaaagctcaatggcatcttggcctaaggcctctgccgcagaaaaaccataaagattttcagcagacctgttcctgaaatagtaccaaaaaacaaatccaaatggaccaaattggaaagcaaataaatatccaaaccacgagtaacagatttaccaaattgctttctttagtaaaaaagatacattgcctaactattaaagttcaagaatttatcaaggcactaattgaaacatcataaccacaataaccaaccacagtcaaatctacagtttctttcaacattggaaacaaagttgcaacccaaccaaaatatcaatacaaagaaaataagagaaaagaaatcactaataatcaaacaaaacaaacaattctcaataatcccaaaaactagcacagcccaaatgaacatctcagtatacgtgtgtgtgtgtatatatatacagaggagagagagagagagagagagagagagagagagagagagagagagtagtactacta

SEQ ID NO: 388726 - DNA, 2014 bp, Cannabis indica
acacctgcagaagtaagtcaagaccgaccaaggtcagaacaaccaagatttgctacctccaccagtagatgcacatctgcaagtcattgttggaggccctcacattgctggatattcgggcaaaggctcgggagaggtatgcccgaacagtgcagcatgagcaagaagacactactacaaaatgagcttttcccaacagttaataagtgggtcaattatgaaaactgttagggaaaggaaaggagagtttttccaacggtttagaaccgaagctaaaaaactgttgggaaaaatcaatgccaacggtcaaaaactgtggacaatattaaataatttttttttgaaaaaatatttattgccaacagttataccaacaatttataattgttgggaatattaaatattcccaacattgataaactgttgggaaatatttttagtctactgataaaagtaaaaagatgaacacgttttcctataattatcttttaaaaatatatattaaaaaaccctattttcactcatcattttaacctaatactcaatttttttttctcaatttgagccgcctcctcctcagccatcgcttcccttccctcatctgatctcttttttttttgttttttgaaataatctctccacactagaaccagtaaggatctgaggtttccttgttgtcgtctagacactagaatgccgagatcaataactcgccagaaccgggctgtcctcgctcatccccgttgcaatcctctccccaagcttaaatcgaaagaacccatgcccgtactattcgcttcttcttcctaatctgtaatatttttctgccatagccactaaaacccgtcgaaacctactgcccagaacccaaacacacttaacctttattttagctctggtcgagtcatttccggcaatagaaacctccaaacatttgcgctgaaaccttccctctcgtattctctctctgtttttctcattttctccgacggctagatcgaagagactctctgaggaagtggtggcggcgccgtggaaagagaagagggagagagaggttgggatggtatggttttgtaaaattatttttatttatttattaaaatttaattatttttgacatctgatatgtttgttttttttatatatattgtataacagaagagggctatatggaaatggtttattatattcagaaggtctataatatagctctttagaaattgaaagtcatttacattgagcgaaatcatattgaatgtagtgtatagaaatgaaaaattaagtatatagaatttgtttttattctactttatttttcagtcttcctattgagaatgctttggatggtggttgtaaataatattgtttgctgtaataacattttattgttatcaataaattagtaatatattaacattagtaatatatttttgttcaactagtgccattgttaaatttatattttatattaatttttatttatattattatttttgttgaaatttatttatattattattgtaattagataataattcatttatagtaaattagtttaatatattttttaatctacaaaatattttgccaacagttctaaacagtcatttaaaaagatttttcccaacagttgtaaaccgtcatttaaaataatttttcccaacagttataaagtttcttttaaaattctgcatttttatgacacccacatagccaacagttttaggaaccgttgggaaatagtataaaagacagttataaaccgttgagaaaagtcaattttgtagtagtgagaaatcatcctggctgtggaagaaaggaagcccaaagttccacgagcaggagagccgaccatatccttcaacgatgaagacgctgtcaaaattagattttcgcacaatgactcgctggtcgtggaagtccagatagccaataaaatggtggccagaaccatgattgacaatggagcttcttccaacattttgttcaagactgcttacgaaaagatggg

SEQ ID NO: 388727 - DNA, 2423 bp, Cannabis indica
gaaatgaagaggccgatcccaattcgttgcagctctgtgacgcctttttcgatgcctgtaaatctcctaagaaaggggactattactctgtcatagattggaacaatcaagagaataacaactatgccacatgttccaagagcagctggaggaatggttaaagagccaatagttgagttcatcaccatgccttgttccaacattgttgtggaaatttgagcagcattaatagagaaggctattccagtagctaaaattggtaataaatggatcaaagtcttcaattcttcaacttgatttacagaacaaagtctccatggattgaaggggtttccactagtactaatctcatcagcagcagcagaaaacacagctgccttatcaagaaacctgttgtgtcaagtagtgtttgttagacttagtgggaattggaatgtcaaactcaatctatgtttggtaaattaaattttaatgaccaacaaatctgtatttctaagtgagttttactttttaagtttaatttatggtaatgctaaccttctctaacatctaagtttcatattctcaatctaaacgcccattactttactccctcgaaatctaactcacataacaatacctcattagtaatgagtgtgttcgggttgtggtaacgaaatggatggaaataatcaatttttatttcaaaacttcatttggttgcatttaaagtattgaaatgttattttaatggaatgaattttctattattttagtggaatgactataattttctactatttaaaaatgagaaggaaaaccattctaatgcaagatgaaaaaaatagtttttcttgagtgtgtgattgaaatctatcaaaaaaaatgtacccttattttagcactaaatgagaattgtaatactcacttgagtgtgttagtgtgtttaagtttattgcagcctccttccatggaagaatttctttcttgtgtttcatcaaaaagatttgtgctttctttaggcacctcaagattccattttcgacacgacgcaaccaaaacttggcacattctagtaattggacttccctttggcttttgaattctataatagggtgttccaaaaaggaaacaagcaatggcaatgcccataaaaagtgcaggaataccaaatcctagtccccaaccaacattattttgaatccatgcaagaaaagtacttgctatgaaaataccaatacatattgtaaagtaaaaccaaatgaacaaagatctcttctttgatctttcttttggatcagtgtcatcaaattgatccccaccaaatggtgacacacatggtttgataccaccagttcctaaagcaaccaaataaagtccacattcaaatatagcaaattggatagcattggctggaattgatgctgagaaagtcaaggaacataatccctgcaaaaacaagttaaaatattggtcaagtttaacataccacactcacttctctttttctatgaaaaaatgaaagcaagaatatgagaactttatactatgaagtagatggtggagaaagcaagaatggtccaatattttcccaagtaagcatctgcaacaatggctccaataagtggtgtgaggcaggtagtcccttgccaaaccgaaacagctttcgcagcagccacatttccttgatgcaattctttagtaaaataagtaacaagattactagaaataccaaagaaggacagcccttcacaacattcagcacctgtgttatgtaattacatatagtcaacaacattaatcaattcatcattatttaatacaaaataaaagtacctataatgaaccaacatgctctccaatttccactattttgcttcactgctggctttccttttgcatcaacagacccatcaccagtgtaaacctcactcacttcattctaataataacaataattaaattattaacaacaacatttttcttacttaattacttactagtaagaaaattaagagagactgagtaaaagagtgtactggaagttgaagaaggggattttgcaagagtgaggcttgatcatccaaattatccatttttactctactcttccttccttctacaactaatgactatttatgtactatacttgtctctagaattagaattctctggtggtggtttctaagccacaaactcctttctctcaccattaattattctttctgtataaggttagatcaagatataactatagtactttcttttacataaaaattgaccagtactgtagtaacctttgtttgctcatgaagtttttattatacattagctcttaagattgctcttatttattaacataaatatatgggtgcactcttagtgggtattatccatgaatgggtaaaattaaaaaattttgagtttttatgtttaatttttct

SEQ ID NO: 388728 - DNA, 840 bp, Cannabis indica
agtgttaccaaacaccaccaaaataaattgaagatctaataattaatatgacattaattattcacaatcaagggacatcgaatgaacaactattattgtgataaagtctccacatcagcatacatgcattgtcttgtgggctgggctttaccagataagcccaaatttatgtattcgtcataaattcccaattagagaaaaatggtaactatgtatgacctctattattctataaatacatactgaattgttcatgcaaagggtttgaaattcttaactgacatgctcaagaagagaatagagtgctcatactcattgtaatactttaggattttttagcctatctgataataataatactgacctgtagactaaggcttattaacgctctaaccacataaaaattctgagtgtcttcttaatttatcgatcatttaattgtctttttagcttaaatattaaataattagttttctgaaaatctcagcaaacaatacgcatgtcgaagaaattgtttaaaccctctgtattaaaaattattcttaatttctcaaaattttattttatgtcttaaataattataaaataaattattacataaaaaaagggaattttacaaaaatactgcttttggaccaaaactttacatttatactgggacacggcaaaaacaacatttatactgccccagcccaatttcattacttttgtactgcccaagcccaacatcatttcatttctactgtgaacagtaaaacacacgggaaacaaccttgttcgtgtgtggggagacgccggagacggaaatcaccaagaaaaaaccattaaatccggcgaaga

SEQ ID NO: 388729 - DNA, 704 bp, Cannabis indica
ttttaatttttcaattattttactttttcattcccacattagtttggcatgaagagaactattttcttagtaaataattttagcattttgtgcccaacatcaatgtaaatataattaatataagggattatttttacaatttttctattttttgttatttatatgttattatttgttgttgttttgatgttatttagatgttattttcatgttatttttacataattttctgttattttcataaaaaatcgtaaaatataaaaaaaaattctttaaacgtaaaaatataatttttttataaaaaaattgtgccttatataattatcccttaatataatttatcttaaataattcttatgttggagttctcctccaatttgtattaatagatcaatgtagtagcccaagcccaagaccaagtccaagcccataatattgatattcaaaattggggtatgttgaaaaataccttttttatttgtcaattaactaaatctatccctattagatatttaattaaaacatacctctttttatatgtattatactcaaaatacccttacataagggagtcacatggagagtatattgaagtgacaaggacaaaattaataaagtgtttaaaaaaagatataaaaatgatagactttaaaaaagaaggtaaaaataaaagaggacaatatgaaaagggtatagagtctaat

SEQ ID NO: 388730 - DNA, 631 bp, Cannabis indica
taattcattattgtaaaatatatttgagaatcaattgttattttttttttatttaggatttttgctctagtatttggacatatatattattatgtccttaaattaatctctgttcatcatgacaaacaaaataatgacttactaattaacacatcaatgccaagtatataatttaacattaaaaaaataaaaattagaccgttttaaaaaattattaaactattaggtaaaactaaattaaaaaaaatatatatttttaaattaattacatagattggcggttaaaagacaatgacgtgataagtgactaagtattatgtcattattttattattttattattttatttatcacttgtgataaaatttaagataatgaccaatatataacactattaaactattaatatagttcataaactatttttagcagaataaaaaattttagggtacaatatataatatataaattattattcggaaacaaaaatcttaaatagccgttaataaaatgcaaaaaactcgatctatgccagaggtttacttattttaaaagcaacagaggtgtttaattttaaatgtaaaggattaaggagttcatcaaattaacataaaaaagaattactatatac

SEQ ID NO: 388731 - DNA, 549 bp, Cannabis indica
accaatacagttgaaagttccaaatagattaagtaaaagtaaaagagaaaaaataagtaaaggtccgagtaataaataaactataatattcgtggaaggcatgaaggtatactcaaatttgaaatcatggaaaagaaataatgtactcaataaagggttatccaaaaatcaaggtaaaacatatatttaagtcaccaaattcttcgtccagcacattgacacatttacaaagaaaactctaggagggaagtaggaattaaaacactttctccatgtaggcctaatacaaatgccacaataaggaatatgaatcaaaagacaatgttgcaatgctaactgatagggaacatttcaagatttctaaccatactcaaatataacatgtcagaacgcatctggtgaaagaatcattagtcattaccacaaaccatagaaaggaagcattgttccttcttaacacaaaatttaaagtgtgcactattataatgagaacatgcatacataactttttttcaggtttaatcaaggtccatgtacacatctcaagta

SEQ ID NO: 388732 - DNA, 1370 bp, Cannabis indica
tttttttacagtatcacatacacatattatcgagatataatagtcaagaaccaaaaaagaagaaaaaaaaaagcataaatcttgctcacaatatattagtaacaaatatatatatcactaaaatatatgactgactctctgaccattaaaagagatcggttgagagtgagatataattatttttagttttatatataatttatagaggtatatttaggtttacatattttattttatttttcaaaattttatattacaaaaattataagatacggcgtgattagctagggttaaatattaatattttttcttaatagttaattcattaatatttataaatcttactaaaatttaaaaaatgggagaaataaaaagagaataattaaaagtatttggagtaattattacaaaaataaaatagatcaaatatttaaattcaatctatattaatgtataaattattcagatatttttaattaatatttattatgaatttaaattatatatgtttttttttaatgaatatttattatggattttaattatatatatttttaattaaaaatcatgatttgtggtaaagttgttattgtcggatctcacttgtaaattgtcactatattcaaagtcattatcatcgttatatcttacttgtaatcactactacactcaaagtcattatcattaccgtagctaatttttaattgtatttgtcactacattcaaagttattgtcaccactacatttcacttgtaatcaccataaaattcaatacttgtattattgtattaaaacttgaccaaacattacaaaaatcaataaaaaaaaatcaatataattgttcaaatcaattttttaattacataacaatgttaaaataaattagatttttgatttcgaactatgattattgtactttcatcctgtcccaaataaaataattatattaaactcattataattgtttatttagtcatacacatatgattcataatacacaaatatacaatatactaagagaaactattttttaggtgaaaaaactggtttgatgatgttctctatagcattctaaatctcttttatatatgaaagcataatttcttttagttaaaaataatggaattgaaatataataaaattgagattattaaaaagagaaaccataaatataaataaaataaatttgtacctgtaggtagatttttttttttttaattaggttgatttttattttgtttaattatttaaataatgatattcaaattatacgattagagagttataattagactagcaaaaagttacgtgcgaggcacgtatactaaattttatgctagtcttttttatgttatttgaaagtaataca

SEQ ID NO: 388733 - DNA, 3319 bp, Cannabis indica
ttttacaacttaccccaatttttagtcactacaaaagaccaccttaatttgttacctgtcattaattataatcttagatattggctatattgatgtacctattttagaggtttccattgtagaaatacttttacatatatttttatatatatatttttatagtattttataaagacataaaaaaaacaacaaaaaatatacgaaatcaataacaaaacaatattaaaacaacataaaaaaataatatatagataacaaaaaattaacaaaataataagagtacaacttaaaaatacattaaaataccgtattttttgtaaataaaattttaaaaatcgtaaaaatatttaaaatttcatacaactctaattttgtattttttttagattatccttaataatattaggggttttttcaggtatatataaaaaaagcaaaaatactaccaaatatattgaactactcctataaatatttatatagtccaacaactaatattataataatacctcttcttctaagccttcagccacacaaagcaaaatccttaacaatagaaagctttgatcgatcaaccaagcaagccaatcaaacaaaacccaaccaggcagagaacaactattaattttggcgacttcacctaagaagaagaccggaatcgatccaaacatatgctgtttcgtattgatgaaaaaaagtgcagaaaaattagtttgaaactaaaattcaaccctaaattctggtttaattcgtagaaactaatcctcctaatattaatttttcgattcataaaatgtagatctctaacaaatagatctggagctctcaatcaatctaaatcaggtataatccaaaaaataaaaggaaaaacaaatgcatcaatactatagctaaaagtttatctcgttgcattttcgttattttttttttacagatttttaatggtgaatttgttcatattaaatcacgaatagatagtgaattcacatgtagatagagacatatgtggaaatactgttctggttttttatgttttagaaaagttccataaccgttttactaatgctctgaaacttgacatatcaattattacaaactgataacgatacaatagattttatcatatttgtaggtgtttcatatcgtcaatacaatacaaagctctttaaagaaacttttataacatggttagttttattaatatactaaattagttgatataaagttagtctacagaggtctaacgattgtttctccacatattactattaatgtacaattagttatcgatcagtgaaaaaataccatggacaaataatttcttatagatacacattcacatttatcatttctagttgtaaataaattgcaaatttagttgaataatagttgtgctactataattttatagtattacataaacaaggctcgaaattggcaatacgtaacttgaatagataaaacacgactgtggtaagtttcatttgtattacatatggggtattattagttattttgaggtttcatgttagttggctcgcaacaaatataactgttacattacagttgtcttgaagttgacttataatactcaaacttttatactctcaggaaaaagacgcaattcaatttttcatattttacaacggacaacttgatgaaggaataaattatgtaaattaagaagctagtggacaattcatctcaattgattgcaaatatgaagaactaatacacaagcagaaacaagtggtagaatgcaactaagaaaacactcaaaatgtaactcaagtactaagtgaaagagggataccaaccgttgaggataaaggacgatccaagcatacttttctacatacaactaaaattaaaagaacatgacttcacaagttatccattatgtgtgatccaaaagatcaaggaaaagaagatttctaggtgcatgggaaaaaaaaaaaaaaaatagaataggtgtagcaaatatggccaaaaaggtcacaagcggaatacataccataacaaagaactagatattgagcgaacattaatttgaattatttaatttttttgtgaacttttacaggcaaaaatgttactttaatacattgatattacatttgtacattatttatttttaaaaagttgcataatagttatgttgtagttgaatgtcagatctaacatattatcaaaaatgtaaagcattagcaacaccatatttaaaacattaattagatgttcaaaaaaaatttcttattacgttgacaagcatgttggtattcaacaattgccaaatcgttgaatgatagttgtatagcaggtgttacacataacacattgattcaaaagatttaagggatttctccaactactttcctagatatcataattagacatgttgaataaaatttgtcccacagttgaatcaaatattttatatatttcataaacgagaagctcgtgcaaaaacatacgctttgtaacccaaaataatacattgtctaaaaaaaagataattatctaatatccaattcttaaacaaaaagaaaaaatagcaatagaaccataacatcaataaccaagtcttaacatcaagcattaaattaataaacaattaaaataaataataacattcaataggctatagaaactagtccctaatcaccagactcttgttctttccttgacattcttcatggacttctaaggtttcttttactcactatcaatattttcttcattttttcttttaccatatgcgaataaaagtatagaaatcctcgtgtggtaagctttgacatcaaaatctattggaacatctttttcatgtataaagaactcaataaatgcagcaacaaaagtaccacaatcactgtgtaataaaatagtaatcaaaatagttaaaaacaactatactgaaacacataaaaactaaaatgcaacgacgtaaataaaattcacttattttcttgactaagtagggaagcaatctccactactcttagtgaagctttcacatcagaaccaaaatctgtaactgttacgaaaattatgaacactacgcaagtatacgcaatcaagtagtaaactcacacaggtgaggtcgaaccacaggggattggattaactaccactaaattatacttatgattctatccggcaaatcaataatttttatgaattcaataaaataattcagaaacttaaaataacaaaagaatattaatcaagatgagaaaatagggagaagaatcctgttgttagtttaccaaatcgttaatgcctaattgctatcattttctttaagtgaatgacagat

SEQ ID NO: 388734 - DNA, 890 bp, Cannabis indica
agtacaatgcttacattacaagtacatacatacacaacatatagaacaaaatataatgtgtataaatagacacaataaatactagtgggtctctttctgataatattatttatttgtatccatatagtagtagttgcaatgttgctcttctttgaaataaattaataaatagttgtgacttaatactcccaattaattatatctaatcgtacttctatttcaaggattttaattaaatacaatcacgttgatttgatttgtttaagtctttaattacaataattctttagatttcttgatttttgcatttacaatctcatagaaatgtatttactattcatttttaattttaaaattaaaataaatatcacaccctcataatacaaatacatataattggctagttgcgttgtttgggggttaatatttatatttttgcacgtgattttttttttttttaaagatgatgaactgatcaatcgtaaaatagtaaaacttattatagcctagctaacaattttgtcaacaaaaattattagtaaattgctctctattctttatttgattcaagcatggaaatctctggagtatattttacatttaattaaattagttggaacttggaatacagtaccctacccccccaaaaaaatagtattacaaattatttatttatttatttatttattattattattattgaagtataggtgtttgttcattgttcgtacatgtatataataacttgaattatatgcacttcattttatgttaaagacaaattttcgtctaacttgttggatttttaatttttaatcatataaataaaatcagaatataatcacacaacaaaaaaaaaaaaaaaagaatctagttggtagtgggtacta

SEQ ID NO: 388735 - DNA, 996 bp, Cannabis indica
agttctaaccacaactagtgctatgcaatcagtgtgtttcaacttagtcgtacaactcacaagtgaacaatataatatgacttctatttataaagattttgctctcaactgaatctgaatgaccaaaaacctcttggatgttaccaatattaagttagacgtttatggacataaattggcaatttggaattttataagacttattagaatcaagcacaatgttcacaaaatattcaaaaatgcttgctaaaaatttagcaggtggcatatgtcgcctctccctatgcgatattttgcttggagtagaaaaacacttaaaattggtaaatagtaactgattactctattctattgtttagtattttacaaaataactccaaatggtttaaaacttctcatactactttatatcatttatgtaccctctaaatatccaacaactatatttttatagctacaatttaatcacattcaaatataattataaatcaatttactaatttaagaatgatgataatatagatgatgagttataaattttataatcattaaagaacttataattcattctagatcatcattcacacataatgttgtaagtttgtgcgtgtcgtgttggcccgatttatatattgtttttaaaaaatagtttcgtatcgtgccacaaaaaaatatgagttgattgtgccaacatttttaaagagtaagcccgatattttcatgttatgctcagattcatatcgtattttcttctgtcggcctataattcttaaatgtgctaacccgttttcatattcgggattaaattcgtactttacttttccatattattttttacaattactaatatatatatagaataattctatggtagtgaccttagttttgtctctatactatacatacatttttttaacccttgatctatttgacatttgagagtcaacattgtttaacatgtacttgtatgtttgtatgtagcatattcaatttttt

SEQ ID NO: 388736 - DNA, 1210 bp, Cannabis indica
gtatagtattcaggactgactcgtgaggtgagatgaaggacgcggttaggaccccacaatgctcaaactcccaattttgaaaaaaaaaaaatatagttaataataaaatgaaaaattatactcataatattaaatatatgttgcaactcggtgataatttgattagagtaatatataagagattcagtgttcaaattctaataacctcatttttttcatttggtcctaattttatttttgcctaaaagggtcgactgtgatagtattatattgaaatatatttttatgcaatatattttatgttgaactatatgtggcatttgttagatttttttaagataaaatgttattatattaaaattaagatcataatacaatagtcatcagaggaggtgggaattcctccaaccaaatgcattctttgtccactgaaagagcatattttgctaaagcatgagcaaaggcatttgttagatattgttatgtaaataatatgcatatgaatgattatataaaaatgcggaattaaattaaatatatacacgatataattaaagggtcgaaatacattcagctattgattctaaaatagttaattatacattcaactattgattctaaaaaataaaagagaaatcagtttctaaaacactaaaacataaattaaaaacaaaactagttctacaataaaaaacctcataacacataatacctcataaaattgattataattttttttttttaaaaaaatagagatcaatttcaaaaaataatgaggcataaatatgaaaagaatcaattccataacaaaataaataaacacaaacaataacacacaatactcaaatataatataaaaaaatcgtttatatttatcaactagataaaaatttaagacaaaaaactagttccgtaaagcaactcagataaaaactcacacacaaaatcagttaaataaaatagcttaaacaaaaacatccattcaacatgctctaacctaccaaataattacacccataccatatctacctcaaaaatactcattgattatgtctatataaccggttctattttagttataaccggtttgagttattttgtgttatttatttttattaattataacattgttacaaaactggttcattataacactgttataaaaccggttatattttaattataattagtttaagttattttgtgttat

SEQ ID NO: 388737 - DNA, 1187 bp, Cannabis indica
tatttatcacacacttatattttgggaagtttaggtataacaaacaactaatgtaaaaaattgtgttaaaatatgtgtttatagagtctatccctagcttatcggctatttttaagttctttgatcatatttcattttaatattgaagatgcttattttatttttttaaaaaaaaccctgcctcaaatttatataactcatattagggttacccctaataatgcaatgctatttaatagaatcccacgtatatatttaaaattaaaataggcaccatacacttctatatttttatatttaatataaatatacagaagccgcctatcttcaaaaaaaatatatatgtataaatatattttatagaagccgcctcgtcttgtacatgtgccataaataaacctgtattcttcacacataggaatacaataaatttcatgaaaaaaaaattccaaaaaaataatgaatacaataaatctcacggcgacaagaactgataagcaacaacacccatgtgatcatgtataaaagtccaaaatgactacttaaaaaaattattattattatttatttattaattaggaaaggatataactatggagatctatcatcctacttacatcatttgacatgtataaataagtaccagcattactcctccaacatcatcaaatcaatcaccaaaaaacacaacctaagtagttactaaaaatagtagtgatgaagttttgggcattgacaattgtgtccctgttgttctccatacaaggagggtcagcagagcaatgtggatggcaagccgggggtgctctgtgcccaggagggatgtgttgcagccaatttggatggtgcggcagtggcccaaactactgtaacgaccgctgccaaagccaatgcggcggaggcggcggtggtggaggaggcggtggcggtggcggtggcggtagtggcattggtggaatcatttcaagagaaacctttgataatctacttaagcatcgtaacgatggtgcatgtttagccagagggttttacacctacgacgctttcattgcagcctctaactccttccctggcttcggcaccacaggtgatgatgcaacccgtaaaagagagattgctgctttcttaggccaaacatcccatgaaactacaggtatgtttaattatgtcgttcttttttttttttt

SEQ ID NO: 388738 - DNA, 2099 bp, Cannabis indica
atctgcactcaatgaatgaacaaatggtgcaaattcctagctgatgcaatttgcattcttcgctttggtttattcaatctatagcattctcttaaaaagcccaaacagctcaatcttgggttttaattgtttagatcttctccttagaaaatccataagaacatttactagctccattatattttcttgtcttgaaagaattttgatcgacttgtctttactgcactcctaattattcattttgtttttgtcaattctatctaaacctacctgttaaatacacagagatggacagctaagcaagcactggatgcagagtatttctggaccgaccctttaccctgtgaccccaagaggtgcgttcctacctatatatgtcttcatataaatttcacaaaccagactgacattctcggcttacagtctctgcatttatgtattggctttcatatttgtgacattgttgtttgattttgctttataaagtaatatgctttaatgtgctttcttaccctcctgtacctcttctttacttgatcaaatgtttgaaccacacttctattttttttcttccttttgtttaatctcatagtcttccaaagtatgaatcgtcgcatgagttccagacaaagaagaaaaggcagcagcaacgacaaaatgaagagcaagcaaagaggcaaaaaatacagcatcctcagcagcatgcccgcttgcctcctatccaaaatgttggtcaagctccatcacattggcacggttctaatcaccccattaacaatgcacagggcacagtatcttctggacctagtcatcaccactacggaaagcctcgtggtccacctactggtcctaacagatacccttcaagtggaaaccagagtggaggttacccaaatcgtgggaaccaagttggtggctatagtggcggtccttacccagctcatggacgtggccctggaagccaagttggtggctatagtagtggtcaatacccagcacaaggacgtggccctccatatgttggaagtggcatgcctgtacctggcccaagaggagctcccggtggttataccggtcctcctcaggggcgaaactactaagggtccagttagtgtaggggttttctgctgattatatttatgtgtgtgcaaagatagcacttaaccacttatgttacaatagtattacgcacttgacatttggtttgatggctatcgttataattgttccaattatttccttagctttgtataggtgttaatgcaattcacttctctacatttttctcttggtagttgctttttacttccttacaaatttgtctccatgaatttataaattgttctacaggtgcaaccggcaatgttgcattttggaagatgaaataaaagtgacttgtaataaataaacatgtacacaacacgttgaagaattatttaagaaatattctagataatgttaaaaaatatttatacaagagcattgtattcactatagtcaaatatgcaagatctaagcatttatttagagcattaatagttaagaaaacataactcccatattatttatccaatcacattcacattgagccattgcaaaaatgtctaagtctaaacacactaacaatatgctagagagtgtaaagagataattgtggcgcaacccacttaatgtctaaccatgcaattaacatacactaatatatatgtgtatatattaaataaccctaaaagggttatgtagcttattggattaataaagattaattgatagtaaattataatttaatggaccaattatagttatatgggtacttttatgtgcctttaaaataattaataattattaaccattccattatggttgttgagaaatattgtgcacctaattaatgattgtgattatggtattatattagtccacaaatgaataattttaccattttcccacttggacaatataatcaatcaccataatattgtctatcacacataaggcaaccaaataaattgtacataatatcatatcaagagaatacatatattatgtatgaaaatttatattaatatttgtattaaattaataattaaattagtgtt

SEQ ID NO: 388739 - DNA, 1511 bp, Cannabis indica
aaatattttcaacaatgtctcaatctttattgtagtgtggctagaaggagtatggagaatacagaaaaaatcaagatttcggagattgtgagaattaaaaaagactgaagagaagactctagccaaaattaaacaatgtctaccttattgagaaggtcatcaatgatatacgacggtggaaacatggaagactacacatcaaattagtgggttgaacaataggattattcataaatatacaaaaatggcataatttttgcaattttacagagctactgttttttcttcttttttgtatatttttacgatgatttttttttaaaaatattgtcttatttttctgttgtttcaaaacaatattttgactttactgctatgaaaaagtaacgtgaaagtaatattatttttttttataaaaaagtgaaaaagtccttttaagtgtactatctaaattttccttgaataatttgctttcttctaggtcatacccaaggataaattccactctatctcaaatggcgaaatgtgcaaatcaaaattcaaaaataaaataataaaatcaagggtggccttggcttcatgcgcactcaaaacccctgaaccaaggttttatctaaagaaaagcttggcacgtagttgcattgaatgtggtctggcaatcaatggtaaaagccaagttttaaatagaactggaaaacagtagttcaactgttcaggtttgacccttgtgtgcccaaaggccttatcaacccaacccatactaaaagaggtggaagatggggtcaattgggcaagcttcttcattaccaatagcccgtatgtgaacaaatggtttgatcgaaggaatactcaaaaactcttaacatacctattcccttaacgccaagaaatgacacttggttgtgagctctggaactaagcaccaactttattaaattaagttgcagagtaattgaggaaaactctcaataaagaattaaaaacttgatcaacatcgctggctttagtttcccgaacttcctccaaacagacctttaggagcctcatttgacgacttgctaccattatggatatcatatgggagggggtgggggggaaatgcagcaatgcatgagaggaaaaggatgcctacaaaacttttggtgggaagcattagtaagaatttttcaaaacccagatatcaacatttctaagtcgagtgaaaaactagaacactgaacttctgtttatggaaatggaagcacttttctgtctccaaactaaatcatcatttagagaagccatgatcgtagtgcatgaatctttcagacctcaaagaacaaacatgagttcatttagtacggcgtattacactatattatattgtatggtattacattaaatagtattttctgtaaaactatatgcattattaacttttatgaacatttaaacacataatatttaatatttaagtataaattaaaattaacataatatcatataaaaatataatatataattcaattcaa

SEQ ID NO: 388740 - DNA, 839 bp, Cannabis indica
tttttttttttttaattcgcatatgttgtagctatttgtatggaagatgatccattcttggataccaaccaattcggctcttgctcatcagaaaattcaagttgagccttattgtactcagtgttctagtggtgcctatgaaaatgtttttcatgcattatggggttgtagagtgaactgtgatgtgtggaaacttactgggttctctggcaaaattaagagacaaggtaaggaggatgttcttgcttttttgatgagaatgtcaggtagtttggcgaaggaggattttgagttttttctagttctgtcctggaatctttggtacatcagaaattcggttaaccatgggggacacaaacccacggctactgctatggttgaatggtgcagcaagtttcttgctgaatttcgagatggtaatgcttcgcagaaggctggagcagagagggctgctgctcgttgggctgcaccagttcggggatcgtttaaaatcaatgttgatgcgggggtgaaagtgggagaaggattagcaagtgctagttcggttgtgcgtgaccataatgggcgtgtaagtggggcggctgtccggatagtgaggaaagaaccatctcccctgcatgctgagcttactgcgatagcagatgggctcaaggttgggttgcagcagaagcttccctcttttactgtggaaaccgattgtttgcaggccgttaatttggtgttgaaagatgaagggggctgtagagatgttgatggacttattgttcatattagagatcttttgcaagatgcaagggttcatgggatctcttttgttatagggaagcaaatcaagttgc

SEQ ID NO: 388741 - DNA, 782 bp, Cannabis indica
atcatcatcagttattcaataaagaatctcagccattgaagactattttctgagcttagatacagtaacaatgatacaacatctttgctgttagattctagtaaaacctggtgtgtttctgttgcattttatttcaaatcaatctatttattatttctgtttatgttctttttattaagtaaatgaagataattttattccaacaaccactgaacaatccacactgcaaagtagcaaccaaacaacttaatacttgtttatcaactctattacatcaatctctcttttactaagtctagataaactaataagatgagatctagctttgacaatcatcttcacttgatgactaagaacaagagttgaaccacaaaaggcttcaaatacgcacctattctggttgcaccacagaaagtagaccacgacaacaactaaaattgttgaaagttcatcaaccaaccctttcaaagggtgcacgcacctacccaaccagtcagccaaatgattcagccagtataaccacccaaaccaactcatgacttcttttatcaccttcatggtaaggatacaattgaagaaaagatgttcatagggttccacatcaatctcagaaacagggcaaaaaggagaatcattagaaataaatctctcaataagatctctggtcaataagtggtcatgtaaagaccgcttagtttgatttggaaattagcagttaattatgtttgactatgaaaattatttatagatatttaaataattatttatgctgttattattga

SEQ ID NO: 388742 - DNA, 4019 bp, Cannabis indica
aatgggaggcacttatcaattgacatcgagatgaatctattgagtgtttccattctacttgttaaagcctgaacttcctttggctttgttggtgaaggaatctcgattaatgcttttatttttttctagattagcctcaattccccttgcattcacaatgaagcctataaaatttcctgaggaaaccccaaaagaacattttttaggatttagtttcatataatactttctaagtatggcaaaacattctacgagatctttcatatggtcctcgcttttcactgatttcactaacatgtcatcaacgtaaacctccatgtttcgcccaatctggtttttaaacatagcatttacgagacattggtatgttgctccagcatttttcaatccaaatggcatgactttgtaataatacaaccccatatttgtcacaaagcttgtatgttcttggtctgggatgtgcattttaatttggtatatcctaaatatgcatccatgaaagtcattaatttatgccccgctattgcatctacaaattggtcaattcttggtagtggaaagaaatctttaggacatgccttatttgaatctaagaaatttatgcatgttctccatgtgccatttggttttggtacgacaactggattagaaatccacgagggataaaagggttaaaatcacctcttccaactcttcaaaaaagtgattaattgttattttagttgttccactaaacttttcccaatataaacacactaaatgagattgttcgggttaaaatcacctcttccaactcttcaattggcttgagttggttattatcatcatggatcctaggatccaaatcttcagtttccttctcggttttttcagtcagaattaccatcagctgatgactggctcttttatttttaagctccaccctgtaacattctcaagctaatagtttgtcaccttaattttccctactcgagaatgtggaggaaattttaaggacaagtgttttatcgagcttattgcccccaatctacctaaagttgggtgacccatcaacacaatataacaacagaggggatatttacaactaagaactcttgcatttgagtcctagacaatggtgattcccccatagttaagggaagctcaattatgcctaggctcacgacactgtcgcatgtgaagccacaaaaatttacgatacaaggtcttagttttgcctcttctaatcccatcctcttcaatgtttcctaataaaggatgttgacagagcttccattatccacgagaaccctctttattctttattggcgagttgaattgtcatcacgagaggatctacatatggatatcgtacatgcttcgaatcttcttcataaaagatgatgggtggtgcatttgactctgctctgttcaaaagttctagaacgaatgctgacaattcattctttacttcattaatgtgtctcttttgtgcactattaatatttcctgcaagatgtggccctccagaaataactaagacatcctcgccctctacagggggaggttgtaatctcgagttattcagtttattgggctgattaggctcatttccttatgtcctcacgtattgcctaaaataccctcccgagattaatttttcaatttcatcttttaactaacagtattcctcagtagcatgctcaatatctttatggaaactataatacttagttgaatctcgcttattcctcgcatgcctcatcggttctggtctgcaaaatatgacccgattttcattggcaaggtagatggtctcgcgagtcttattcaattcagtatacactgaataaatgggtacatacttctcatgcttcttttgtttcttcttatccttggattagtctcttgactcatgtttcctcttggtatttgatccatttggattttctaccttagtagtcacggtgctcgctattactgtgctagtgctgggtttatctcccaagccttattttaacagcttcatttcattccgtgcttcttcattttgcacaaaattttgtggttttcattaaattcattgatattccttataggatgcccttgcaaatcatcctataattctccccctgcattggataaatcagttgtaattccaggctgaagagctgttaattgaatgctatcattcaaatttttgactttagtcgtagctgtactgatgtgactcaagtacgctttaagggactctcttgattgttgcttgatgttcgtcaatgagaatgcctctgttcgatgatctcttgcagcctgaaactactttttaaaatccttcgacaattgctaccgggaagttatgaaatggttggtgaatttttcaaaccaactacttgagcctcctgttaaggaagttggaaacaatatgcaacgcaagttgtctggaacatttctttcttgcattatggtgttaaaattctttaagttggcgacatgatcagtggttccgtgatattgcgagacatgcaaatttttaaatccttgagaaaattgtgagtttaggatgtcaggatggaatgatttagtttcttcatctgaatcatatcctggcagtttccatactctccatcttgatatttcctaaatttgtcctcaagatccaaaggttgttaattaacgttttgattaagttagttacgcaaatcaagtgcatttttaaatgattgcataaagtattgtggattaataataaaacttgctaatttatcaaaaaaatcaagtgcattttgattcaagtgttcacaaaggtctggttgcctttgatttaatcgctcgcagaaattgggttcacaatacatgtgctcataattactcatgaatctagtccctgagtaactttcagactggtaactacgtgagttactcatactttcttggtcagtaaaataacatcgagatctattcccatctcgcgtttgcctatttattccagtcaaccttctatgcctataggcttgtgactctcttgtactcgaacttgcttcacgtgtctcatctcacgttgatcttcttctccgaaagagatttgacacacgtcccctacttaagtaagtgtgtgtattctctgtgttcgtgcgagaaggcctttgtggataccttgggggttcactagtcccaggttcatttccaatattttttccatcattacaagggatttcctagtttcctggttgcaattgtcttgcctttgcattcatgcgagatgactcaggtacatcagtttgttcattcccctagttcacaaacccatgggaagttcctggagcgtcacgtcgatgctccaaatttcttgtattacttctgttgggtagattttctctatccattgggacatccctagcattcccaggtttttcttcttgagcacttgtgggattccctttgttattttcatgcctcctggccttggaacctcgaggtcttcctcgtggtctccttatagatggatcaagttaagtttgaggaatggttccctgtgtatccctggcaactgcggcttcttgctccaactcagcattttgtttgttttattcagtcaggcattgtcgaagtttcctgttttctaattcaactagtgggacatatctagtaggatcataagcattttcacttcatctctctgggatttgttcaccggcaggtttaaaatttccatcgttcctcgtagaatgtggttttttagtcgtgttttttctctgtgatgttgggttttgtgccttaaataaaactcatttatatataaagatttactaattaataaaagatcagaaattattttatgttgcatgatttacatgctttatttcatgattatatgtttaatgtataaattatattcaatccagaacatatagtaattcgtgattatagtgttatcaacacaacgaaatataatcatgattaaatgtttcaaaagtttatgtgtaacaccctaactaccttaggcgtattacgtgattttttaaacgtactgtgcagct

SEQ ID NO: 388743 - DNA, 1109 bp, Cannabis indica
aaataaagttcttggagtactactagtatatttctttcattctgcaacttctatcttcactggcttttcttttggcttgaatttgcaagattgtgtttgacaagtatagttagtggcttccaaattaaggtagcgtttggttggaggtaataaaatagaatagaaaagaaaagaaaataatcttcattccattcttttgtttggttacatattaaagtattggaatgaagattgagaaaaatgtaaatttgcattgatgaacggtgtgaatttcttcggggtggtttgttctatatctcgtataaatattgtgcaaagatctgagatgttcaaccagagattggacttttttgtttgtttaatttgcccttctttcattttctatcaataacagaataagtttacttttctaacattttgtattccatattgatcatcctctaactatgacagaagaaaatgaacattgttttcctttaataatgaagatatttacatccaattttattttaaaaattgcaagtaattattcatgttaaacaaatgaatttgaagtttctcactatacttttcctgttgattctcaattactgaataaactaactttgttgatgaagttcttgtatgacatctatatgttttgatcattggaggaaagctcctgataagatttctttcggcaataaaagtgatggatctgagcttaaaatcagttgagaacgcaataaagatcaatgttgatgcaactatttttgagttaaaatctatgtatagtttcggttcggtagcaagagatagtatcgacactcttattggagttagaacaaaggcacgaggaggctgctattttgctgtaataatagaagtcgtgggaattaaggaggctcttaattgggtcaagcgcaaacaatggcaacacgttgagattgaaactgatagcatgttttctgtttaggttcgaatctaaaaactttaagctacaagctattaattgattgtaaaaataccattacgcgacactaaaaaaaacattgtttgtaaaaataccattacactttaatgacgcgtttactaaactgtaattagaatcagaataatcaatgggagaa

SEQ ID NO: 388744 - DNA, 1028 bp, Cannabis indica
actaaggccatctataattatttgatattggataggtaacaaattcaaatacaacttaattaattagtactcttaaattatgtatattatatatatatatatagaagaagtgagaagagcagagaagagaagagattgcataataattatataatagttatagtggcagacattaacattatattattggttttgctttttgttagtggaagtggaaagaggagagtgatagcgatatgattactgatgaagttgaatcaacttaaagaaagttcctttctggtaaatttcttggctatggtgtggctgctccaatttggattagagccacaataaaaaaaaaattatttatattaaacaacactgctcttacgatgtgacaagacgtccaataaaaatcctccattatggtcttaggatggattatattgtattaatatatatccattgataagatcgggaataaggtgttgtttccaagcactagtggagacgactcacacaccctttgagtcaagtcaaccattcaaattcaagtctttttctatattagccatagccaccaccttcacactttacactctccgaaaattatcgtgctcttatagaaatatcaaactaataaaattacaattcaatgacaaataagaacaaaatcacaaattaaataatgttacaacactaaataatatatacacataaaatagaaaatatagatgaaaaagaaggattacaacttaaccaataaactacacatgaaacacaatatataaatagcataaatattaaagaaatatgagagcaatcaataccacatactaggggtgttcattggatcacatccaatggatttggacccatccaatccaatccaattatttattggatattagattttttcatccgatccaatccaattgaattgagtcatccgatccgatccgatccaatggatgtattggattggatcggttccatccattggatgctttaactagttttttattagattggattggatccatcca

SEQ ID NO: 388745 - DNA, 629 bp, Cannabis indica
tttttagggtagtttaattgtttagtaagttaaatattttgggtaattaatatagtaaattttattcataatacatatataacaaataagctatatgttgtaaaaggtctgtttaactgtatatcatttgttattgtttatcgagatttttaaaaaataaattatttaatattaaaactaaagaaaatataattaaaataatcaaatatggatataacactcagagattttacgtaattgaagtgttaatgagcctcacgagtcagtattaatatcaaataggctagaaaaaagcctaagggattacaatgaatatgaagactctattctcttctcaaacttgtgagctaagaaagtccaaccctttgcaagaaggattcaatgtgtatttatagagtatagaggtcatacttataggggatgagagaggtggcggtgagtggctcagccaaggggaaagctaaggcggtggctttgcttacaataattaatgttggaaataagattaggaattgcaatgggaatgagaatgagaatagaagtagaatcctttacgggtttagtgattctcgatttgattctttaggtgccgtttggtaacacttttgttttttaattttttaatcaca

SEQ ID NO: 388746 - DNA, 1204 bp, Cannabis indica
caaaagcctatctatccacaagacacccacttgctgaatccttatttcctactgaaccaaggacagttcagcaagcccttaaggacccaaaatggtttaactcaatgcaaaaagagaatactgccttagttaaagccaaaacctggacattggtcccatatcagcctcacatgcatgttattgacaacaaatgggtgtatcggatcaaacttaatgcagatggttctcccaacacttataaatcaagattagtggccaaatgttatctacaaacacctggtattgactatgaagagacctttagccccgtggtgaaaccggttactgttaggactgttctcaccttagcagtcacttcatcatggcctgttaagcaattggagttagtaatgcctttttaaatggtgatttgcaagaaacggtctacatgaggcaacctagaggctttgaggatccaacaaaaccaactcatgtctgtcatttacataaagctctctacggattgaagcaagcaccaagagcttggaatgagaaactaaggcaaacacttttaaagtggggttttcgagcttcaagatccaacacttcactttttgtatatgcctccggatctgatctcataattcttctagtatatgttgatgacatactagttactggaccaaactcacagttaatttcaaaactcatcactgatctgaatgcctcctttgctttaaaagatcttggtcctatccactactttcttggtatagagatctatagagatgctgctggtatgtatctctctcaaagaaaatatgtcactgatcttcttgttcggcttcagcttgatggtgctaaaagctgcccgaatcccaccagctctactcagaaattatccctatccgatggtgaaccttttcaagatattactctctatagaagcacacttggtgctctacaatatctcaccttgacacggcctgatgttgcctttataataaataaacttagtcagtttattcatgcgccaactgttactcattgggaggcctgcaaacgtctacttcgttatctcaaaggcacaatttctcatggattacttctcagaccagcagccacaatggatatttctgcttactccgatgctgattgggccagttgtatagatgatcgaaggtccacggggggctatgtgatttttcttggaggtaatttggtt

SEQ ID NO: 388747 - DNA, 2067 bp, Cannabis indica
cagcccttgtccgagtgaattcgaacatgaacgaagatctgctgagcctggtgagattcgcgatgcatcttttcttttactcgattcaagtatgaacaattcgcgaaaattaaggttttcaggtgaaaacaattgaagaagaaatcaaggataatattgaagaggaagttttatttgcaaacaaaaatgtacaagtacccctatttatattttttgttggaagatttttatttccatataattttaataatttgattttatataaaaatatatatttaattatattagtttttttgtttaatttatattcttaaaatatatatctatcaaaacaaaaataaattatattcataataacaaaattaagatacaaaattatgtgaaattttataaaaaaaatttataaaaatattgaagaatgaaattaaaaaattaaaagaaatatattaagagtaatttttaaaaattatcttaaacttattttttaaatattggaatgtacttatattttataaggtgcaaataaaattttcttttttatttttcaaaatactaaatataaataagatatttttcaaattataagtacccctatttaatttagaagtgggttttgagggattgggtttatacgggatggttgatcatgtgggaaactcaaattttaaaacttctagacgataaactcctaaacaagagtgggaattgctgcagggaagaaagcagtcccaatccctggagagaattttatcaaacccgaaagtaatgagttggaggttctgaaacaacctacatattgcctgaactgtagcatagacctaaatacaatttaaccctaaaaactaccaaaacaaaatgagatgacaatgatacaaacaaactaagtaacaatttaatgcaatgtagcaagcatgtgaaggaaaaaagtaacttactgtttggagttagggcttgggaaaatgattggctactccgtccgcaaatcttcgaacgtagcaatgatcgctgtgaaaagatgaagttggagaaaactcatagaaaaaatgtcaagggcagagatgacatgcaagtcttcggacagccttaatggtcattcttggcgaagaagcttaagagtttctcaaactttctaaaatggaagaaataatgcaaagatggttctttttttttcttactttatactcatgatattggattcgtcagattagagaaaggttttatcctacgaacataattcaaagtagaagtagaaaagattgtcatttaatgctgatgtacctcgaaaccgcacaaccgccaaaatcaaaggagatgtgtctcttcaacaagaggatcatgacaaaaataccctttgtaatcattaaaaagctctttttattaaaaaagaactttttaaggggcgattgtcatactcaaaactcggcgagcacatcagaagaaaacacgtgtcgagctaggaataatgaagaactcaagcaatcgtaattacacttgacgtggaataactagttaaaagcataattaacagaatatatttataacttggatgattgaacagtcttatgcgagataaaaatgtactaactgttgacttgtgtctcgatgagaaaatgcaagtgtgcatgacgaggcattaacctcgtcacgtggagaagatataataacaatagaaatacttagtgtatattacacggtatacaaactaagtataaatagagggtgaatcaaggtgatagatagcgaggggtccatctcgctgtaagatggcatgcacgcaagaaagatcatctcgacactagaaactgtagttgtcagaattaaagtaaaagtaatatcaaccttggaaagacatatgacgagctctagctcgccatcaaagttaactcagctccattctcagcgaggcatcccaaggagataaggcttaccatatatcttcaatacgcgttcattttggcctaataaaagcgggaaaatcatagctatatgattttcaaataataatcgcatttacttagcgtgatttgtaatcaaatcccatgattttaggagatgatcgttgtaaaa

SEQ ID NO: 388748 - DNA, 1147 bp, Cannabis indica
tctggcagttaacagctaaatttggacggaagtgttaaattgctaacataacacgagtattgggggttttaccgcccaaatttagattttggaggttaagtgaaaccaaaataaaaattttgcggattttaacaccatttaccctatatatataacatgcaaacttaattgcaccaattatgacattaaaaaaaccttaaaatatggaatgaatcattataaataagaaagaatatcataaaaaatttaaaaactcatattttacttctatataatcaaaatcagttttttgatgaagaaacttattttttgatagaaaaattagtttcttcatgaagaaatttgttaaaaataattttgttaagccaataaattaagaaactagttacttccatataactaaaactagtttcttaataaagaaaccagttacaaataccaaaactcatataagatttgcttataataaaattgatttttcattttaagaaattggtttctagatctctgacagcgatagaatcttttcgatcctttggggttttggtggtggagatctgatattcatcgtccattgaggcgtcagtcgtcgaatatgtcgctggtgaatggaggtcaataggtggactattgagaggtgaggcaagtagagtacttaaatggaggaaaagaaatagctttgaatttattttatttttttgaaataatttatctaaacatcaaatatgggttttaaaaattaagtttacacatatatggcataaaaaataccataaataatttaaaaactaaaatatattataaaagtggctaacataaaagtgtcatatttttataataaaggagtattcacaaaatacccaatccaatctaatccaattaacatgatccaatctaatccaatccgcaaagtgcgaatatccgcacatgcgaattgaattagattgaaaaattcaaaatcccacacttgtgcggattgaatattgattgatatgtaaaagtaatcgaaccaatctaatatacatatttatgtatattttttaaaatatatatatatgcaattaatattttaataaaaaatagtaatttaagaaactaatactatacctatgatataaacatattaatttatattctattattatat

SEQ ID NO: 388749 - DNA, 571 bp, Cannabis indica
ggtaaaatagtattttgaccaaagagtgccacctacaatatttttgtcttagaaaatgtactaggattaggactagcttgtaaatctttgaagctttgggaggtcattatcctctcgaaggattagtctatggcttagctttgggatctccttaagggcgaatgtttgctcttggatactagggtgcctcctagacgctttcatgatcttagaggttgatattaatattttacctcttttatcgtggacccaccatacacgtggctcactcctgaatggacctattttgataaaaaatacagacaatatttacattaacctagtccttctttccatcacatttaattcaattttatttatgaaacgagtgatacgatgaataatagttaataaacaaggccggccctaggcataggcgggctaggtccgtgcctagggcccacactttccgggggcccaaaataaaaaaaataaaaaaaaattattaggcttttatttaagtaaaatttaagtgtattataagcaacaaatattcatagcttagttggttgaggtggatgagataatgtct

SEQ ID NO: 388750 - DNA, 1197 bp, Cannabis indica
tatggccaaagatacaaacttgaaggccctagggctgaagaataaagtagtgttctaaaaaggtctcaggccacatggaacatgaaaatgaaataattttctaaaaatgccacatgccacatagatcataaaagtaagtgatgttctaaagatgataggccaccggctataaaaagaccataggctatagcagtaacatagaaaatactatatatgttatgcaaacataataatgaaaaaccactaatgaaaaaaactgtctaaatatgtgcaggggcagaatgagttgaatctggagctgcgagatcgagattgatagagtctacggcggccccatcattagcattgtagctagcctggtggttagtgtcctggccagccacctcctccataggtgggtcagcaagcccctcgtcatgagtccctgatgatgacccctctttaataggtagcaacctggtctgcctccataaagctctcgaaaagtgcctttccacaagccaacgttctctccacaaaagcctcactgcccatgtacgacagacttgataaggagttacgtaacttgaactcataagtgagttcaaaagagacgttggcatactcctctctagtggcctgctagccattaagagcctcatgtagctcctacttgtacccatgaaggtcagactgcaactcggagatgaatgcgacttgtgcggtattctttgtgtttctggcgctaagaataatctccaagccataaaccattctttatatctctgtgaatgaagcctccaactcagatatggcattatccttcaccaaaagggaggcctccaaggttttcacatgctcctaaagagcactcgaagaaccctgagagccatcgcgggtttagctccgcttcatcaaggccgaaaaaaacaaaataacataagtgttgaaaccacaacactggccgcgctagtcccccccccccccttgggactactatggctggcaagcccctcacagcaacatccaaggccggctagccacatgcaacaagcctcatggacagcgagcttgtggagtggcaaaaagatgaacagagatgaaagtacaacttaccagagaaagaactcaaagatccgtagagtagaacctgttggctcaccgtcgccaagcttctttagatcctcatccatgaaggggatgttgggttttatgccc

SEQ ID NO: 388751 - DNA, 1221 bp, Cannabis indica
taatagcattgaccaattcaaaagctacaagaatattgtcagtagttaaacgattaagcaagaaggcactttgtgattctgagatgacataaggacttgtttgaagcggttgacaagcactttggtgacaagcttggagataacattacaaaggctgataagacgaaagtcttgcattcactgtggttttttgatcttgggaataagtgcaataagtgttttgttgagacttgtagaatctgctccgtcatttaaaacacttaagacagctgctcttactaagttacccacaacaacccaattgtgttgatagaacattggagacataccatcgataccggggctcttgtctagtgccattgagtgcagagctacttcaacatcaacgacttcaagtggttttagaaggttgacattcatctcggtagtgattgttgtaggaatggcatttaaagtggtaataagggcatcctcatctaatgttgaagcagttaaaatctcagcaaagtagtcgtggattgcagctgcaatttcatgtttagtagtgacccgagtaccattctcaacatgcagaaacttaattgtgttattagacttccttgccgaggctttggcatgaaaaaactttgtatttcgatcccctgcatttaaccaatcgacgcgagagcgttgctgccaatagatctcctcttgttccaacaattcatcaagaaaagctttagaatttttcaaagaattcattgcttcagcaattcggtaaggagcattgtttggagtttccacctttaattgagcatcagtaattttcttcttcatgttaccatatttatcaatatgccacttctgtagattagaggcacactcctctaaattagcaagaacagcaacaatcggattcgaacttggtgaagagctccaactagccgaaatgatttctttactttgtacatcagtgagccaaagtttttcaaaacggaacctactgcgtctcttttcttgctataaccgtgagtttactggtgcaaaagaagctgtaattgccctgtggtcagagctaaaataatcgagatgaagaactacaggtgcatgaaattgattctcccagtgatggttcacaaaacaccagtccagacgctccttaatagtattcacaacagaacgatttttgatccatgtaaaagggtccccttcaaaaacagtctcatgtaacttgcaatgatc

SEQ ID NO: 388752 - DNA, 1641 bp, Cannabis indica
ataagtaaatatagttttagtactaataaatttagtatagttttttaattaaattatttttttctaaaggttggagttgcaccaactttaacttttagcagtagtttattcataaattcttcaaaaatttattttttgacggtttactaaatacttttttatgacaacttttaaaattaacttttaatttttttaaaagttttacgaaacgacaccatcgtgaataacattgggatgaattcagctataaatagaagtactacattaagtagagaaaccgtatactaaaacgagaaaataaaaatgaaagctcctacattattatctcccatacatatttgcttttaactataatttttattcataaaacttacaatattttgtgacaattttttggctcatatttttagttgggataattacataaggtactattttttataaaagaattacaaatttacgtcttaattttttttttacttctttacacttttctaacacaaaaacgacaagaaacataaaactaacaaaacaaataatatccaaataacatcaaaataataacaaaaaataacatacggataacaaaaaatcaacaataaattaatgagagtacaacataaaaggactatattttctgtaaataaaatcataaattaaaatcgtaaaaatatttaaaattcagtaaaactgtattttttgtaatttttttgttatttttatgtatttgtaagataatctctttttagtaatagtttttctatttttataagttccccggctatttaatacttgagaaatttaggtatagtgaccaaaattctattttaattataagaatgtgggttggtattttttatgatttaatataccgctgtgtgtaatatttcggaaatgctagttttatttatttttttttaaaaaaaaaacccgctagtcatacccatttacctcacaaccatttttactctttgtttttccagttcttttttcatttgactttttgctcgattttttttttaaaaaaataggatatgtaattatgtatcaattctattcaaaggcaacaatttgtttgtttgttttttatttatgtctttttgtttataatattaagaaaacatcactctctcttctttaaacaatttaaaaaataatcccactcataagttacactatcacaacctaccatttaaaatgatcattttaatacgcggaaacatatatttttatgtggtcactaaaaaagataattttattatttcatatttaaaagttattagattgttattttttctaagcttgtattataaaataattttaagagtactaaatagtatcttaaacattgacaaaaaaaaaaaaaaagtatcttaaacattaataaaataaattatatttcaaaataatcaataactatattaattttgataataaatttaaaagtaacattatatatatttatagtattgataactttttatatttaatgataattgttaggctatttttagcctaagttttgggtcacattttatagttgtttttcttctctattattatttttggaatagaattacgcttgttttctttgatttcaggtttctacacttgggatgtataaattggacaaatttcgga

SEQ ID NO: 388753 - DNA, 2972 bp, Cannabis indica
accttaagacatagccatccaagcgatatttaatcaaagttttattttgtttgtcaagataaatggctgattggacaaccttcaagcccagaattttaaccttttatgtctcattttaatgcatatagacttatcttttttttgttgcttaagtgttttttatgtcatcttacagatgtaggtgccccccaagtgatcgagcaggctttagacttctggtcacttgcaaattaactagagtatgccatagtaacttttttaaaccttttacccgagcaaacatgtttgtacaagtataggtagctccatgacttaaggttaaatcactaaaattttgcaagtaattatttattgaattaacacaatttgaacgataattgatcgctttatttatttatttattgatatgtgttgttactatattaacgaaatttattcaataattagaatctattacgtgatatgtttgaatcttagctagttaaaaaataaaaaacttttggaggagaagctttgcccagaaggcattactgaagagtaatgcttgttaaaatgatctatgctttagaagtggtcattcagaccttggcactagcattttaccaaaccattgaatgatgatcattcaaaaggccatcacttaagagtgatgtttgagcattatgtaattacgtggtcttcggacctttgtatttattggtagtatttttttagatgttcacaattcttataccatggtaatagaactagcttcatgttttcatcatactgacccaattcctatgcttcagttactttgtatggccattcctaatttggtctaagcacacctgccgcactgtctttatcgttaaggagcactcttctgagtaccaagccccccacaaataatttcctttatttcacttgtttgttgaagtactgagctactttttgctgatgaacttgtagctttaggcttgctaggtctcttcgctctttaatttcgtcaagtgactctgctaggagggcatgattggtctcttggttatgcatcaatcttatgtgggatggaggttctaattccatgggaaacattgcttcagagtcgtaggccataacaaaaggtgtttgcctgatggtcgtccgtttctgttgttctatacgaccagagtgcctcgggcaattctttaggccaattacccttggtttcttttagacaattctttagagtatcctttagtgttttattgactgctttaacctagccattttcttgaggatgtgcaattgtcgagaagcttttcacaatcccgtgtgtcgcgtagaaatcagtgaacatttagctatcaaattattttctattatctaaaacaattttttgcggaagttcgtacctacatatgatattttttactacaaaattgaaaaatttcttggaagttttagttgccagtggttcagtttccgtccactttataaaataatcaataaccacaattgcatattgcactccacctttttcttttagtagctgtttgatcaagtatattcccatatatcaaaggaccatggactttgcatctagattaattcattgggtggagccttgggagctttagaaaacctttggcacttttcttatttctcacataagcttttgaatcttctatcatggttggccaaaaatatccttgtcggaggattttcttagacaaactttgtcccccagcatgattgccatagagtccctcatgaacttcagtcagtagtcatgtagattcttcatttgtaacacaccttagcaaaggcatggagaaacctcatctatacatcgcaccattcacgattaagtaccgtgcaacttttctcatcatcttttgagcttcatttatgtcgattgtaagtgttccattattaaaataggctttaattggggtcattcaattaggtttgtcatcgagcatttcaatctcttccgtgtaggtgatgctagggtttttcaaaaattgaattaggactaagttttccttgtctgtcgcagtgttgcttgccaaccgtgccaaagcatcagaagtttcattttcctttcttaaaattatcatgatggtgtatcccttaaattgtgcgagcaagtcttgaattttacttaaatacgacataattttttctccctgagccatgtattctcccagaatatgattaacaaccaatagagaaccgctataaagttctagatattcagcatgcacctctcgagcaagtttcaatctgacgatgagtgcttcatattctacttcattattagatgtcgtgaagccaaatttgatggctttatgcaaagctttcccccatgtgtaataagggtaattcctgcacgtgtagcttccatactcgtctatcttcaatgttttcttctggtggggactctttttcttgttccttttcaggctttgtactctttattggacttgtcatttttttacctgtgaattcaactataaaatattccaagacttgaccttttattattgttcagggctgataagtaatttcatattgtcctagctcaatcacccatttgagtagccaaccagagtcatttggcttttccaagactttgtgcaaaggttggtcggtatcgaattttaacattaattaacatagtagacttgatattggtattattttcttctttggtcagaaggacacttactgcatattacgtcaccgcaaagtatattcccgatttttctctgtctagaggttttgatgggataggaggttgtgcaagttgcttctttagttcttgaaaagcttgctcacattcctcggtccatttaaacgttttgtttcatcgaaggatgttgaagaaaggaacacatttatcgataaattttgacacaaatttgcttagtgtggctatttaaccattaaggtgttggaatttattttaccaggatcttagatctactcacaagtatgttgtttaa

SEQ ID NO: 388754 - DNA, 512 bp, Cannabis indica
ataaaaactatcgtgaaatgatatagataaaattaataaaataattgaaaaaagaaataaacataatccaatttaaaaaaaaaaaataaaaattaaaaatatcaaattaaaaaagatatataatgttatttcctaataattttttctacttatatgagattttttaacggtatacatcgcgtgctcgtaactatatacaatatgatttttctcataaattgagacatcattatacttgaccaattattatatgtaatttttcttatatatgtatttatattacacaataaaaaacaaaaaatcatacatttttttaaaatataaaaatcatacatattttttgtcttttcactttcatataaattaatttggctttcatagcagccctaaattatggcgcagcatgcatacaatacaccccctacctattattttgtattttttgtaatttacaataatattgtatctttatatattaaaagtgcctatgtaacggcaattcttggtttaac

SEQ ID NO: 388755 - DNA, 1112 bp, Cannabis indica
aggtcaatgttcaattcccatcaagagcattttttgtttttatagaacttaaatttatcaagattgggataattattatttgagtggggcttatttaagtaattgtaatatttatatggaatatttggagcaaaattttttaatatttgtaattgttaaacatataactctaataaaaaaattgcagtaaaagtattttattttatgattttgttgcagtcttattttttttttacttgttaagtgtcaattaaacacgttaagagctaactcaaaaacacttgacgatatatttctttagtttatttaatatatagtccaataatatgttgtcacgtatttttgagttgatattaatagtcaaaaaaaagcatgactgtaacaaaatcgtaaaataaagtacttttgctataatttttttaattagaatcgtatataaaacaattgtaaatatttatatatacttatgatttctcaccaaattcaaagcctctattttttttttacaaattaatcttattttggggttttcatttatgcagattggtcagcttggtgggattgcagttggttttactgttctattaaacgtgcttgtagcagggtattaaattttaattattggtcaatattttatttaataataattaaaaaaattaaattaatgagttcaatcatattctaattaatgggcttgggcttcttctatgcaggcccatttctggagcatctatgaacccagcaagaagcttaggcccagcaattgtgtggaaccaatttaaaggattctggatttatgttgtggcaccaattcttggggccattagtggtgtttgggcctataacttgcttaggtttaaccctaaacctgttagggttattaccaagaccaaatcatttctcaaaacatcttcacaaaaataattaaggccttcattatcattagtttcttttagattttggaattttgaatttttttatgtatttgttaaggaaaatttgaaaagaaaaatatatgctaaacttaatttttatatattaaaaattatattgtatactcgctttttagtttctattttaatttttacctttcttttattattttttaattt

SEQ ID NO: 388756 - DNA, 1349 bp, Cannabis indica
ttcaggctcgaagtaggggaaggaaaaatggaaccatgtgaatctgcaaatgaagtacgaatagagtcaatacacttcttcacatcaacagaagattgattatgtaccttgtcgtttcgtattcgccaaatggtgtcaacaacaactgaagcataaaggaaaacctcatcagtaggaattcctctctatttaagatcccagataaaatttacccagtcccacatgcgaataccagagtcacacacaggataaatactccaaggagaagaccgccaaagatggaaagccacttcacaggacaagaaaagatgttccataaactcctccaccaaaccatataaagggcatttgacatcctcaatatgaaaccttttcctgatcacccccaagatattagtattcgtaccatcagccaccaatttacaggaacccttcattaaaattgacttggctttaacaacatttttccaaaaccaagaatctgaatttttatagctacagttaatgaattccttccctctaaggtatttagctgccaaaatccggcaacatagagactgagaaccattaagattgttccactcccacttcgcaagaaaagcctagttcatctccctagttttccagaaactaaggcccccaagagacttagggaggaaaagcttatcccatgcttttaggtgaagaccatggttgccttttttgaaactccgccagaaatcacacaccaaagcgtcaattcttgtgacgatttgattagagaatttagtagtttgcatagcatacaaaggcaaggacaggcccacagacttgataagggtatctcgccccgccttaaataaggtctttgctttccaaccttgcaactttgaagtgagattatccagtatgaagttgaagtccgcataaagtggaaaaggggaagacccaagtacttaatgttacccctagagagccaatcctcaaagcttccttgatccctcatacaatctattggaagtatttttactgaagaaaattgaggtttttaatttgttaactcgttgctccgaccaagagcagaatctcttaagacaatgtcagtagcttctagcttccattaagttagctttgccaacaagaattaagtcatccacaaaaaagatatgggagataattggacctcccatactcaacctaataccattaatatcgcattttctcagagcatcctctaacagtctagataaaactttaacagtccaaataaataggtaaggagacaaaggatcaccctgccaaagaccgcaagagtagggctgcacatttagacccgcaaacacaaaaaatccaaccacccgcctcgaccc

SEQ ID NO: 388757 - DNA, 1058 bp, Cannabis indica
aaataaagttaaaataaaaaataaaaaagtagacttcacaactttctcatctcatcaactttgcatcagatttctaatcaacttgggaaatatcaaaaggcattagccgtgctaggcaacacctttagaacattattattagatattactccctagcaccatcacaaggtagaatttgttaatgattaatattattatgaatagttaatcaattgtaaaattcgatatttaattctacccataatgatatcatattaggtggtgttagatagtatctttagcagtttttgaggaattaagtagaagtatgctattgagcagattaaggtgccgcaccaaagaagaatgtgtaatattttaatggtacatttcagttcggacatattttaatttaagagatttgttaacaggtacattaaggtagctccttacaatgagccacattggtaattaaagtgttaaggttcctaactaattgttggatatcatatataactcaatattgtattaggcacattaattaacgtgccaaataatagtgcttagttcagtatcaaatcctacatattttttatttctttcaaaaaatgtccaacaaattgtaatttaataattatgaaatatgctaataagtgatgactatgcttaataacaatactctatttgaaaattaatttgaatataaaatagaaattcatgtaatacaaaattatttttattccaagctgatgtgatatttttttttaattgactgccctttttatttgaaagtttaagaggctgggtatgtgtgactgtgtggggtcactactaccaaagaaagaattcccgtaaacataaaatcgaaattttatgaagaccaacactattgaaattgtttgtctattgaaaaacggacgactataattttattgtcaccagttaaaaaaaaactcataatacattatcgtcaattttaatgggatgcttagaagtcttttttcgttataataataataaaaaatagtcccaaagcttttacccttggttctctctctctgtaaagaccgtcttagttt

SEQ ID NO: 388758 - DNA, 1303 bp, Cannabis indica
atgcatgtaatagtagtatagtgagtagactcaatatatatatatagaccaatcgtacgggtttgatttgtgttatatatatgtaattttcctcccttaatgggtgggtatatgtattgaattgtgttatgtcatggccggaaggaaagtaaacacgtaatactaaaaggtagtgtatattacaaaatagtatccatgcagattaattatgtggagatttacaaagttaagagtttttcaagatattgatactatataatagtagtttttttttaaaaaaaaaaagaaagaaaaaagagtaaaaaaaaactataactcttatcactaaacaaagcatgagctcagcatgaacggtccagtttatgtgtgggagggaaattttgatgtgttttttttatcaaaaaaaaatatgatttggtgcaaatttcttccccaattttttagtagtttagacaattttgaggacaacgtgtcagtcataagggtcttatatctcatctcccataattaagtcatcagtatgcatctcgagagttctcattccataaaaaatgacactatcacaacaagctaatctctcaaaaggtcaaacataattcttcctatgagagactgtaataggcagtgacggaaccaacagtataatttaggggaaccaaatttttttttatatgaatagaatattaataaaaaaaaaaattgttggagaatttcttttaaattttatagggataaaaaaaattatataattttatggaaataaacataaaaatgttaaaaatataaattaaaaaaaatatacattttaaaggataaaattattaaaaattaaattttatgcaggtaaaattaaaattatcttaaaatttctatataaaaatgtaatttttcaaaacttaagtggggtcatgtatcccccacatgactcctcgtcgtggctctgtcgctggtagtggaatttgaactcttaaccaaatttctgggagacctggatagttattcggatcgggcattccaagtcgtgataagtattaccaactatacttaattagtagattcttaaccattctcctaggaccaatacgtgtccttctctaaagtgcggacaacaaataggaagactgattattttgaaacaaatgggttatagttttattagtccgcagaacaaatttttccttaaggttacttttttgtaaatgtaatggtcctaaatttaggtgtcgtttggtaatacttttttaatcagttttctgttttttaaaattaaaaaagtgaaaatattttttaaaaacatgttcta

SEQ ID NO: 388759 - DNA, 847 bp, Cannabis indica
ggctataagatagccgatgcaaacaatttcattgcaggcccttcttcagagcaacaacaaaaaactggtggaccggagtttggaagatcgaggctcctcctaaagtcaaaaatttcacttggcggttgtgcaatggttggctccttgttaacactgttttgcagcatcggggaatgaacattaactccatttgctggtggtgtggaaaagaggaagagaccattgaacattgcttatggttttgtccctcttctaagaatatttggaagaatttttcaatttggaggataataaaacagagcaaaggtactattattgatatactcattcatattaaacagcaagttcctaaggaggaatttgttgttttccttattatgccttggctattgtggaaccgaaggaataagaaacgtcttaaccactatgttcttccgaatgagtcatggacaaaatgggctcaaatggaaatagactacatgatgtacaatgttccgtctctagatagaagcaagatcaccccttcaattaagcatactggctgggaggcaccccctatggagagcttttgcattaactgtgatgcaagtgtgctgcacactgaggcgcaaattggactaggagtggttttaaggactcattctggcgaggtagttgctgcaaaaactcattatcactctggtgctttctcggtggagttggctgaagcgttagctcttcgaatgggaattttgcttgctgttcaagttgcagcaatccctttcatactgtcttcgggtgattaattacctaaagggcgatttcaaagcaaaatctgattgggggcgctgctggaagaagttcgtga

SEQ ID NO: 388760 - DNA, 1856 bp, Cannabis indica
atccaaaaatagcaagaaggctgcaagagttgatttctattaatctacttgtaacttttgttccttaaatactcattgcatcgtaaccttatccgattcacaaggaaatctaaaaattcaaatgaaattgggccttaaacggaatgcaaataaatataaatggacaccaataatgaagaaataactaaattgttgaacattaaagtataatagcaaagacaagaaactggaatgaagaaatggagggagggagacaaagtaccaattataactgaattttcttgaatgaataatgagtttggcaaggccaccccaagcaagtattgtgtcaatctgaaagaagaaacaataaggaaattagtcaaaacagtgcacgcaatccgtatcaaagaattataatacatgattatcctgtaaccttttattaaagaatgtagcattttataaaatattttaaaaatagaagaaagtagacatattttacaagggtagtgttaaactaaaatgaaggtgttaaaatgtgtccagattgatattattgtcttgtgaccatgggcattgcagtgcttcacaatgtgacgtgtaccatatgcaataccctgaactgtaccacacagatttgaaggcatcttgctattattatatttatttaaagaaaaaaaaactcacttgaattgtaaatggcagctcgaaccaaatccatatgctccatgcccaatagtatatctcttttctcataaaaccaatcattaactaattttggtactctacataaatttggtgcttctttcattaaattaaatagaagctattatattcccatatgttaattaaaatctatttgccaaagctaatgaatacagaaacaatcgagtatttgttggcaaatcaagaagaaaaaaaatgaaaaacaagtttggtggaatactaaaaactacatgcatctttaatatagttgttgtaccatttcataatggcataaattaactaaaaaaaatcaactaaattttacctacctataccattaaattaaaaaaaattgtaaataaaactaaaattcaacccaagctttatcagtcagtactgtatattactcattcacaaaacaatacatacaattttttaaactattttccaaagaaagcaaagaaaaaaccaggtgaaaagagggaactaacttcccaatatcctcagcaatatcagaatatcagaatataaaaaatatacctcaccaacaccctaaaaaaatcattcgaaaaaacatctgaatcacataaacaaaccatttcaaaataaaatatataaaggaatgagtttcttgactaaataattgaataactaacctttgctcaaaacataaatgaaaaacaaaattgccagagcatagaggggccaccagagaacatttgagaatagtcgtcccctcatcgacgaccgtatcgaagagacagagagggctcattatgtgatagaattcggggagagggtggtttctctatgagatgcgtgagggtttgggagaggtagagtgagagagtgcttaggtagggaactgaaaagacagaggaaaaagtttgggatttgccgctaaaaatgaaaatttctcaaaaaaagaaaatgaataattatattaatatttaactttttgaaattaatatctgaaaaaacgtttaaaatttgaattttttaaatagtaacagtacataatattatgaaaaaataattaatttattcatactatatgaaaataaaataaaaaaagcataaaaatagttgactaattattaggcaaatttaaatttaagttttgaaaataaaaaaaaaaaaaatctaaagatcctagttttttttttttt

SEQ ID NO: 388761 - DNA, 584 bp, Cannabis indica
aaataagcttcatgggtccagcaattaaggtgtattaagccacttataataatatatcactttctctatcgtctttaaaacccaatggaaaaatgccactaacaatgcttcttattaattatttttaacagattactgagactataaatatggtttgttacttaatatttatttgctacacctacagagtcttatcttcctggttattagtcatgatttgaagaaaaaaaaagtgtattaatattttataattttcatctcacgtgccaacttgacacaatattatatttatacatataaattatataaatataatatattcgaaagaaaatagaagaagaatgaagcatgcaccgatatgcacggccattatgtcacacattctgatctaattctatataaatgtaatttatttataagtaaagttgttgatcagtcccctttacttattctattatattctatattgttggtatatatttatttctttaatcaatgtaatatgtcaaggtattcatttttgtttttactttttaagtaaaaaacactattatattaatttaaaaatcaaattatgtacatgt

SEQ ID NO: 388762 - DNA, 1049 bp, Cannabis indica
aaaaaataataattatataattaggtgggggtaagaatatcaatttaatgctagtgtaatgttttttttaataactttatttaatgttcaaccgtttaatattaatgagaccttacttattttatactacaatatatcaaattaattttaaaataactaattagttacaatatttatcatctatatattattatatttcgtcagtgtaacaattagcttgtcataaaagaaaaatcacttagaaatttttttatttataaaaaatagaaaaattaatattataagttttattgattatttaataagttttaaaaacatattctatatagttaaaatatatataaaaaaaaaaagaatttatattttataggaacattaattttatactgtaatattacagtaagtttaaaattatcaattattaacactatttatcatatccaatatattattatatttcaataagttataattgaggctaactcaagttgtcataagagtatgcgtgtgtgttaaaggtcctagctcgagtcccagattatgtaatgtaatatataaacgcttaaataaaaaaaaaatagggaaaaaaaatagggaaattaccacatatactattttttttaactttttttttaatttacagtttaggtttctaaagtgattgcagcgctagttgcaataagggtttctgtacgattttttgttgcaatttaagttgcagcgctagttgcaataggggtttctatgtagaattccgtaaaaatgaaaaaaaaaatatattttgaagtgtaaaaatgaaaaaagcccaaaaacaaatatttaaaaaaaaaattgatcccctatccaaaatgttactatgtatcactttgcaagtaatatctttatatattaaaagtgcctatctaacggcaattattggtttaacgattcttggtttaacaacaaactgttaacgttaaaggttaacaaataaataaacccaaaaattaaacaatcttttttaaattaaaaaaaatatcttacccacatatctctctaacaaatcctac

SEQ ID NO: 388763 - DNA, 949 bp, Cannabis indica
ttaattttaatttcttttgtaagcaatccgtgaataaagttgcttatgtgttatgttcatataattgattgtacttttagagttggacttctttgccagctgaaattttatccttaatttagaataatgacataaattaatgaaatttcttctttatagcattaacaataccactataatcctattttttttttcaaatttaatatattttatttatttaaaatatataatattaatattttaactatatatccacatataaaaaaataagtgttaaaatctaaaatatatctagaataatgaaaatatctactctaagaggggtgtgtcgacttagtgccacccgtgacatacgttctcaaatttctccggaagaagacgaagtcatggaagaaaaagaaaaagagaagcaatgcacgagttatggaccaccacgttaaatttagtgaaacctatatttataattttacaagtattcttattaaatagtattcaagatagattgtttaacaatattttttaaatgttattttattaaattatataaaatccaatattaaaattatcttaatagctgtaacatttgtcgttattaatagaccctactctatctatcggcatacggaaatactttgaaaagtcatgattcgatcaaaattattgatattaatgatatatgatatccttggtaaaaaaacaaaaaatatataaatatatataatatcaatttaacttaaaataaagaacattattattgggtattggttgtaactaatacttctagacatattgcattttaagttgtgataatctttaaaagttattacattaaattatataagatttaatatttagtttgacttgtaaccagagttagcttaaacattttggagccttgtgtaaaattttaaaattgggcttttttttaaaaaaaaaaaaaaatcgtgtg

SEQ ID NO: 388764 - DNA, 914 bp, Cannabis indica
aaagaatatgaaaataaaattaataagtattatcattaattgaagaaaatgtgaaaataattcaaaaaatattaaaagtaattttttaaaaataatttaaatttatttttttaatatggaatgtatttataattttgtgtcgtggaattaataaaactttttttttgttaattaggtttatctcctttattttctattatattttctgttctaaattttcacagtgttctttggacaccttcccacaaagatcttatttccaataaaaatagtgtcgattcttaaatagtactaaaaaaaaaaaggtacaaaaaatagagttatctatttttttttttttaaactaatacaattatagtgtttatgattggagttactcttagaaggggaatattaaacaataaaaacttaatttgaagaggattattattaaaaaactgacaaaagaaaaaattggattgatgacctactttgagtaataaataattaattgttagtgtaataatattcagcaagtgattacttaactttacataaaattataggagctcccgatatttttattttatcttttaaaatataacattatttttttattttatctcaaattttatataacactgtatattaacgtctctaaagtataattaatccagttattatttttagtaactttactataattaagtaaattattagtatataggaatcaaggaagccttgagctggataaaagtaaaaattggatagatatagttgtggaaactgattatcttaatgatgtatgaacgatatcaattctaataaggctatggtttctttatatatggtattgttagggaaatttgattttttatgcttacatattcttgaaatttttcccttaaactcataatatttgatatttgtgggat

SEQ ID NO: 388765 - DNA, 1258 bp, Cannabis indica
atgaatttggacaaaaaggtgaccttctttcggtagcgcacacactctactagtctaatatagtggacaaactctgacactgcggtgccttgtgtctggagggttccgtgttggttgaggtctggaagccatttgagttactcttcgattaccttgcttcaggattacctcttgaaggtatctggattggtcttgatagactcttcacttctaagttgaatggctttatccagaccagggtggtccagtattggaagcttagtgagttgggcttacgtgaattacagtttgacttaatcattgggcccaggtttggaccgaccttggctagtattaggctttagaattttacatgtcatcattttggaaactcatataacatttactcctcaagcctttggggctcaaaagctgcagaggcttgcaaccctcctttcgaacttgtttatagatgtggagctgggaactgaaaagtccctttgaaattccaaagcaataagttgcgaaagcccgtggtcctttcatctatctggaactgagaatacgtgtcgacaactccttggtttgtgcacatcaagcgtctcgaaaaggtgcgtagaatttagggatgcgggttcacgactggcgtatgtcagcgagattttcaaggcatgtttcatcatttgaattgcctcgatcctgagaaacatattaaatgttaacttcccgtagcccaaatagatgcaagtgtgttttttgggacgtaatctaaactgtaggatctgaagcacgcggatcgccactttcaatataaagcgtgaatcacccgttcaacattttcgccacttggagttttttcttttttagcttcacacttccccgagagtgaaaaattgtttgagagaagaaagaaaaaaaaatcccaaaactcgtttctagtgaagtctgaatacttcgatgaagcacttcacctccttttttcgaattcgttcaagagaaaacccaagtgcaccacccctaaacctaaacatggatccttcgaagttgccatcgtcgtagggactttaagctgaagatgacagattaattgagaaatttcatgcttttggggcaaaacttcagcgctttcccataacacgatgttctagaaaaaataataacaaaatctacactcagttttaccatataattgacgattcatcacctctcatacattcacaataatataactatccattcacatacatatcacatatatataaatgttggaaattatttt

SEQ ID NO: 388766 - DNA, 805 bp, Cannabis indica
ttattttgcttgagaaataaagtacaaacttacaaatcggccaatttcttctgcagcgcctaatatgtacaaattttgttttaatagataattaatagtataatttttattataaaaaactgcaacacatctattaaattaatatggtttatttaattgaaaactatcaaaaataaataaataaaataaaataaaacggtttgtatattaattgagcttccttacaaagaaagaaaaggtctactatatatgatctaatgtacatcaacattgcaagtcctaaaatgtttcatatttataggattgcaattttcaatttttcaaggatgtctttctcatgttaatcttaagtttaaaaaccataatttatagattggttaagcacatgatctattgtttaaataatatgaaatcttttaagtacactccttcaaaagatgttttggtaaaatgctctatttgttttggtattaaagaaaattaaactaaaaaattattctaaattctaaatagataaaaaatttatagaaacactaagatcacttaccctaaacaatatatatacatttctatgttactagttggaacaacacgtgctacgcacgtgtaatttttttggaagtaaatatataatttttattaatgtgctaaatcagttaaaagataagatttttccttaatagaaacatcgctcttgttgaacactcgaattagaaaagaacaagatgctcaagcaaaactatgagcaactatcattaataaaaaacaaggaactattgtgtaaagatggaagaagtttacgata

SEQ ID NO: 388767 - DNA, 1838 bp, Cannabis indica
atatataatatcaatgacttttcaaaaattagagctctcaacattggtgggtgtaacaagtatttctttatacttttgaaagcattttggcatgcctcatcccaaatgaataggacatttttttgcatcaatctcgaaaaaggatgacatctaaccgagacatttgagatgaagttttgaatatatgcaagtcttccttgtagtccatgtagatgacgtaagttacgtgggggagacaattccaagttttttttatttttgcagggtcaattttaatcccttgatatctgacaataaacttgagaaaatttattgatgttactccaaatacatattttaaagggttcatcttgaaattatgttttctgagcctttcaaagactcgttttaaatcatcaatatgatttttcctttcttttgctttgaccactaaattgtcaacataacattcaaaaattatggtcatttctctttggtaggtttccttgagtcttgaggccaaatggcataactgtataacaaatataccttttggcgtctgaaaagtagtgagctcttcatcttcaggtgccatcttgatttggttgtacctaaaaagctcatccaagaacgataaggcatcaaaaccagtggtagcatctaccaataactcagtgatggggagtgggaattcatcttgtgggtaagcccaattaagatctcgataattcacatatatgcggagcttcccatttttcttcatcacaatgatgatgtttgtaagtcaaataggatacttgacttcccgaacaaataaaaaatttcttaacttctcaatttttgcctcaattttggggattagctctagtcaaattattctttgagattttttaacagggatagcatcttttgatattgccaacctatgtgcaataatctttgagtccaaccctcgcatgtcttgatacccccaagcaaatgcatgtttattttcataaaggaattttttctatactgtggtaattcttcttcagttaataaagcattgaaaaatataggctttggatcatcctcggtcccaaagttgatatttattaaatcatccactgttgattgttctccttctttgaattaaaggggtgccagttggaaaatgtctacaaatttttttgaaaggtttgagctcgagccttcatcttctacaaccaaactttctttaaaagaaaggtaattgacttgagcaaaattttcttcatcttcttgtgttttattcccttgaagaatagtaattctgaagcatttcttctattttggcacccattgcttttttatttttagttttctttggctgtgagcacttgggaaaataaacatttcaatgctgacactcatggagtatatgtgcttgcttcaagtctgccaaacatcgacacccaaggggaaggtgtaggtacatcgttattgcaaaacattttttgttcttcttctattaactcgtctggttcaaaagaagcttttaaaaaatcactattttgatggattgtgactccttttttgtgtcttgacatggaaatttttattctctattttgaagacttctggagttacagaagttgaagatttttattaagagtaacaactcttttatttttcttgctattttcaccaaaaataattgaaattttcattttactcttacggtagtgactaataaattttcctcaacgataaagtgaagctcgtcataagggttgtcatcgaatcttcaatcggtgtcaaagttttttgccccactcatcgttaacttttagggatgtacttgaaggtttgtttttagttagataccttcaagtcctcct

SEQ ID NO: 388768 - DNA, 1373 bp, Cannabis indica
actattcatcaagtatctatttggttttggtttttttttttttttttttttattagcggttccaaaaatttttgctaataaatagtacgcaaataggcttccaactctccttattcaagtggtgagggagcaattcaagaactttctcccaatctttcgatttagtataatgttgcttaaactacttatgtatattggtctttcgctcactatatctctccgcccagtggcagacctaggattgaattttagggtgggtttaattatacatttaatataatctaaaacaataaataactagctaatttaagtgaaatgatagtttaacaacatcttcctattctagtggtcataagtttgatcctagtttgaactttattcttcatttgtttatttaagaaataaaatgtatatacaacgtaaaaaaaaaaaaaggaaattcaaaacatggtttccaatgtaaatttaaatcttaaccaatttttttatttaactactgtatatatatgaaagtaacaattctatattaatatattttcaaatctcagcgtgggctttagccctccctcaacacccctaggtctgcctatgtctctgccatctccgtatatagagtccccatttgtaggtctcgatggggattcttgtcaatattaaaataaaattgtataataaagcaattaaagatttatattaattttcaaatgaccttataaaataattgaaaccataaataattgaaaatcactcacccttatacgattaaacacttgatccttatattgttggggtacatcgaaaaaattataatgatgacctagacataaaatggatacttactagcccataaatcaaatgtaagcgttggcttcagtccccaactattttgcatgtactgaggtccacctcaacctctaatgttttatcggctttccttcttcgtttttcaagttcagtgtttgaagcaaggccacgaccctttctgacccttggttcgactttatttgttcgagaaattttttttctcttagtacgttagaaaataatcatgtatttatagtaagaataaagttagggatgaaaatatgaaacttgattagcaaaacgacgatactctagaaggatcagattagtagctaattgagatcaaatcatatttaacctgatctatttatactcatactttcaaggaaaaaattagattttaattacttttgcccgtaattttcagaattttagtatttattaataacaaaacaaacaaaaataaaataagtatgagcaaaataggtatttagtatcagctcaaaaagacctctatttttatttatatatatagggttaatttcacaaatgcacaaaagtaacaaaaa

SEQ ID NO: 388769 - DNA, 727 bp, Cannabis indica
  modified_base (9)..(9): a, c, t, g, unknown or other
acttttttnttttttttttacatttttttattaatttcgacatacatataatatttatttaattactaaaaatttatataaaattaagcataatagcttataactttttttttctacattatcttttgtttttcatactatcgatcctctatttaattccttgaatcaatttttttttctaaaaacaaaaatatatactttttaattaggttgtgaacaaaatttgacatgttaaaatattttcacacatagctataagatagccttttattctttataaaaaatattgtcttttattattactctgaaaaatagagtgggaggtgaaaaaaatagtctcaacttaattcaaatccatttcatatattataaaaaaaaaaaaaaaaaaatccatttcatattatttaaataaaattaattttttttacatatttttcatttttttttttaaaaaaaaaaataggcatataaataaatgtattatttgaccactcattgagagagtgcaattaatgttctaaataaatgatcttattgttattaccacgaaaaagattgtaaaaaatcaaacattccaacaactgcaataaatcctttccttttttttaaaaagataaaataaaataaaagatatttatttttaattaaggaaaaagcaataaatatacatgtttggtttgaagagtaaatagaaaaaaatgattttttttaaatattattttaaatt

SEQ ID NO: 388770 - DNA, 1840 bp, Cannabis indica
tgggtttaccaagtttttacaataaatcaaagaaagaaatgtttggatacattaaggataactttaaagagaaattatcacaatggaatgagaggctattctcgtttggagggaaggaaattttacttaaggcggtagctcaatctatgccaacataaactatgagttgtttccaggtgctcatctcaattttggacgatttggaaagtctaatggcacagttttggtggggtacaacatcattcaagaaaaggatgcattggttaacatggagaaatatgtgtttatccaaggatcaagggggtatgggatttaaagatcttcaatacttcaatcaagctttattagccaaacaagcttggagattattagttgaccctacatcgctgacgacacaggtttataaagctagttactacccaagaggaaatttcctagaagcaccacttgggtatgccccttcccaaacatggcgagctattttttggggtcgtcaattgataattaaaggtatacgatgggctgtgagagatggtgtctcaatacaaatcatgaaaacaccatgattacttagaccttataatttttggcctctgatatgtcaaagaaataccccattaatgatcaatgaacttatcaagtcagacagaacttggaatatacctctattacgtaatatattcttggaagtgaatgttaatttaatattatcattacatttaagtccaatccgtatggcagaccaaatttgttggttacatatagatatataatgactgtatataatatgcattctaaacacatttaatataatctcttatgtttatgcctagagttgataatattctagaagaagcgaaaaatatgatgaatatctattaataaataaatgaaagaagtgtgtagaagcttatatgataggaagcgtaaagtcaatcactgatatgaatggtataaaattttagttagaattatcattacaaataatatcatgctcttccacttaatatgatatgcattctactacatatcatattatctctaattaaattaactaattatgtgtataaaatttaaaatctctctaatattccattatctttttctaaataattttatgtatttttttttgtaataatatttttcttagaaacttaatagataatttaagttgaatactccaatagtacttcaactatctataatttctgatcataagttttgtctataactattttattagataagtttatattttattatgatatatcatttcattctttacatattaatattatttctatatataggtcacgtggcattatgcagaaactggaatctacacagtcaagagtagatattccctagcaatgaactctatacccaattcaaattcttcttcgttacttcctttagcaaagtggtggcgtgctttatggtctctaaaaattcctagaaaaattaaggtcttcgcttggcgtgtgtgtcatgatattcttcctactggctcagcgcttttagctcatcatgtttcagtttttggaagctgcttttttgtagctggcagtttgatgatgtcttacatactattttcctttgccctctctcaattcaagtttggaagctttcaaatttttggattttcgtccagcctagtctctcttgaaagatcatcgacattcttaattatctcatgtcagtattttctccacatcaattttgtgtcttcattactctggcttggtgcatttggactaaacgtaacaaggaaaaacatggtaccccaattaggaatgctccagcaattttgagttgggcacttcaatattatgatagttgg

SEQ ID NO: 388771 - DNA, 649 bp, Cannabis indica
aaacttgatcatcatctctctaagctcatgtagataaggcagccttaatacttccatcaaattcccaaacacaaacaatgtacagtcaggattcaatttccgatttgggcaacaaataaaaattaatcgatatcatcattaatcagatcaacttatacacatatataccagaagaaaaatcagcgtgttacgaaacatatgcttgagagaatcaacaaaaaaacgatatatgtcaaaaactgtaagaacaaacaatgtagaagaatcagtaatagtaccagctgctggagagatcgaaatggagatggagagatagacgagagggaacatgagaagcggttcaaccgctggagtgatcaccggagcaattaagcagctagcttaccggtcggtttttctaatcaaaacagaaaaaccaacttttgcaaaaagtaacttacaaactgaaagaaaaaaaaaattctcacatgtacaaatttcattcaattttccaattttacattcaaaatttacactcaactattaaaattcttgaatttatgaatttttgtctagtttattcaattttattaatttattgattatttatgtactaaattatatctttttaactttgatatttatcgaaggttaattagtaatttttctc

SEQ ID NO: 388772 - DNA, 1269 bp, Cannabis indica
atccttttattttcgcttattattattgcagaaaatactattgtaataagtaattttcctaaaaaaataaacaaaaaccaagactattaaaagcaacccccttcgagtgagctcaatatttgataatgactaaatattataattgatgttctccatttaatgtattattcaatgtaaatttttaattgattatttaatatattatagttaggtaaatattattttagtcccttgtgttttgtaaaagttataaattgaactctttattttgttaaatgacaaaatgaatcctgtattttctaaaattgtacaaataggaccctgaactgatttttttgtcaaaataaaacttaataataatctgatatgattttttgtatctgtttgtgttagaaattgtcttagagttgattatattaaaataaaattgttaaaaattgaactcggggtcctatttttaccattttcaaaaatataaggtctattttgtcatttaacaaaacaaaaaatctaattggtaacttttgtaaaatacagtgtcaaaaataatatttacccattataattagataatagtaatattgtttgttttgggcatactgatttatttttgggcactttcctcgaaagttggcactaggtaatttttacttattcttattaacttaacttgacttgataaagaaattagagcattgttattggattttagtggtgcctaatacttttcataggtggcgtcgcacaattaattaggatattgtttaaaagttatttttaaagagcattgctattaggcactaatggtgcctagcaccttctcgacatgtcgtgttgcgattggctagcgatactctttaaaagttattatattaaattatatgagacccgatacttagttggaccaatagcgatattgacatataggagggtgctaggcaccactggtgtcttttaggacttctctattttaaattatataaaactcaatacttaattagactaataacggtatgatatcgaagagaatgctaactactaatattaatttgtagcaattctcaagaaattccattgaaagatgacggtcttaaatgcataatgcaaaatgtgataaatattataattaattagattgataactttcaccctgacattgatcaacctattaagtaaggtaaagggtgaaagagaatcaagcaaatccacaaaagcattgaaagaaatatatctttatatattaaaagtgcctatctaacggcatttctt

SEQ ID NO: 388773 - DNA, 1500 bp, Cannabis indica
tttttctcttataaatcttttccaaattccaactactccataccatttcttacacatttacatgctcggttataaaatataaatcgatcaaattccatttgtaagctgcttttccatgatattaacaatactaccaattatgtatggaataggcaataaaaaaagatccattcatgtaaatattatgctggtatggcttattatacatctatatttttctactaaaatcacgagggccaatttcccagaccagtgtccctactgtcaagaaaaagtgaagcccaaatggtagaaattgagtgagtatgataaaaatttgtaagattttgtagtactcgataggagggtgaagttggctgttactttaacttgttatgggctccaactcactggcatgtcttgtagctaccagcaatataagattccttcatctcagtttacctctgataacaaaacaaaaataataaaaaattaaagtttacacaaaaagagttcactgagagttttttggcagagccactgcaagttatgtatattttactatgttatatttctctacttgagtaagtttctttcaataagttattggaaataattgggtaaataatattttcgatcttgtgttttgtaaaagttattaattggattctccgttttgttaaacgataaaatagaccttatatttttcaaaatagtaaaaatatgactctgagctcaattttcaacaattttatttttaatataattaactttgagataatttttaacacgaacagatacagaaaatgtaatcaaatttgtcacaacatctttatatcagaatattattaaattttattttgacaaaaaatcagttcagggttctatttgtacaattttgaaaaataaagtgttcattttatcatttaacaaaatagaaggtccaattagtaacttttgtaaaacacagagtctaaaatggtatttaacccaagaataatttatattactacacctctaaaaatatattttgatagactattttatatgttttggcatttaagaaaaaattttaattttttttcataattctttacgttgtaatatttttttactaagaatttatgttgtaattatttaagaccacatataaatttttaaaaaattctgaagaatttataatgttaaaaataaagttaaaatagttgtttactatgatgccgtttagtaatactttcattttctaaagtaaaattttatttttgaaaaacaaaaatatatttataaccacttttattttaaatttttaaaataggaaataaaaatgtgttgtgtaaagtttattttcatatttattttttattttatttaagtcaggtctagatccgagatcaagttcaagttcgggtcagggactgggttcggtgccagggctagggccaggtttgggtctgagtctggatctagtcggaatccgaaatattgattaagaaaaaaattgtttaaaaaaaatattaaaag

SEQ ID NO: 388774 - DNA, 626 bp, Cannabis indica
ttttttttttttttgtcaaacactgataatacattttggtacgtatttctctaaaataaaagtatggaaatgcatgagttgatgagtagtatatgacccaccaacttggcttgtccaaccaaaacttgccatgtctagagtcaattaacggtaaagggaatatttggaaaaccaaacttggaaaaaaagtaaagaagatagtaaggggactatagtgttagcaattgtaatattgctatggtaattaaatattaaattttatttattttatttcaataaatattataaaaattttttaactaattataaagcgacattttatcataatactaaatagttaggtattttatagcaatactttactataaaatataaatgtattgaatgaatggttttagggagtgatggtccaaaggagagatttggtaaagtggattagcttgagaacgttataatataatagactttaacggaaagcatagcatttcatagcagcaaacccaacacattttcacgagaaaaacaattaaaaagccacctattggcccattgcactacctaaattaaaaatttgtaccttttatttatttatttattttcaagtttttctcttataaatcttttcc

SEQ ID NO: 388775 - DNA, 1667 bp, Cannabis indica
tttttttttttttatgaaaagtatttaggacataatatactttgttttgtcattttctctcgtctttctaaaaatggatgaattagatcttgaacatttgggggagaaagtatacttccatcttacctctccctactttcctccctaccaaacatttattctctctttctaactcttactttccatttatttcatttcacccaaaaaaaatttgtgccaaacagagatacttttctattttgtaaaaaaatcacttacattaaaagttgtaatatttttttaatatatataatttttttaagtttcatacacttatatggtaaatatttttttaacggattcaatactatatgttatatttttgttaccgcttctaatcccaatttcgttaattctttttaaatctgactaatctaacacctatcaattgattaattgtctactttcaataatcttttattaaataatttcaaaaactaaaaaaaaaaatattttattataaaaatgaaataaataaataataacatgattctattgtgtttttttctcgatatttcaacttctataattatttactgattttttaaaaataaaaaaaatcagttggactgttaatatatttataattggcattttagttaaccaagatcaacacttagcgaaatttattgtaacgactacaacaaaaatacaatatataaagtatttaattcgtcaaaaaaaataatagtatataaatgtatgtaattaaaaatataaaatattaatgccgtaaatatcccttaaaaaatataaaaatttcaacaaaatctaagtaggttgtgagctttaattttttattttattttgttgagcttcctccacattttttttgttacttgatttgttcttacagttacaagaatctccacaatgctcttttagttgtctcaatatcatgtggatggttgagtaattttgatccaaataataataagtataaagtgaataaaatataatagccccaatatatgtatattatgttgttgactttttattttaaacttttgtatttgttagttttatagttattagctatacaaaataaaattaagtcattaagtatattttactaatattttgtattattgtaaaaaatattttaatttaatttttcagctttaatttttttcggagcctcttccacattattatgagtatttaatttgtttttacagttatcacatgtacaaaaatctccacagtagtttccatatagaaaacaatcacaatacctccatatagaaaacaatcacaataccttcaagaataaaaatacattatggtttagaaattattagtaaattcaattttgatgatttctttaaaaagatcattaaatttcaaatttgggtttaattgatatatataaagagataattagcaaaatgaacttggaagattgaaagaataagagcttacttatattcaaaaggaaataaggtactcctactttcatatcgatatgggataatggaatgttaagaaaatgtgtacatatatttatattactacaactcaatcacaaaaactacaaataatatcaaaaatattttttctatttccgatactacctgtgtactaattgttgtataagatgtgagatgtcatattaattttaaaataat

SEQ ID NO: 388776 - DNA, 975 bp, Cannabis indica
cataagagagttttgtcacaaaaattaaataaatgggttaaatgtataaaaataaatacataagagagtttttattcgctgcaaattgctataatttaatttgtgaaaggttgtgttgtgtgcttttagtgacgtaaagtccaaatatagaatgagagtgaggagagaatcacaatgaaaggcttgtttcgtttgatggagttaatatagttgaataggaaagaacaccattgaggttgtcaaatgtaaaagattgttaggtgagagaaagagagtgatggtggatgaagcactacttcatcttaaattaaataatatgaaaaagctcttcacttttggcgtcttcaaagttgtcaacaccaactaccatatgggtaccacactacccttttccacatttaccataatacccttcaccttataatagaccctaaaattgtattatttttttggttggaaatttaagattgaatatatggttacaaaattattggaggaatttttcaattagaattaaataggtataagatttgggttaaaaaaaaaagagatagagtagtggtagtagctataggattatggctatagtagtagtaatagctaaagggatacaaaattaatggtggattttttttttaaatcataccaaacataatatttatgaaagaatattgttatgggacatcaatatgctaaatattactgtaagatagtgtcctataattgattagcgattttttataatttttgttaaagtaaaataaattaaacctgatattaaattacactactaacaatattatacctcgcaaaggtattaggcatcatgtgtgtccattaatattttttagagcaatttgcggcgaaacccccttatgttttgatttttatacacttaacccccttgtctttatttttggtggcgaaactcccttatgttttaatttttatacacttaacccccttatctttttt

SEQ ID NO: 388777 - DNA, 2091 bp, Cannabis indica
ttttaatttatgaagaagtatgtatgttttgataaatgtttttactaagattggctgggatagttttcttgattgcctttggaaaataatatggttttgttgtgtttcacattttaaaattgtgaataattattttatgttgaatgcaacattttagaacaagcctctgtttagttcagtacttgcgtaatttatgtaaatgtgagatcattttatgtatcttcaaatggcatccagctagtatggcatgcttagctgagcacgtttgactttaatgctttatgggatttacttgttgcactcaatatgtaatgcagattgctaatcaacttgatcgttttgttgcaagtcttgggagaaaacctttgaaggttttggtccaagttaataccagcggagaagtgtgtgagttcacttgatcaatgtattttgcaatttagttgtgaaacttgtaattatttctggagttttggatgtatttcttaccatggaggataaaatgactagtaacaaagaactttcatgtttggctatgcttctctgtaaatctgtttgtaatgagttggtgtagttttttatgtcatttactttgttttctccatgaccccatttagcgttgagttatattatggcatagctccaaaaattaaaccaattgatgatttagtcactatcctagatatgattaaaaatgtacccgaagagctgtagatttattgtccattcgaagcgatcttctcttagtttaaaatgaagtctgacttctgctaaataactgcagcaaaatctggtgtagagccctctggatgtgtggagcttgcaaagcatgtaagtttgagatgtccaaatcttgagttttctggcttaatgaccattggtatgctggactacacatcaaccccagaaaatttcaaggtactgtccacacaaatgacttgcaatttcttaactttactcccttaattttcagttgtgattcttgaactttgttaactcgaagtgtttcttgtgtcaggcattagcaaactgcagaactgaggtttgtaaagctctcggaataactgaagagcaatgtgaactatcaatgggcatgtctggtgactttgagttagctgtaaggatttaatcatcgatgcctatatcatttggatattctcagtcaacagtttttttttttccaacttattttctaggccttgctttgagaaggtccccaccatttcattttcattcacattcataaactgaaataaaatgaaaatgtcattacaatagaagattaagaattagttatccgctactaatcaatgcaagttctgtgtataattgcttcaactaattgaaaaattgaatgtttttgcagattgaaatgggaagcactaatgtgagaatcggatctacaatatttggagcaagggaatatcctaagaaacaatcctagttactgttctatgaactcgtagtttcatgataatttatgtttttgatagaactctcaaatggagagttgatggtttgagttgtattgtatgtgacctgaatggcttaactgaattgattagatcaacttgaatcatcactataagcgtgggtcaatatcttgcttactttttcaaaaaagaaaaaaaaatagttataacatataattattcttcttatgtgtaagtgtgtgttaatgttaatgtaatttttattattaatatccttgtatactcatgttatcttatcaatttcacatatattaataagtttaattcaagaaacaaagttttagagttgattggattttcttatttcactcttttttgttttggtgtgcgtgtatttaaatttgtttggtcatctcctttcaataatagaaaaaagggttatttgcggcaaaacctcctaaagtggacaggtttttacaactaaccccctaatctaaaattttggtggtaaaactacctaaaccactagttcgttagcagttagtcctttccatccatttttggctgttaagtgccaggttggaatgtccacgtgtacacagtgtacacgtggcacaattttattgatccacataattataatttaaaattaaaataaaaa

SEQ ID NO: 388778 - DNA, 721 bp, Cannabis indica
ttgagtttcgagattctggcatcgcgactttatggttcacttggaccattgacgaccatcgtggctttcgtcggtgttgcaccgagaggaatgatagagaaagagaaagttgtagagcgagggaaggtcggggttttaggctttggggattgggaaaactcattctttggtccgtttggaccaccgacatcgacaagggtcgtgcatgcgcactgtcgagatagagatgaagtcataaacaaggcaaggggattttttgggcctatgaggacagtgatgtgtggtcctctcggggcgtgggtgatcgaagcacgacatttccgttgtgctaatggccgccgcacaagtgcaaagagaatagagagagggtgtcaagtgaggaagaaagagaaagagaattagggtttttatcattttcaatttacaccctttgaaactaaatttatttttaagtttaattatttttatagttttttaaatttttttttatttacaattttttaaataattttttacatgtaccaataaaattgtgatcatgtgttccacatgtccacatagatttatacatgtatagtctaacatgaaacttaattaacaccaaaaagagatagaaactgtaaattgctaacggtttcatagttttaaaaatttaactgctaaaatttgatttgggagtttttttttttggtagataaaatggtgacattttattagcaaa

SEQ ID NO: 388779 - DNA, 1143 bp, Cannabis indica
tatatatttccctattccctttgtcagctgcacttggcccttggagggtcctagagaatcaaactcctatatttgtttatttattttatttatattttcagtaaaagtggaaggaaattattaattaagtaattaaatgagaagaatgaaatatataaaaataagaatatatgagaatttaaatagaaatagaaataaaattaattaaaatttaaaatatataaaaaaaattgataaaaagtttattaaattttttgctaaatcatgcattggaatattggaatgatctttcattctattttgaaatataaaatagtcattctatcaaaatagtagaaagaccattctattaaaatgatattctaatacttatattatttaatatacaattaaacaaaaaaatgaaataaaaaatattttctttccattctattttattttattaccagcctctaaccaaaccaaacactacctagtagtatagaaaagttagtttacctttagttttgtttattttttgggttgcaaacaaaatatgtgtacttttattttcttgctttactttgtacaaagaaaaaaagatatatataaaaattgagtcaactgggtttttttggctgaaaagattacatggtattgatcctttccccactttaggttgtgcaaactataggagttttatattttaatctatcttaattaattgcatcatcagtaaaatttcgagagttcctataaaaaagatagtaccacttacagttagccttcatgcataattccttttaaaagaaattatggtaaatttcgaactcttatataatctaaataaaaataagatggcaatcaaaacaatcactatacctgtggatatattgagtcaactattggtaatattatatattcatatatgttgctatatagctaggtggatcacaaagaacatcatgtgatgtatgaaattatataatgaatgtgtgttgtatccattttcccttctaagtatttgcatatgattagatcaataatggaaaataaagatctaaaagctaataagtgtgatcagaaacaatccaaaaaaaaaaactcataaatttcttaatgtatatatttatcaactttccatgtgttggccagttgtctacc

SEQ ID NO: 388780 - DNA, 625 bp, Cannabis indica
ttgacaagtaagcgtaaatgcctaaatacactcgggttccttaagtcccgcgcattccaacttacaaaattcatggttgtgagtggtgttgcttaacaacaaccgctggaaattcagactgctgctctcttgaatctgaaagattgttggaaacaggcagggccgaagaatagtcagtaggtgctgaagagtctaactaaccatgaatggcattagatcgataatgtttgagaacattcctaagtgattcagagtcgaattggcatttgaactgtttgttaggattgatattctctgagtcaacatcaaaggcaatgacaactttgcctttggaacaattctgatagacatttgattcaattgagggttgagttgtgacaacattgttgtatgaaggacaaatcgatggaaatggtgtagacaggggtggaaaacggtggaattctttattcaaagatgaaaaatcgtgtttctacaaatttctattatatatacgaaaatataaaactgtatacgtctgcagaagcagaatgtaattctgatactgcagaaaccagttttgcagtgacaaaacagaacaggcagaatataaaaatatttgcagaaaaataaataacttgacaca

SEQ ID NO: 388781 - DNA, 1229 bp, Cannabis indica
tatagaaaaatagttttatagaagataagtcttccaatgatatataataaggtagagttcatttacaatgatgaatatgagtcactgttagggattaaaacgaccgatattaaagttttaccttgaatctgtcctcagcaaaaagcatacgcaagtcacccatataggagaggctgcatattttggcataaagatcttcctgcataaaagagcagtgaggaaattcatgtaattccaaaatgattgagcattgacaaagaaacaaacctcaggaaacttcttcggcagaaggaggagagcagcagaaagtgcagcccttaaattaactgaatttaaattctcaacatctaaattatccaccagtatatgaacctgaggaaaaatgttttataaccccaagttaaatatcacatcgtgaatggaaaaacggtcccttaaccataagagtgcaaaggacacaacaaatctaaattagcacaagaacccagagcattgcaaatgatgctcctttaacagcaaattaaaaatattatgcaaacactctttcctctataaaatataattacacgagagattttcaattttaaaaaataaataaataaataaatcaaatattctagtttgtaaaaaagtcgacccaagtgcaatttaatatgaaaaactgtctagataaacgtgacatgacaaggcataaatgtaatgaaggcttcacgtctgcaaaaggattttcttttctacatgtccatatatatacatgtgtataggacgtgtatctggtggaaagttagaaactcctatcaattttttaaaattctatgtcgaaaataaatttaaaaataatttgtttcataaacgtatagaacaggcttcaacctttttgataaggtaaattatttaaaattttccaaaaatttgtaagaaatcaaaaaaaactaattgtactcttataaagaaattagattgtaacacctatccatgtgtcgaaaacacaataatgaattgctttgaagcctgatttaaatcatattttctgcacagtaaattatccaaaatttcataaaaacccgtaaaaagtcctaaataattataatgcacaccatcatataaaataagcatgtgccaaaaacagagacgcttctaacattgggaaaaaaatcaatgctcctaccaaagaattttcttaaatatatatatatacacacacattgatatagacataagaaaagagg

SEQ ID NO: 388782 - DNA, 948 bp, Cannabis indica
agatagctttgaaacttggcatcagtttctccaattaatcatcgagaagctctccgagatatagtttcatatcctttatctcagcatcaaaactttgctccgtacgcaactccataactttaaagagttgaacaatctcttcatcttccatggatgagagttaatacaatgaatctctcagtgtaatttctctcaatgaaagcaccaatggtagataatagtcctctttgagacaagataaatctcttaaaatacactcttcgaatcagtgtcaaactccaattgaaccaatgctttattttctgatctatatccaacaatagcctcacaatttcatatttatagtctttcacaccctttacaaattactaataagcccctatattatttcatagtgtaacacagaaacctttaaaaatacaattgttcttgttgatcaagatgatgtaaacagtaacttccattacagcattagtaattagacttatcaagatgatgaaacaccttcctgagatgatataactatctccaatactagttgaaatgtggtttgagaatgtgctccaagaaattcatgttcttactactataaacaatcttttagaggctatatttttcacaattttaaaaatatctgcctgttgaaaattgacatttaaagacaattattttataaacactggctataacatttgttaaaacatttagaggcagtttttaattaaaaataataaactggaaaaaatcccctatggcgtcggttatttgaaattaaatgacggcatatgtgtcatttatttttgacacttgtagcttatgccatttgttattcttaaataaccgatgccatatggttatatattaaaaaaataattaatttttaaatttaaacttcaaaatatctcaaattaataataatctattagaaaaattaaatattatttattt

SEQ ID NO: 388783 - DNA, 700 bp, Cannabis indica
tctgattgaattaattaacccaacaagacaaattccataaggacatgcgcgtaccatgtcttgtttaggacaaggatggtgtcttttatcctgacaacttttgtctcaacaaatattgtcttgacaactacagatagagagtttttttaggggggtcctggacgattgataaataattaatttgctttgtgaagccttatggattgggtgttttatctatatttctggtaaggaacacgtggaatccaggtcaccatcaaggcccattagtgggtcccaagaaagacaatttgggctaagcccaagctatataggaccttccaagaacgtaccttagctccgtggtcagatgatcttctgccagtgatagctcttatcttgaagtagctccaatattgtgatgccgaagagttagacaacatgttcctagaagactagtctggtttccctttttattcctgtgcacaaataaggaaataaatgctctctaaatctcgacagaagatcgtatcaagataaaaggggaaacttcctaaacaatgatcaagcaattaattcacgattaattgcccacagttataggacacgattttgaccaattcagttgtatctaaattgcctagtcagtagatcactcttttgtgggctgaacctcaactcaagttatgtaattcaatgtaaactccccagtagagggaaa

SEQ ID NO: 388784 - DNA, 1030 bp, Cannabis indica
aataataataataatttattgtatagaaacccattagacacgtataaaacgtttttaggtcattactaagaaaaacatctaattattactttgttacggcttgacttgttatatcttatctataaggaaaaattgggatctatataattaattaattaattaattattaatggggctaagttacctatttatttattatatgatatattaatattaagtttatgagaatgttaaatacatatggtgtttaattgtgtataattaaatattaaattttatatatattttgatttaataatgaataaatattattttagattctatgttttatataaatttacaattaaactctaagttttgttaagttacacaatgaactccatatttcacaaaatagtacaaaatactatcctataaattatttttttgtcgaaataaaactcaataatcacctaatcttgatgtcttatgttacattttttttatatctgttcgtatctaaattatcttcaaattagttatattaaaaaaaatatcgaaaatagctcaagacatattttgtaccatttcataagtatagggtccaatttattatttaacaaataaaaaatctgattagtaacttttttacaaaactcaagttccaaaatagtactaaatcataaaataatgggatttttttaatttttacgtttcaaatcattttttttatttttgcatatttacagaaatcaacatagcaaccaacacatacaacaacctaaattgcaattaaaatccacatagcaacctacatagaaactaccagagcaaccactagatcaatcgaaaccataaatgttttaaaaaaattaaaaaactgtaaatggggtaatccccataaaactaatttttagtttattaatttagtaaacataataaaataccaattattttaggatgaatatcattttagaccttgtattttgcaaaaattaccaataggacctctgtttattaaatgacaaaattgaccctatatttctaaaat

SEQ ID NO: 388785 - DNA, 616 bp, Cannabis indica
gtattgcttagggttttctacttgctaaagggttgggtcctcatgtagagaatggagatagtatctatgtgtttaaagatacatgattacctcgacttcattcattcttacctataacttcagtagatcaaaattctaaaatgctagtgaaaaatctcatcttaaatgacagaaggggttggaatttacgtttgtatggttctatttttaatctggttgatcaagagtggatggttttgacgaggatacaaatactcatgcaattttttggtgtagtatttttcgacaaatttgaaaacttttcaattttagtcttattggtagagttttggtggaagtcagttttcaacaagttctattaagagtttttgcagtgttgtcccagatagactttgagttgtttattatctctacatggtacttataaagttatagaaacaggataatcatggaaaggatcctcaacatccagatgtgatagtttcaagaattaaggtgtcgtttggttggaggtaatgaaattgaatggaatggaaaggaaataatttacattccattcatttgtttaattgcattttaaagtattggaatgtcatttccaccattttggtggaat

SEQ ID NO: 388786 - DNA, 810 bp, Cannabis indica
cttaacatatatgagatatgtcatttgaattaccttacaaaaaatattaaaacttccttcatatattttttttaaaaaaaaatagaaacagttgagactatagtgatcgtcgaagtttattgtcggtactggaaaaatcgctagagtatgctactattgccaaaaagtcaccggaattgggattgtggccggaaaaagtcaccgaaaatttatcggagttgttacagtcaccggagtttgatgtcagagttgtcaccagagttagacgttagaatctgactaatagaaaccaattacgtttatcagctagtaaaatatctgaacaatgaaaccattttactaaaaaaaaaagaagaagaaacatttaaacacagaaaccagttatttagtacaaccaacaaataaatagaacagcagaacacctaaaaaaataatttcaaaaaccgcaaataaaaatataaactatgaaaacataaattgaaaaaaataataagcatagttcaaaattgaaaaaaagtatatatatgtatggaatacttctaaatgggtattacccattaatgggtaataaacaaatttaactataaatattaatttcaaaaatatgaaaccattagattttgttccgatagcgaatagctagtaaaagagaaatttgaatttctatacttaatttagctacttaattaaagaaaatatcaaaaaaatacttctttttacactatatcaaaaatatgtttatatgaaaaaatatttaagtcaaatatattcaacttttttttatcacttttttgtagaaaaacttttttt

SEQ ID NO: 388787 - DNA, 665 bp, Cannabis indica
ccaaaccaaaaagtcggcccaaaaacctatattctgatgggtcgactttttttcgaccttaaagtggtcgtgcatgtattttataattgttgtagtgataattattatgattaaaattaaatttgtgaaaatttatacctaactactataatatttggccacaaaaattttataatgtgattaaaaagttattgttaaaggtaattttttttagtggatattttttacctgtaccaagatcatgtttggtgccaataacaaggtcatgagctgtaacatcatccattgatcctttcactttgtgcttttggtcatagattgtataccttatagtcacctatcatatattcaaagaaaataagtatatatatttgtttccattcaaaaaaaaaaaaaaagtatatatatttgtcaaatatatatatataattaatgttttgtacgtatatagctatatatacataccttctgattgacatttggatgactttgaccttgaccataatatggtaataacttcttataatacaccacagatttaccaacttgaagctccttaaaaatcattagtcaacgacaaaagttttgcctgtaaaaaaaaaaagaaatttgatcaattaattctagacttctattacaggatatatatatatatatataaaaat

SEQ ID NO: 388788 - DNA, 1034 bp, Cannabis indica
attatccttaaataaataaatgacagttgaactattataaattggataaagtacaactttatttattaattggtcaccattttgaaaataatatctacttaatttttttaatttaacatagcaaactatgtactcatctggatccctattaaacattccacctctcatcttctgcggccaaagtttctgaagaaaatataattagttaattaataaaatatttagctttttgaataaaacacatgatacataaaaagaaaaataattaataacacaaaatttgaataaaataacatgtaactaatgaaaaaataaaatagagtgattaaggatgatagctagaatgattaatttagcatataatttatctgatagtcatgtatattaactataatagttattatagcatgcatcttattatttttttaaaaaattatgaatattaatgtacaattttcgagaaaatggctcaaacgagttacaagtatatttatattgtatttatatccatacaaatgactatattgttcttaatatttaatgttaattataaattattcaaaaaaattcaaaaaaatacaaaaagatatttctgttatagctataatatttattattgtataaaacaaataaagctataatttatgcaaaaatgtccataaaaaatgtccttacaacaattggacatttactttagcagaacatcttttatttttttaataatttccaaaaaaaaaaaataaataaaaataaacaaaaaaaaaaaaaaaaaaagaagaattacaaaccttagggatgacaaatattgcttgttcatctaccctcagttctcgaatgccaaagtcaagccctgcatgcatgcatgtggatatttgcatttaattataagaaacatttacactataaaatattattacaaaaattagtgtaatcctataataataatcatttacagtaattaatgtgttttattattattattattattattttgtaatgggtattaaatttttacctttaccaaaatcatgttt

SEQ ID NO: 388789 - DNA, 931 bp, Cannabis indica
actaaattttagggccagccctgtcgggccaccatcgaacaatatcttacatttatagttagcatcggccaccatcagattactatcgaaccttcgtcttcaacctttactcattttaacaatagaaaggcatcaagccaccgtagaaacaccatcgggcctggcaaaaaattaagctttctacccaaaactcatgtccgaccgttttttacccttagatctaacatcaactcacagataacagatattaattatataatttattcctaaatcaataaacttataataaaatcatacattttaaccctaaatcacacaaaatacaataaaatgaaatggaaaacttacattcatggcgtggtagtcgtgattcggagatcctaagtcttgagttggtagtcgttggtgggtagtcttcggttggaggcgtggtggttggcagccgtgggttgctatgtgcgtgagaagaagagagcaagagagacagagagaatagaggaagagagagagaggaggggtaagttatgagaagagtacttttaaatttaatgaaaaagtggtatatctaattatttttgatatacttaagtttagtataccaattttgttcaaatacatcaatattaattcaaatttcttttataaaaaatgtttaacggtaaatgaccatatatacaatataaaattataaatatatatataagatttattatacattaaagctggacgacacctatttgctacacctttagtttattttaagaaaaaaaactttaaaggtatttcagttgagaatcgaacccacaacctcacaattggtgaaacaagcgcgtacttagggtcgacttaaggatggggcaaccagggcctaggccctataatattaagggcccaaattaaaaattagtatgtataatatgtaaaaaaaaaa

SEQ ID NO: 388790 - DNA, 1138 bp, Cannabis indica
atatatttatttacatatatatactacaagtatatgttgttctctctattcttttttagtttatgtatgtttgacttgaaatgttgtctttgtgtttgagaaaatatccgtgaaagaccaaagcttggttgttccttaatttgtgctaaatatcatattggcagtttggagaataacaaattcaaacttggaatatatttgttatacaatttatttgtttcaggaaagttgttttcttttgtacttgagcctactttgatgaaggtcagaaaatgaagttattgttactttacatcaaattgtagggtagtcttgtctaatttcaaggcaatgaattctggcatatgactagagctttaagattgggcatcaatgataggtacccttttctcttatcatttttaggtaaaaagcactttttataatttatgtgggttcaactcaaatacttgtgattactcacataatatatataagggtagagcttttgaacggaaaatgagagttagtagaaggttgtattaagaggattgaccgttatgggaattatttttctagtattgaaagatcccaagtttattctttcacagaacacacaatggcatgtatctgcaacctttggtgagttttcaaccatctccaactgaattagctcatcaaaatgtttatgtagcttgctgaagataccatacatgttgttaacgcagatttttgttaacaaaatttgaacctaacagtgacaatttcacacagaaaaaataaaagctataaaataaaaagtacaaacacacaggatttttatgtggttttgcagttaaaattctgcatagtccacgagtcaatcttattcggatttttgattattttctcagggcctcttttgtatgagtttttcggtccattttttttttatctttctggccattatttataatcacatagtggcccgttaattaaaaagttgactgtaatctttttacaacgatcatcccctaaaatcatgggatttgattacatatcacgttgtgtaaatacggttatgattggagaatcatatagtgtgatttttctgcttttatcgggtcaaaatgatcgtgtatttaaacacgtctttaattgttgtatccagggatgtctc

SEQ ID NO: 388791 - DNA, 923 bp, Cannabis indica
agaagaaggattgtacccaaaacagatcatgaatcatggctccaagaaacaaatacatagtacccccaaatatgaaaaagaaaaaaaaaaaaaaaaagacgggggccgatcttcgaaacgggccattgataaactttatccgattatcataataacaaaacaatttcaagaagaagacatagaaagggtattacctctagcttgttgaggaataactactcttgaagccatttcttcttctaaaacctagaagatcttccaaagtccctgttgaaaatcttgattggcaaagacacaagaatgatcgatcttcttctaggtttctctctttatctttagagatcgctcccttaatgaacacgtatctctcacacacaaggagttctacgaatgcggtaaagaaagagatatcccttttgaagctggaggttcagacgacgaatcgttccaacggtcgaatttttttaaatttgtgaccgttagatctgtgaccgttgtgcgattcaaaagttaccgttctgtcaaaggccaatataaaaagaacttgggacatcttagcagttaacggaatcaataggcaacacgtgtatttttttttaactaaatactataaaccagagcttgttttcttgaaaaagaaaaaaacctcaatattagggatgcacatttttccgacggggatgggccccgcggggacctgtcctaagcggggattcccccgtctaaatggaaaacggggcggggacaagatcactttttgtccccgaatgttaagcgggcggggacggggatcacactctccgccccgacggggacccgtttagtattttatcttatatttttaataatattttataatttataatttatgtttgatttttttagtatattagtatcttttttatgaattttaagttatgttt

SEQ ID NO: 388792 - DNA, 1598 bp, Cannabis indica
gaaagcaatcctacccgctctatcttatcagaccacttccttctcacaaatccctcaagaacagcaaggggcggattcgcaccaagaacatagcatacaatagatggtttccaaaaatcaacttcatctatatcatcattagtaatcttaaccctgcctttcgattcttttgcaaacaaactcctaatcactgtaccagatctcaaaacagggggggttgagtttttaccttgagaaatattggctgagcactgctcgttagctgtcaaaaaatgcccaaagtctttccttatgtcctcctgctgcaaatcgaacgcagagatgaatccagagagagcggttctggttccagcaatctcgcaccatccgtcaggtcttcctcttcttcctgatctgagaaatccatgggtgcaattcccagatagcgtccatagatttcctcttctgcacatcagatgccgagttcggtcccttacgtttcgctgccatcgtcaaattcgccttccctcgcccccttcccctcgttttcgccatggctccagcaagttgctgcttcgagacgagagagagagagagtaaactcagaaccttcctatttgttattatattttattgttattaatgttgattaggtttgaatataaaaattcaattttaaaattgacactagtacattaatatttctatttttattatttaaagatgaatgttgtttaatattttgatattaattcaattaatcttctcacttttaagttatatataccaaaaatttaagaaattatctacattcagcgtccagttttataaacatcttaaattatattataaaaagtattatttattattttaaatttaaataaaaaatattttatatcatttttatttgtataatcataaaaattcttcttattgtttaatttttaaatttaactaatatttataatttttctttgtataatatgaaaattattatataaaactttcattgtcgattaataatgacagataatataatataaatatatatatatatataaaaagactattactttacgattttttttattataattttaaagagatttgtttataaaaaaatcgatacatcatatagtttatttataaatttttccaaaattttacaatttattaaaattattttgtacatatcacgaatacacattaatagagattttttaaaattaaaaatatatatataccgttgatatttttatttttgttaaataattaaggatttataaaatttgagaaaccatttttgttgaccaatattttttttttagaaatagagaatttgaaaattttagaaatatatatcattgatatttctagtttagttttttattttattttatttaataataataaatttataaaagtaaacaaacaataacataataaaaagatttataataaaagaaaatatatttttaatgataattaatgctacaataacaatcttgctaagagcatctccaatgagtacaccaaatttgatgttacactatcaccaaatttagtgttaaaaattatcttctctccaactataacaccaaaaattacactaaaaaata

SEQ ID NO: 388793 - DNA, 781 bp, Cannabis indica
acaaccacattgatggtccgcttgaattggagagagaggagaattcatcggtgattcttactggagttgtgtacggtgtcgatgatcttttcggcaacaccatagatggcagtgaagctcatctccgtatcaatctaagtagatcgcatcaaatctcattcgatttaccacgaagaaggcagctcatagctcaatgagagcactaattgttagataatagtcctctttgaaccaagacaaattttctaaaatgcactcttcgagtcagtgctaaactctaattgaacaaagttttattttctcaatttctattccataatagctacacaattacatatttatagacttttacatcttttacaaattactaataacccctatagtattttatagtgtaacagtttcacacccaatcttcaaaggaatctcggacaagccagcatcacaattcaacttaacatgtccaattgacaaggccacccacggcaaggccttaggtcccagccgcgaagcacccattaagcacacctccccttcaagcatataattttttaattatgaaaaaattgagaaaatttttactatgcactctttaaaagagatgtatcgatgcattcctatctattttggtatctgaaataattatttagtcaaaaaatttttaatggccatatacattagttatttaagatattatgtaaaattttaagaaatttggaaaaatttaacacaccaaaaacatagttcaaatattgtgctgcacgtgtgtgaaataaattgt

SEQ ID NO: 388794 - DNA, 1543 bp, Cannabis indica
aaagaagaagaagaatatagtgttttcgttttgtggttgatcctaataatatggaaacttcttgttaaggttgggagtatgtttgatctttaaattattcaagctaaccagttgcttactaacaccaaggagttgctcaatctctttaatattgtttttatcagtaatcacaataggttcacccctgtcctttatactcattacatgtctgaatgcatctagtgttattgggatttgtcgtccatatatgtttagagttgatgccgtagtgtccaccatcccaacaatccattaaagtaaagaatgtttgatgtatggaccatcatcccttatgcaagatccgaaatcggtagcgattatggtctcaatctactcaggcataaaacactcataaattctaaaaaagtcgatcaaaggcacaccttccatgtactttcgattcattctccacctcttcttgttccccatcactgttgtgctccactgtttctcctcctttacatcggttcttcttttctttaatgtttcaccaacctcagtcttttctgcttccaattttttacgcttattctccttttcaactctttgcttctgtctcaaggcatgatcattatttaagataacactctgcaagatgtgattaaatgttttattattaaccttttaatcattgttacctacatactgaataatatattttacaaaacagagattgtacgtaatgtgaaatatgcatacccactatattacctatatagtactatagataagtgtcaacctgggcgctggatccccgttctggccgttaggttgatccgtatctcccctaaaagcacttgtttcctcattttggatgaagacaaagaaaattcttgggatagttcttcagtattgcggatggaagtgccccatgtagacaatatgtcaacctgggcgctagttgcatggggcacctggtgctccgggtgctcaaaattgaaagttctttgattttgatatcgttgccataaatatgttcatgacaggtctaattcatgtcccagtacaaagtttgactcattttcactaagacgggcccgtaaaccaaaatcctagttgggttgtcaacttgggcactatgcactcgtattgacttccaggttattatttcgtgtattttcaacttccagaccttagatttggattctttatgtctttgtggtacagaatactaaaagatattgagttggaaacaacttagtgggatccaaacacccattctggagttctcgaagtcaacctgggggcaaaactagggactcttcctaggtcgactgccatgacttgagactactcaactttgggatgttttctttcttgccacgtatcaaatattgatgtctgcgttgttggaaatattttaccaggatctagatttactaccatgtatgtttcattgacatcctaatatgaattctaaaacaatgaaataaacacatataaagtttaggaaaccttacattgggtacacggaatataatgactcattccgttcagatctcta

SEQ ID NO: 388795 - DNA, 1045 bp, Cannabis indica
ttttttttttattatatcgtcgtttatattttttttatatcgtgttatgtttaaacttatatttttctataacatatcgtgagtgtgtgtgctggtttgtgttgtgttgaaaaaactaaatcgactccagacataatcatagtatttgatttttttaaaataataataattcctcatgatgggtattattagttgggttgttacaaaatttatgagttttataaaaattgtgaagctagggttagtttgagatggaaaaacaaattatagctgccaataataataaatgtttccacaaaaagttaatgcttctttacaataattttccgataacatgaatgtctaaatttgacttttaagtttgaatgggtcaagccgaaaatactggtacagaaaccacgtgagagtaatagctagcggtgttattggatgagtatgactattggacaccacttaacacctttaagacgtgtcgcattgtgattggctgagaatactccttaaaaattattatattaaattatatgagacctgatacttaattagaccaattgcgatattgacacgtaaaagggtgcttgacaccactcgtgccttttagcatttcttttattggattgagtattgagcgagcgtttggggtatgagtgtttaaaataatttgattatggggaatattataaaggagaacatgatcataggaaaatgtgtaaactgtatttagttgtgtagggtaatatataatcatatttccgttaattgaattacactgtttgattgagtacaagaatcttatatattattttaaaaaattaaaataaaaatattatttttattatatctatataaagttaattatacataaaaataaaataattattcattaaaaaatatatatttattaattaaaaaatattaaattttattgtattttttattaattaaaatgaatatttctatatattttatcattatgttttttatttttgttcgctatgtcatttatgtacaccatcctcataaaatttacgtataatatatatat

SEQ ID NO: 388796 - DNA, 892 bp, Cannabis indica
  modified_base (61)..(61): a, c, t, g, unknown or other
ggatatgacaaagctagacttatttttatagaagtgaatcggtatccgctatcttaaaagnggtgacccaatggcaatggaaaagactagtgggtttggactaaggaagcaaatcactaattttctactaagtctacctacttatttcaagcattggacaaggctccttagtgtgatgttgccccttccttgtggaacaagttgtgtaacaggaaaattcttgaacgccataaaatcttgtggtagagcattctgtctaatgcgcttcccatttgcaaaatcattgggcaacaaatgaaaattgaagatacaacttgccttatttgcgggggagaggatgaaaccatagaacatctcgttctgtattgtaatttgtcttaccacctttagtgatcgtcaccgtggggactcattccgatcaatgaatctggagcaagaatgtgagattgaatgatttttttatggaaccttaacataagaggagctaatgctaatgagattttcttgtatgcgtctattgttgttgacgcgatttggagagcttacaatgataaggtacataacaacaatttaaacagcatacaacattatattgactctattaagtattgttatgcagatttttcctgttgttaccactgagactggatggtcccccttccgaaggactggattaagatcaattgtgacgtgagaaatgggagggagaccatgtgtatgacaactatggctcgtgaccatatgggctcgcttgtgtagatagctgtcaacaacgttcctttttcaaatttcctcattggtgaagcttacttgctctagagacttcagtaattaaccttaggctacaattttgtgttattgagagtgattcaaaaatcaccatcaatgcttt

SEQ ID NO: 388797 - DNA, 608 bp, Cannabis indica
aataatatatagttttttaaaagaaatgagagaaaattaaaaatgttattaactcttcattatttatttcttagtcattaagaggaggttccttgtttgggcaaaaattagaacttgagacagttagtgttgtggtggaccaaatttttattataattagattaagactgttagctgagttggtagaagtaaagaagtatggagaccatttttttaagcatatggagaccatttatttatatctaaaatccttaagaacttttaagggaaaattcttagaagggtaaaaagtagtttttctaaatagaaagtaatcatatgatattattggtagtttttattctttaaagcaattagagtttaaaagttcatgattagatgctctaaaataagattggtagcttttgactcaatttttgtcacccaaatatcttatctttgaaagattagagaagaaagaaaaagtggatgagttttgctatagattacatcatcctaaaattatttaacatatggtgaatgtaacgcccccgcttcaagcctctattgggtccttacacccactgaataaatggctcttatacacgagtacgccactctggctgctt

SEQ ID NO: 388798 - DNA, 522 bp, Cannabis indica
aaggcctttgtgtaaactatacaagtgtgtatatataactattgtgttaaagattgctgctaaaccaaaatttggctttttcagctacttttttggcattacacttgaaattctatgtttcaaaatccactttgtttgctgctgcatttggttgggagtatccatctttgaattccaaagctgatcattcctattttgccaaattgaataccccaaggctgcaattgcagcacaataaacacgttttctgaattttgagtattcacctctctcaattcttcaaataattcctcacaagctacttgaatttatcctccaatcaagccagaatttcacctgctgcagagcttcttgggagaacctacagccaaagaataaatgctctaatgtctctgctgtcatgttgtagaaagagcagttctcatcctccagaattttgaattttgctagcctttctttggtcttcaatcgattttgcattgctaaccaaagaataaaactgtgcttaggcacattgagcct

SEQ ID NO: 388799 - DNA, 951 bp, Cannabis indica
tctcaaaatgctaaaagtatgcctatacctaggaatgtacctacgtgcagatgagggtgagcgccacccctttaaaataaaaattataacatatatttttaaattaattacatcatatagtataattaaaactagcaataaaaaattaacaaagggtttgttagagtaaaattagtactttacatatgtgtgttcaaataccaaagtttatttatttttttttattttataaaaatgctcatgatagaaattaaactcctaccattaagaattttattaaagagcttcttatccattgacaccaaaatctatatcattatgttttagctttaaattatattaaatactttaaaaatagggcccttaaaaatacaaattttaataatttttagcatattatattatttaaaataatacttagtcttatagctcagctcgctactgcccatgcccctaccaacttaaatgtaaacaggagggcggggcaaggacagagatttctttcctatttccatacatgttttctaaatttactctatattcacctcaatacttatttaaatcaaaacaaagacgggaccagaattacctgtcaggaaaaagattcctattaagtactcattacatatatatttttaaaagaaaaaaataatgtctcaaagagaatttaaaagaataacaagcataaaaactcattaacacaataaacataagtgaaatagtgtgtatagtaaatagaattaataaatacaaaattagtaatcgtaaataaatggtttaagtgtcatttttcttttaaagcagttaaatatgattattaatatgcatcacctcgaacttttttatgaaaattgaaatatctcattagtgtaatcagtaaaaaaaaagcatgaagttattttaattgtagtattatgattttaaaacttaaatatatagggaaatttacac

SEQ ID NO: 388800 - DNA, 1025 bp, Cannabis indica
gcggtgcacagttattgcaacccaactcgtgggaccaagaacacgtgttgcccaaaggtttcaccttgcaacgttggtgtctagacaagctgatgggcaaaaaagagctacagagtacacacactaccaaagtttgatgcaagggaaaagatctgatttggtgtcagaaggtgtgtaatcgtcgaatttacctccggataggacattcttgactaggttctaagaacatctagctaaggctttctcgaacgagactagcctgctatcatcctgaagcactcatgacttctgatccttctatatagcatttttattaataggaatcccagagcccttttcacccttactaacaggaagagcctccaggtagcctctgatatataacaccttccgtgacgccaaaggacagagggtatacactaaccaggcataatctaacgtggcacccttccgcgattgccacgtacacttcatccaggaatacagataacatttatccccaagctctcgagactcatgagtactttttccacattccaatgcttttcttatgtttctgattcgttgaccaagtgttggaatgtggaaaaagtcttccacattgcctcaggcatccaaagagttatcatgttcagcgatattacttcaattttctgaagcgtggtgcttatttagtggagtcatgaagctcacgcttcgagttttaagcacgtttctcgtgggaagagaatgacgactgatcttgaaaagatgccatgcttctgtcgcattggagatgcagccacgagatgatgagtaataaatactttattatttttcttcatgtccattaaatgaaaacttttcgagtccctagtcgttggatgaggtagacttggatgggatcaatctagaccatttatttcaaaatgtttgaaccgttgccacccatataaatagaggtcttggcgattgaaattacttttccttccccactttagcagcaattttttgttgggttttatgccataaataaaactccattt

SEQ ID NO: 388801 - DNA, 769 bp, Cannabis indica
aagcatataatatcaaatttcctaattaaaatttatttaattctagaccaatacaagtatcacattactattgaagtaattaagagttggatcctacataatttaccatataatttactctaattattatagaatattgctaactatttttaagcgcaagctttagatagtgatgagcactattggtgccttatagcaatgctaacaaaaaaatattttagttacttttgtccaaaaaaaaaaagattaaatatttaattccaaagcactatcaactatttctcaattttattctttaaaatacattaaaaaaaatataactttttttattttacctcaaatttttacattataattcatcaatttctatatatttttactttatactatttaaatattatatatttagattatttatttaaataaaaacagatgaaatgcgatataataataataataataataataataataataataataataataataaatttgaggaatgagtagtgtgtaggtgcatttgaagaataaatagtgtttaactaaatttgtagttacatttgaaaaataaatagtttaactaaaaaatgagccatgcaataatttttaaagggtaggtccgacacagcctctaggttcgatattttcttgtcatgccttactcgggccaagtcattttcctatacaggtttgaattcgtgctctactttcttacattttattttttataattgatgagataattattaaactatatgtatttttt

SEQ ID NO: 388802 - DNA, 1796 bp, Cannabis indica
ttaagtatcttattgacggcttccgcttgttcattttctgtggcctcgcgaccgcgaagaaactcttaatgacttcgtgttggtcgcagaagtctgtgaactcatcacaatttaattgttttccattgtctgagactatcttgtgaggcaacccatatcaacatacaaagttctttatgacaaagtccaaggctttcttggcagttatagtcttcataggttcagcctccatccatttcatgtaataatccaccgccacaattgcatatttaaccccacctttacccgtggggagggacccaatgaagtatattccccacaccacaaagggccacaggctaatcattaaggtgatttcgttaggcaaggctcttagaatatttgaaaaactctagcatgggttgtatttgaggaagtagtcaatacaatctttcttcatggtgggccgaaaatacccttgccttagaattttcggtgtggtctccacagaatccctcgtggacctcttgcacgatccgtctagcttcaggatccgacacaccttaaatacggcatgcttagcccccttcgatagagggtaccgtcgatcaccaagtatcggtgagctcggtactgtacctttctagacacagtcctttcttgaggcagttctcctgttgttatatacttgatgatggggtccatccatcttgatccttgtttattagtggccacttcctcttttggcataatactaggctctgtgaggtattcaataggtaccacccccagcttttccactttgctggtcgaggctaacttacccagacaatctgcatgggcatttctttctcgtgggatccgttcaatcttatattccttgaattcttccaatagttccctgacaattgacatgtaagcgaccattttttcccctcacatttgatattcttctgacatcagattgacaaccagttgtgagtcgttgtatatctctaccctgttggcccctacagccttagccaattttaatcctgctattagggcttcatactcaacctcgttattagaagccaggaacatgaacctcagggtagcctggagtcttaatccatcaggggatatcattgctattacagcccccgatccattcttatttgacgcgccatcaacatatactttacatgtaagcacatccgaagctggcatattagcgttagcctcaatttcattgcactctacgttaaaatctgcaagcacctggcccttaatcgatatgtgtggaatgtattgtatgtcaaattggcttaacttcatggcccacttaaggagtctccctgaggcttcaggtttttgtaagatttgttgaagtggatggtttgtaaatactttgatggggtgcgcttgaaaatatggcctcagctttctcgatgcaatcaagagacagaaagctagtttttcaattagagggtaccaaatttctacccctatcatgcatttgctgacgtaatacactgggtgctggacctttccttcttcttggaccaaagctgaactaaccgcattcttgaagatggctacatataaatataagtcttctccgtgaatgggttttgacaacactggtggttgggccatgtgctctttcagcttcttaaatgcctcctcacagtcttcagtccacttaaacttctaacattttttcaaaatgtctaagaatgggatgcacttattggttgagcgggagatcagggccggccctgaaacaaagtgggccatagggaaattttttttttggcccttatgttagaaaaaat

SEQ ID NO: 388803 - DNA, 1929 bp, Cannabis indica
agatctaattcatggcaattctcttgaatctctcagtattgttggttgccattccattactgaccttccttcttctcatcagcccaacatgatcacaaacctgaaacaattgatcattaacgattacacgaacctaaagcttttaccagatgatttacagaacctaatacatcttcttcatattgaaataactgactacctttgatgatgctaaaatctctaagactgtccaattgttggagtctcaactccttaccaaatcatatgcacaacaacctcacatctcttgaagaactatccatagaaggttgctcaagtatttcttcatttccacagggtggtttgcctgttaatctgatctctctgtcaatcttggattgcgagaagcttaagcctacattcgaatgggggctgcacagactcactcatcttacaaatcttgtagttggtgtctttccctgatgaatgattgttgcctagcactttatcctctcttcaacttcaaagactgcctaatcttaaaatgcttcctaagggtatcgaaaacctctcatgtcttgacgatttggaaatatgggaatgtgacaaccttcagacattgcttgatgatcagcagcctaagatgcttcagaattttaatttctaggatgaactttaattatgaaaagaatttgaaacttcaatggtattatttttttgtgataactaactatgaatgtatagcttcttcttcttctttcaatataattatttgagctacttttgtctatgtatttccatcacaggcaacttatttttgttggtttagtgttgtttgaatttgtgtttagtgatctgattgactttgaattctagctctttgatgtacagattgagcttatgttctcttttagtattttgacactcacaatgtagcttgagcaaaacatattctggcataaaaaagaatcattgaattttatgcataactaattaatttggggtgtaatcattaattcttgggatgcaagtattctttatgaaaatggaaccgctctctttattttttccttaatttgtatagactctactaatttctctcattccaaaatttaataaacaaattaatgggattcaattgattctaatgggattcaattgattctcattcccctttataatgaggaattactgggagtggatatcaatcatataagagaggtggaatcggtaaggtagaataatggaattaaatatcattaatagtatttaaagcatagaataaaaagtgaaattatcgttattagaaataaaactgataataataaatgaatataaataatcgcttaataaaaaacagttaaatgaaatcccaccaagataggcccaaaattaggttaagaaaaattcttaagattttcccctaaattaagggaaggattttgaaaaacaattaaactccactaccactcatcacaactgtttaaacatatagtacattatccataaaaagggttgtaataataaacacactgattttcaattgatttagcaaaaattcatgaaaagacaaaacaaaatataagttcttatcctttaacaattagattttaaatgataaatagcatataatttcgactgagaagagaaaatataccttgattagagcccccaaatcttcagggaagaaggaacacaagaaaaggaaggttgaaaagaacaaaaccagaatagacatctccatgattacatagagtaaaaggtctgtgaaaatactttcaaattcatttgtttagtaggaacaaactaaaaagttaaaaaggaaaagtagatgtaaacatcttaattagttcagattattctttcatagttatattagttaatataacttattctgtcattgataaagaataaatgaaaagcaaagagaatacttccaatttcatttgt

SEQ ID NO: 388804 - DNA, 955 bp, Cannabis indica
atagatacttatactttgagctaaatttagtaccaaaaaaaaaaataaagtgaattgatggagcaattttcatattgaaaagaaaattcgccattggatgagggttcgggattagtgacggtcagttggtagaagtagccttgttgtgtgttctggtcaagtggatctaattttggcagaggtggtagggataatagaagcgttaagttggattaaggctaaagaatgagcgagtataaagtttgaaaggaatttattaatagtggttcaagtcatctctagttcattggatatgctttcttcttttggttaaatagttcatgaatgcaagattttattagcttgatctttaacatttattaggttatgttttgttaataaagttgctcattgtgttgctcctatctattgtttttatcgagatcataaatttagtatggagactcctctagctaaacttgtatctatggtaatggttgatgcttgttgattaataaattactattctttaaaaaaaaaaaaaaggtcataaatttaaaaatttgaataaggaaaaccataattttgagcaaatattttataaaaaactataaaattataatttatttatgttttaagtttatattcaatataaatacaagggagtcaatattagttaagttttttttttattattaaaaattagttaggactgttcttagttagaattatgttttacacatgtataattgtatttatcaactaaatttagttctgattagcttgtatatattgagttatggctcaatttgattcactaataaaaatacatttttcatattctttcttttcaatatggtatcaaaataattcttctttttttttttttgcttccacacgttttgattttctcttcgtttcttcattttctctgttaatgaaataaaaatagtgttatattttaccaggatcttag

SEQ ID NO: 388805 - DNA, 1401 bp, Cannabis indica
aaccatgtcaatagacaagacctgtgtcatcattctataattttaagagtcatgaaattgaataataaagaattttatatgtaaacacaaatttaaatatagatcattttgaaaaatatttactctgatggttgtgtgccgaaagttaatctaaatttatcacataacaaaagttgtccaaatttaaaacatgataaaaattttatactgcaataaatgtactatttttatatttctttttatgtcattttttaaatttttattattaattaaatttcgttattgcattaaattataaacatttaatattcattttttattattttacataataaaattaatacttttaataattttgatgaaaatatttacattaaattttacaattatgtattgaaatacactattaaaaattaatacaaatatatcatacatttattttttatatcaaatataacacaaattttacccctctctctgtaagcagatcttatataagggtgccatgaaagagagagaagggttgtgatgagatgtagtaaaagtattcctacattcgtgctcaagcgaatatctatgttggttgttcctgaacgacttaactcatagtggaacataagtaggaactggagtagaccaatttatctgaaccaatcaaacactggttgcattgttcttcacgtttgacaatcataatttcaattttcatgtttgacaatcatactaactcaattgtaacatcttttgctaaaaggtaacacttttttatgtgttaatattacttggtttaactaagtatcgaatcccatatatagtttaatataataatttttaaggagcatcgctagccaatcgtaagacgacatgtttagaggtgttaggtactactggtgtccaataacaatgctcatctgtttaaggtgatccactcttctcactttgtcagtatgtcacgtacattgatagctcggattggcttctattttaaaattctattttgttagttggattcacggctttcaactatgctgacagagtgagttgattcattattgttaccgaaagaattagagagctaaagctaaacatttgtcaggaaaagacttagagagaaattcttgtaactcaattgtgttcttgttgcactcaattgctttttctgtaattctgtggtgacatttctaatggtaatggtagcatcttttaatcatatatgttaaaaatttacacattatttaaaaaatataatattttattttatctctctactacattaattttgacacttttatttctaaaaatactctaatgtataacactctttaaaaatagggaaacttacaaaaatactgaaattctggttaacttttacaaaaatactgtcacacagaaatcttttca

SEQ ID NO: 388806 - DNA, 1208 bp, Cannabis indica
ctgataatagacgtatcaataatactacatcaattttagtcttatttacaaatatttcatatggacaattcaacgaatgagattaattagtggacctgtcctgttacgtaggcctcaagtatgtattgcaaattgaggccacgtggcaacgtattatgaaaatctgtgtcgtttctattttccatctcatttttcactcacacgctcatctcatctcatgtgtcgttttcttctacatatcattattaacaaatcaaagccgcatgactcaaggcttcggttcttctagatgaataaaagattataggctctcattacactctttctctactgtttctccaaccactcactaataaacagcaaccaatagtgtagttatacccttttagtttttactcttataaatacccattattttctacctcaactcctactataccaaagaaaaaaaataaaataaaagataaagaaatggaggtctcatcatcaatcctttcactgtgtgctagcttagttggtatactaataggtgtgacatggatttggagggttgtggattgggtatggttgaggcccaaaaggcttgaaaaaggccttagaaaacaaggctttaaagggaatccttacaggtttctgtttggagacctgaaggaaagctctaaattgatcaaagaagccacttccaaacccatcaatctctcagacgacgtcaatcctcggattttcccttttctcgatctcacagtcaagaaatatggtacttatttacttattataattaactactttaataatgttttcagtaataataatgcttagtttctagctagctatatattgtgtaatacttatcttttcctttattatattttcgtcatgctatatttagtatggctgtttttagtactacttttgcttttatgtcagtgttatctgcatgtgtaattgtgtactactgctatatatggttccaaattaataacgtatgcctaccttttaccggctcgtctcaacccaattcggggaaaaaaattaagttggatttttttttatgaatttttttagggtaaatactattttggaccttctgttttgcaaaagttaccaattgtaccctgtgttttgttaaatgacaaaatggaccctgtattttctaaaatagtacaaataggatcatgaattgattttttgtcaaaataaagtttaat

SEQ ID NO: 388807 - DNA, 1593 bp, Cannabis indica
acatatcaaagttcggagggtaacattcaaaattagccttacatatattgcagagtgcctaaataaatttaaatgtggaaacgtctgtcaagaagagtcactttttaagaaatgtaattatgatatagcctttttagtttgatggtattcaattgaattttaacaacactactttgatgattattttattgttaattcactttaatttctctaaggtaatctgctcaatttttgtggtggtataatgtttgttcttttattatttttaaaatgaactgttcctaagtttataattatgtgacattaaatttcctaatgttagcttattaattgtaacatgtatactgttttgttgagattacttttagtacatgtttgttattaaaattaatttgtttcatgcagacatatacaatatatatatatatatatatatttcaacttttaatttttagaattgttatttcaattttgcccatatgacatggcatgtcgacgtgggcaagatcgttgccacgtagagtacaacttgttaacaagaaggtcaaatcatctacacaacactttagttgataggaagtctgagtgcttgagagggacgaagagacgatgaaccgcccaccctgaggggactagccagccacccctggcgggccatatggctagcataggctggccagccagcctgtatctggcaggcacttggccagccagcctgcacctggcaggcacttggtgcacagccttcatccgagacaagcgaagttgtgatttggccttcaacaacccacgaaataggggagaaataaaagttattcctctattcttgagggataattaacctttttattatttattatttaattatgtaacaaatactttatagttcttattttttaaggatattaggttattaatctcttgtaaggtttaccatataaagagcatgaacctaatcctaattcttttaagtctctaagctccttaaagttctcaagctctaagtttaaaaccttaactttatatcttcctctctttcacacgcccaaggcttctctctcacttgaatttgtttacttgattctcatattgtaatcttaagagagctacttcaaaatttacaaaccttgtgatctgagtagtattatcttcggaataaatataataaaaaagggagtaggttattattcactaaggaggatgaacctctttaaaaatattgtctctttactttcttgttcttattgtgtacaagtggtaagcatcagtaataaataggattctgctattggttggccaaatatgaggtcaacaatttggtactttcattgagagctttgtcaatttagctgattaaacaccatgacaaacacaaggagaactctggctacaacttctacctcatcggatctccctcaatacccaatttgctgatcttaatgtttatgttgcagttacaactagaattttctcaaacccgacagatgtagccaaccccgccatctcggcagacattacaagcctgattaccatgactggccaggtggacactaccaacccggtttgtaacgccctaatgctaaggcacgctac

SEQ ID NO: 388808 - DNA, 1812 bp, Cannabis indica
gctcgctcgtagctcgtatacttaatgggcaatctctttgtatcaggcagagatgccatagatccatatttctaagtctaagtcttttcagacactcacttgtagtttgcttccttatgggcaatctcaatgcctgtcggttgttgaataatggcatggatactaggagcggtagtgttgttttgcatgttcattgttgattgcttgcttgaacttgtgaattccatccagaacaaagttcttggaagaaaaattgaattttagtcggggaaatggagttttggctctcaatgaaagcaccaaaatgttgacgctaaaaagtgaccaacattagctcgctagattggcgagatgattaataagtttaagtaaataattttgagatacacacaaaattaatagtacttaaccccctacgtcgtgatggtaatggagctacgtctacttaaaatttttatttctcaagagattacagaaataggttgtgtttaagctctagtttctagagagagaaactagagagagttgctctgacctagtgggtagttttctaaatacaaaaataaggtaagggagatctccttttacacgtgaaggaggcccacaatggttttaccgttgataacgatctaacagtgaaaattagctcttgctggtaatggccatttttcggagaccggtcccgctacgggtaacccaaagcttattttcctaactcccttaagggtgaatttcaacgacgataaatttagaattacgtctatagtgtgagacatgacttgatagagcattgaattagcttcaaaacacaagttgaatcacgtaatcagatcaaaaattagtgatgtatggctgttttactgaaggcagttcatgacctagtgactaggttgacatgtagtgaccaggttgacatcccaatgaccaagttgacatcccaatgactaggttgacatatgacatcaacttggatgtttggtaagtttagaaacgtccaagggatgtattttttgatgcctaagtgatattttcacacacttgactatttttgtgtttcggaaaagtcggtcaccgattctccgagatgttgatgttctgtggaaatgagggactcaaaactcttcttttttgagtgagatggaaatgagaaatgaaaatcggacttcatggatctttattattgtgaaaaactagacagacggtcaaaacgcattagaatcggataggcagaacccaacacaccaggccatttgtcaacatgggtgctgggaacttactcctgagctcccgcaattttgtttttgatacttacaagaattttaaacttgaggacgaggccccataccctatttttgaccattccagaatcaatggtcgcatcagatttggcatttgagcaattgaagggagcatcccagattgattgtcaacctatcattgtgcccaacacaaggttaacctgtgcattgggccctatttttaggggctcaagtttgtggttttctttttaagtttgcttgaatcatcattatttctaatgacagaaaaaattcccataatgctttttgctgaacttgatcagaaacaacccaggttgataatatgtcaacttgggcgcttggtcccccttttggtccttttaaaattccattttgtccccaaaaatagtcaaaaatctcaatattttctaaaaacaaagaagatgctcagaagtgttctcgaaaaactccaattaaaatggcccaagttgacaaatgtcaacctactcggagggccaaccccaactgtcaacctaggcgctgggccctattt

SEQ ID NO: 388809 - DNA, 865 bp, Cannabis indica
tttttttgctttttatagcatgaaatgtgttattgagcgttacaacaaaatgaaagaggaacataatcaattattgaatcctgcttcagaagtaaaggtaatattatttatgatatatatatataaaaatatatatatatatataaccaccgatatattgatacaaattcttttgtgaagtagtactaatattatattgtatagaattaattaagctaggctcttggtatttatatatttcaattatatctttaaatatatatatatatgtattattcatagcttgtgcaaattatgttctttaattaattaagttacttgctagttttggcaaagggaggcatcaacacttcagaaccaactacaatatttgcaagaatgtcacaggtaacccattttactttttatatatagtacaacttattaatgcttaatattatgcttttctttaagagttaataatactaacttaccaactatatagtgacaaaacaatcaaagattattatcttatgataatcttctatatactacaaaagaataaaaaaaaatagctatctgatctcatacatttttttatgtctaaatatttatcacttttagtaaaaaaaaaacaattttttgtgattaagtaatattatacaaatttgtcactgttaatgttgttttagtcacaacaatattaattattgtgatgaaacatgtttagtcatatggaaaaatgtaatttttttgggctaatacttctacgatctactgattttttagtaatatataatataaaaataaagatgaattaatttaatcataatttattttacttttaattataaattttgttagaactaaatatatatatatatat

SEQ ID NO: 388810 - DNA, 931 bp, Cannabis indica
aactataaaacacttgcgcaccaactcaaaaatatacgcacctatggaaaattaaatatatactaattttctcttagttgaacaactaaataacaatgagatagcaattctaatttaatataaaaaattattagaaatcaacaaattgtgttaacttaaaacacacacacgaacaaataatcttagtaaattaaaataaacttaaaagtaactagaaatcacttgtacaacagctcaaaaaagtatgtacttaagaaaaactaaatatatagttattaagtataatttgatttgatattttattttagttattatttgggattattttgtaaatactaataaatgaaaaaagtttacgttttacagatttataattttttttacaaaaatacgagaaagttatttttttcgttgtttttatgtgaatttcataaatttaccagtaaatatatataattttattttattttcttagttaaacaactaaataacaaccaacaaacaacttaataacaatttcactataatatgacaattaaatagaaatcaaaacaactccataggttgcataaactctaaaaaataaaaaataaaaaatctgtgtacaccgacttaaaaatatatatataccagtaaaaaacaaacatatacttattttctcttagttaaacaactaactaacaacgaataatcaactcaataacaacccactttaaactaaaaattaattagtcatcaatacatagcgtcaacttttaaaaataaataaaaacaacacacaaataaagaaatgtgtatatagtatattctttttttcttggttaaagaacttaataataacaaataaataattgtataactactctaatatgcaaattacatagacatgaaaacaaactacaagaaagaaaaaataccaataatctataaa

SEQ ID NO: 388811 - DNA, 1151 bp, Cannabis indica
tactcttccccaccaccaccaacaaagtctccacctcccccataccactacatctcacctcttccaccagtaaaattgccatcacctcctgcttacatttacgcttccccaccacccccaactccatactaagctcaagaattttagcaccatacacacatagatcatgtaagtaataagtatttacttgactaatttattttacttatctggtgttagtattactaaattataaataattaatttgtattattatcggtattataattgcaggttctagtttgaaaagtggaataaaagaagtctccatcaatgcgcaccaagcctcgaatgaatgttcattattcaataagggtttgtcaattagcgatgagcaacacatttcaacttcttttgtggtagtgttgcaaatgtatttgctgattttaagttggagtggttatgggcaaaacaaagtaagaagaagaatgtggagattggagattaagataggataaggacatagtttgttttgtgtatggtttttcaacaatttttttgtttatttatagggaataataaattatttcatcatattgtatagagtgtgtccatacatgtaattgtaccatattggactagcttctatctatttatggagatttgtcatatgttgtaaagtcttcctcctcgatctgccttttttaggcttcgagatttatggtaataaaggaaggcatttaattatttctcaaatcttattatatatatcctttattctttgttggtcaagttctagttggctaatcaactcaaattaaagaaaacaaaataccgtcgtcctttaaaattggcaactatatttgattttcatctgacaaatatttccttagcattgacacgtgaaattttttttgcactgttgacaatgttgagggcaaggcttgataataagctacttgttcaaccttcttaagaatctcaaaagaacttgtaaacctagggcttaactttcccttcttctcgaagtgcttcacccttttcccttacctaaaattcaaattctataggctttggatatgcataaattttctgctttctttgaaaagcaagcctcatggccttgattcaagcccgaatacttcctttccctggtttcatcccagtgaatc

SEQ ID NO: 388812 - DNA, 507 bp, Cannabis indica
gttttaaaaatatttgattttggagaataataataaaagaagtttgattctacaaaaaattgtacaaatccataacattaaaattaaggaccctattactaaataatgttagtctctaattgcaaaaaggaacatttttaagcactagtccaattctatagtaacagcttagggcggtttttggttggtggagtgagtagtagaatgagaatggtaatgtaaaagttattgttatgaaaatgatttaattttttttttagaaataattagtgtattataaaaaaaaaatatcctatttgtaaaggtcattctattttttatgcaaataatacagtaaaacctctatttaagaatactctattcaagaataacctctaatttgttataaaaaaatcaagtcccgatttaggccagttataaataagaataacctctacattgtaattagttatacattttttaagtcccgtattaacaaagtatacctctatataagaataattacat

SEQ ID NO: 388813 - DNA, 1787 bp, Cannabis indica
ataataataataataatatactttcttcctaacaaagaggaatttcttttatattggttgagagagaggggcataaaatcccaattttaaatatacccttttttaatataaaaataattaaataataatatgtcttccttatataaaaaaaatacaatttatatatatgatatatatgtaataaatctacagaaactggtgacagatgtatttgcatatatatatttgaagttatttattagcttaaatatccaaatgcaacctcccaaattatttcccatattatttgatattccatgcacctacaataaaacaagaaataaataaaaaaataaataaataaaaaaatcaatgctttaaaatgacaaatttagccccttctaaattccataactaaagaaacaaaatcaaatcaaatcaaaaaataataataatagaaacatacaaaaattgccacttcattcttgtagcaatagcttagctagaattaatatggtatatatataaaaatattatatatataatataattaacttaccataaaaaataaaagaaaatatatatgatatgatattaaaacaatttgttttacactttttgtttttctctttcctcacaatgagtagttggatatatatatttatacatatagcttataatgagaatataaattgagagtatctctaacattatatatatatacatatatctagagagaaattataattaagatgaagatgaagttgtggtacataatgttgttgttggtatatttagggttagggttagtggagatggctatggggaaagaagtaagttatgatggaagatctttgatcatcaatggccaacatactcttcttttctctggttctattcattatccaagatcaactcctcaggtaccaaatcacatttctttttcttttttattattaataataatatatatttaattgcacctctttagtgattttgattaaattatgccaattaaactttgtagttatcaaaacaatatataatgtataattaaatcattacattgtgatcaaaataataatatagaaggagagagagaagagtaaagtactatacattgaaatcatctaattctcattgtgtgttgagtagttggtatattaagaacaatattttgtgtgtttataaaacttataagatttttttttatatattagaagagtgatttcgaacttggaaagagaaatagaaaattattaaattatatctataatcacataaaatatttaaaattaatcacgttattagtactattatatatgctacatattttttaatttttataaatatatatatacctatatttagttggttgatcatgaaaattgcaataactagaaatattgtagtagaatacatattctcctattgattgaattttaaggtccaaattaagaggcatataatatgggtgcaaattaagagacataaaaatataggtatatatatagatagagtagagatagaatggtttggacaaaaaaggaagcaaaataatatatatattgattaattatttaaaataattttctcataatatatatataatgcaaactacatggtttgattcttatactttctttttgcctttgtttttattttgtgtgtacttatatagtttgttcccactttttcatataaatccaagtctcctaacaaaccttataactcaacatctcttccatgataatatatcatataaatatatattattctttttttaatagtaaaaataaaaataaaat

SEQ ID NO: 388814 - DNA, 1798 bp, Cannabis indica
tggcgtcgacgccataggtgccacctttattcgacattaggaacttaatgcaacatgacgccataggtgccacattaggaacttaatgcaacatgatcaggtagatgtggtatattttgtctatagagaagttaataaagttgctcatgttttagctaatgaggttttgattaacaaaaagctagtgccatatagattgggattaataatccctcttgtgcgagtcatgccatacaacacgattcaccttatcgatcttgtgtaatttgtttttcatatgaatgaatttctttttttttgttttttttttttttttttttaaatattcatcaacagttagttttattttgttttcatattttttaaaaatcatgtatgaattttaatttttttttttactaaaatttcatataatttttgaatctttttgtcttaatatttgaaatatattttgttttattttataggtattctttaagaaaataagactggggaaaaaaactaaaaaaaaaaaaggtgaaatcaaaaatatatattttatataaaataattttttttaaaaaaaacgtgtacaaattaaactccccaaaaaattatatgacattgtatattatacagtagtagactttatgtttgtttttgagaaatatttgtgaataatttatattattaaaaatatgatacaaatagttagttgtatgaatgtcttttgtttattagtgtaaattgaatatttgaaatttattttcaacactgtaaattatctagaattatctaaaacaagtgagatatataatgtatacaactccacttctttacaaactattttgaattttatttttagtattataaattattttgaaattttcgaaaacaagtaagatgcgactatactataatgtagaatgtcatataaaaaattaggttacaattgctctaaatacgaaaagttcgtaaatgcctctctatcggtaattaaggacaaaagtagtactcttactttgtatgtatataaggtgcttctatggtgtcacccctaaaataaaggatccccgaatgcagcatactatttgaatcttatttttgacacgataaattattatgaatttttttaaaatttgtaaaatatcttaaacaactacgatatacacactgtcagataaaaattaattaagaatattttaactatcctaatatcaaaaatacttaagggaaccaagcagaaaggcagaaaatgtttgttattaggggagcaaaagtgcaaaaaaaatttgagggggacaaatataaatttttaataaaataaaattacaaaattataaccacaaaattaaaaaaaaaaaaatgaggaatggggggaggctatccatgtatgcatagcttcgtctttgaaaagtatggaaaattttatggttcaccttctaaaatgagtacatctatgtattttttatttgttcgtcgtataagagaactttttatttaattttttttttcacgctgtagttattataaaattttgaaaaattcagaaaaaatttaatatgttaaaaataaggttcaaccaatttgttgaacgtgttttcttttatatgcatgtgaaatagatttactataaaaaaactgctactttgagtgacaactttttagtcacaacaaaatattacttgtgactaaaacatagtatttagttacaagttatcagtaatttacttttagtcacaacaagtattgtgactaaaaatacattagtcacaacaaattgtaatttttgtgactaatacttttagtcacggacctt

SEQ ID NO: 388815 - DNA, 1828 bp, Cannabis indica
ggtagtattgatatatgtgatcattgatggttagccacgttaatgtgacgaagaccactttgatacctatttagtataatcaatagacgagattgtttggaaacacctataaatttataattatgatagcaaatttaagcgtttataaggttacacattttaaaaatacatatgtaacacaagtgggagattgttcgattaaaatcctgaatataaattcatatatatatatatatatattggtgtattgctatttgaagtttgacctacataaagtgatcattgtagtaattgtggatcattaggtattaaagtgtcatgagttaaatgtgtagacatcttaagagatatttttaatttattgatgggctaaattagaaatactaaaattaataacctgttaggttatataatggtagtggcctacaagaattaagagccaattctattctcatttttcatcaagagagaaaattaaaaaatatctcttcaataaaaataataaatcattttgttgttgttttttatagtttatttatggttgtttttatagttttcgtgaagttgatttctcattatttttaattatttttcttttattttttgctaaacaaagtgtatttttgtaattttaactttataaatatatttttataattaaaaattttaagttgtaaaattgtaagtaaaatataaaagaatggtacttttaaaaattctcaattattactcaatttcaaaattagaattctatcatgttaccttgtacattttatttttaatattaagataaacgttctaaaagtataaaataactcaaaataactactcttttttttttcttacaaataaaattattagatatactctgataactaataaaagttaatagataaaattacaactgagatacatcctgtatcagctcatttattagtggacagatgtttgtcctagatttattagtgctcctgtaacagctgatttgatttaatgtgatacatcctttacttttaaaaaaaaaattacgactgagataagataagaaagagtaatctttaaattataataataaaattttattattagaaaagaaaaatctttaactttccattccaacaaaaagatatctaaaaataataataaaaaaataaagaaaaacatcagtatcaaatattttgcagaaaaaaaaaattatatatatcttccaagaaaaaaaagtttaatcatgtaaaaattaaaacttgttgtgtatttgatttattccttaaaccaaacatataatataagttatttgtatgacaactattgaccatagtgatcacaccaaacgaaaacttaccatactgattttacaacaacaaactatagtggtcatactagcaccataacatagctagaaatacaaacaataacctcaaagtaataattacaattgttgggaaaattattgtaattaatcacaatatttcaccttttgtatgttaaaaatgggaaataatatcaaatatcaaccaaagtactacaagcaatataaaatatacaaatcaaccataaaagtgagacactaaaatttttatgtggaaactcaatgtgagaaaaactagtgaaccgtagtccgctcaaatcatctactatcaccaaagcttaacaatgagattacaaatttcttctctagtaaaactagaagctcactgcaacatcaagattaaacaatattggatcatcaatacaatcattatcatcatctcaagagatggatacacaaatagaaaatatttgggtctcaccaaatgagtattgtagaagagcaccttagagaggacaa

SEQ ID NO: 388816 - DNA, 700 bp, Cannabis indica
tcttccatggctatgggaggattcagcttgaaggaaaaaggaagtgaagaagagggatcgggtatggctggaggtagaggaggaaggaagaaaaaaaaagaaaaaaattatattttaaaatgttatttttaatttttttaattttaattattttttattaaaattattatttggaccaataatagctcaatacgtgacaattttgaataacttaacggatccgtcaaatttaggacgaacggacttacaaaaaatgtaatcttgaggactattgctgttattttttgaggttggagactaatctgcatcatagtaaactttttagggacttttactgcaaattttcctaaaaaatcaagttctaatttgggtcagttataaataagaataacctctaaattgtaacctaccctataaatagaagcctaaatagagttataggcttaaaaacaccttatgaaatgtgctacaacataaaccccaacctaatacatataagaacatttgggtgtacagcattattataacctaatttcggctaataaccagaagttgacacgtgtaccagagaaggaatatgaatcagcttgagaattgcattattaaatgtacattaaataactcacctcaggaattacgattgaaagaaatatttaaactctctaccacataggtagaagcgagataagaataataacta

SEQ ID NO: 388817 - DNA, 611 bp, Cannabis indica
ccactgccacatcttcatcctccacagctgctgtagcacgtttcagcatttccctgacagagttgccaatttgaacgttctgccttgtgaaagatcgcttgacaccagacaaattcaaagatgggggggataaaatgatgcgaggacattttgaaaccataacagctttgcctttgtcaacacttgagatcacaaacgtggtcatgataggagcagtcggcaaaggacaggtgagacttggaataccagccaaaaaattagtggaagacgtcacagaatgagcaggagaggagtgaccaaacctgttaccattagataaaactgttagagattttataacaatggaagaaaatcaagatttattacaactctattgtaaaataatacaaggactaaaataagagattgattaaatatatgttacaatacatatatacactatatattacatatatatatgaaaggtagaagagaagattacaacacatgtaatataatatatgtatatatataacaagagaataatatatatataaacactcactcacaaccttgagtgtagattagtggggatcaccatgacttgaacaaggtattacacctttgtccaa

SEQ ID NO: 388818 - DNA, 755 bp, Cannabis indica
caccaacactcatgccattttcatctctaagaccaataattgcactacacagatcccttgaactatctcatatcatcgacattaatcttaaagcagccagcagagggcatatccatttagcaaaacttctctctttatccctcctttgcttcatgttagcttctttgtaagtcaaaatgataagggtttttatctccatgcttgagcttatttctaacataccaaagctgccaataaataattagaaaaatattaaattcataattattgcataaacttctcatttgggagatgaaggacaacgaatctctttctttgtaactcttgagcattggccagtaggtagtttctttcagaacttcacacttgacagacatctccaaattgcgtgcattacatattccacaactccattcttggaaaacaaaataccattagttggcagccacaaatggtttaatttccaaaaataaaaaagtgtttaactttaggggagactctcattttctagattgctacatctatagatatttggttttcataatatccgagctttcagttatttaaatttggagaagtgccaaattaaagtatcaatgataggagcctcttgttggaattttattttactaggatctggatttactaacatgtatgtttcattaacaccctaaatatgaattctctaaaataatgaaattaaacacataagagtttaaaaaatattacattgatggcaacagaataatatgact

SEQ ID NO: 388819 - DNA, 1404 bp, Cannabis indica
aattttgatccaatctttgcacgtgtgagaaaaggtacaataatacaaataaagatatttatgaggttagattgaaataggaatagtaactagataaatggtaagaatagttttaaaaagttaaaacaattttactaaaaacactttatagtaaatgctatatttttttttttttttcatgttctacattcatataatattatttattatttaaaatatattttattaattatttttagttttaataattattttatatgaggatatgtgtatataataacattttaaaaaaataaaattttgataatatattttaaaggagattttttataagaatttgatgtatcgtataatgtaaaagtatgttagagaaaataaattttagtaatgtattttaaatgatagaatagagaaattgttgggagtactaaggtattaatggtgcctagtatcgtttaaatgcggagtattgctgttggtataaataagtaaatggtgctagatattattgtacttaataaaaatgctcatataagaaaaatattaaaagataacagtagcactacttatattgctattactgaaattaagtatcaaattttactaaaatttaaatttaataattattatagaatattattaactatttacaaggtactagtgctagactttgtgtctagttcctaatagcaatgctataatgaaaatgatattgtaaattttagcttaatttttttttttttttttgaatagtaatgaaaatgaatggcggattgacaaaaattttcttcaatttatttgaatatggaggagtatataaaaaaaggtatgatggcaattttacttttatataagtaatgaaaaatgattatataaatatagagttgtggtctttattcataaaacaatgtaatagtgattacattgtaaaagaattacaatattttcaaaaccaaatcaattgatgaatttgtaatggtaatttcgttttgtttatgattctgtcaaaacaagtatagctaagattactgatatgtgcacacatataatttatacacaaatttaatataagttgttataaattactatgaaatgacgatttataattaggtagtaattttttataattattattaaagtaaaatatgtgaaatttgatattgaattgccctaatagtaatattacatattacaagattattacacgctatggatgtcttttagtatttcttagagaaatatactaaaaagtacagtggtacctaatatctttctacatatcaatattattattagtacaactaattaaacatcaaatatcatataatttaatataataatttaaaaaatagaaaaattatcccatatactatttttttaacttttttttcaaatttacggttt

SEQ ID NO: 388820 - DNA, 1060 bp, Cannabis indica
aacaccataaagttcgaaacacaccagtccaagaaaacggcattttgttgcagcaccatgcctattcccactctgttccggtagagttttgcagctggacaatcaacaagaaaatggtaaattgattcctcatggttgttacaaatagggcagattgttgccacatctacacgttttgttcttagttgaatcatagttggaagacaaccttgacatgccctccacaccagatttttcattttcagaggaagtttcaatgcctaaaatttcttccaaaaagcttcaagtactgatgtgtcttgagtgttccacccattcatctcttgagccattctatatgcacttttcaccgtataaaaatcgaatatctcaccaatccaagtgagtttgtctcggccgtgatcatgttgcccaagaattccaagaataaggctttgatctcgctgttcaaacaagtcagccaccacgtcttcatcccatcccgacccatccatagccaacaaattgcaaactttggcaccaacaagagctggatgtgaagatgaaacaaacgaattctgtgtatcgggtagccaaggttcactcaaaactgagatagaagtgtcgtctccaacagtccaacaaactcctttaagcactaattgacgagcttcaagaacactacgccagacataactggggttattaccaatatcggctgtgaaaaaagaaccccgtggataataccttgcctttaagattcctgaaacaagtgtatcaggttttgtaagaagcctccaaccttgctttcccaacagagccaaattaaaaattcttaagttacgaaagcccatacctcctttatatttatgtttgcaaagttttttccaagacatccaatggataccttgttgggaatattttaccaggatctagatttactaacaagtatgtttcattaacatcctaaatatgaattctctaaaacaatgaaataaacacataaggttttaagaaaaccttacattggttgcagcagaataatatgactcctcccgttcaaaatctctagcccttgatt

SEQ ID NO: 388821 - DNA, 740 bp, Cannabis indica
gttttgatttgctgtgccaaaacatcattagcagagaaagaaagaaagaagattatgtccataggctaatggttattatatccatactcattagtttaaacttttataaaaatatgctaacctctatgtatgcagcagcagcttccgaatgtttatcattggttcttgcaataaaaatgtcccagaaaacagaccaccattcaaaaagaaaacccccaggtgcatcaatagctacacacacatatatatacatacatattgatatgaattggttagcacaaacgctactaaattaagacattccaagaactatgatatgaaatttaaactaacaaactaaaacaaagaacatcagaaactcaaaatagctttcgaattgattatattctaaaccaagcaaatcttcaattgtcaattcagtaatgaattcaaaagttacaagctaaaaacaataatcataaacttagtttaacattgtattattattacctactggatctggggcaactttcccttcagtcatgaaggacttggcagtagcatgcagttttttctttaccaaataatcataaatgtacacatcaagcctgaaaaaaattagaaaacagtaattatactaaaaattcaaagaaatagtaactttaaaatttacaaaatcatagaatgtgtttatacatatatatacatacatcttatctgcttcccaattactcaatgccattctggccggtcaaaaatca

SEQ ID NO: 388822 - DNA, 564 bp, Cannabis indica
ctcaccactaagctagttttaatagcttatcaataagtatctgtttaaatcttatttttaccattgttaattatttagaattttataaatatatacaacattacgacatatactattatggaaagaaattgaactaaatactttcttgaataccttaacaaataagaaatgtaccaaaacgatatatattttaaaggatatactatacatttttccaacatattttaggggcactatggccaacaagtaatcctcatttcatgaattggaccaggctagagcaaggaaagtgattgcttaaacaaaggcagtaaccaaaatactcaatcattgaagattattactattcattttcctttgagtctcagttgacacttccacttctttcattccatcataattcagtttaagaaaaataaaaaataaaaggcatcacttcaaaattattatgactaaattataggtaagaaaaataattatttctacaaaaatatcataatattaatttttcttttcgaaggaacataatattaattgggaaatttgattttctatacttagaaa

SEQ ID NO: 388823 - DNA, 1032 bp, Cannabis indica
aatgattcattcttttattaatacatatttttttattgataaaaataatattttcaattgtttacgatgttaataaaaaatattgtgatgtcggggtttttgatggtgactgatgatattttaattgataaattaatataataataattggttacttgtttataaaaaatttaattttataattataaattagtgaaatgtaaataataagtatataattaaaatggtaagcatttaaatagtgactttgattttaataaaggtgaaaaatatatactttttacattttaaaatgatcacattaaaaaataggtggcaatgataatatttttgaaattaatgatgtaatcgaaaattaattttaaagttagaaaagaaagagaaattgataaaaatggagagagagagagagagaagtgaaaagataaatagaaaaagaaataaaattaataggattgcaataggtatacgtatgttacagtaaagtcaaaccaatagaaaaaaaaaaaagaaaaacaagctcatgattaaattaacaagcaaatcacggtaatctataacgagcaacgttctataaaactatttttactttttaatttttagttagtgtttttttttaactagaaaataaaatatttttaacatattttaatcagttttttatttttaaatagaaaaataaaatattttccaaaaatatgttctataaaattatttctacttttcgattttttaattgagaatcaaaattttaaaaaaataaaaaaaatcactttcacaatttttttaaataatttttttcttaatcaatattttggagtccaaccccaacctggacccttggtagccgaattctggcaccggtcctaatctcaaactcggatcatggctccggcctgagactcggacttagacctaatttaaataaaatcaaatatgaaaaatgagaataaaagttatagaacatgtacatttttattttctatttttttaaaaaattaaaataattataaaacatttttttttgaatga

SEQ ID NO: 388824 - DNA, 1408 bp, Cannabis indica
tagattgatgaagaaaattggggggaaggatcactttaaatttcatagtggctactcaaatattaagctcaatcatctaacttttgcaaatgatgtgcttttattttgtaatggagacatgaggagtatcacctatatgctacaagctttgaagcttttttcaagaacctctggtttatgcccgaatgcctctaaaactgcttgctattgtagcaatatgtctcaaagagaggtccaacagctgctggttctttctggcttccaacaacaggtattgcctttcacctatttggggattccaatctcttcaaaaaagatatctggaaaagattgtgaattacttgctaaaaagatgactgctagaattaagagttggagcttgagaaatttttcctttgcagggagaataactctaaacaactcggtgctcatagccattcaagcttactggagtcaaatgatgatttagcctaagaagattctgaagaacattgaggctatctgtagagcatttctttggaagggacaagctacctttcaagggggtggtgcagtggcttgggaagatgtttgtcaatcaaaaaaagaagggggtttaggcatcaaaagacttgaagagtggaataaggctgctatgtgtaagtacatatgggcaatttcaaatcagcaggaaagtttgtggttgagatgggtacatagtgtgtatatcaagagagactcctggtggagttacacaacttctatccactcgagttagtattggaggaagcttgtaactcttaaggaccatttgaaaaccattcagaactcgactgaattccaagagaaaaaatatgagattgctgcaggttatgagttactcaaaccaaaccaagataaagtttcttggagacgagaggtttgggcaagattaaacatccccaagcatagcgtgatactttggttggcaatgttgaatatattaaagacaaagtagaggcttgtcaagtttggaattcaaattgatagtggctgccggttgtgcaacactcatgtagaaaatttacaacacttatttttcaaatgctcatttgctgaaaagtgtttacaagcagccaaaagctagctgatgtggggctcggctgctactgatcttcctatgattttgaggtggattaggaaagctaaaataagcaggtttagaaagaatgtcttggctgctgtgattccaggtctggtgtatagcatttgggaggctagaaacaagctagaatggcaaaatgagcaaccggactgtggcagagtgatggaggctgtgcgatggagaatcaaaacccgagttactatgttttgcctaagaaattgagttgtaaggatagggattggttttatggattgtaatattgtaaatacaatatttgtatagatt

SEQ ID NO: 388825 - DNA, 1455 bp, Cannabis indica
acagtccccgattaggttcgagagggagatgccgatctgctttgggacggactgctgtccctgatttggttcgagagggagatcgagaccgagagaagggaggagctgggtcgaggttggtccagtacctttggtagtagttcctctaggtcggcggtggagtattccagctgtggctgtagcggagccgagccgagcaacgaggccaggtcgtgagttgggagatgatgaggattgtgactgagaggagcctctcaccattgttgcagagtgaaaatgaagagagagagagagagagagtctaattataatagattacaattttataaaattacaaaattaaataattttaatttttatatatactaaataattttatataaaaaaataattgtaaaaaattataaaactcaaaaaattaaaaaaaaaaatattaaaaattatttatgtaaaactataactttttaccaacgcacttcgcgatgtgtgagtaaaagtgacttttgctagcgtattacacatttaagtggcaaaaccaatgcacttttttattggtaaaaaatatcaaggggagaatgtttaaattgcttgttatgccaacacaaatataaattgcgctcgtaaaaataggttttgccatcgcaattatgtgctagtaaaattttggtctttttaccagcacagttacttttaccagcacaatcgcaaaccgtgctgcaaaagtgatatttttagtagtacgtggtgattcttactcttgctctagttgtttagagattcgaattagtatgtacaacttattttttatatatatttatttcaaatatttgtaatacaaaaaataaaataaaatgtgttctatatatataacgtcataaaaaataatacaaagacaacatgataatgatataataatattatatacatgtatgaattaaaaacaaaacacatatattgttaaattttgttaataggatgattcaaaaatatatttgttgattggacagattaatatataattatattaagaatgtgtattattttactagtttatatatgattgatatagacagtgtaattgaagtaataattattttatatttaaaaattttaaatgtattgaacattataatcttgaacaataagattaattaatataaaattataaaaagtaaaattttaaattaaaaatatagaatttttttaaaagaaaacatgttattgccaagaattgaacccatgcacctttatcatcaagataagagtagttaccaattacatagtaattattttattgattgtattggttattataaaattatataaataaacataagttgatagttgtaggtcgtgattatggggtgctattagagtgtaaagattgatttgagcaatacaattttctaattaaaaaaaaaaaaaaaacaaaggcatttttcatttttacacttc

SEQ ID NO: 388826 - DNA, 681 bp, Cannabis indica
taattagacacttaattaataatagagaaagaccaatcacatttgaatgttcacaaaccagtatgatattgtatactgtattatatccatccactgcaaatataatattttagattggtgggcattctcatattttatatcttataaaatgtgtaaacatattattttattcctttatttatttacctattataataatcccagcctaataaaatttctatattgttgattattctattttatgtgaagtcaattttgtctaacaggaatgcccttaaatttaatttttttagaatattaatttttctataaaccaaaaatatatcaaatttttaatatatacacacacattaactatatgcaatttatcataagagaagagtagactatacattatgaaaaactagtataaatctttatacagcattgagtggctaattaggtaaaatcattttattacatatatatgttattaattattttctataatatcctcaagtacttatatatataatgtatttatttcttgaattaaatgttattggagtagccgccaaaggatctgagaatcctaatacaaggaataaaattcctaagtatatattgcttaatttgtaattggaaccagctacaaattgtaggtcatccacatatcttctatatatatatttgtatatttta

SEQ ID NO: 388827 - DNA, 901 bp, Cannabis indica
tatatatataatactaataataatattggtccctattgctgtttggatatgaatgatcattatatataactcttgataaagtcttttgttttcaaatatactctcaacatatttcattttatgaaaaacaaaaaagaaaagaaaagaaaatgaaagatcaatatcaatcatgctgtagttttcttaggatctagaagttggtccacatttgactggttcacttagctacgtggcaatgcaagtaattttttgatctaaattaaatttttccaaaaagtttttcttttctaatatatagatatacataacgatgtttttctttttgaaatggatatgcacaacgagtttgacaactcatgtcttgcctcaaaaagacacatgatcccttaataacaataataacaacaataataaaataattgtagtagtaaaatttgcaggaccataaagcccatgtgatgccatgtgggaaacaatagtatttgtaagccttcgatatgagtttcatgatgatcatatatataaatttatatatatcatcataaaacttgaacaggaaaaaaaaaaaaacctaccctagtgtggtccttttttgacaagcaatgctacatattttgcatgtcaatagctcattaaatttgatttgaccattgacaaatatatcaaaaaggtgtgattaatattaaactttgattggttttggctccaaataaaatactacgattaattatatatttgagtggtttcaggacatgcatgaaattatatatgaaatacttattatattgatgattactaaaaaaaattaaaatattaaatcattaattttttatcaaataacaaataataaaagatagaaaattttataatgcacctctttaaaagagatataccgatacat

SEQ ID NO: 388828 - DNA, 1100 bp, Cannabis indica
atctatgatgtttttatttagacacagtaacaaatattttgaacaaagaattggttgcatgaatgaatgagcgactaattgagagggagagaaagggataggttatgtttttaggtttagaattttatgtaggttagttttgattttgtatagtttgttagttaaattaaggagtaagttttttttttctaaaaaaagaaaaatatgtatctacatacgaattgggaaaaacatatttttttttaagcatatacaatattttttttattgcatagaaacacttcctttgttctatatgatagtgacattttatagatcaactctaactctcaaatcaaataattatccaatctatattccctaagtacaggacaaaatcgtcatatttatatattaattgatataaatttggatattgagaaataggtgttgctgatttaaaaatatatatacatatatatcttactattaatatagaagtgtcaataatataatattctcttatgattccttagcactttgtctttttccttacaaatgttctactaagtacttcacttctcattgtttttttttttgttcttttcttaaaattttcattcatatattactcttaagtactacaggtggcttcattaaatcaatttttgtgtaactatttatatataataataaatgaaagttcaatccaccaaaaaatagtaagacaatattatcaatatagtaaaaaaactttacacttaacttgagagtttcagtattagtggtgtacctttagaccatatttggataattatagttttaatatttttgtataatagtctttatatagttatagtaattattttaacacttttttttatttgaattataaactatatcagcaataaaatgtattttagttcaagagtgaaacaaacattttgaactcttatttagacattataaattatttaaaaagtttaaaattaacaaattatttactatagctacaatatacactatcatatgataatataattatataattactactgtaaatacaaaagaatacattaacatgttagactataatgtagtgtatgtaatatagcatatac

SEQ ID NO: 388829 - DNA, 2197 bp, Cannabis indica
tattcaaattttttaaaatttaccgaactatcttaaataactataactataacgtacacgattatgaaaaaaattaaattaaaatattcgtgtgaatgtcgaaataaataagaggtgcatcgatcagtgcttactttttaggagtgtgtattgtagaactacctatttttattaatttttataagttgtctaatctttaattgatttcttaattaactaaatctaccagtcttcttaatttttggttttttgttggaaaaaagtcccacaaaagaattgtcttcccattctacatgttttgatttgtttgagaacgcgttctccattgattttggtttgaaatttgaccatttagctttaatattatataataaatatataaatataaagaacaagtcactcgatttctagaagctaaaacacacacaaatagactaattccttacttttatctttaagaggttagttaagtaattaatacaaacattacgtaattaaaacttttcaattctttaatcacattcacatgttatgttaagtgtacttccaaacatgttaaataataatttaatttctatttacaatcactaatctgacatccaatgctatagaacacacaagaaaatgattattgaaaggaggaatgttaaactttgtcaagattataagagacataagcactacaaccaaatccaacccaaaagactaacaatacttactagagtgttatccgagaaatttagacaataataaaaattatatgagtattcgaattaaataagaatacccatatgcataattatgagtattcacctaaattggtgaatattcaaaataaacaaagattaatataatataaacaacaaaataaaaagacaaagaaatttagtttaaccagagctcatctatttactccattttagaagagattgtgattagtcttatttaaattggataactcttttatatataagaaaaaataattgattcttcaatttacataatcagttagacatgaccgttattaattatacttaattgaaatagaaaaatgtaaatactgaaagaataatttcgactgttcttatttaaaatccgaacaggcgcgactatgtaaatcgtacattggtcgttcacattctgagtaacacattaattcgcaggtttgctggtgttactctcatatcaagtcagactcatccgagagagcataaacctaggggttttatagatgcgcaaagctattgaggttttataaaataaaatgcttgcgacaataccgatcatgtattggacatttatgtactgacaacatagaactcgcgagttcaagacgagatgtcacgcacattagtcattcgaactaattattgtaaagataccgtctttacttaggttgtagagaaataccagattatcacatatagtcgatatatgtcgtgactgtgcttacttctctctacgtcctatttttattctcttcattatgcacctagaccctgtctcgatcgcaccttctcacatgtttatattatgcaaggataacccaattgggattggttgtgtaaacacatcatccttttccaactggaaattggatccctgtcaatgaaatacaaggtacttgttattctaggtgaaaaattcatcctataacaaatcattgatataaagcatcaatggtgcctagcaatacctagaggcgttatcttgtaattagttagcaatattttataataattattaaattaaattatttaagatttaatacttaactatggtgctagacattactagtctttattatttctccacttattaacctgtaggctattttgattttgaattatattataattataaaattgtgctctttaaactttttcactcgtcaaaattttttcttgaagtattcaacatatgttgaaatataatattttcttaagctttatccaatgtgactaatatgataatttaaaaatttgaaaattttattttcttataaataaataaaaataaataattttaattattctattattaatttttgattaaaaaataaatttcttacatttaaaattaatttttcttttagtaatacatatagtgtttatgtggaaatgacacgaatcattcacatcaacactttgttataggggtgttcatccgatccaattcgcacttttttggtcaaaca

SEQ ID NO: 388830 - DNA, 749 bp, Cannabis indica
tctctctctctctctctctatacaattgacaatccaaccgtgcaccccctccttcaatcatcacactcgtgtgccgcctcctccaatcgtccagtcgtgcgcctcttcttctctctttctctatctcttctcggcaccagctctgccacccactcaccgacgagctaacggtctcccatttccctcgtctcgacaccatgtcggtgtcaccatagtaagttttctctgctttttcttttctctctcttgtgggtgaaacattttttttgtacaaatctctaagttggggacgaaaaaaaagaggacaaccactgtgtattctgagttttgacctcatgttagtggctattgtgttttgtgtttggattgattttagatttttttttgtatgtttatttgtgtagatctgagtatttatatatttctattttagatttataaaattaaaatggacattaaaatttgggtatttattttaaatttgggtgtgacatcttgatgaatatctaattttttttttttgtgtcgatacaaaattgacgagaatattgtaaaaattgacttttacactattagcatctactttccaccgtcgataattttaggtaccgactattgaaaatgatgcaaaataatatagtttttgcatctatggtatacaggagcggacccacatagaggcgaggtggggcagtcgcccaccctgaaaaaaaaaatcgggaaaaaaatatatatgcattttagttagt

SEQ ID NO: 388831 - DNA, 1471 bp, Cannabis indica
catgaaaacaggctaacgtagctatcatacaagagtagttcatgcagataataatatataaaaagcagaatttgggttaatgagagagaatttgagggagacatgtaatgctattttcagtaaaatgaacctctaactttatgtcatttctaaactatttacatcctttaatgttttgatttactaataaataattactataacaaatataatatattattttatgcatgaaaatggaatgtgataaatatagctttacggctttggagcttaacgatgaaaattagtgtctttctctatcatggctcaattatcaggcttatcatcctcaacaacaggcctaggttttgtagctcttcatctcaattaatggcgtttttctctgttttattcttgtgtttgtgcatcaacctattatcgtagttcaagggttatagctgggaagagaattatagtggtgcatatttccccacctatatgtttttctcgagaactttttaatctgtcatctcatttaaattaaattatcacaaaattcctgcattatgtattcaaaatttcttttatttcatgaagatttgtagtatatattctcaacatgttaaactttgcactcatcaaacataaatttattgacttataagaaaggatttcattttctatttttttgaaaagaagaacttttttagagtacccccaataaattctttactctatcttttaaaatatattattaaaattttatttttttttctattttacaacaaaattttacattaaatcatacatcaatttcattaaaacacattactaaaattttactttttaaaattttattatattttaattttaaatatataatattagtatatacacatattctaataacaaaataattaactaaactcaaaattaattaataaatatatttaagtaatagaataatattgtataaatgtagagcataaataattaaatttttttaaacaaataaatgaagaaagtgttgcttagaccatctccaatgggagatctagaagttaaattttgtacaaaaagtagttttgtgatatttttacatcaacttttactattgtgctccaatgcataatgataaatcttgatgaaaaatttaatgtgttatttaatgctcatttaataatttattaaaaatataaaataataataatacaaagttaaatataaaatttaataataaaataataataatgcaagtcatttttaatgcaaaggagtatgttagctaaaatttaataataaaatattaaaaatagcataatgataaatataaaagtatagtatttattttgatataaattttgcatcatgttatattgtgatgcaaatttagatcacttttgattatgtgagatttttgtattataatttagcacactattggagtaaacttttaacaaagtgagctatattttatatatttgaataacgt

SEQ ID NO: 388832 - DNA, 3436 bp, Cannabis indica
aagctggctcaaggatttcttcttgttggccgtggtcttggtccttttgggttttttagtagaacccgaggcctcaccggcttgggcgacactcttcttaaattttttatcggctaggggaggacttttgaacatgttctccaagtctacatccatatctgcgagacaagagaaattcattaacacttagacaaaataaataagtgagaatggggaagaactcccacattaagaaggttaccatattcttcagaggatgacaagggaggactataatattcactaaactccctagatcctatgatcataaatatgtcataagggtttagtggatctaattcctagcttgaatctatgtgacctgctctatccaacatggttccatactactcggcaatctaatagaatgagctagtgcagctaatttgaacatgaaactttggttaccaactatcgaacctatgggatatgcgatctatgaggagaggtttccaagtgaaaaaattataccgactatctcaaaaagagactaaggtattacgttcggccctatgcactttgggtgaccacccacattgattacctcgggatgctccatctacctgaggagagactctctcgagatattgtccgtgagccacgaagtcttcactttcctcttcatctggggcagggaccttttgccatgaagtatacttgggtattttgtaattgcaagtatattcgtctgaagcaaggaggccaacgttcttcaggttctgctcctttagcaagaaatctacaactcgcaacccatatggcagactcagcagggttttgtgatgctcggctatctctggggtagggactggtctccgaggaaccgctgcaaacagattaaagttcagcaagcaaccttaaaaattacaagttaatgtttttacagttcgttttacaaggaagagaacttacgcataatgcgaaaggtagttgtatttattggagataggcccgtcgtccagaagaagtcttctttaaaatttgccttgttgagcaatctaactatgatcttgcgatcaccagtataagtcccaagatagtagaagcctcccgtagcgttcttcctcgctggaactactttgatagggtaaaagcaggctatctccaaaggagtagagcactctcagcctaagatacggtataaaaccttaaggctcgtaaggatcctgtatgagatagggtttagctggaatgggacaaccctaaggttgttacagtactccttaaagtagtccctaagcggaagggctgccctagcctggatatgtttgaggctccaagctccaatgcccgaggagttactcgtgttgggtccactacactcctcgcatattactctttctgggggaaaacagctgaattccccaggttccacaaaccttataatgcatccttttcgctgcttaatgtcgcaggacttcaggatgccaccgatgtaggcccccatagacctaaccttggactcgataagttctgcctcaatggtaacattgggaacctgtggggtctttgatttgcgaggcttaggagacatgatttcaaactcaaggtcgcctggtccaaaagcaacagtgactttgggtaaaaacattgatcttgcgagtggaatagaacttaatattgtgggttcaggccaggccacgtctcgcaagaaacgacacttgccctcagaaatttcttgtcagagtcgcctataatgattggcagtctcttcttggttcgacttaatcagatggtcactaattctggcatcatttacttctaatttcgattgaggtttgaaatctttgggtttatatggagaggctagatgtttaggctattctgattctaaaaattctagagaataaacttctgaaccagattgggacgtttctacaaaagaaaaacaatcccaatttctggatgaaatttattaaactagaggtttaaggaatatgataaacctaaaattatgcccaactctaaaaatcacccaaaaattatgaaccctaatcgttaaacccaatgaagtgacaaaatgcaagacaataataacccaaataaaaaaggaaaaaagatgaagtatttactgtgtgaagtcaaaaaactaggtgttggagaattctgcaaatggagacgtgatggccggcgggatgagctcttcgaacaataggagttgaagagcaagtccgagtaaatttgcaggaagaatgtcaaagataaggatggcatgcacgaattcaggaagctcgagtgaaaagttttagacagcttaagtttttgaagaagacaaaaatggtagaaaattagattcttaccgttttattctctaaatttaacaaccatcaaatcataatatagaagatctaatggatgaaaatagaagagaaatggaaaatacggttcattaatgctattgatgtgcattggaaccacaaaacggccaaaatcaaaggcatccataatttcaaaatgaattatgacaaaaataccctcagtaatcatttaaaaagcaccttttattaaaaaaagactttttaagggacaattgttacacccaaaatttagctggtacttcagaggatgacacgtgtcaaccttgggaaatacaaatcaacaaatattacggcaattatattaaaagaatattaaacggaataactcattaaatgcagaatcaatagagtatatttataacttacagactgcacagtcttcagcgagggaaggatgtacgaactatcgattcgcgtattaacgagaaaccattttgcgtcagaagacacggtcgtgagaagggcatcggtaatgcatagcgaggcatatacctcgcgatacgtagagaagcagtgacaagacgtactgcctgtcagagcacttagcacataatatagatatatcatactacctaagtataacaacttgatggacgtgaataacgaatagcgaaacatccatctcgttataagaaggcatactcctggtaccttcactaatcaactgcagacatctttaaatgagatccactgctcagtcgagtcagctctctgagatagaagatgactttcaaatgatgttggctactgaagttcactttgtcaccaagaactctgattgttagatggagcgttatgtctttaatcgaagaaacgtagacatttacattgtcaacctcagaaagacatgggaaaaaactctagctcagtgtcagggttattgttgctgtcccagcgagatgccctagcaagatacaccttgcagcgtgattaaatccatgtcagcattgacccattaaaagcggataagtcgcacctgtgtgattatcaaataataaccgcatttatttaagtaggacgtaattaaagcccagaattttggggaaaatattgttgtgggatttgaatctgattgtaat

SEQ ID NO: 388833 - DNA, 626 bp, Cannabis indica
acgtaggatcaattgagcaactattcagtcataagacaattaataattacaatgaactcatgaaagcccaaagatttgtatagaaacaaaaataaataaataaaaagaagatcaccaatcacttatatatactcaaataattaatgtcaacttattaagtttgaaaatatatattaaatgaaaaaagacaaattgacttgtattatattaaatttctgtttaaaatgaatttattttttcaaaataataatataataagatgaattttcgatgaaggaagaacggtatttgatgagatagtgagatgagatggtatcatgaattaatcttgaaaatatttcaaggtacatctagatagaccattaaaactcaatattgtacctatcatgatttttattgaacaaattaagtcagctacttccaattttttcttatattgtatcccaaatttacttcaaaatttatagattcgcccctctaattctttttctcttaattaatttgatcttcattaaaacccaactgatcatcatcctctctctttctctgccatgcatatactaattctgaaaaaaaaaaaaaaacaaaaaactaaactaacaaaaaggtaagtttaaggttacgtg

SEQ ID NO: 388834 - DNA, 1584 bp, Cannabis indica
aaagatacaaacacctgaatctctatggagattaaaccacacaaagacagaaattccaatagattattagaatcttaaataaacagcaggaaaatgaatatacaagattaaagaagaaggtgaggtgtgtacataccatagccaaaaggaggtttctggggctgtggtactgttcccagtttctttctttagcaaaatcagccattttttgcttcagaagatcaagagacacgctttcattttctgaatcctcaccaattttactcatctttttcactcttaatgaataatcttagtatttgtggaaccccaaatgagagaatgaagaacccccaaaagagagtataaaaaggcacaagcctctgctctttgctatatgcaattactctctttctctctctcactctcaccaaatccttttccaaattagtagaaaactgtaataaattgagaaataaaagccatggttatggtatgagtctaatggtctgatcagatgtacccttttttttttgggttttaacatcgtaaggtgggtaccggctactggctgttcccggtttctctattggtacttgaagttgaacattggaaagacacgtgtcagtccatgtgctttctttttctacgtttctattgggcttttcccaaatggccaatacgaaattgacatctgtcaattctatgggtttactttaccatctagtcaatttggtgctgccatttccaaaaaataaaatccttgtttacttgtttttttttttgaaaagatccttgtttactgtttttggtttttttgatagaaaaaatccttatttactgtttttagctttggaagaaaggatatcctattttttctttttttttttgacttgaagaaaatccatataatttaatgatatggatcatgaattatgaattgttacaaaaagaaaaaaaaaaaatagggattattccaatttttcgggaaaaaataagtaagaaattaaaaggattatggattggagatcttcaagttaattttgtttggtaactgaaattggattggaagaatccctaaagatagaataaatataaaaattcttattcttcttattattattggataatacttcaaattaaaaatgattttatgtagtatcaattttttaatatgtattattgttttattttaaattcatattaatgttattttttatttttttttatacataattatttatcaaaaatattatcattattctcgttacttctttcttctttttctccctctctttctaaaaattctttaaagttgctgaatcaaaattgtaaccaagacttatggacatattttatttaaaaagaaaaacaaatattgagacttacaagttttttaatggcaaagttaaaatacaatgcaaaaaaagcctcttgtgcacctcttttttcttagatcatatttttattataatactaaaaataattcaattaaccgtgcgaataacgattatattatctagggaaatttacatagtatactaacttttgctatttttttacaaaaatactgccagacggtatttttactttttactgtgtttt

SEQ ID NO: 388835 - DNA, 891 bp, Cannabis indica
atatactgtgtggaaattattcatttctggttcaattaattaattttaaataaaaatagatttgagaattttggaaatttgatttggttgaagcatgatcggatccagggtgggtgggaatcgtaaactgttttagatggtggtggtgtgtggtgagtttttggtaggggtggtttctgggcagtgagcatgaacaagtagaaagaataaatgaaaaatgaaaaagctaaaaataaataaattaattaatctttaaatagattgatacagtggcagcgtgaagaagacaaaaaagaaaagaaaaaataataataatatttataatttcaaaatatttatttagcttttttatatttaaattatttaattaaaattataatttagagaaataaaaaattaacatgttgcattttattagtatctaacagattagttagaaaaaattactaattgacctacgaaaataagtttatttattgtgtaatattttaataatttatttttaaaaaaattataaaaaaacaaaattgtatcttattaagaatcacaaaattagtaatattacaaaaaaaatattattttaagtaacattgattatcttattatttaagatacttttatgttacttttacttatatagtaataataagttcattaccttcaaaatttagttgtaaatttaatgataatgtacaataaaatataagtacttattaaaggacgaggcataacttggatgtcatgggatcgtatgtgcgctgtaaaggctgaaggtggcttgggctttcgtagcttgcatgactttaatcttgctatgcttgctaagcaaggttggcggcttttgtgcaaacccgattcccttgtggggaaaatctacaaagctagatatta

SEQ ID NO: 388836 - DNA, 1007 bp, Cannabis indica
ttttttatgtcattactaattagacattgagtttcagatggtaccttatcaatgtttctttcagaatgtattaaataatactgccaaaagtcatacaattgtccttgtgaatggtcagaaatataaaacatttttccctttttagaattgaaacagacttcccacctaacactaaactattagggcagaaaattataacaattgctatgtcggtatcaaggaaagatttgaatctcaaatcttgtaggagcgaacctcatggctgactaattaattgagtaaaccctttttgtatatcataaactgacagaattcgattttgggaagatgtatggattggagattcttctctgatcagtgccttccctgacttagtaggggctgccagtggctgggtagagagctgggacttcaagttcagaaggaatctactggagcgtgaggttccaagtcttactttgttattgcaaaaggtggaacatgttagagtgtcaaatatttccaatgatagcagtatttggaagacagatcgttcaggggttttctcttgtaaatcagcctttagctggtttgcttcaaatctgggtcttactagtttgtgctggatgagaatcttatggaaaagatgtgtaccttcgaacaaagttatggagaacggtgatcttagcaataatttgggttgtgtggttggaaagaaatactagaatttttgaaggggttacaaactcagaagcggatgtgtgggagaaagttaagttctggacagctacctgggtatttaagaccagattttttgaggacttgtcatttttagatttatgtagagaatggaaatcactgttgtattagcagtattttggctgcctagtttagtaatttttttgtactgcagagtgttaactgtttttggccttattatttttggtaattttgtaaccaaggtgttcctcggccacgagtgaggattctcactttatattggggagggtcctgtctaagacaagagg

SEQ ID NO: 388837 - DNA, 866 bp, Cannabis indica
gcatatatactaattatatgttttaattttattttgtatgtactattttaaatttataaattaaactatttattaaattttttaaaaaataataatttaaagtttaaaaatttagaaagaaaaataaataaatataaaatttaaaatattaaaattaacatattaataaaaattaatcttattaacaccattagataattacattttatatagaataaaaataaagatattttagaaataacacttaattattatttatttttagttaaaaaaggaagaaaagtaatgagcacgtaatagaaaataaaatagtttctcggatgaaagtaaaatttaaatcattttattttaaaaaaaatatatatattttgtgtgtggcaattaattaaagttttccttaggagttaagatccagtttttttccctccaactaaacaaattctttactcccacattgcataattaatcctagtatcccacaattttctttatcttgattctttatatttaaaatttaaatggtgtaagttttgaagtgtagaagaagtaaaagacatttataaataatgttatttattaagtgaatagatttcgtaacaaaattcattttacttttactattatatcaactcaattcatcattttcaggatgtaattaggttacgttacctttttttatttttaagttaatattgtgattagtgatagttgtttaaccaaagctaaaaataatgatggcaattcaagttatgacacaataataaaatacgaactcgatcgatacgaattgttgtgaattaagaccataaaaatagacgcgtgacaatttagtcgaactccaatgacacgattattatttgagttgg

SEQ ID NO: 388838 - DNA, 1700 bp, Cannabis indica
tttaccaataaatacctcaatagccattttcgaaatgatagaaaaaaatataacacgatagagccaaatctacaatttttaagccaagatttagtttttaaactcaaactttctctactccacacacaaccagcaaaactagcataatcatgcttcaaataatttagtaagaacaaagaaataaaactccaaagaccacttgtttagacagaaccaaaatcaaaactttgcaagttcaaactcaacttaaaacttgaaaagcttaaagaagaaaggtttctaggggttacctttctaatttcttccaattgcaactgagtttccttgattccagcacccaggttgacatccagcgcccaagttgacattccagcactcaagttgacatctgacgtcaaactagaagtggcataagtgtgaaaatgtccaagaggagtcctttgagattcctaagtgatgattttacaccccttagtccttttatatgttttggtgaagttggtctatcattctcgaagatgttgttttgcgaaaaaatggaaaactcgaaacttccgactttcgaatgagccaaaattgaagttacgaatttagttgttatgacttcatggatcattagaattgtgaaaaaaactagtcgaataatgtagactacattagattcaaataagcagaacccagcgaaccaggacaaatgttgacctaagcgttagggccttctcacttgagcttcaagattctatttttgatactttcaaggcttccaagacttttaaacttgaggacaaggtttcttcccccttttttgacgatgtcggattcaatggtttaatcagacttggcattccagcatttgaaggtaacgtccaaggttgattatcaacttgggcagtgggcccagtcccaggtatcaacctgggcattgggccctatttcaagagacttgagtttgtggttttctccccatgtttacttgaatcttcattatttatgatgacggagaagatgtctggagcactttttgttgaaatgatttggaaacatctcaggtttacaaaatgtgaacctgggcacagagtgtcaatctaggcgttgagtacctctcctgacctttcaaaagttttgtttggtccccaaaacaagttgattcttaatattttctgaagacaaacatgatgctcgaaagaattctaagaaaactccatttttcaaggcccatgttgatgaattgtcaacctgggtgcagggccagccataggtgtcaacctgggcactaggccctgttttttctacccataacttgttttttttttcctataaatgtacttgtttcccaatttttgatgaagacaaattcaatgagaaaaaagtatcttcgatctgacactgggaaggtacctagactgacaaattatcaatcttggtgttgggtgcccaaggccccaggtgctcaaaaaccaacttactctgaatttgattctgatgcctcaaacatgtcccttatatgtccagttgatgtcacaatgcatgttttggcctctttgcacaaagactgtcccaaaaactgaaacccaggtttaggatgtcaacttgggtgtcgggtgaaaccctaggtgcccatgttgccttttaggatataagtttgtgtaattttagctcccaaaccttgtattaggttgctccatgtctttagggtacag

SEQ ID NO: 388839 - DNA, 3261 bp, Cannabis indica
tttttttttttttttgttaccaattttgacatgtgtgaaatcaaatttttaaatttttaacatcattaaaaaaaaatttataaataaaaattcatgaagcataatttaacatattttaaaattatcataatttattagatattaaaattattaattaataaaattagacataagtcagacaaaaatttaattagtcgtttatttataaagaatatactatttagtagcttgtatttttataaaaaacatatttgttgccttatatttttaataatacttaattgatattttatatttttaaactgtatatgtttagtaccctaaaataaaatttaatcaatatagttttattaattaatttaaccaacaattatcaattatatctaatcatataattgaatttgactttagaatttacaaaattttagacagtttaattgataaaattttatcaaaaattttaaatttaagatactaaggtggcatttgattgggaggaatgaaaatataggaatagaaatggggatgagaataggaataggaatggaagaaaatttaaaatgcataaaaaaattgataaaaaaatcattaaattttttcttttattatattggaatgatctttccttctttttttaaaatggaatagtcattatatcaaaagggtggaaagagtattccattagaatgtcattccaaatggtggaaagagtatccttttttttttttttgaatggaaaagttaatcttattaaccatcaaattcagctaccaaagtaggtagcaaatccaccggaacatcctccaggtgaaaaatacggtcaggatagaatagggatgcttttgcaaaagcatgagcaaccttattcgctgatcgtttaacaaagaaaacagagacatttcttaactcagataaaagtttattacaatcattgatcacacaaccaaacagagacaccatgtctagtgaacttctgagggcttgaacaacccccatgcaatccgtctccactagaacttgctgccaatctcttagttttatccaactaagagcttccttgactcctaagacttcggctaggaggggctccactttcccttgaaagtgcttgcaaacaccttcaataagaaggcctttgtcgtctcgtgctacaactccaataccaaaaccttgttcatctccaaataacgcggcatccacattgatctttacactattaatactaggtgcagaccagcactcagcaccatcaccttccttaaacaaggaccatgatgactccaagaaggagttctgagcatttctccattgataaagatttctatttgcagaagccacaatattatcaaccaaaacagccttcttattccacactaactcattacgagctccccacatcgcccaacacaccataactatcatgcatcttttctcctcactcagtcccttaaagatagttgtacaccattccaaaaaaactccccctatccacataagatgtcccaatgcccaccctattccagcattctttaaccacttgacaagtaattaaagtatgaacaatagtctcttggtcaccattacagataggacagatagcacttacctctacctttttagtttgcaacataacagtggtaggaagacaattcatggccgctctccatactgtgttttttggctttcggtggaactttgagcttccaaaaactcttccagaatgatgaatcttcagtactatgccattgtccttgactttcctgaagcaagttgtaagcacttcgaaccgtgtagctgccagatacatctttgtgccaagtgagatggtcttccgttgaagacaagttgattggtatagcaagaataagtcccctatccctctccaggaataaatcatttatcagctccaaatcccaacctccaccttctccatgcataagattcgacacttttgcattcacaagtgccgggtgatcagagatgatacacggatttgagtgatcttgcaaccaaggctcccccaaaactgaaatattctcacccgtccctatacaccatcgaacccccatagccaccaaagactgagcttctagtacacttcgccacacaaaacttgggttgttgcctaattccgccgaaagatatgacccgtttggatagtatcgagccttgaaaacccgagcgaccaaagagtttgaccgagttagaagcctccaaccttgtttaccaagaagtgccaggttgaagtcacgaaagttgcgaaaacccatgccccctaagtctttgtgcttgctaagccgatcccaagaaagccaatggatgcctttacttgatttccccgaagattgccaccaaaatctcgttatcatcttctttatatctctggtaatctctatgggaagaagaaaaacactcatagcataactagggagagcctgcgccactgatttcactaaaacttcctttccaacttttgataaaagttttccttcccacccttgtaaccgttttctcactttatcaagtagaaaacccattgctgcagtcttgtttcttcccatcgtgctagggaggcctaggtacatgctagattcagtagccggttgcatatgcaattgattgatgagatattttaaaatgtgtaaaatttttttgtcgacattagaaaattaactataattaaaaataatattttagcattttttatattttaaattcaaataaaatttaatatattattaattttatagcgagttactataaatatctcattagttcatatttaaaataatttgatagtatttaaaaaattcgtgcaattttttaaacaaaaaacttatagaaaaactaaattctattttaaacatcataaaattagttacattacagaaatattattttaggtaatattatattgttttattgtttaagatactcttatgttacctttactattattactttcaaaacatattcgagaatttaataataagataaaataaagtataattatttattatatagcttattagtaaaattaataaatataatagttttcataatgtaattttatatatttaagataccatctattattttataagctttttaaactcatattaataaattttttctaagtacattatttggtaacattaatataaaacaaaaaattgagactactctttagttttcttttaatttaaaatttggttaccttttattagacgttctgtaaatagtgttgctcacttcttagct

SEQ ID NO: 388840 - DNA, 1150 bp, Cannabis indica
atttttggaaatgatatttcctaaaagcccaaacccaaaaatgaagcccaaactcaaacgaggttgaccgaaacccaaacccaacacaaacagtccgaaatcatttatgtattatcattcaagaaactctttttcctcttctgcaaaataaagaaaaaaaaatcttttcctttttcttttttttttcttaacaatcaagaaattctttgttaaagagaaataatttataagtaataatggattttgtgttttcagaaaacaaaaaaccatagaacaatataattgtgtcgaacaaattaaataaaattaaacttagtaaataaattttgaaaaaataacaataagtatgttatataacagtgattccttgattaataaactcgtcaatacaaatttgttaagcaatcaatgtgaacgataattttataaaataaaaaaaacgtcaataatgataataatgatttctataaaataataataataataaagtacagtaattctgctaaaatttatcattgattaacatatgtattctctcaaattaaaaaaaaaagtaatgaacatttcataactaattaaattaaattcataaatctgttcctaaatagtgactctctgctagggcttgcttccctgttccgaccttctcgtttcgctctcttcggaagagccttcccataaaatctgctctcaaagcctcccatccatggacaatctcctcgaacgcactcaccagttgatggttctcgatgcggaaggatgggaaatcaatgagggctcgttggctaattgcactactacaaaaattcttattcctatcagtccttaagttggttttttttataggaccatcgctaataaaattatgtgacggtttaaaaccgtcgactataataggatattcccgactgttttaaacaatcgtaaggaatcctcaacggtttaatatagtcacttaaaaattagagggactttttattggctatccccgacggtttaaaactgataggtatactatagtcgactgtttgtcggctatagtatacacgacgggtttaaactttcggggatactcaatatctttttttttgtgtataaaaatccccaaatcagatctattaatttttcatttcaaattctctctctctct

SEQ ID NO: 388841 - DNA, 1311 bp, Cannabis indica
taagtatatataaatgatccgtactcagttaagataatagtatctctttatttatggatcttttatgatcaaagtttattagtgatgtggggtaactagttaccactctcaaaataacaaacctaacacacacacaagttataacctacagtaatggtaatggtaacttgttacttaaccaaattttgggaaagaaaaatttaattggtgacttgttacttaatcttattcgtaaagaaaaaaaaaaaaagaaaatgatggtgacgataacaaaatttggaagaaacaaatcaatcattggtataaacctgatttagagaagaaaaaaaatgatcatatataatgataactggttgcttagaaagatatgaagaaatgaaaaatcacaaataaaattaactttttactaatgtcaaattacttattttttaaattgatgcatggtaaccgattatcttcatatcactactaaaataaaaatttataatagtaactaactactactgagtcaattttaaaaataagtaattggatactagtaactagttagtgtaaacaaatgaaaaaaaaaactaaactaaactataggaaaaaaatatataaaaatgtaaaataaataaataacggaaataataaccatattttagtggcattatttttttgcctgtatttgtaaaaactagtttaagtttactatatttttgaaattatttttcatgcttatgtgcaagaatttgagtgccataaaacaaaacaaaaaaaattaaagataatataccaaccaactaaactaaaattgaaagagttaaatactataaacttctatagacaataataacaataaaaaaaaaatagattttgtattgactgtttgtaagatttaaatataatttcatttagtaaactttttacaaagtgattggattttagatttaagcgtggaaaaattgtgtgggggaacacaatagtgaaaaaattgacaaaaatattttcctaattttttttacatcaattatcttattgaataaaattacaattagtctaaattttataaaatttcatcaaattcaacgctaggcttttcaacaagttctttcttttttcgcaacattccaaataaattaaaatttctatttgattagtttacattatggccaatcaaactttgattaagtgttgtgaacttgtgattccgttatataggagtgtatatcagtcactttggttgttatagtgtttttaccaactcaatataaatgtcaagtggtatatatatctaattgtaacccgtccaataaaaaaataaaaaaa

SEQ ID NO: 388842 - DNA, 1047 bp, Cannabis indica
taacacttcacgttgaaagcacatttatatctacttctacatatagtttaatatacttcatttataacataataaatattggtagacttatattatagtaattataaatttaatatcattatattttcaacaaatataaaaaatacattaattaaatattaaattttagagaaatgttaagggcaaatccaaaccctagctaccttaactatgttggtggaacctattttttaattttttaattattttacttttaaccccattgataaccaacgttcactattagtggtggttagtactgaaaattataatacttaatcataccagccaataacaatataacacaaaaaaaaaaaagtgttaaacactaggagctttttcagcatttctcaaaaactaaaacaaatagtaggcatgaatcttaattacataatattaaagtcaatgttatatataagacagaattaatatgtttaccggtttcaatatatattttattattggaatgtgaatgtgtcaatgcatgtagtaagtttataaatatgtgccaagagaagtacccaaaaaagctgaaaccaaaacaattaattaaaaagaaataactaatacattttctataagtaattaattaatgggaaccgaaaccagtcttaggcttcccattattaatttttcagttgaacatgtagaattgaaaccgggtacaccggagtggaacacagtaaggagccaagtccgcaaagcagtggaagaatttggttgtttcgaggctcagtttgataaaattccaacaaacattcgaaaggccttatttgatgcagtacaacagctttttgatcttcctttacaaaccaaacaacgaaacgtttcaaagatgtcgtttcatggctatgtgggtcaactcccagctctgcctttgtacgaaagcatgggaattgatgatgccaatattcctcaaaatgttcaaaattttactagtgttttatggcccattaatggaaacccaactttttggtacgtaaatatttaattaattaaattttgtta

SEQ ID NO: 388843 - DNA, 960 bp, Cannabis indica
attatatttaaagtttagagttcagaaacctcacctaagtagtgcacattaattatcagtggcagtaaaaattagtgtaccgaaaaacgttgctgaaaataggggtagtgtatatcaaaataccactacgacgagtagatcacacccatgctaactgtttgtcaaaacggtacacgatatcgccagaaagttatcagaaaggggtggagctacaaaatcatcacctgaaaaagtagtgagttgggcgaaatggttaagtataggttgttctcctcaacgagctgagtctagtggtgaagaggactcgtcaaacggacactggaggtggccggaaaatccgttcaaagtatgaacctccaaactttgactggcgatcccgagctaacagcggcgaaagcagcggcgccgcttgggggttgaggtcgtcggcacttggggtttcgattggtccgacgcgtggggccagacggtggctgcagatgggtcaccggagtcacgccagtgatgggatttgtggttttctcttgtgatctgaagatatatatagagagagaaagagagagagatgatacgaggggggtaactatctgtttttattatttttatatatatttatttattattatacatatatattctttctccttttgactcgatcaaatcgagtctccacaaatattatgactaaaaatacatttagttataataaattgtaatttttgtaattaatactttagctacagatcttttagtcacaatatagaaatgaaaatttataattactcacattttttttacttttaattacaatttttattgtgactaaaagtaaaacttttatagtgcatataaatcattaagagtaagaatattatttaatactctaataaggatacgcatgacctaaggtggtgtttagtttactgaaatgtaattctaatgataataggaatagtaatg

SEQ ID NO: 388844 - DNA, 1122 bp, Cannabis indica
aagcataaaaatttgaaaagaacaaaagagaaaagcataccttgaattgagaagaatactaagttaaaccaaaacttccagcaaatttaggcaagagtttgaaattgaatgtgtgcctgctagttagaagtacaatgagataacattagtatgataattttaattgtatatattgaataactaacaagggcaaaccaacaatcagaccatgtaatgggaaacagaagatatatccaaagctataagaaaatggtacctataaattgagaagtctctaggtaatttcttctagtgaacaaacagctgctcatatctatctctcctttcacaacaccaagattaaatcgaaccttattttcaaaaagtttaagtgttgattatccaatagtattttgttaagcataaaaaatgttaacataaataggtgcatcctactattgaagaaatgctaataaagagctttccctttcgatgagtaccaaatcaataaaaagagtgaagaatttaactagagatggaattgaagttgggttggttttgaagaaacatgatatggtaaacttttacttttctatttcatcaaggtcttgaatgaactattgtagaagcaaagagatatacatggtataccctcaatcatcagttttagattttgattagagttttgttcaatttttaagattatgtttggaagttagttctggtgaacaaataaaaagataagaaaaatgtaagaaaaaaagtgtaagaaaaaaaaaaaaattaatttgtcatgtttagtacggaaaatgttattgaatcaagttttttttccatataatttttctttcacgtaagcatgagaattatatcttcttttttatttttaattttttcacttttttccccaaattttcttaattggagataccattatttgaatgcagtttgaactattaatttgtgtaattggaagtaactaattaagtttatgatgaaacctagaaatcaatcactgatccaatttgagtacttctattggatagaccttctttccgataaaagtgagaataatattattatattttatttacgagaaatgctaaaaagtaccaatggtgtttagcatcctcctatgtgtca

SEQ ID NO: 388845 - DNA, 1458 bp, Cannabis indica
cttgttaacttccctaaccctaataagcggttgtgtggggtttttctttgtttccgaccagggcctgttggccttcttttgggtttgggtgtggctttggtcgggtttgctgatttcacaaagtagagaaattcaagttctctcttatcttcgttgtttgaaatagtttttggtctatgtttctttgcctcattgacggaccgagtctcatacagtactggtttggatggtgtgtggctgcgtcggaggtgtgttttcttcaaggtgtttccctttttttgatttgttcgaagggtttcccttctaagaggatgggtggagggccacgtgtttgggggttgtcactgtcggtgcagtcgttgcacaaccatagttccgatcgacaaagatcctttgttcagggtcgcatatctgatgtaatatctcagaaaatattataaaatttaagtgtgcatgttttattaaatatgtgattaagctaatattggagtgagattataatcttacttaagctaaatgtgtggtcactaatgtgaaattaataaatgattaaataaagcgtaatttattaattacggagatttcatcggattgtgtgggtatagtagataattaataaaatattttcaggttcgacggccttagaaactcgacggaatggtcagaaatatcactataattaagttgtgatgtattggaattataatggactaggttaaatgttgaggagttggttgaaccgaaaaaattaggaaatgaccaaaataaccttagatcatattatagcgcaaattttaaagggaggggtagaatagtcattttgcaaaaggttgaattcttttgtcatttagtgttttatttaggctgaattttaaataatagtaagtgcatatgctgaatataatgttaagagataaaaggttgatattttagaaattaagaatgtttaagtttattcttcctttctctttcctttgagcaacctagaagccagccaaatgtgaggagttcttcatcaatttccttaaatctctagcagattttactctcaagctcaacttaggagccttgaggtaagttctttcatatgttgtgttaagatttttcaagttttaagctagttttgggttagagttttaggattttgggactgtgatgttaaattaagtttagataatatttataggcttgatttagggtttgttagagtttagtttgagtgaattaagtggatgtggtgatggaattggagaattgagttttagaattcaatttcatggttctaacatggtgatttgtgtaatttgatgagttattgtgaattgatgctttgaatatattcggtattatactcttatggagaaattggataggtatgaagaggttttggatcagttttgggggaagaaaacctagaattccttacctgccagaaccggtcgaccagttggttctggt

SEQ ID NO: 388846 - DNA, 981 bp, Cannabis indica
aatgccaacttgtttatctgattcctctgtttaaatttcagtgtcccattggtatagattcagatcgctttatacgtgcacttgagcttcctcaagtccaagaacacattagggaacttaaagaaagattttctgggcggaaggtaaataaagtatctgattgtaacagtttcctatgagctgaattttttggatagctggtcccttatatgctatgaggcctagtttataaaagtatcacgtacaagttgtccctgtctaattacctcatcccacacactaaacaaacttatgacttgtttggttcttttattgattagctataaaaatattctgtcctcatcttccttgtgacaaattcctatttatgttattgctcttttagagttctattattagtagattagtatatttcattttatatctgatgatatatcttgtgttttataaaagtttcttatgtgaagcatttgacatgacaggtaatgttaggtgttgatcgccttgatatgattaaaggaattcctcagaagatattggccttcgaaaagttcctagaggaaaaccctacttggcgtgacaaagtagttttgttgcaaattgctgtgccaacaagaacagatgttccagagtgtatacttctgtctaaacttgcattgcttcttgttgtatttgtctgatttgcaaatagttttcctttttgtgtttcacatttacttttgtttccttaatttattgtatttgaattccttatgttagacccttagtagtttaatgtatttgatgtctaaatttgagctaagttctaggtgacttctgattgtagcttggggtagatgcagaatagtgttatattttgtctctccattgtattactgccattgcttttaaataattgactcagtctacaatgtttaagataaatttatacatagctgttttttttttttttttttgcagagttagataagttaatgtgtt

SEQ ID NO: 388847 - DNA, 1527 bp, Cannabis indica
tattttgttattttttttacatgtacaaacttagaattcgatatacttagtggacctcgccatgtatcctcgatagatctcatgtaaataatataaataaaactaaatagaaatacaaaacattactaaggtttatcgaggtgtagtgatgattattgatgaactattgttattggcataaatttatcctccttcatgcgagaaggacttgattatattgaattggtggtatttaaaatggctcgcaggactaaaagaaccttgtaattactaactgaaagagattttgctatatcaagaaaagtatacctcgcatatttaaagacactgcagtatcaaataaaaaaaatgtgaacacatcgattaacggaaattaacagtcaagcattcaaggaacaaccatggcaaacgttacatttgtattctaactgttgtaaacaatataattaatatgtaaattattattgtgagttgtagcggtctcattatgaccggactattataatccctacccactacctataaataggggcttatttttccatttaaaggaggctggactgatctgaataaagaaatagagccagagatcttttttcaatagtggattaggcaagccaagctcgaagctcctgttgaaccactataatttatgtgtctattttatactatttacaatactcgtatataatttatactatattctttgagtactcgcatgtttatatcgagtattcaaataatttttgaatactcgtataaatttagtgctgtctaaatttctccagcaacatttggcgtcatctatggaaaataatttttataatatttctacaatttttggaggagaatcatgacctgaagaaccaaaaaatatacatagatccaacctctattcaatcaagacatcaataaagaaaaatacgcagagaatctatacacaaaataaagtcagccctcagcatccaaacaccaaaataagcatagatcttccgttcaaaattatcaacaaagctctagttgaagaaaataaacaaccctggaacaaatcctttgttagcgagaagagaaaagatgtataatatattcaacgaagaaagaataatctcttactattaactcagattggagtcgcccaaatttcgaggacgctaggatcttgaagccgctcaagtcctagagcagttcgagttgcctttgaagccgtccaaatcttacaaaaatattagaagaaataagcaacatcaagacaaaaattgccacaagatctcaaaagactaagaagcagaaagtctaaagaaaaagttcttaaccaaaaaattcaccgaataacgaactaactcagagattccaaccaaatattaagttttatatttaacttatataacacacctagaattaaatctctgtatttgaggaattatatcaaatatgcatattttctaataatagcgctttataataaatatgcacatatagccataattaaataaataattattaataaactgttaataatttactaat

SEQ ID NO: 388848 - DNA, 1572 bp, Cannabis indica
ggtgtgtacaaatcataccatagagcagccctggagttaagcaagatttgtgataacataataattggatatcattgtagagctctagcctccaagcctaatccgaagagtagcgttcccaactgtgcccccgtgagccaagagctggcggagggccctctctctcttctccaaaccccaggctatccaaaacaaaggcacatcgtcatccaagtgaggaacatgtccaccactaggacagacctcctcatcagttgaggctccatccgcaccaactgatgggcccctggcccccacatctccaaaagtatgaggatataggccgtacttctaaaagttggctacactggccaacctaattatgttcctctttgccacgaggagagacagtatgtgattcgccctatccctcatctgtatagtagggatggagtgcttgtatattggcactcgttggaagcagcgatgtcgaatctcatggatatcccaagcaatgaagtagttccgggcatatccaccaacttttgatgtaggcgtgctgttggtgtcacccaaccactgatggccaacctgactgaagtagaagtaccacgtctgattctactttggagcaaatttcaaattaaagtagtatccaatctaatacagagtaggctaaggccagcctagctccgcatatagaacatacatccctgagaggtattttatacttttcagggtgatttgtgttggacacatcttgaagtaagtagtaatatctcagaagtatgggtgtaatagaaacaccgccccttgttgaatatggcgctttgacaatgccatccattcgaaggcaagccagtgtgcgctctaatccctcgtaggtatctcacactcgacacctctcactagtccacttgctagtatcctattaaaagtcttggtaggaataacagatgcaggagagacccacctgtctccctgtgacccagcatcaagaacctgaggctctaaagactgtatcaagacatggtccatacctatcactaaaggctggcctagcctgttcaatggttgcccatcgatgccatatgcacccagagggcagtagggaaggacatcataagttccgtaagtcctcctcctaataggcgcaacctcctccacctcagactcagttttagaactctcagcccctagtcaacatcaggcacctctccctagccgaccttcgactctacatcatgacgggattgtgtggcctgctctacaactctaactctgtccattgttgccaccttggcaacatgagggtcatatggtggtgcactatgacacgatcatttcattctagccatagtatatatctatcaatccagaatcactcaaagggagcaaggagacagactgaatgctatctctcaaaagtaaagctaacgtgacctatgacaaagcggttgtcacctccccagatcgacactcaaaatcaccgacgtagaagagacaaggggaggtgagcaacttcctaaagctacatacaaagttctggtcaattgtacccaagggtactttccaggtaaatcacattgtaca

SEQ ID NO: 388849 - DNA, 768 bp, Cannabis indica
tttgatacgtttataaatgataatattgtgtactccatatttacatcgtgtactataatcatatcaacacgatacaataacacaaattgtctactctataattcatgtcattacggttgggcaccttagttcctcgtgttgtaatgacaagtcatgtcatgtgtccttagtaaatttaatcaaatgtgttttcctagataattgttttttttacactacgaaaagtaagcaagagcaaccatgcacatggttattaattaattgaatgggttcccatagacaattgaagggtcaaactatatagtaactatatgtactaatttgaaaactccactttattattaggactatagctagccatatatgtatgttatgtatagctataaatattgcggaattgatccatgcttttcaggaaaaatgtttctgtatgtcatgcacattattataatgtatggaaaacagttggccagcatattaatttgcctaattaatattatttacttctaataatacaaaggtatatctttcaaatttatatgtattgatattacatactactagctagctataagttttttcaagagaatagtttttcttaattaccacatttccaatttggttttgtcagctttgtggtaggaataaataaggtattgataaatattaaggtaaatagtgagataagtacttaaagttttatatttgtaagcggcataaattcaatgtttatttttagcggcataagtatccaatgtttgtaaaact

SEQ ID NO: 388850 - DNA, 503 bp, Cannabis indica
tttttcaaatataaattaattttttaggatttattaaaaaagaaaaattgaatttttcttatttttattttaatggggtaagatttgatagttgtcaaagtttagggagacaatattactaagttacaaaaacacgtcagcatttgaacgaaataataagataaaacctaaaaaaaataactaaatttctgtaaatgtaaaaaatttaggggattcttaataaacagtatattttaagaggcagaattaatattgttaaaagttcagggagtaaaattattaattattcttattattatttaaataataataataaagaatggttaaattgcggcataagtactcaaaattttaagtttgtaagtgagataaacccaatgtttatttttagcgacataagtagccaatgtttgtaaaattgtaattttcctcctgttttgtcagtacagactatgttttgaatttattaaaggaacatttgaaagtaactgatactatatatt

SEQ ID NO: 388851 - DNA, 791 bp, Cannabis indica
tccttctgaccttgtaaaacaagcagagcaaccatggcaagaaactaaggaaaatttctttctaacctcgtaaaagtacacaacaaccatccatgacaaaaataaaaaataaaaaaaaaacacaaacacaaacacacaacaacaagacggtaggtattattaattttttacaaaggataataaagggatcgataactttttcaaggcttcatgtttacggtttttttgcttattacatgatcaattaccaaaatggttctaccactcaaaaaatgttgctacttaaagttcagcttccaattgttttgggcttccaaggattcgtaaacaccgtttcagaggcagaagacggtaaccagacaagccaaagttatcagacaaaggtaattctattcagattggttggataaaccatcattatttcactcacagatttcatctctaaatcctctcctccccattagcaattagaagaggtatacctaaaatctattattatatatatttatctatatgtgtgtgaaatctggttcaattcatgatgtaaaatctgctataaatatatataatattaaatttgggtaacaggagataaacctagattttaagaatacaataagggcagttgtcgaagaggggattctcagataaggtggccagggatcaggatggtgagatcaaggagctgtgagatactattgctggtggcgattccaaggttaaatttcattgtttattgttctttcttttatttttcaggtttctgatttagtagttgctatttggttttt

SEQ ID NO: 388852 - DNA, 2447 bp, Cannabis indica
catgactcttctttcatagcagtgatgaccactttctcactttcataacagtaatgacaattttatggtttcataacagtaatggccatcactaaacatcaccatgctttcataacggtaatgaccgtcaccttgctcgcataacagtaatgattatcacttttcataacggtaaagactgtcaccttgtactcataaaggtaatgattgccaccttttttaataacggtaataactttcaccttactctcataatgataatgactgtcacctttttttcataacagtaatgactgttactttgattgtcacctttttttcataatcaactaattcacaaacaatcttgatcgtgtttgacatgctatgtggtaaagatgtgcttttcttacttcaagttctactccaagtatgttggctaacctgtatggacaaggatcttcgatcccagcccctatgtcacaataacaaaaataataattaatcacttaacctaacccgttctaggtccttaattcatcaccatacgtcatctctataggtcactaaggtaccaataccctaaacatcgagaaaacatgaaaaacaggggctctaaacaccaataaaaatggtaggctaatttttagtggtttctagtagggaaaatgatagatcatttttccaaaatggtcagtcattttctacagaaacgtaaaaccccaattttaactctcaaaatcccacaaaacttaaccaaatattccaaactttagagaacaatcatacaacatccatacaataatttatatgtgatagaattcaaaatcatgccctgacatgaaaagtgccttgagagctcaagctttgagcttaaaagctcaaacttgactcccacctcaaaacagcagtacaacaatcaaatgagcatcacaactaatcccaaaacaccccagaaacaaaaccaaggctcaccaaactcccagaaataaaaaaataaaactcaactattaaaacttatggcttttccaaagaaagaagaaccaaaccttacctcaagattcgacttcaactacgaccactccttagctcctcatagggctagaaaaactaattctttgatagaagaaatcaagaaaaaagtgaggtggtaagggttctagcttgctcgagagaaagggaggaggggatgagggtttcattgatgtttttattttttaaattaactttatctacatatatttatattactacacattttgaaaaaataaaacaaaggtaacaataataataataacgattaattaattaaaagatttattttaccatttcttagccactaagaaatctctaaccctaggttatttggtcaaattcgagtatcgcaacatacctcggtaaatctaaaacctacttatctcaataattccattagagttactaactaaaatcgttgtgaaatttttggcctctgatcgagtctccaaggtcgccaaacctgacaatatttttattccacgaataactcacattataaccacatattctaaataaatctttataattaataaattacgcttatttatccacttatggaaaaaaatcataaactacgctaaattagattagtaggatcataatcctactcattagtacatgattaacccataacatataataaatcctagttattcataattaggtttccaagatattacaaatattccctcttgatggagatttcgtcctcaaaatttacctaaataactcgagacattgctcctacatctatgactctaactcctaagtcgcttctttaaccttgttgtttctccataaaactttaactagtggaattttcttattctgaagttctttttccttccagtccaaaacctggataggttgttcgtcatatgataagtcttttttgaagctcagtgtcatcattgctaaaaatttgtgtcggatctgacacgtactttctcaacctagatatatgaaacacattatgcactccggtcaatgcatgaagtaaagctagctgacaggctaccaggctacctcgctccagtatcttaaaagggataataaatataggcctcaactttcctttctttccaaatctacatatccctttcataggtgatactcagatatatacagaatctccaagttgaaattagatatccctatacgctatgggttagtgtagccaatctgtctactttgtaaagcaagcatacgagatcatatctttttaatgggttcactagtcttccggactacttcagatccaagataccatctctcaccagtctcctcctagtaaatgggtgatcaaaattttctaccacataacatctcgtaaggggtcatgccattggtactctaataactattattgtacaagaactcaatcaagggttgaaactttttccaggaaccctcaaaatctatcacacatg

SEQ ID NO: 388853 - DNA, 659 bp, Cannabis indica
taataatatatacgccagtactatagcgtaggctacaatctctgagcgtaggagtggtcgttgatatatattatatagaagaaatataagttagtttagtgtgtatatatatatatagcaaaaaaaaagaatgagcaaacacgtacaaattggaggtgagtgcataatatagctggacagcttttccacaatttgataaatcacatgcatgcactaatatcttccaaaaagccaggatgatagatcatccgatatatatacatatatatattatatttatatatgatcatcacttcactgtctacacactgtcattataatcatcagtttcgttactgattcggagaattttcattattgtttctgatttaatcagagatttataattgtttttcatatatatattatgatatatattaagaaaaaataatagaaaaattggcgagcctaattagttataatgtgatcaatatatatataatatatgcagagaaacatgttgatatatatataccaaatcattatagagatcagaaataacgtgatcggcccagattccattattattttaattaaggacaatgcctatattaatgtggaccctataataagatatatacctaaagacaaatagatatgattctttctctctctctctc

SEQ ID NO: 388854 - DNA, 538 bp, Cannabis indica
attttacttgtatctctataatattagttttagcattttagcatttcttctaggtattattacatgtgtatagtatttttttcggtgtttatattaatattagattgtaaatttaaataattaaaatctacatataatttaagaaaataatttttaaaaaatatcactaactaaacacaggatgccacctaagactgaccgtacgattaaatgaatcttcgaacaaataaaattattggatcctttatttaaaaaaactatatggtattttcagagaatactaaaaacatatacatgttttaaggaaaaatatttttttggtcccttgactaagtgggttctaggcacgagtctagtctgctttagcataggcctgatcttaatgccacctatagaaagtgctagacaatactagtaccccaataacaatgctcattgggcccgtttgatacgcaggattggattggactgaaaaaggattggactggactggacaagattggattatgctgaaagtaatcctgtgtttggtttaaga

SEQ ID NO: 388855 - DNA, 1091 bp, Cannabis indica
tttttcaatttgatcccgcaattagatgttgtcaaacaatactgaatgtagcccttttctatgaaagtccatcatcttcataattcctaattacaaagttccagcttactcgaaagatgatttttacacttcatatatgtagctctattctagcaaggggtctgataagaaactgaaataaaaattgctcaactctgtattaatactttaatttatcccaatccctcatatgaatattttaacccaacctaaaaagtataaagagtacaagacatgcaatggtcagggaatattaatggtcgccttaaatgcaatgtacgaaatcgaggcatattaatgatggccatcatcgttttgctactggagattccacatgctccctcaagccgcgtgatgcgaacaaaccaagaaattgacgacacatgtgctccactcatggaatatggaaggtccacaaccttccacgaccttctgccttgaaattttaaagggcctaaaccgatcatggccctgcataccacaatagatctggatggtagttgcaagcctccatgactctcaaaccccgaaggcttggaagaacattctgtaaaaatttggcaagaacattcttgtgtgaaatactccatagccaaagagctcaataatattgactagtgaactaaaattcattaacgctctaatcatgtaaaaatctttatcttcctattatttcttaaatattttttacttagtttaatctgttagtgtttcggtttctaaaaatctcggtaaacaataataataattatttttttatttactttacatcttgtatattggagtgcacttgtaaatagtggatcaaatataacacacatttaaaaatgagtaattggcggtaaaaccctctcaacttttaatttacttgcaaataaccatccaaccttatattttggtgggaaaaccctccaaagtgctaaaccgttagcaaattgaaggtgccatccatttatctcagttaactgctgacatggactgcctacgtgtacatcatgtacacatggcatatttatattggtccacttaatataattatttaaaaaattata

SEQ ID NO: 388856 - DNA, 1534 bp, Cannabis indica
tgcttgttattccactttattattagtttctatttatttattctttaatttttggcagggtttccatagcaatttgaaaagttacataatacataggttttgttagggaattttataattatgtacatatatatatgatgacttactttgatcttgttgtatcaattaataataattgcccaatgaaatgtaacatattctaaataatgaatctatttatatatatatatattatccaactaaatatccaaattaaagcctcctctctctccaataattaaatatgtaatccctttacaaaaaaaaaaaacttattaaatatgtattgacacatgcatgtattaatgcttaattatttattacttgatttttgaagggttgccatcaaaagcaattaaagcaaggtacgtagctgcagttatcataattaaattaaatgtgacccaaatatttaaagacatgggctgttcatgaaaaacccttctcccttgatttttttttctttattaattaataagttaaatagtgtataggaggcaactcagcgtgggagtgtgtcatatatatagtgagctatcatttaataaatatatatatggctagctaggttcctctttgaggaggaattaaggagcccttccctgtcgacagtttaagggtttccaatttcatgatatattttgatcaggtttccctacgtgactccatgttactattaattactttcatcaactacattaactaattaaattcagttctaccaaactatttataaacaatatatatattatctgacaattattcatttttcttaatatatcttgggtaaatccaccgtatagttggtttcttttacgtacgtacaaaattctacgtgaaaaagaaatcatatttactactcaagctttctttttatatatacatataaatatataactctattaacttgggtaatgaaataaatggttaaaagtcaatctttatatgtatgaacactaataaattgataataaagagtccccaacaactcaaaagtatataggaacacaaaactaattgataaaagatgatttactgaccaatacatcgtaattaagagctggctatcgagcacaagccacaaggcatttgtttttttctgacataatctttattattgaggcaagaaaatactccttttttttaaggaaaaaaaaacaagaaaatggggtcactagttatagcaacgtctaactaatactctttttgcttctctctatctatacattaatatatgaattacaattcaattatcagagcattattataagcatactgctgaacattattgagcaaaaagctcgaaaataaaacaaatatataaatgaattttttgtgtatgattaacatgtttgtatggaaattcaatagtagctgttcaacaatcagttcaatcacttcctgacgcaaacatgatcacctctagcccattcattgattatgatacacattttcctcctctcaagaggtttgaaaaaactgaagatcagggcac

SEQ ID NO: 388857 - DNA, 1054 bp, Cannabis indica
agatagccaggattaaagaccacatggtcggtcacactatccatgataaaaaagcaacatggccaaatactagcagtgttaaaaaatagagagattacgaccaaagatacgaacatgaaggccctgggactaaaaaagtagtgttctaaaaggcctcagggacatgaaagtaaagttccaaaaaggccgcaggccacatggaacacaaaagtgagtaatggtctaaagctaaaaggccacaagccataaaaagccacaggctatgcagactatgaaaatattgtctatgtgatacaaatataatgttgaatattactaacaaaaatgttgtctaaatgtgtgcaggggctgaaggagctgaatctagagccgtgggattgagatccacggagtctaggacgaccccatcatgagtaatcagtatgttggtcggcctggtggttaatgtgttagccgaaaacctccaccacaagtgggtcggctaactcctcgtcgtgtgtcctcgatgatgacccctctcgataggcaacaacctggtctgtttccatccaagctctcaaaaagttccttcccacgagccaacattctctccacaaaagccttactacccatgtacaacagtttagctcgagggttgtgcaactggaactcataggtaagttcagaggacaggtcaacatactcctccctaatagcctgctggccatcaaaagcctcctacaacttcttcttatgatcatcaagttcaatttgcagcccagagatgagggtagcttgggcggtgtactctacattcctggggccaagcatggtctctaaaccagaaatcatcctctatctctccgccgggaaggcctccacctcaaaattgactttgtcctttaccacaaaggaagcctccaaggcttcacacactcttgaaaagcatctaaagaaacccgagagccatcacgagttgagctcagtttcatcacggcctgaaaacaaagcaaaataacatcagcgtcaaaaaccacaacactggccgactagtccccccttgggactgctatgg

SEQ ID NO: 388858 - DNA, 856 bp, Cannabis indica
ttttcagcccgaagggcatggctttatagcagtttaggcctaggttcatcatgaagctagtgtgctcctagtctagtggatgcatcttgatctgattataaccagaatacgcatccatgaaatacaggacttcatggccagtcgtggcatctactagctagtcgatcttgggtagcggaaagcagtcttttggatatgctttgtttaggttggtgaatttgatgcaaactctccacttcttgttgggtttaggcaccaacacttggttggatacccactgagggtagaatgcctctattatgaagtcattggctcttagcctttcgactccatcattgagcgctttggtgtgctccatgtctagcaatctccttttttgttgaacaggctggatgcttggatcaatgttgagtgcatgggtcatcacggaggggtcgattccaaccatatcttcatttgaccatgcaaaaaggtctaggttttcccttagaaattttataaagattgacttaatttcaggagccaaaccattatcgatctttagtcttcttgttgggaaagtgggattaacctccacttcttcaaactcttctataggtctgaagcttcctgcaggatccccaaagttagggtctatgtttgtgtccctgccttggggaagacttcattgccccttagtactgggcttgtctttttgacttttggcgggtatcttctcctttttatccttggatagggaaaagttgtagtagtgacaggcaaacttctcgtctcccctcacacatgccacgccatgccttattagaaatttgaggtgtaacgccctgtccaacagggacgccacgtgtgtgcaatt

SEQ ID NO: 388859 - DNA, 500 bp, Cannabis indica
ggtgacatttatctgagatttaaaaaactaaggcattaatattgatgaggtgttcctctacgcctccactattgttgacaccacttggcgggtccgcaatgataaggtacacaataataggctggataatataactcattgcattgattctattcgctcttcttatgcagattattgtgcctccatctttctctctccctccccgtcagtggttgatgtttggcgccctcctccccaggattggctcaaattaaattgtgatgttagagttggattggagagcatgtgtatcgttgtggtagcaaggaaccatcttggtgaggtggtttgcgttagaacaaaactttaaaattttgccgtttagctttagaagtggcgaaagcgaaaggccacaagtttgttatggtggagagggactctagggtggttatcaacactctctgtgaatgataactctatggtatagagttattttttatgctttaaaactgaaaatattg

SEQ ID NO: 388860 - DNA, 805 bp, Cannabis indica
ggggtttgtccctactcatcttcatgttattttgttaataaatttgctttcttaataaaatagcaaatgttcactaattaaaaacaaagatactagaagtctagaatgtatatgcattagtaaagattataaaaattgtattaaaatgaaaatatataagaactatttttatggaaacatgtatgaattactaaatataaatgggtatttatggatttaattcaagcttctattttatattttgtacttacgtcgtactaatatatgctaatatattttgtatatctattcagacccatatgtattcatatttatttgtatcgtgttctgttcgtgccgccaaaatagtcttccgaatgtacaatgttaatgttgtatgcacataaagtattttagtttatttcaaataaatttttactataatttaatgttcttttcaaaatttataatttatttaaatattctttctttatatatttatactaatatatcttaataacaatatttctagatttcaaaataataataataataaataacaatatttctatcaaattgaacaatgcatacaagcctccctaacatcatcaaatgattaggaagaactaaggagacaaagttcaggcgactggtttttactgctgcagcagccggcctggtgtatagcatatggggattgaaaaacaaggtgatatggaccaaagaagaacaatcacctactgccatgatcaatgagttgaagattaacttgaaactaagaattgagatgttttggccaaaataaagtctcaaatatagacacaca

SEQ ID NO: 388861 - DNA, 988 bp, Cannabis indica
aatacctaaaactaaaaaataatcatattaaaattttgcattttgtgtattcgagtaaaatatttttttttttttggaaaaatattggagtataatattaaaattatgtaaaacatataaattatttttctttcactaaatataacacaatatttatatctcccattaaaaatagttttagtatgtgataattttttagtgtaatcaccttgatgcataattaattgtacactgaagtcaaagttttaatttgttaaaatgcagtagcacatgcgggactaaaatttacatttggaactccatttgtagttaattttttaaactataaatggcaaaggcgacatttatcaatgtataattctattgaggaattccttcacactcaaaataatcttagtcctataagatactcatttagagatataaagaagatgacccaaaactttaaaaataaattaggtgaaggaggttatggctctgtgttcaaaggaaagcttcgtagtggtcattttgttgcggtgaagatattgagtaaatccaaaggaaatggacaagatttcatcaatgaaatttctacaattggaacaattcatcatgtcaatgtcgttcgtttgataggattttgtgtccattcctcgaatcacgctctcgtgtatgatttcatgtccaatggatctttagaaaaatatattttttctcacgaaggaattgcctctttaagttgcaagcaaatttttgaaatttcgcttggtgtggcacgtggaattgaatatttgcatcaaggatgtcacatgcaaattttacactttgatattaagcctcacaacattcttttggatgaaaattttaatccaaaagtttctgattttgggttagcaagattatgcccgttggataatcagaatttgtccttaactgcagcaagaggaacattaggatacatagctccagaactattttacaaaaatattggaagagtttctaataa

SEQ ID NO: 388862 - DNA, 1206 bp, Cannabis indica
atgtaaccattgaaacctcattcatatatttatataggatatgtctatagtaagcaacttagttttgtccttatgatagggatattttatagccatagatatttaatttaaaggtgataaattaatgagtttatataagtgtttaatattcagaatatatcaaatcatttataaatttattttttaataatatttttaaatataataataattctttaaatagattattattatattttaatattctccaattaattaatctatttatttagcatctttctctctctcttactcctattatttggtctttcattgaactctcaattctaaaattcatagtgaccatgcaaagcttagattggaggacctacgatttttccatccacctaccgcactgcttcgactattgttaccttctgcaccgctcttgaggttcatagttcatcgattggtttggtgcttgagatggctcaacacttagatgagaacatggtttgaaccattgtccaactgaataaggtttcaaatattctttccttaagctaaattcaacagcactagtgtaaagagtgataaattcttctgccaactccaatgaatcaaattcatgaccaaccatgtcatcccttgtggatcaataaacattccaaatctaacaaatttgattctacaatcatccacatcatccaccgcctgcgtacaatcatcaatttttgattcttgtagaagcacactagtttgttattggttcgccattcaaagtttttaggaacttaaattagataacaaaaatcgtttttttttttttatttttacgccctaatggtattttacaatcatataatagcttaataatttaagattttgagttcaaacccatgacctctcctttttcccatccctctctcaccactaaactagtcttagtggctttagacacaacatcttttatatcatatcgttcgccacttatctattactgttagagattttattacaatggaagaaaatcaaaatattacaactctattataatacaatacaaggaccaacaaagagattaaataaatgttacaacaacataatatacaatatatatatacactatatatatattatatataagaaatgtaaaagaagataagaacacatgcaatataaaatatgtatatatataacaagagaataatatatatgtatatatat

SEQ ID NO: 388863 - DNA, 1442 bp, Cannabis indica
ccttaatcctaaattctaacatgctctccgaacaattaaaagcttttgttgtcttcacctttggcctccattgaggacctttcgactaatgtgtgccaattctagcgttagaatctttgacatgtttcaaaaaattcacaaatttcctaatgtgtacactcgtaaattttttgttttggccttgtaggattctttcaaatgtatgtttgaccatgtggtctcttaaaggttgttcattatacctatactttctagatccaaacgaagatgtgtgttttagaaatagctacacatcgttaatgtgtgaaaaaataatatcatatataagatgaatgagttgctcctcttatttaactaattagctttgagatagaataccgtaccttatccaaaattctcactcgatatatcaaagcaaattaaaaaaagctctcgatgtcttcgcctttgacctctatttgggaactttaggccaatgtatgtcagtttctagtgttgggggtctttaacctattttaaaaaatccacaaatttctcgacgtgtacacccacaaatttctcgatttggctttgtaagatttcaaatgtcaagttcgaccctgtggtctcttaaagattgttcattatatacctatattttgtctaggcttaaacgtgaggaggatatatttagaaatagtcctacatagctgatgtgtggaaaaataatactatatataaaatgaataagttattctcatattgctaattgattttgagatagaactctatgcaccttaagcatatcttatcttaagttctaacaccttctgtgcctctaaaggcttagaccacatagagccactaccagtgccaaccatacaaactctaagttatgatcaactaaaaaacttatttagcatcgattttgaatcgacatttacgcttattgtgttagttcgaataaccgatgtatattataccgacacaaaaagaaaaagaaaaaatattgtaattattatcaaagtgaaatagtaataccaattgtactaataacaatatgatatctaataatgatgctagacaccttaagatgtcaagcaccataagagttattggcgcaattaattaattatcaaatttcacatgttttgattagataaataatatataaaattattaatatcattcataatgtgacacatcggtgtatacatattgaagacattatgttgtagcaatgctcttatgttatgttaagtggagtacactattaaaaaaaatcttatttttagtgacaataaaatttgtgactaaaagtaaaagagttgtgactaatattataaattattattcctatgttgtgactaaaaggtccgtggaagaaagtattagttacgaaaattataatttattgtgactaaatgtatttttaatcacaatacttgttgtgactaaaacta

SEQ ID NO: 388864 - DNA, 902 bp, Cannabis indica
aaaatacaaatacaaaactacaataagctaactgctatagagctaccagcctaaaactacccaactaactaagctagattaatacataacctcagcaacactttaatttgttgtctttcttattaaattgaaaagaaaatataataaaaaagagaaagaaaatagaaaagcccttttgattcttttctcaaaaaggcattttgtggtcatgttgtggtccgaacctaaaataatattgtaaagaaaaactccaccaaagtgatgaaaaagcctttcttcttcttcatcatcataatcatcaaatatatataaatcaaaagccatagtattgaaactgtgtagagccattataagtaccattgttcatcatgaactgtcctgatcttagtactgttccattcatgtcttcttcttcttcatgcagctcttcaagctaaagaaaaaaacccataaacataaatttaattatatataagaagaaatatatacattacttatatgtataatatttttttaattaatccatctatttttatatagtttttcttttttaaaaaatatcatattgtatataatattacaacatatataatacgcttaaatttgaggtagtgataacagaccaaatactacaatttttttactttatttatattaaattattttttattgtgggggcttggagcattggtgcccatatgtaatggctcaggcctcagatgtttctgagtggtggtgatgagctcgtcttgaaaattttgatttgaaatgacgtactcttgctgctgttaagacaatgggtttgtaagttgtaacctgcttacagatttttctttttaacatgatctataagagtgaagaattgtttgccaaaatggtctcactaagattgatttttcatc

SEQ ID NO: 388865 - DNA, 1017 bp, Cannabis indica
aaaaaaaaaaaaaacaactatgccctttctaaagattttgggccttttcaatagtgttttcttttagttatttcttcttaaggaaattaaataatagtctattacatgatgataaatcactcaaagaatagaattaacaagattagcaaattatgtcgcttacaaaaacatgaaagaaaaaccataatagcaccttcaaccaaaagactaataagccttcaacattgaaacatcaaagaagtgcgaagaatattagaactccaatctaaatgacatgtgacaaatcacacctattaatgactatcaactaaaaatcttctaatataaattaggtaataacaattctattattcaatcgataataaaaagaaataaccaaacaaccaaccatagcgataacaatcataacaaaccactgcatcataaaccatgaggctaataaaaacttgagaatctctcaaatctgaacatggacaagtatagtcatgttacttacaaaaatttgctttgaggcaactgagattctccccaatgttcccttaaaaaataagactaaaatctcctaccatgaataaacaaaaccttactaccataacaataataaggtggtgtatcaacactattactaataataagaacaaaacaaaaaagcaataaaacatcaatacaagccgcacaacattccaatgttcaccgtacacacgtttcctctttaagaatttatagatccaaacccctaccccagccaacaacctccaccacggccataacagaaccccgaccattgaccaccattttgctacaaacctagacgcccaaaaccactgagaaagtcctaggccccaaaggaaatagttggacccccaaaatgccaaatctagacctgaaaggagaagatcagacccccacactgccataggccatcagatctacacctgcaaagtcgaaccactcaccatagacgcccactgcccataacaaaccaacgctaatcaattattattatttttttttaaa

SEQ ID NO: 388866 - DNA, 578 bp, Cannabis indica
agagagagagagaaaggcaatcaagattgggagagaggagctcgggggtcctcagcaatggctcttggctcgatggtcctcagcgacgacggtacctgagtcttggtcctgggtacctgcatcgagaaagaaagagaatagggctgagagagagagagaggcgattgacttacctgggtcgagggtcctcggtgacagcggctggcacggtggtcatcggcgacgacagggtttgggtccttggctccttattttgcgacgatggtttttgttgggaaaaggaagaagcagaaaaagaaggagaaggagaacgaagaagaagaagcaaaaaaaaagaaaaagaaaaagaacaaaggaaaaaggaaaaaaaagaaaagtaaaaaaaaattattttttaaagtttttctgattttttaaaatttttaaatattttaatttattttttaattattaatagtaggtgtcctaataaaatttcgtcacgtgtatacttgtgtatatagtggttaagggtgtacatcaaatcgctcaaaccgcccgcaccgcaaaaaaaatgcaatttgaaattctttgcggtg

SEQ ID NO: 388867 - DNA, 714 bp, Cannabis indica
gttacgataattctatccagattttaagcttattgtttgcttttttgaagtataaaaaagaaagatgattttttggatctcgaaaaacattgaggaacccctaagtatttattaataaaggtcttgtcctccatgccaagtaaatgaagaaaagagttcttgtcctgagaactagtattaggagaaaacagaacagaagatttaacaagattgatcgattggccaatggccttattataagtacttaaaatatctttgatggcttcacaattcttataggtcacccgagtaaaaagaagaccgtcatcaacaaaataaagtgagaaatacaatgacccgagcgacaaatagaattgcccttaaagagattatcttgatctttggaatggatgatagttgaaaggctttttgcaacaaggaaaaaaagtatggtgaaaggggatcaccctgccttattcctctggagggaaaaatggaaggagaaagaccattattaatacaaagctcgaaagagacagtggagatatagttaagaatgagagaaataagacaatgagaaaaaccaaaatagtgcaaaacatacttgttatcccaaaattggcactctgacgtggcatcacgagaatggtgacacgtggcatctacctagagcacctggtcggatcaacatgccgagcaggatgcctcgctggcatgtccataatggaatactca

SEQ ID NO: 388868 - DNA, 681 bp, Cannabis indica
aaaatgaaaatgaaacttataggtacaaataataccagctctccaattagaacgacattctctccacggattacgtatagacctaaaggcatgtcacagtaaagttcaccaacaatgactctctcacatgcaccctcaagaacagcattggctgcatttgagaaatataaacttctttagttactaataagatcttaaaactttaattgaaaagatggcatgttcacatgtgtaccaaattgatcaaatgatcgaagtatcccgagaagctttctcccatctctaagcaggacaagaagtttctctgcaatgaaagaacacagtaaaaccacataagattataatgagaacaaataatcatcatcaattatggatcaaggataattcatgttgatatttcctactgcactacactgtagatagaaaaacaatgagacagactagcaaaaataaaaattggcacaaacaacatcacctgtgacccaatatgtcatttaaatgcaaataagtttgaatgcactagtgaacaagaaggcacgtgtattctcttaaacacaataagatccataatatcacacagcgtgatcaatctataaatgaggcttgaagttaaggacctaggtcaatgaaatggaaaagatatagctgcacagcccgtagatcataaatggaaagaaaaca

SEQ ID NO: 388869 - DNA, 983 bp, Cannabis indica
agagagagagtatagatggaaaagtggaacgatggtcaaaaattataatctcaaataatcttgatatttcaaaatatctaattatcttgttccactaattctaagatcctcaatttgaatttaagtgtactcttaaatgtctaaaaacgtttgcatttcactgttactgaacataaaaatatataaaattcgtaaacttcacatataacatatataatagaaatcaaatatatttccataattgagaaattattttcctaaatcctatttctcactataagccctagttctacaaagaagcggagaatcataaattactaattaaatctcttaaatatttgttaattctcatgatttaactatgtggtcaatacagttaataacacttaacaaatttattttagaaagggtagaagtctattttctatcaaaaaaaaatgaggtttaatttattgcaaatatcataattaaatggtttgaatattaaaaaattgtaatggagatttaagtaaaaaaaaattatttataaatattaattactcaaaaagttctattaaatatactaattaattattattttttaagcatatagttaatcataattaatttaattttataaaaaaaaaatatttacctattagtaacttgttattaaatgtaaaaaaaaaaatgtaaccatcatagttacattaaaaatataactattgaatattcactcatataaatatatatctattctatataaagtgtgccagaattcttggtttatgagaaatttatgggtgactttttatttatattgaaaataaaatgggttcactttttatttatatataataaaataaataaaataaatcccattacatccaaaaaaaaaatacaattgtgtttttgctgttgtacatctacgattagattttctaaatatacttatgttatttattagttggattttattctaaataagaatttactactattta

SEQ ID NO: 388870 - DNA, 2086 bp, Cannabis indica
cggagttgtactgttcaaaacctggcaagggaacagtcaatgaaggtggaagaggaagcggtaccggcggcggtggcagtgacaacccaagtagatggttattattgatagggtcaaatatcagcatattattacattattggacttttcttcttgtaaaggaaagtagaataaagatgaacaaaaatcttgattattattattattgttattaatactgattcccagtaaatttatggaccataaagatgatgcttgttgttgttatagcgtaatactattattattattattattattattattattattattattattgaaatgatattcttattctactaatactgcacctgctgttgttgatgaatttgccataataatcgaattattgttgttgagcacttctttattttccattaatttagattaataaaaaaacaacacatattatttatattatttttatttatatattattatttctatatatttattaatttatttttttttatttttaaaatacattagcggcggggtcccaccactaataatattattagcagcggagccatattccgccgctaataatattattagtggctatttaatagcagtgcactattagctaacgggggatttccactgctaatagcctatagcagcagaattggggtttattagcggcggagtggcccgccgctaatgaggggatatgttgtacatgcgcaccaagttaaatgtcaacctaagtgcctgttgcacaagagtgccaacttgggcgcctcccaaggttttctcccaccagattacttcgtttgttgttcaatagcatttgtatcttcatctttgatgaaaacaaaaggaaatgaaggggaaaaatctttagaatatacgtcacagtgccttaagttgacatacgtcaagttaggcgccttaggaatccgtctcattgatgcctaatcttctttttggtggaaagtgcacacgtaaattttgtttcgtctaatatgcatgtgcgttactcagtgaacttgagtcagtgccctagcatccatgtcaatctggacggctagagtttgtttccttcattcacatgtcgaagtgatattaagccataaataaaagtgatattaccatttcttttctcatttatattaattgagtagtgaaaccatagagatataatacaaatgatgaaccaaagaaatccacctctcattgaaccctaagtgtggcattataccataaataaaattctacttgtaagccttgaacatatattcgcatttagagcaagataaccctaatatttgcttttcttcactcaactcgatatcgcaaaccttgaacatatatttatgttatataaatttggcgaaaggagccattaatttattttattttagctaatttaatagtctctgtttatatttaaaaaatttaaaataattcttttgttaatttttacaaaatctactaattaaataacattttaatcaaatccatttttagaacactataaaaaatcttacttttagtcacaataaaatttataactaaaaataaaaaaaataaaaaaaaaaattgtgactaattgtaaatcatcatttctatgttgtgactaaattaaaaatctgtggctataaaggtattagtcacaaaaatcacaatttgttgtaactaaatgtgtatttagtcaaaatatttgtacttcaaaaaactgctacttttagtgacaactttttagtcacaacataattctttgtgactaaatgtgatttttagtcacaacaaaatatatgataaaacatagtatttatatagttacaagttgtcactaatttagttttagtcacaacaagtatattgtgatcaaaaatacatttagtcacaacaaattttaatttttgtgaataataactttaaccacacggaccttttagtcacaacataagaatagtgatttataattagtcacaattttttcacttttagtcacaagttttgttgtgactaaaagtaaactaatgacaatttgtatttaaatactatgttttagttaagtaattttttattgtgacta

SEQ ID NO: 388871 - DNA, 883 bp, Cannabis indica
ctggtaccactcttgggttacaagttgttcatacaagtcttgcttcaatgctccaatgctttgagtggaatgtggaaaatggaagtgttaatatggatgaaggacctggcttgaccctcccaagggctcattccttggtttgtgtccccaaggctaggcttactcccttgcccttgtgaatttggtgtagtgtaatctataaaccatacttaattattgattatatataatttataaagtccttaattagtacagtaagattgattgaggtaagggaattagggaactattctatatttcttatgaaataatgtacaattttagtgagtttattatgatcgcttaacatttataagtcttgtcagtcggccatatatggtcaaatttactgtactcagcttttttattgcgaatagtattcataattatgagtgtgtgctatagttttatgttcattgttttgcactaaatatcttccggtgtttttaatgaaatttgtacccatttagatttaatatttttatgaatacggttatgtttatagggacaggatttggtcccgttatgccaaaacagggaatacaatccgtgattgtactgtagccgttggattgaattggggcatgatctaatggctggggttaaagtaggggtatttaggggggaaaaatggtaaccggttggttttatgtattttaaattaattaatttttaaaaaagtgacaccgattgacgattgacgtgtgacgtttgatgtacgggtgacagttaccaattttgaaaagtcactaataagtgggttcgtggggtatttagggcacatttggttcttcttcacacttcttcacatttcgttcttctttcacatttccttcttcttctt

SEQ ID NO: 388872 - DNA, 588 bp, Cannabis indica
ggtaattattaagattattaagatgtgttagtgcatgtttgagaataattaaaaaattatttttttgtttttaagaatagaaacagaaaattatttttttgagaacaattaagggtacttcgccatatttctagaaaattattttcaaaaaacaagaattttgacaacaacaaaaatgttgtcttctctttttaaaaaacaattaattttttgccaatttttttttcttcgttatcttacattattttccctctcttcactttctctctccttatttttctgcaattgctttatctctcatctttttttgtccagtctaggtttgagtttggactgaagccaaggtcggaatccgggttgatccaaagtctgggtttgggtccaggatctaggattcgagtcgagttgtgggtttgagtcgaagtcaccgatttgggtcgggtcgggttcatatcaaggtcatatagtattaaatttgaattggctattttctgaaatttaaaaaaaaataaaaaaataaaaaaaaactattttaggaaacattaaccaaacacgtattgtgttttgaaaattttaaaaactattttt

SEQ ID NO: 388873 - DNA, 1157 bp, Cannabis indica
gatgaaagttaaaagagtagaacaaacaagaaaaagaaaatgaatatgtaagtgacaagagagagtgagaaaatcatgtctacatgtaaaaattgaataataataataagtattaatgtgtaagtagaaattttgtaatattttaaatttttaaaaatatattaaagaaaattaatggtaaaattatttaaaatgccgctcattatagtaaaagaagtaataatatgtaagttttggttggattgagcaaatattccttttatgtttggaaatgtgtagactaaacatttttagttgaatttaaaagtaaaaaattatatatttaaaaaaaattaacataatttttgacatattattgatttattttttatgcttttacaaaaagacttaaaatatataggatttcaatagaaatactattataatatcaaatattactttaaattagtttatgtggtaagaaaaatcatttatcgtataaatatagaagaactaaattataatttgtcaaaattttaataataaataatatctcaaaagtaaaataaataaataaataaataataaaataaaataaaataaagaatatttattttaattttcatattttgtcttaggtctcttaaattttgagacgttattgtctaacaatatactgttattattacaatttaatattggtatccatacattttttttttttgaagaaggtatccatacattttgatttaatagataataaaaaaattgctaaccactcacaacaaactacattggtatagtgttaaatactttaaaatatttaattataacaatcttaaacaagataaacatggttggcgctaagtacttataatgtttatggtatatatgaacacattgtatataataaaaatcctgtgatacaaatttgggtaattattaaataataggtgctatttttggtggaagccagtttcttttgccataatataaatatttacatttttacctattatattttaaaattaattgagtgatacatgtacagcttttttattctattcatatctatctattctatataaagtgtgtctatataactgaaattcttggtttatgagaaatttatgggtcatttttattttttatttaataaaataataaaataataataa

SEQ ID NO: 388874 - DNA, 2721 bp, Cannabis indica
ttggacattgatccttgcatagtgtaattccatctctagatagtaattgtcctttcttggaattctccattgagaatctttctagcaccttattgagataagttgcttgagaaagtgctaatgttctcctctttctacctctatagattttgatcccgaaaacatatataacttgtttctccccaattcttcatttagaatttgtcatctaaccacttatttacatctgataacctttctacattatctctaataagtataatgtcatcaacataaagaactacaaataccactatattaccattaatgtatttgtatacacaggctttctttgttttgttcgaagctatactctttagtattattaaggtgatattccatgatctagaggattgcttcaattcataaatagatttaagcaacttgcacactttttgatcttcccttggtaacacatatcctactagttgttccatatatatggtttcatcaagatcaccatttagaaaagcagtcttgatgtctattttccatatctcataattatatatgacaactatggaaagaagaatgagaatgtgtttaagcattgccacaagagagaaggtatcttcatagtcgatgccttctcgttgtgtgtagcctttggccacaagcctagctttaaaggtctccgccctccctttagcatttttcttattcttaaaaatccacttacacccaatgggagtaatatcctaaggtggagtttcataaacccagactttgctggtgcacatggaatctatttctgaatccatggccttattccacttgtatgagtctggatcatccattgcttctttgtaagtcaatgggtcgtccatgtctatgttaaaaacaagaacatgtgcatcatgttcgtaacggataggttgtctcaaaatcctcccactacgatgatgtaccagagtttcgtttttcaggaattgtggtaaccgttgttagtcgttcaagtaatggtgctgaaattgttggtttagaaatctcatttctaatttcctcgataaccacatgactgggtggcttgcaaattttcatatagtcatgttaaagaaaagtatcatttattgacacaaatactttattatcttgacggctatagaatcaggcacctcgagtctcatttgaatatcctataaatatacaaacttcagtcttaggagcaagcttcccatacttaggtttaagaacatgagcaggacaaccctaaatatggaaatgttttaaattgggttttgtcccattctataattccattggagtattacttatgctcttcgagggtactacattcaaaatgtaagtacctgccaaaagtgtgtatccccagaaatttagtggcagtgatgagtagcacatcattaatttgaccatgtctaacaaggttcaatttcttctatctgcaacaccattctacgaaggtgttccaggtgctgtaagttgggataagatcccttcttctaaaaaatagtctttcaattcaaaatctaaatactcgtcaccacgatctgattgaagtgtctttaatgatttacccaattgcttttcagccatacccttgaagtctttgaactttcaaaatgttttggacttcttggccattaggtaagtatgaccgtatttagaataattgtcaataaaggtgataaaatatttataaccaccttgagcttgaatattgataggttcgcacacattagtgtgtattagctcaagttgttgtttgactttattacgttttgtaaaaaaaaaaggtcttttgtgccttctagacaagattcacaaaccaaaagagttcctaatttttagttctctcgaaggaccattctttgttaaccaatttattctgtctaggctaatatggcctaaacgtagaagccatagatatgtttcatcatcatcagaaatattttgtctcttatttgattgaggcaatgctactctaaataatttattatttaagatttattgctcacttggcttgagcacataaagtctgttactttgttttgcagaacaaataggtgtaccattcttagaaataataatctcattattaataaaactagtatttaataatttttcatgcaaaagagataaagaaataatattcctggtacattcaagaataaaataaacattgttcaataacaaaaaattattatcaaatttcaaacagaatctaccaacacccttagcagacatttatacccaattacccacgcgaagaaaaaatataattagtggctcaagaatccacaatccataatatgattagtggctcaagaatcaacaatcaacacccttagcagccaattcccttgatgagtgaagtatcttcatagaagaaaaaatatgattagtggctcaagaatcaacaatccataaggatgtatcatcttacactaaattagcttcaagaaaaaataaatcatatttacctttcttaagcttgtacagatactttttacagtttctcttccagtgtctcattatgccacaatgaaaatagtttcctttacccttcttgtccttggacttgggactggctttgttcttcttggccttgggtgacttcttgcctttgggcttgtcaccgctattgtccttactgttccacttccttttcttatttgaagatgaaggagagtttgacaatgtttgtaaagcccgcttagt

SEQ ID NO: 388875 - DNA, 1100 bp, Cannabis indica
acactgcattctatattccctaacatataaaatttccttattattatttacaaagataatatctagtaaagtaatatgataatattcccaatcaaaatggtagttataaaaattatagacagttacaaagtgcatcgtgtaaatacttttttttttttttgagaaataatcactgttattataaattaagatcatttacaccaacagataaaatagaataggaaatttctcctaaccaacacatgtcttcatccaaccctaaagcaaatttagctaatccatgagctgcttgattagcagttcttttaatatgggatactaaaacaccatgggagaagtataagagacaacgaacatcaaatataagatttgaaaagcaagataaatcagttgaagtagaatttagtgctgcagagactctcaatgcgtcagtttcaatatgcgttatagaaagttgtaattgtaatacccaattgagagcgtgaaaaagagattttgcttccatttcatctgatctaaagcttccttgaataattttagaaagggcagcaacaaccatgccatcgtagtcacgaagaatagcacctactcccagtttttttttgctctaaattcgtcgctacatcaacattcaacttgaaaccatttatgctaggtgatgagtgatgccatataagtctatcatgagcagcaaaaaaacttaaggggattgtcaaaatttattcaacatctattggctggaaaaaggtgtttaacaagttgatattccattccatattttatgtaataagattggaaactgacatgagagatggaccagtatagctttctggtttgaagttattgtggctgggaatccaagagcagggtcggcccttaagatatttgggcccaagacgaattaaattttagggccctcaaaaatatatataaaaaaatattagaaaaagggatttaatcccatgaccttaaacattatgtcatccacctcaaccaactaagctatgattatttgttgcttataatatacttaaataaaagcctaataaatttttattattttttattttaggccctcgaaaagtgtgggccctaggcac

SEQ ID NO: 388876 - DNA, 1164 bp, Cannabis indica
aaacatatcatttactataaagattttattcatatcataaaaaaagctaaaattttaaaatctagctattttaaagcaattattgagagtgctctaaattataaataatataacataaacatgatcatattataaataataaaataatttgcggtataaatacttaagtttaacttccagttataaataaatgcataagtttaatttttggcagtaataattcctaagttataattttagaaattttgtaagtacttgggtattaagtgttacgtaaattaacttgtgacatttttaattggtccatgtcattaaattatttttttttaaaaaaaaaatagcttaaatataccaataaaaaaatgacacatgaataatgacttaacatttattggttaggtacacatatagttatagaaatataatttaaatattattactgtcaaaaattaaattaaatatttatttccaacagaaaattaataaattactctaaataatatagcacatgctttcttctcacaattagaatgtggcaaataaatttctcttttctttttttatttattttttataatcatttttttatcttcaaatccaataataataagcttagatgttgagtaaattgcatgtgcaacttatgatgccaaataaaaaagcagtaactttttctctttctccaaatatgtcggtggattgatatacatatttttaatttattattgaaaaacaacactttgttaatatttacttttcgtttgcttaccatttttttcctcctgaaagaaagaaaaaattcccttacaaaagaaaaataatttttttttcacttcaaattaatgatcatttaagttgaatttttttaatttgacagtaattatttttttttttccaattttttttttttaaaaagaaatagtaaacacgtgagaaattattattgaaaaaaaaaatatatagtacaatttaatattaaattccacatattatattttaaaaaatattataaattacctttaaccatttatacagtgtcgttaaaaaaatacacataaagcaaagtaaaagaacaaaacaaacatccaaagtcaagccaagcactgatattgataataacaaggataaaaaaaaattatttacactccaaaaatatataatacg

SEQ ID NO: 388877 - DNA, 697 bp, Cannabis indica
atatttattggaaattatccacattaatatcattggatcttattccactacattgtgcagaaataagtattatatcaacttcatagatgatttttctcgatatggcttcacctacttgattaaagaaaagtctgacactcttgatgaactcaaaatctttaaatgaatgagtttaaggaaaaattagcaatagtcatcaaaattgttcattcaaatcgtggaggagaatattatagtcgttatatagattttggacaacacacatggccttttgctaaatatttataagaaaataatatagttgctcgatacactatacttagttcacctaagcgaaaaggctttgctgaaaggagaaatatcactctaatggacatgattagcagcatgataagcagatcaaatatgttagagctcttatggggaaaatcactcatgaatgctacttatattttgaatcatattccaagtaaatctgttctcaaaacttcttttgagttgtaaaataagagaaagctttgtttgaattatcttcgtgtatggggtctctagttgaagtaaggatttatgatcctaatttgaaaaaagttaaatctgagaataattcgatggttttttcatttgttatccaatgcaatcaaagggctatcacttttaccttcttactcgtggtacgcaaattgttgaatctcagact

SEQ ID NO: 388878 - DNA, 771 bp, Cannabis indica
ttattttaatttaaaaataaatatccatttatcaaaaatgacttttgctagcgcattaatgggcatgtaaaagtaagatattctccagtgcacatttttgttagtaaaagttagacttttttctacacgttaatccgctagtaaaattctagcttttctcagtatacatttgcgctagcataattctaatttttattagtgcatttacacactggaaaaaattatttctactaacactttttgtttcgtaccaaaaatattctaataccaataccgatttgccaaccttttgcgctgacaagcactgtcaaaaatagattttattttccgaaaaaaatacgctgctaaaaatttcatttcttatagtgaaagtaaaataaaattatctaatattattactatgtacacattattagggtgtctcctgtaatttataaattattttactaattatttattttaattcacaaacttttttttaaaaaaaatatttatgtggatgagaactcaccgaaacaaaaaaatcaaaacgcatcttcccatttcttttttctttagtcttctaaaatttgatttcattcatgatattttgtttgttaggtgtgtgcactgtgcaataacgtgtcactcgtgagaaatacataatacgtgaaagaaaaaatagactaattagtaatttttccttgaattttgacatgtattaaatcatcctttctgaatttttttgacggttaaaaattctccctgaactattgaaattattagatttaa

SEQ ID NO: 388879 - DNA, 1831 bp, Cannabis indica
gagagagagagagttgagattcttaatttttttttatttaagaaaatgctcagtttcatagaaggggttaatccttatctcattcagcttattacatcaacaaaaacttggaatttactaaaaattcatactaaaaattaataatgaataactagggcaagtgatttcttacccttacttaactaagaagtaaccatcatacttagggataaaatggtcttaagctatgacccccaaaattctcaacattctaaatgtctaataatattgccccactatttctaaggtaccaaaccatatttaagtgactataaatgccatacattacattccactgttataggacataaaatatgaaaataattaaatttcacatatatcataattaattcacctagaattcaaataaatatccataattaaaaaaataataactaaaagtctattttctaaaattaagctctaattatctgctaattctcgtaataaagctatgcggtcattacaacacgcatagtaacattgacatttgagtgattgaaaccagcgcactaggttgattatcaacctaggcactggactcaattttgatgcccttgggattgttgtttctcctcgattttacttgtatcttcgttatttctcatgactgataacattaccttgaacaaaaaattgatcggaaattgttagggtttacgtcctgaaaagcctgtaaagatattttaattattaataagagttgaatatttgatacatttatgaatattaaattattaatatttaatattaaataatttatatataaatatcagataattttttattcatacatgaggttgtgatttgtattgtatagagaattaagatcatttaaccatgaataaaatagtcagtaatatattaaagtttaagaatctttaatcaatggttactagtgcagttcactgatgcccgttattcgatgcaagtaatctaaatttggattactgatgtagcatgccatctaagtgaagatggtgtatataataaagattatatatgacaaggaccgatatgaataaagttatctttgtcaaacttatcgtttactataaagatctaattcatatcataaagatgatcaatactagatcgacctaaatcttgagtaatcatgaacacatgttcatgttattagtctctttgattcactcgttaaaatttatcagagaagatgattcttataacttatattttgggaatctaataatgcagatggctgggaacatgatctataattatgaaatcctgactttcctaacggatcgaatattggttccctctatgtgttaattctagaactgaaaagttgtgcataaatttagattggatctaaattatactttcaatagtgaattaacgttactaaatgataaagaaaaaattagaaaggtaaaatagtattttgactaaactaattaaaaccaatactatgagggctaatcactggaattgaatatcgacacaacagtaaaacttagtaaatataattctataattaataagagttcaattctatatctatagtgaagtaatcatgaaattaataaataagattatttgattgatgagattcaataaataaatgtagtttattggagtttagaattataggttcatcatggtcctcggatcgccaccttgaaacattgtcaagggatgggataaacgttgtttatgccactacttcttttttgaataatttctatttttgcccccagaacttttggtactatctatttttcgccccctaaaatatacagcttgttaaaaattctccctaaaatat

SEQ ID NO: 388880 - DNA, 1032 bp, Cannabis indica
tttttctttctccaaatctaaacaactaagttttttatttacatatttttatttattttgcaagaacaactaaagtttattataaaaatacgtatatatatatattttgaaaaataaaaggtaagaggagttatatggttaaaatgtcagcaaccaaataaaatccagttggaatactagaaatagtagagaatataaatataatagctcactactgtattttatttgtacactatattattaacttgttcatatatacatatatttatacataaaacagtgaatactcccttgagttatggaaaaaataaaataaaaggctttaccctttaagtttaagaatgatacacacataaatgacaaacataagtaccaaaaaaatctatatgtccttgtttacaaatataaacgcattagttaatgggattgggggtagtggaaattatctaaagccacttgataaaatgacaaaggtttggtgaaataatatatattaacagacagtactgcccacttgaacaaaaccccaccattacatactcatgccaataacaatgtaatgtatcaacacattttttttagttggcatacacataatatatattataggagtcatcatctcagtaaggaaaagtgcctttttattatatattttaactattatcttataagggtttttcttagaggaaaaacaaaaggaagaaaaagaaaaaacactttctaattaattagtgaaggataacttgttatagtcattgccaaattgagattgtgtttgagggaaatacgtcagcagtgactaaacttgagcaaaagttgtaataataaaatataattaagaagaaaaatacatgtttgctatgcactttttcttatttgaatagtggaaaataatctatataaataaaagagaagtatgaggcggtgacgtgatattactattttttttttctccgcttacttctctcaattttaatattttattaaaacataaatttacaaattgatgttttactattattttaataatct

SEQ ID NO: 388881 - DNA, 1418 bp, Cannabis indica
aaggtcatttacaaagcttctgaaaatgaggctaaacgtgaagctcccaatgttggccccaggctagcacacgaagcgcgggctaaccacctagacatgtaccacgactctcagctagtcgtaggttataggttatgtcctaagtgaatatacaactcaatacaagaagatgatggcctagcggagctgttaggacaacttaaaggctatactagaaggcaagcccccaaagacggcacaatagtcgacgcactcgttcaactagccacctgggccttgacaaccaaggaaaacttggtacttgctcagttcttcaaagaactaagtcattttatttcaaaaggaagagacatgttagacaaccagtaatatacctccaaacaaagaccttgccagaaagcagggactaggaggacggctacatggtgtctaatcgtggcatcataacacacagaggtggtatcctaacaccaccaaggagcatttctaagaaagaagctatatagctattaacaaaagtgcacaaacgctctatggaaattacaccgaggtgcaaagccaatcgaatgtagacgggatcaaactacggcatcgcctgggcctttagaaggctggccgaccatgtccttagcaagttggccagtcatagaatccacattatggctagcaaccacctccacaagatgcccagccatggcctcatctaatcgacaaggtagtgctacctcaatatggctggccacctggtattgcatatgccagcccaatccactagcactctgctctcatacttctggtttatagtgaccaagaggtacacaatatcttgctagtaggatcccttgacaaaagggaaagaagaagagatcaagccaactcaaagcagtatggcgccgcacaaggagctaccaggctcgttaacaaacagatcgaggaaagaaattctttgcaagagaattactccctgataaatattccttgtcaacaaatcccatgtagcaagcatgttcggacaaaactgaaaaggttcgcaccattttacaagataacagtaaaggtgcatacaagtctagcgagtacgaagagaacttgaagtcagaatttctacccaaacactgaaatagggaacataggtaagtactctcattggccaatttgtcaattatgttcctctaatgtttcatcgtgcaggaacccctaaaatcgctagtactcacggccttctttgtgtggtcttccaccgttcttcaattgtggtctctgctttgctaagctacacaggggtagccactacgttatttcaaaagcggataccaagatgtaagcttttgttacacattagaccgactatgtctaaaccacttgctcgcaagattaacttcttaaagttactcatttagttccacatgcgtactatg

SEQ ID NO: 388882 - DNA, 1872 bp, Cannabis indica
agaaagtgaatttattagtgcaagaaaaatgactacaaggataaagatattgagttcatagatctcttatttgaggaagtcacttgattaattatgttcttatattgatacgtaatccataagaataaattatgatattcctaaagaaaggtcttgcaaagagtaaattcaaattatagggcttttctttggaaaagggcagctgaggttttgggcaccataaggtttcttgggaataagtatatatgtaagccaaacaaagaaggggtcttggctataggaaaatcattgattagatatggtagccattggaaaagatgtcttggcacttggctccaagcaagataatttatgggtgagctgagttaaattgcctattgaactgtctcgccattgatgaactagaaacaagaaagaacacaaagaagaagaaaggaaagaaagacaaagaaagagaattggagagcaagaattctcaatagttatcgatgaaatgaagaacttatatacagtagctacaagaaacagaaataattgcaacaaactcaactaactaggatagctcactactaactgtcactaacataattaactgttctaacaccccccttcaaactcataattgaaggaactttgattttgagtttggtcctaacatctgagaatctttgactcgaaataggcttagtcagtccatcagctagatgtttaaatgcagagacatgcttgatttgcaccatgtcattgagaactttctccctttcaaagtatagatctagctctatatgcttggtcctagcatgtaggattagattttgtgtgagcatgatagtacttaggttatcataccagatagttggtgtgtgtggcattcaaatttgaagctcaggaaacaaatagtgtaaccatgtaagttctgtagtgacattggcaacacttttgtactcagcttcagtgttggagcgtgaaaccatttgctgctttttacttttccaagctatcaagtttgagcaatagaaaatggcaaatcctgatataaatcttctgtcatctggatttgatgcccagtcagcatcacagaaggtaacagatcatgagacaatatctttctgagatgaagaccaaaggttgttgtgccagtaatgtatcttaggattcttttgacagcttgttagtgtgttgtaaggggcttttgcataaactggcagactttattcacattgaaggacaactctagtctggttatggtcgggtattgaagagcacccacaattgatctttacatttgaacatcggccatagggtccccttggtgagctgataatcgaaggccactagtcattggggtaggagatggtttagcccctgccatttgagctttgatcaacagatctctggcatactttgcttgacatatgtgaacaccatctacaatatatgttacttcaataccaagaaaataattcactgtctctaagtccttgagagagaactcattgttcaaagcagcaatgagccttgtaacagcctgtgaatcactcccagttacaagtatgtcatcaacatacacaaggacaattgtagtagatattaaagtgtgtaatatgaacagggagtggtctgattgagaggacacaaaacctagagatgtcaggcacttttggagcttgtcaaacaaggctctaagagcctgtttaggcccataaagagctttgctaagtttacaaactagttgctcttaaccaaggacctcaaaccctagtggatgtgtcatatacacttcttcttgcaaatgtgcattgagaaatccattgttgatatctagttgtcttacttcccatccttttgacaaggctagagttagaacaactc

SEQ ID NO: 388883 - DNA, 677 bp, Cannabis indica
taactgcacaaccatgtcaaaggttggtgggtaggccaaaaatactttattacacaagttcttcatgggatcgggcaccacgatttttggtatgtgccactcttcagacgttccatccctactttgctagtaagggatagagaaattcacatcctttctttattggctgagtaaaaaaacattatccgattgaccagtatggacaatttctggaggtatggcatgtatcctcttactgctaaagttgcaagagggccaactttagatggggcctgtcctcgagatgggcaaggccctcgcttggatgatgatgaagtacctctatctcgtattgcacgaaatttagagaggagagagaaggctctctagcggcacttggctaccggaggtctagtaagtgatggttatcttcatattgggcctagaggccatgtttctcagagacctacacaccccgtgcctgcatctaggggcaagagcaaggctgtagttgaggactcttatagtccttcttctgatgatttatttgatagttgataacatcatgcctttattcttatattgaatgtttgttattgctttttgactatactaccttctttttgtaaacatgtcttccaagttgagaggtcttatagaaggacctttggatgagcctcctggatgggtaaaggcca

SEQ ID NO: 388884 - DNA, 1064 bp, Cannabis indica
ggtattacacatctcagctgcttggccatctcaaccgcttttggtccaaagaatgcgaagtcgaagtctggcagcttgctcaaggtagcgtacatatagtcagtgaaagcctggtcataagacttctttgtgttctctttcttagctgcaacatcacgagtaagactagtgttgtcctcctccaacttcttgactcgctcattaagagtcttgacttgctcttccacctgacctttgtctttgtcgagattctcaactttcttatctttggccgccacatccagctttgcctttttaaggccctcttgaagagttgagttttgtttcttcggaagattgagatccttaaggctcgcaacaaaagcccgcaaaaacattgtcatgaattgggaggggagttcaactgaacgaggtagcagatcctcagtaggagtcccctcgactttggaaacgaactcgtcattcacgaacttgtccttcaagaccatgatgtcatgagccttgacagcaggaccgatcacaactttctttcacaagtcagccacccacgtaggcatgatgtcacttttcctattttgaggagtcgtaggtgatggcatcgcagtactagccttagacttgcgattaaaaactggagcttgtttcaagaaagtaatgtctggaagaagaatgacaagtaaggatttgatagggtaaaacaagatcgttaaagtaatatactaaattatattacctaatgttgatctcgaggtttgcttggatagacgcttgtctattatttccttttgcttctcagaaggctctttgtacattggttctcactgaagtttagtgtcctctatgatgagcttgtgttctcacaatttcacggtagtacacaacaaacgccatctgtgatcttgcacaggaaggccgcttaaaacttcagcgatttctagacgaattgggtctagtacaaatcgagccagtctatctgcaaataaggaaaataaaaattagtgtctaaaaagcaatgaaaataaatactaagtgtaaaagtacgcgacgtacgaggtcggtgattg

SEQ ID NO: 388885 - DNA, 1549 bp, Cannabis indica
tttttcttttttacctttttcttttacgtttttctaaagtttttggttgtttaggggtaaagtttagtattgttaatttatttttttttagtatagtatagttttagatttaattttttaactataccgtataaaaatttttagtaaaaaattataaagttatttattacttactttttatatattagtatataagtttaaaacgaaaaaaaaaaaaaaacctttacagtaagttgtactttacgaaactaaataatactaactaaagtaaaacttaaaaaaattagtaaatttagcaaaaatttagactatctaatcgacttttatttttgtaaaaatataaaaataattaataaataaacttaaaatagtgttatttttaaggaaaaatacctaattagataatgaaataatgagaattgaattagtttaatggttacctttcaaaaattacataggatgttaaaagcttttcactaattaaatatagtcaaatttaattttatttatttttattaaggaattttttttcactttttataggcttaggtttgtgatattattatacatatttttttaaatctcatatttaatattttaaacattttttctctttgtttagaacatataccatagaagtcaaaggtatcctatttaatatacgagttttttaaattttatggtatttcttccttcttttttttttttttttttttgacatgtaggtatttcttcttatttacaatgatttcattaaaaatcaattttttcatcaataatttattttattaacaaactaattttaattatatagaagtaaaatttttaagtttttttctttaaaaaatattatatttagtgtaattatatttccatgtgatacatttgaaaacttttattttatgtttttcatatttgtatagaaatagcaaaaaaaaaaaaagtttagttcaatgttttaaatttagcaaatcattagctggtaaaggatgatggttaaatctcagccagacattgggattgaccactttacacttaaaaagtatatttccataatggggtttggtagtgttcttcttattctctttgttatagtaaaactaaaagatggaatcagatgaaattttccacttagaaaaaaaggacagtttgattggaaaaatcctaagggaaaagaagatgtaatcttttattgaaagagctacggtgatgaccttccaaccaaaacaccttttttctttaacaaggtcaacaaactcttttaaataaaactagacttaattaattaaaagcatcgccaaataaccatctatattggtaagtgaaaatatgaaactaggcatgaaaactttgagaagctaagttcatgtttggcatcataactaaaaaaatattttttgtttttaaaaatagaaaattgtttttaaaaacaatttgacttgtttggccttgttttttaaaaacagttttcagaaaacaaagttacaaaaaataagaattttgaaaacaacaaaatgttgttttctgttttaaaaaccaattcactttt

SEQ ID NO: 388886 - DNA, 576 bp, Cannabis indica
tctccatactttctcattttcaaactttcaaaaataattctagagagagaagcgctctcttttctcttaaaacaagtactattgaagctcctctatgcaagctttgatccaagaaagaactacagagtaagcttttgtgtcatttcctcttcttttactttcttttcaacgctagttcttttcctcaccactccatttcttgtgttgttcattcatgaatcatcttctatacttaaaagaaaactccattagaggttcattgtaagtccaagccaagcacacaagaggataaagcaaaggtgagaagttgtgtggtgttgctcttctttttttcttcctcttaggaccgaaaccctctctctctctacgtttagaacacccataagataagaaattagcgaaagttgtgagtcgctctcactaagatgatatgatatgatatgaattgagtgccttattatctcagttattatccacataatgacggcatgtaaggtacccataacgacgacatatgaaatatatggtaagttacacattgtaggcgagacaagtaaggttagagagtgttatgct

SEQ ID NO: 388887 - DNA, 1536 bp, Cannabis indica
tttttttttaattttggcatgaataaatgttgtatttttttctccaaacttcaaacagattatcttacttttttacttcgaataactttcaatcatcttagcacacaggtttaaagttgcttttatctctttctcttccttgagtaattccacagattgattttgttatattgtaattgttgttggatccaatcaaaataaaatttagccgaactataagtaaatatttcgcaccatgttcctataacttgattctaattctttattgcttaaaaatatggtttctgtccatatattgaaagatttaaaaattcgaaatcctaagtttttaatttgcagatttctaataatacaatagatgtatttttagccatgataataataatttaagccaaaaattaaaacaacttgatttttaaatacataataccaaaatatggtataggagaaatttcacaaatgagagatattgtaattgaaaaatatactttgaatgaattatttttttgaaattgtacttgaagtaaattattatttttagtatgtgaaaaatattatttgaattctaatttaacgttctctctaattacaatcaataaaaaaaatgtcgatgtggtattcgtattatatgaaaaagaaaaaataaataaatgcaaaaaaaagggaatttttaaatataatattttttaatgttttatttatgacattatggtctaaaaaattttatttataaaatttaaaattataaaaatacactttaatgaacagaaaataaaaaaaaataactaataaataacgagtaatcaatctcacaacaaatataaataaactataagggctcgtttgttgcgtagtattatatcgtaatgtattgtattatattagatcgtgttgcattgtattgtattgtattagtattacttaatacaatacaatgtttggtattgacttggattaattgatcgtgtaaagttataatatattttcaatacactcgatcccaacactaaaaccagtttgggtcctggatcctgcgtttagggtcaagtcgggggtcacgggtcggagtcggggttcaggttcgagtctgggttcgggttagggtcggggtccaagttcgggtccgggttcgtgtcggggtctgagttcgggtcgggatccgagttcgggttcgagctcgggtctgggttcgggttcaagtgtcaggtcctaagtccaagttcgggtccaagtctgggtctgggtccgggtcccatgtctgggtctcgggtcccaggtctgggtctcgggtccaggttcgagtccgagtttgggttcaggcccgagtccagggtctaggtctggggtccgggttcaagtccgaagttcgggtctgagtttgggtccggagtttgggtctgggtctgggtccgagtccctgtccaggtctgagtcccgcatcccgggttagggtccaggtcccgaatccgagttcgagtcggagattggtgttgaccccaaatcatttgtaaatattataatacaacctaatatgga

SEQ ID NO: 388888 - DNA, 1945 bp, Cannabis indica
cacgcaaatgactatgtgataaaaaaatcacaagtataattggtggttatgaataatttcagtacattcatgggtactactagccattcgaatcgattcttcgattgcagcatggttttcagttgtttttgagatgaagttttctgcaataatcgatgagattaaacttacactttggaatgactctgttgctttgctcttctgtaccggttctcctgctcaaacaatccgagatccattcaacaatggatgatgaatgactaagcacctcatggaagcaaactaaagaccaaaaaccttacctgtattcaacgatgaaaacaactcggtagcagcaatgggaatcgttgaacaagttctaccttcttgtttatccgagcaatctgcaagatgatccagcaaaatccaaagcttgatgaaccacatggataaaaaagagaacaacacgtagtaattaaacatgagtttgcaccattgaagatgccaagatcagtggagcttagcaaaaagtgaaacaactatatcagatgtgacaatatcacaggcataaatgaggaacagtatctgaaattattaaggtgaactagaatcattcatacagccagaatcagaaccagaagagcataacctttcttccctttggatatcgagtaaaactccacgaaaattttacatgaaagaatgactctcttagaagatactacagtcgaatcactacatcttacaaaaagaaaaactcaacaaatggagagttattgagctgaatcctcagaaaatctagcatcgaaaggagctcccggtgtatgggaatgagcggctgaaccagcagaagaacctgaagagccatgttgaagttcaaggacaagccacctaacggttttgctcatctgttccaaacgaacagcgctaattgctggaagaccagtagtggcagcagggccaattccaatcccaacaccagactttccaaccaccgagcctgtggcttcatccacaaggcactctgatcctatcctttgcttgacagactccacaaactcctcagcttgatcacatgccactctgaataattcccatttctgtttgaaattctcgagagctgcatcggtggctaatgttttctgggcactacagctttccttagcttcaaggatatttgcagctgcagcaacaaactcttggtatgcattgctcaatgaatcaactatattgtccattgtgtggactcccaaactgaaattgaaagcaacgattgagtcaaaatctatcaaaatagaaatcaaactaaagaaattgaatattccttcataaaattccatttgattttaactaaaaaaaactaatcaatagcaataaatcatcaaaatatatgttttttttggttaaggaaccaaataataagaaccctaatccttcaaactccagattatgaacacccgagcggccgaaattgttacttgaacatgctacttttcgaaacaaagagatagacgacagaaaatccccctccatgttcaaatatcaatctcctggtccttgattgcttaactcttttattcagtaacaaaaaaatctgggaatagtataaaatttgatactagagaatcttctaaccagaaagatgggtagattggattgatcttgaatatgaggattgggtgtttgtgatcaaaaagcttaaacacagggagagttgggttaaaggcttaaacttggaaaaatatttgattctggagatatatataaatatatatatatacatataaacaaatccatgggcatggtttgtttctaactaaaaactatacttttaaaaggggtgaattgaaaaaccttataagactttgaattttggtgtggatcttaaaacacttaatatttggcttgaagagtgtatgaaaattgtttctttcatattgataattgtttacaatatatatatata

SEQ ID NO: 388889 - DNA, 1174 bp, Cannabis indica
ctcatctattctactctattttctactgtttaataaattcagttttgataggttactaccctaaaagaagaagagaagtattttagaaatagcatgcgctattaatctattaattaattaatgtaaatagttagtaagtacagactagaatcacctatatctcacatgccgacccaaatattatatttataataaattaatatatcaaataaatacgaaatatagcttcttttagtaaaaaagtttacttattagttttttttttttttttgtagaaaatagttcaggtttacgtatcatgtacacttattaatataatttttcttttgaaatgcgtatcatgtacacatatagtattactattagtatacataattaattattattttattttttcgaagggaagtaatcgaaggatgtttagctgactctgcgctccacacaactttagtaaaggcatatctttcagtaaacaacaagtgaaactatatatataatttgcttctttttaatatatatataattaatatagtcaatagtcacgtatttagatgatcatcatcgtcttgattttagatccatatgtatatatttatagacgatctaaaaagactaatcattaataaaagagaaaaaaaaatgaagctcaccgaaactctcacgtataagcccaaaaaaaatggcatatgggaaatgaaaattaggatttttattttcttattccttttccttgcaaatagacaaagggatgaaaagatcttacactataaataaaaggggttttcttattctttttccttttcaaattatgctgttatatatatgctctgtatcgctaaaaaagtgtaatgatggcatctttatataatataacatacagaatttattcctaaacaataataatcaggattttttttttttttgaattgaaaaatattcaggatttaaatcgataatatataatatatcttttttaataaaaagcaatctacagaattaaaatactattacataaatttatgttgctttgcttaacgactaattagctgtgatcaaaatcattgatataaataaactagaagaattcgttaatcatagatatatattagcttggtactctgtgtaacgtttttttttttttgtaaagaaagtatgttattaactcaaatcaaat

SEQ ID NO: 388890 - DNA, 922 bp, Cannabis indica
gaaggcccccaatatggtcatataatagtcttcttcaattacgcctttgacctttgtggccttggccatgaacctttgcatataatccttcaaaggtttgccttgtcgttgtttgaccttgacaaggtttgcaagctgcaatggtgttggtcttgaggatgagaattgagtgtagaattctttaaaaaattcattccaagaattgaatcttcctggagccagcttgaagtaccactgttgatctatttgtgacatggttgtcgagaagacccgacactgcacatcactagtaactttctggagatgaagtttcatctcatagtagttgatgtgtgtgaagggtcttctcgtctgatacacatttttcataccagcatcttgaacttgggcaaggccaaggcattgatgtaagacgagaatggtaagcccctttacctatctagttcaaggtctgatggttttgggccagccaaatcctttatcacgtctcttatttgatccaactaagcttgcacaaaaggatctaacactgtaggagcctagttgattgctccttcttgactaggttatagccctggattggccagagcctagttaaccataccctgggagagggtatgtttagggatggcaagccctaggcctggcagctggctttggctacccagccctaggtaaggaaactagccatggtcgatcagcccttccctaggcagcttttcttagccagccaaccttatgttaggcagtgtttggtcgttcattctcccatgattgtctagtaaaacctatgtgttgataggggagatcacaccaattgctgaagtttgatggatctaactgcctgaagcaattgtactcacttcttgagttgttgttgtcttgggtgtttccacccgttcctgaacctagctcgttaatg

SEQ ID NO: 388891 - DNA, 1252 bp, Cannabis indica
ataatttcataacttgggatggacattggaatatggagaagatcacaaggcattttcataaggaagacattccatggatacaaggaatcccaatagacctattcattgaagatactttatcttggccctacactccaaatggtcaatacatagtgaaaagtggctatagagttggaagggagataaatcttcaccccactagatgttcaaacatggaagaagttaataaatggtggaaaatgatgtggagcctgcagctgcctcctcgaatgaatctttttgggtggagagtttgtcacaactagctgccagcaaagacgaatttgattcatagaagtatggaagtaaatccccgctgtgatctttgtgaaaaccatgctgaaactcttatccatgctctatggagttgtgataaagttaaaaagatttggaaactcattccttggtacaagaaatgtgatactctgggagaaggatcaacatttgatttgttgcagtcattagcaaagacaattgacaggaatgaatttgaagatgccattagagttatgtgggctatatgggaaaatcgaaagaggaattgaaatcaaattccaattataaatggaattcagcttctaaattgggttttctctgcttatccaccacctagtcttcatggagatactgctgtgcaaccgaaggccactcaatctatgacactgaaacaatggcagcctcctgcaaagggaagcatctgtgtgaattgcgatgctgcggtgcaagagaattcgataggagtgggcattgggttcatttggcgaaactgagaggggcacatcatcttagcaggtatgatctatatgcctagtttgtgtactgtcgaggtggctgaggcttgggccattctcgaagctattaagagagcgccggctgctgctacaggtcctattgaaattcagtctgatcgcagggcggtagtggacaagctcaaaaaccaggggcagtattttaatgttgttagcactattttgcattagatcaaagaccagatggaagttttaaaaagtgtcattattattcatgtaaaaagattcaataatgagtgtgctaatatgttagctaggagaagtttagctgatagaaccactcaactctttgatcaatcttttcctggttggttagtcaatttttgtaaggctgaccaccccttattgatgtaaccctgatttttttcaataaatacatttttctttcaaaaaaaaatatatat

SEQ ID NO: 388892 - DNA, 1403 bp, Cannabis indica
ataaataaattgttgtattcaactttcaagtaaagcatccaaaaatttgaaattaagacacagctgccaacaaacaaaaactccctcatcacataaaagtctagagccaaaactaaaacatctagtattaactagataaaagggtagaagaagatctatgaatctgcaatggtgacttcaacctctacaccaggttcaatggtaatagaagtgatctgcttgaccacatcaggggagctgaagaggtcgataacacgcttgtggacacgaagctcaaatgtgtcccatgtgttggtacctgatgtaaacaatgaaaaagtatacataatttgcaaaaggggaaacatgtaattgcacatacaacttgtgtttatgagagtttaaaattcatgttaaaccatgggtagtcctaaacttgactgaaaagactaatttttagcttaaaaaccacaacagaacagtactataccttctccacaaggagacttcctggtagtgatacgcaataccttggtgggcatcctgactggtcccttagttctaagtctcttgtccttggcaccacgaaccaagtcagcacaaactgagaaataaagcagcattaaaattaaaagtaagaaccaaaagagatcatattttttacaaaaatattcagttaactcaaaaaaaaattgtttagcaaatactagatttcttgtgattcttctatgtcaaattaaataagataaataatctataagttcaattcaataaggcaataatcaaaacaaattcatctccaaacacgttctcagccaaagaaacattacaacactcgaccaaaatagtataaacccttgaatttatttacatattgttatcaaataaaagtctaacaaaccaataataaatgatgaaattctatctacaaacgacacgtacattccagtatgaacaatatagaaagtaaagcataaacgaatgaaattgaaagcttaaaaagaacaaactgtacctttctcgaggttcttaacgttcttggaagaaagggtgatcctaatcttgtggatctgctcctgtgactcctccagaccaggcttcgtcggcttcatcgcgtacgccatttttgtctagagagagagttgctgcttcaacttgagggggagaaaatatatgtgctcctatggattagggttttctgaagtggcgactcagtggtatttatgtagtgggcgggtattcatatgggctgggtttggatcactggcccattacctagcgattctagtcagcccacttaatcttggttttggtttggggattatcaaaagaaaaaggggtatgttgaaaaataccatttttattaatcaattaatcaaatttacctataattttatatttaattgaaacatacctctttttat

SEQ ID NO: 388893 - DNA, 693 bp, Cannabis indica
gagattattcttgaatagagtatctttagatagagtaacactataccatgttttcacttttaaaaaaatatatattctctctcatccacttcatatcctaccatctcacaaaccacaattcaaagcaagcaatattatacatatattaagttaccatttctcattaagagcattgctattaggcaccagtggtgcctagcacttttgcgacatgtcgcgttgcaattaactagcgatactccctaaaagttataaaattaaattatatgggactcgatacttagttggaccaatagagatattgacatataggagtgtgctaagtacccgctggtaccctttagcatttctcattaagttaacaatattatacatatttattaatatttttatttagctagttaatcagagtctttatatatgctgtgttgattcagcaaatcttaatcacagaatttacataattatatataataaagtcataataaattaatcacaaagtttacgttattctatacgacagcaacacattttatttttatacaatcatttttaggagctaaaggaaatattattggcaagattgattacatgtataaataaataatactggaattattttatatattattatttatagctacaacattatagtaattggcttttatttattttagggataattgcggcaaa

SEQ ID NO: 388894 - DNA, 1705 bp, Cannabis indica
gtcgaaactgaagggaaaggatcaaccccaactgacaaggatgaggtatcagccacttggtttccacggcatcttttgagtgtttggcgcaatcaaattgggtcatattgtcttttaaattggcggttgggatgaatgctctcttgttccatatcaacaaatgggcctggtgaagatggtaatacagtagatggtggtgttgatgaatgggaattggacgaaaatttatgggaaaatggcatggtcatagttatggcaggcttaaaatgagatgagatattgttagtggcagtaagtggaggataagtagcatgaatggaatccagtagaggtgaagtgaaatgtatggaagaaggagaagtaccgacatctggtgtatacacatcagaaagatgtgttacggttgtggaggatacagggattggttgcgaagatatagtggaaatggagggaagtaatttgtcaaatttggtttggtctttctcatgagagggtgttatgagcgatgattgattaaggaaagcaggggaaaagggatgagaggcttcagggacaatagtggttgtagttgttgttggtataacccgagatgcatgattaactgtatttccagtatttgaagattcccccattaacaaaggacgtgggtgtaccgccgatcggttatgtaattgtggaattgttgcagttaatgaagttcttgcaagacgagtgaggagaggccatgcatttccttttgaaaaatccgatcggtaacgatcataagatgaggaagccagagcagaacccatcaacataggtccatatggcaattccggatcaacaccattatctaattgctcaagaaatacaggacatttctggtataagtggccaatgataccacactccatacaatactccggaagacgttcataacggaattccacccagaactcatctcgaactcgtggtaaagtgatcatcttacccctaagcaaaggcttagtaatatccagtcgaacccggaatcgtaaaaatggaccccagccctcattcaacgagtcctcatggacagaaataaactctcctagtaagttccctaatgatctcgccaaggatttcgacttactgaggaagggcaggcggtaggcttgcacccaaaaaggagaaaggatcatagattcaggggtgacattgtgcatagccattggtgggtagagaacaatgtgatggtcttgaaagtgccacggttccttttcaagagcacgaaatcgatccccttcgcacccaaaacagagaatgaacaaaccagaatagtgttctttaatattaaccttgaatcgaccgtcccagtgttgggccatttgacgttggaatgttgagagccagacttttttatttgttattacacgggcaaacagagagtagtcaggaggaggagtatcttcaagaggaccttcattaccatcatcagtgatagcaacaacagttttctcagcatctgacaattgcatagccgatttcatcttgtgtatgaaaggatccataataccagagaaagacaattgtgggagtagaggttgcagagtaagcggttaaaagaaagaaactggaaaaaacctcaatggacaataactgcctcagagcacaacaacagggcagacgctcaatatatattaaatcaacccttttattctaagctaaactatatgtattttcttgt

SEQ ID NO: 388895 - DNA, 1997 bp, Cannabis indica
acggagattatttttagaatatgtgggtgttatggatacaatttttgaaataaaaaataattttcagtcccgacgactgtggaagctcggcagagtggctagaaatgtcacgacaataaaggatggattattttagaaatgttttggactagtttagaattttaggttgtcgattcggcggattagtttgaattaccaaattacccctagatgtgatttaggtttaaggttacttaagggggtaaaagagtcatttgtggaggattagtgtttgactttctatgttttttttgtcttggctgactatttaggtattaataaaaaacaaatttaaataataaaagatgggttttatgtttaagaaggaattagaagaaaaccttaaaaacaaaatcaatctctcttctcccctctccttcgtgacctagagcctggccaaaacctggaggaattctcctcaattactctcagatttggagcagattgaacacccaagataaatctaggagctttggaggcaagctcttttcttttaggagtacaattttcaatatttaagttggttttggaatagagttttgggatttcatggctgtaggattaaattaggttgaggttatatttttaggtctgttttagaatgtgttagagtttgaattaagttattttaatggctgtttggattgaatgtatttagttatgtgatttgagcttaattttaaattgagaaagtgattttgagtaaattgatgaattgtggggaattggttgcttagatatgttatatttatcatattggattggtttggtttggaaagtttgagcaggtttggtggaggtttaatcgatttttggggtgaaaaacaaaaaatccccatggctgcccaaaaaaccggtcgaccggtttggccagcaggggaggaatttcgggtttttcttcccaagtctgatctggttcagggtatcttctgtagtgaattcagagtatttttagggatatttaagttagtttgacccaaggggaaatagggttgtccgattgtgagaattagggtttgtttctagaatttttgctttaaggtatttattgttttgttgttgtcgtgacataggacccgggatcatcaagcttgtttttccacttaggccagcatgaacgcttaatttctgaaccgaggtaagaaaagtattatacactgtttctgattaatgattataattgtaatagtgtcgattatgctcgagatccctatatgtgtttgttattactcgattctgatcgaggtaatagtatgaaatgattattatcgttgtgactcaattatgatcgaggggaaaatgatatggaacgattattatcattgtgactcgattatgatcgaggggaaaatgatatggaacgattattatcgttgtgactcgattatgatcgagtaaaagatacgatcattaccgttatgagtaattacacttgaaaccgtggataggttttttacttatcgtttgttgtatcgggcaatgatagtgacatacgtagctcgtggttaacgagtggtaagggtactttatgaagtaccgggattgtatgactaagatattgtgaaattgattaagcatgttattatgcaacgagttgtaattgaatatattttgttatagtgtaattaaatggattttgtactccttaaggagttagtaacttctctactgagtctctgtgactcatggaatgtaagagtatgggattatgtattggatgaatatccatttggtataacaatgaagtaattgactataagatattatgatttggttatatggcgtaatatatgtgtttctataaatgttaaactatgtatgtatgcatgatgaatatgtatgagtctcaaggatgtgctttatgttgagatgagaatatctgtatttacagtatttttgatctaataacttttcttgctgagtgattgtgactcacgggtgctttatgatgcaggtaa

SEQ ID NO: 388896 - DNA, 986 bp, Cannabis indica
cataggagatcaaccatgcaattatagtgttcagtaccaggctttattccataatctgttctcattaaatcaaagtacttctttccctgatcaaccaaacctgagtgactacaagcaaaaagaaccccaacaaaacttatataatcaagcttaatatcattttcaatcatatcttcaaataagtcaattgcttcttggcctctgccattctgtgccaacccacaaatcattgagttccaacttatcaaatttctaacttgcatttgaacgaaaacactataagcaaaatctatacatccacatttggcatacagatcaactagagctgattctacaataacatccctccaaccacctcttcttacatactggcagtggacctctttgccttgtcttacagccgctaaagcagcacatgcccgaataacagttccgaaactgtaaaggtcaaatttttccatcatcttgaatagcttgaaaacagattcaaattgtccattttgactgtatgctcccaacaatgcggaccacgaaactgagttcttcaccatcatccgatcaaaaacagcttgagctgcgttaactgacccacatttcccatacatgtcaaccaggctactctcaacgaccacatttccgcaaagcccgcaagtaatgaccttagaatgcacttctctacctcgctttagcctccccatgttaccacaagcagtcaacaccgttccatatgtaaagccatctggcaacaacccagcatttctctgcatcgagtaaaagaatgccaaagcattttcaaacgaatcgttccttgtcatggccgaaataattgatgtccagcatatagcatctggttcaagcatttcatcgaacacttgttttgcatcttccaatacgtaattcctcccatacatatcaatcaaagaactaacaatgacattattcgagtcgaacccacgtctcaacaccattgcgtgaaaagattgacc

SEQ ID NO: 388897 - DNA, 1258 bp, Cannabis indica
aaattatagtatttgctatgattttaacaaacattttgtggtgagcatgtcttgtaagagttaattatatatatttgttatgatgttattagtggaaacttttttttttgaagttagtataaagaactataatttttttccctttgaaagttcaaagtaattttttctttttaattcttttaaggtatatccacttattattatctagaagattcatgaaaggtctctagtttatgtttttctatttgtaattttcatttgtaaaaacttttcttattatcttcatcttggttatagaggtattttcttaatcctcaaactttttttttactttcctgtaagttttaaatattgtttgaacaattttagtttgtttgttttcttatttgcacatttgacattatgctaattgagagttgcccgagttcttttgtgaattagtgtgttgatggagaatcaagtcctcattagtgtattttgtctgttgaactcatctttattaattggcattgcaaattaaagtgacaatatatgattaggatataatttagaaaagcattgtgcttactgttctgttatcaattgttataaatttatttactttgataggaccacatgtagtgaaagtgagcttttagattggaagcaaaatactttaatttgtaaatgcacatattcaatagttctcatcctcgcattatttatgtccaacatctttatttttttttttcaagaatacattttaatattaatatttttcttattactatggttaatatattttttttcctataacattttcaggtaatcatagggagaaattgatgtactctatctctctcttataatcttgcgcatttatgcttatttaaggctaaattgttttctgtattttaacttattggaagtaacatgtaatcattgagttgattactaagtgaaaaaaaaaggttattgtgatgctgctaagagaatttcttaattttgtgtttatctagattccacaacttggaaggcccaataatgttgtaaaattgtgctccatctagattgtgcttcatttaattttcattttttaagacacaacattttactttaattctgtttttgtacttagtttgtattagtgtaataattttgttgttagccagattatatattatgctactttgacatttattaattaatgatgtcttcatgttaggatttataaaacactcaagaaatatataaatcacagatgcaaacatattcctaa

SEQ ID NO: 388898 - DNA, 618 bp, Cannabis indica
gggtcccttgctggacgacaaagtgggcccatgtgtatgggatcggttttctgggtttgggcacgagccaagcccatgtgcatgacctgccacgtgggatgttggatcattcatctcattcctctcctctttctcaagtctcaactacattttaattaataagataaggataaggtttatatttttatttttaaaaaaacgaaaaatatttataaattatgatcgtaaattttaacattttgtgcgtacaaaaatacaatgttaacatcatgacctgaatcggcgttgagcctgaaatagctgttttttttttttgtcatttaacgagtaattttgaggcttggtgaaattgaaggattgttaattaattaattttgttttatctaatgttttaattattattattattattgtatataaatagtgaagatcacactattattttacagtgtttattggacttgagaagctaacctacagacactagagtcgggctttggattgactatacaagtcggttttagttatccttttcaaaatgagcccggctgcaaaaatattaagaaaattattttaaataaagtaatttacaatgtaaatacttaagtttaactttca

SEQ ID NO: 388899 - DNA, 1965 bp, Cannabis indica
taccaagggaagattgcctgacacttcaactctaaagtgaatagtcgtacatttgatgttggagatctcatcttaaggagagtatccccaactttgcaagaatcgggagtgggggtagttggcccaaattgggaaggcccttaagaaatacttgagaaagtgggctaaggaactctttagctcaaaagtatggattgattgagggtccttcatgcctagaatgcaaaccacttacgttagtactataaataggcaaaaatgatacagccttgatgaagtccattgagctttgtgtaaatttttatgtaattaccttttttatgtacaacctttgggtataatgaaatgaaaacagaaccaatttacatttaaatttacgcttcacaattttaagtcacaagctatgttttaaacaagtgaccaagaagttggagaagtccaaacttctcagctcacttagggggtactatggccacatgtgccccaaaaacgtacagtgtgctatgactagttactttgcttacgcatatgcataatttttatcgtagcttacagtcaaaccttaaacaagatacattttcaacaaaattcattaaaaggaaaaatacgcttcaactccttcttcaggttgaaataactctaaacattgaaattagaagcgtattcagccaaaatttcgataaaagggaaagactcacctgaatcccttctcaaaagtttcaatatatcgcttaaagttttaaatttcttgaattcgttaaaatgggtaggccttgcctgaactcatgtgcattttagccttgtcttgcttaaaagatattgtctaaagttcatagtgtgtaaaattggacccccaaatttgtgaaaagcctttgtggccttaggcttttatggatgaagttcgtatggaaaagtacactgcaacactatcacaattttagcccaattcctgagcaaggaataacgcctgaaatctacaacatgttcaaccatttttcctaaagcacaaattcacaaaagtaaaagtcactgaacactcataatggagaggtgcatccttgaacaagaaaacaatccctggcttgcgccctcgtcaccggaccaactagaacttcacttgtttctttggccttagtgttctcaaaagcatttgtcctcaaatcttcacttgcatcaaagggatcaaatcagaaacattaaaagtagcactaacattatattctccaggtaaatcgagacggtatgtattatcattgatcctttcaagaacttgaagcagaccatctcgtcgaggtagcaatttggaacgtctttgggatgggaatcgttctttcctcatgtgtaaccataaccaatcactgggctcaaaaacctacttgtgacgacccttgttagcttgccttacgtattgctcggttcttctctctatgttgagtcgtaccctctcatgaatttgcttcacaaatgttgctttcttttttccatctaaattcaaatgctcataaacaggtaaaggtggtagatccaaagatgtcaaagggttaaaaccataaataatttcaaatggtgagaatttagtagcagaatgcatagaacgattataagcagtttcaacatgcggtaaaaaatcctccgaagtcttaatatttttacttatgatagccctcaataaagtggataaatttcgattaactacttcttttttaccatcaatttgaggatgaaaagtagtagaaaacaaaagttttgtcctgagtttttcccacaatgttttcaaagaataacttaagaacttaggatacaatggttgtaggtataccatgtggtacctcctcgggaaacacatccttgaattcctgcaaaatagaaacaacaacactaggcagcaaagaatcaagttggttagtgcttaaaagagcctcctggtaaacgaacaaaatcattggttgttttgtacgcaaagct

SEQ ID NO: 388900 - DNA, 903 bp, Cannabis indica
agagagagagagagttaaaagagagagaatgttcttgctttttcatgtattttctttttttttttataaatgaataggttttgtttaataaaatattagcttaaaatataattaaaaatctgattaatcatttaatctaagttcactcaaagacaagataacttaggcaaaaagatcattttgcccttcccattactaaaagtcataataggtcacttaggggaattttgtcacttctagattttcaactattcctgacattcccaaggtctaactatactgccctgctatactaaaaatactagaatgtgattctaatagccaaacacctcgttctaatgttgtcaggcacaaaacatgcaaaattataaaactctatatatgacatataaaatgcattctgaattcaaataaatcatcgtaaattaatagttcacaactaatatgtaagtttcataattaaaccctaattatctgctaatttccaaatcaaagctaagcattctttacatggggccaccctagggttgagtcctcctggaacgggtggtctgtctggaccgcgggttggtagaccttctggagcccatgggctctttcccagaacgatgattagtttcctcatgtggggtgttaacattttctagattttcagccatgaaggaggtggtttttcttcaaaagaagggagggtttttctgatttttttcacagaggctctcaatgaaagcaccaaactgttaacgtagatttttgttagccaaatcagagcctcacagtaatgatttcacacagaaaaaataaaagctataaaagtaaaagtatgaacacatggttttttacgtggttttgcagttaaaattttgcatagtccacgagtcaatcttattcagatttctgagt

SEQ ID NO: 388901 - DNA, 560 bp, Cannabis indica
taaaaaaaaaaaaaaaaatcgttcgtacgttttagataattctggttgtctcgttggaagccacagaagaaaatatatatatgcatgacagcaaggttttcatcagcaaaaaaaaaaaaaaaaaccttaattaggataaattaatgagtttattactaatttctacaaagcaaaacatgtatgcatgcttcataaacataaaaaataaacaattatacacatatattataccttaaacaaaacaacgtctaaatacactttttatatataaatacaaaatatataagttataccttttctatattgacataccaaagataatttattagagaaaatatatatataatactatttctactacatggagtgtggctataatttactagaatggtactctctctctccctttactattctttatacatataaatagtactcttgctctctttctctccatattctctataattcaaaagctcaccaatattcaccaaggtatatataaatttctattatatataaacgtgtaagtgtttttatattatttaattaattttgta

SEQ ID NO: 388902 - DNA, 1092 bp, Cannabis indica
aggatttgcgtatgtattgggatttagaagatgggaagcttggattggaatgggaaagagttcggaagggagaacagactatcttctctttgactgacttagggcttgtttgtgacttgtgcttttagtttactgtaaaagtacattttttaaggttgttttttttttaaagaagtacttctaatattaaaatttaaaagaaaaaacataaaccgtatttaaccttcaattatttttcactttaacattatattaatttttgttaaaaaaaaaagctattatattaatttatttagtaaataataatatgttgtataaaaatatactaggttcacgcataaattatttttttcattaattatatatatatataaattagaaaaattttgtagtaaaccctaaaagatgtagattatttatctgtttcatcaatttagaattttttttttaattaattctttttcatgattgcctacatagctatttagaactactaaaaatagtgttgtttataacaaaatatgtaaatcttgtttttggaattataaactatttaaattttttgaaaaatttacacatagttttaaataattgtaacatacgccatcatgaaaaaaaaaatagactaaattttttgttaagtgccgaaacagataaagaatctaccgaaatactcatttaaaggatggtgtatgtagacttaccctataaattatatgttttccttgtgttccctgtttccattctaattgtaagattataaatttttagtatgttaaactttgacatttaggcaaaacgtatattatcgaaaaacaaacgacattacttataagagtggcaaaacgagtttcgacacggtacacaaacacgaatacgacacgaattttacaggttagggtcagaaaaattagacgcgggtcgaaaacatgtcgacacgacttgccgtgaaattaaaacgggtcaaacacgacaccacacgcttaacacaaatttgacacctttttttttaaatataataaaataaaaaattattaataataatataaatatataaaaatatatatttagtgattcaatattaagttaaaa

SEQ ID NO: 388903 - DNA, 1247 bp, Cannabis indica
gtttctatccttgttttctttaaactctagcttaattattgcatgagttatgattttaagggttgtgtgattcagatttgtttggtgttatactttgaagttgagttatggttatttatgcaattttaggttggattagtttattattaggaggttgggatgaagttagagcttgtaagattttacttggtactttaatggtgtttttgttttctggactcattgtggagttttattacttggattgggtttattgtggtgtgcacaggtgttctggaaggtttcattgagtttggggttgaattgtggtgtgagggtcgatttttggtttctctgcacaaaaccgttaccggttttgtgggacttgagaaaccggtaaaccggttttgccctcaagaaacccaataaaccggttaaccggttgggaaactggttttccggtcagggtttttccaggaaccctagttttcccccaaattgttgattttagggtatggtcatgtcttttatagatagagttattcctagttgaccttaaagtccccgagaagtgtttagcgtgtctctcatcaaaattacaatgatgtgatttaggaccctgtgaaatgtcaagctgcaattccactcaggctgaccggcacacccaagcacggaaacgaggtaagatagcataaagtatatatatgtgtgaatatatacttgttattaattgattacactactaacaccaattaatatatagttttaagggtgctagtacagtgtagagttttagagtagttagggtgttaccaacacgagtacaaaattggtgctctagtgcatgtggtacaacactcggtaactcctggagtacaatttggccctaccaacacgagtacgaagtcagtactctagtgcatatggtacagtggtcgaccctactaacacgagtacagtgttggtgctctagtccatatggtatagtggtcgtacttccattaaaaacgttcttaaccacttggtgagctcagttattgagctcaggacggaaatccggtacatcatcactgttatatatgttatgtatatcttactgagtctgttgactcatcagtttgctaccttgtgtaggtaaaggaaaggctaagctggaggagcaatgagttagagcttggcgatgattgtacatatcgcggcagtgcaacctggagggtttcggttttataacattttgagctgccctatgttttgtaaaaaaaaaatat

SEQ ID NO: 388904 - DNA, 1300 bp, Cannabis indica
cgtcgctctattgaaaatgacacgctcggtcaataccctataagaaggttatttcgaagaacatagttttcgagtaatcaaattacaagagacttacaactaacataaattcttctacttacagaggagaggacatatttatttcggtatggaatctacatcgcagcccaaatcattgggagaatgcagacaagttcatacccgaaagatggcctttagatggacctaatccaaacgagactaatcaaggttttaggtaatattgatttttttcttcctactcatttgacaaattagactaatgttttttcgagaaactcatcttgtcccgttcgttcatagttatttgcccttcggaggaggaccccgaaaatgtgtcggtgacatgttcgctacctatgaggtaacttaacatgattggtttctgctaattcttaaatctttctttcttatgaacatattgaaactcttatgcttaacagactgtagtggcgctcgctatgcttgttcgaagatttaacttccaaatggcagttggagcctccgaagtaagtcaaattattcaacgatcctgtttgacttagcttctataattcttttttagcttttagaattattatttcgaaagaatgattttattatatttttctttttttgttttaaggtaaaaatgacaaccggagcaacaattcacacaaccgacggattaaacatgacggtgactagaagagtaaaaccgccaatagtgcccacattggagacacaagcattgaatttggattcatcatcgtcgtcatcatcagcagccggtgttatcgggaacgatccattagttggtcagaccggttaagtttattcttttgtacattcatggtgaagctagctccccaagctacatacacattacttgtagaataatacaatgtgacattattaccaaaagggaaatcaattcaagaaatgaaagaaaaaagagttaattgaaaatgtcaatgttggttctttcttaatttctctataaacacatattttagctaataataattaagtgaagtaacaatacttaactaaacttttagaatagattatgaaatgaaggtgttccaaataataatagttaagctcagtcccgagtgtctaccattatacctacaatgatcggatgtactatagttgttcataataaaaaagaatattttcccatttataaaaataacaaaaaaaaatacataaaagtaacataaaaatagcattctaacaatatcaaaataataaaaaataacataaaaataacaaaaaa

SEQ ID NO: 388905 - DNA, 1108 bp, Cannabis indica
caagatgagttttatacatttaacatgaattattgagtttgaggatacaatgggacaaaaataaaaaataataataaaagaaattaattaattaattattagtatagaaacaataaagtgacacttaatagaaaaaaatgtttatatgtacaatattttcgtgactccacctaaacatttcctataatttatactgttattttatttttgatattgatatgaagtgtattaatttttgtagctagtatttgtgatgtccaaggtgcattcatagattgaactttgctttaggtcagttttgaagtgcatggtgtaatatatacacttactcattttcacttgcattcaattttattttaaataaataaataaataaataaaaccaaacagagttatatttttctacagttccgaatatctttctttcttcttcttattttttttttttatttttcaaatcacatcacatctcatatcatatcaaacaacttatctatgtcttcatatattctcttcaatgagctttctcaccaaaaactattacaagatctacctagccttgtaggaaacctaattaactcagccattgatattgtgatagtgaggctatatagctttggtataataagttttttttttaacactttcttttattatttattactatagaatatattaaaaaaaataaagttttgtcaaaataaatttataagacctaccaaaattattgtgtttttttttcttgaacaaagtagcacttataaaagaagaaaatatgtatatatgggggaaaataggatggtattaattgtgaagatgtgaattctcaacccaaaagaattgggcccaaactcaatcaaagcacacgagtgcagcgcagtcacaggttgtgattgtcggctgttggtgggaattttcaggacccatcatttcaatttctttgacaaccggccttgatatgaaagctgatatctattattagtacttattatctatatctatatctctatttaattattatttattatttgtgatttgattacattaagtatatggtcaagtcctaaatgccaaaccaaaaatctatgagagaagagtatataattgg

SEQ ID NO: 388906 - DNA, 839 bp, Cannabis indica
gttagatttcatgtatattttcaatttcttctatttatatccttcctttttacatttattaatttagaaaaaaagaaaaaaaaccaaaaaaaacaaaagacaaaaagaccaacctttacaaaaacttatatatattacagacaaccaaaaaataaatttaatatgtatatatatatttatatatatatattatatataatgaaaaaaagacccaaaaacttaaagtaattataatttatatatatttttttaatgatattatttatatgttttttaatagaaaaaagtttttacataatatttgatatctttccatttaaaaatcataaaatttgaattttttttttcctgaaataccaacgtttataaaggatcttatgtagattacaatgtctctattaccttgcaagaataaataaataaatattctctctctatattttcaaaaaaaaaaatcacatactccccaactcatggtaaagccatgcaccctgtctattcaaccaataaaaatatttgacaaatgccctcatctataacagtaaatatgatgctctcacttaaaaatttttctatatatatcatttaataaaacaaaatgaatatgtcattataaaattactatgtagccctcatgaaatatttaaaaaaaatgattgtaagctcttttaagttggaggttaagaagaaacttattatatattagatatatatattaaaaaagcattacttttcatgtgtacgtagctttgttaaacacagtataaataccatgtctagtgtcacgggctcaccttttcaggcagcagaacacctgtaccgcatcttgacttctctaa

SEQ ID NO: 388907 - DNA, 1532 bp, Cannabis indica
ataataataataataataataataataataataataagagttttaagagagaaataggtaaaaaaataaaggaaaaaaagagccaaaactaaatttgaaacgactcttcatgtgtaccaaaaaaaaagggatacatggcttttttaagtctttttttaaaattaatttttaatttttttaaaaaattgtgtattcaccattataaatttataattagatatgttaataaaatacaaagttgaaactaatgagatcaccatattgattaggtgagttactcttgtttctttttctaagcaataaactatgaatatatacattggaaatgaattttctcttttatttttcacaaaaagataaaggtttttttggagttggatttaacttgtgttggcttttatataaatataattaggagtggataggatgcaccaatcttattttactaacttaatttaaaccaattcaattatatacaatatgaataaattgtattttaattggattagattagttattcgatgacacttttaattttaaaatcaactaaaaactcatgtataataatttaaatattttttttatattatttagaaatttgagcataaataaaatttaaatattattaaatatatattatatgcaattaaatttaatcaatttttaattgaatttagaaataaaattcattcccttctcctataattttatgccatgaaagaaatttaaaatatattaaatttgatatttttagaatatatgatatatgggccactaatttgtgattgtttgatcttgtgaggtaacacatcacatcatatattaaaattttaaattaataaaaaaactcatcaccataaggagggaggtttttaaaccaatttagccaaaatagatcttccaatccttttttagttaattttaatctaaggtggttaaacaataatgctaattttggatttatacagcaaattgttgtgaattaaggtggcgtttagttttttatttgatgcaacagaagactttattgaaaaacaaactagaaactagtagcaacaaagagtgctacttccctttcagagcaaacacgagagacattgttcactgcagcccaagctgcaagattgtgagccaccccattggcacctcgaggcagccaagaaacacttaaaccaaaattcattttaagggaagaaaataaatgcagaaagagattagagaggttccacacaaggatagaaaaattcctaacagcattagcaagttgtaaacagtcaatgtagaatgtagcatccttgcaattcagcttaaggctcaaggaaaaggcatggcagagagccaaactctaggcttgaagtgcagatgaagcaggcgtttagttaggaggaataaaaatataggaatagaaatgagaatatgaattggaataggaatgaaatagaataaaatttaaaatgtataaaaaaattgatatataaatcttgcattggaatggtctttccttctatttcaaaatggaatagtcattccac

SEQ ID NO: 388908 - DNA, 1928 bp, Cannabis indica
tgattacaaatataatatattttgaaaagaaattgattattactaattaacttaaatgtaaagataagaatctaacttttgtctagggttttttctttaggttttgcttttgccgcttggtgtcttcattctccctcttcggccatggttcaccaactcttttttgggtttggtgtgaggccatagtcgggagaatggtttgatcgacctttgagactgggttcaatggttgctattaccatatgggttgtttttttgtttctactatgtctgctggttagcaatatctctttggttgggtcgtgttaattctcgagtgttgggtcacgtgttttgccagatgagagacttttcttttttggtggtccatttcagatatagttttgaattagtggtttcgatgggtctttggtaggaccttattatggctcgtatctaggttttcgggatctctcaagctgtggtcaatgacgtttagggtgtggtcggtgagactagggtcattggtgtggtcccaatggtgattagtgttattgattttttctctcaattttgtcttgtctttttttatgtaagagtcttggtgttttatttatttatgataactacatccctgtttgatctccagtctattttggatttggatgaacatgttattctaagatttttactggtgtcttttaacaccttattttatgattctttgatatttattgttgggaattttgaacatggtttgtcatgattttctccattattctagttggaataattggggtattttacctaattttattgaaagatctttagttgtttgccattgatgataagtgtgatctgtcacttgttcatttaaggtgaaaatttagtattctttgcattgttttgatacttcacaattggtgacttttgggtcatttagttggagatagtgtaaggtttattgtcctagttattgcaaatggcttgattagcctatattttgttgatgtcgctccatgagcaatatctacatgtaatagactatgtctgatttacgaaatttaattaccttttaaaaaaaattaatatataactttattatattaattttaaaaataatatttagagtccacatttttttaaagggcttaagattaccttattaattataacactactaaagaataggtattcctgtcgattcaaacgacaattttcttcgaggaccaacaataataaaattgagtgactattataaataaaaactactattagccattggcattataaatcgaactctaacttaattataacctttccttcgatcttttattcttaacaattttggttccaatcatatacttgtttaaacaaaacactacatcaacatttcaaaattggtgtaaaaattaagaaaaaatgctaaaaaagactaacatatctaacactttttatatggtattatagtcaaaataaatttgaatattcttcatatttataatatataaagtcaatataataaagttttaataatagaaaagaaaatcttattaaagcttcaacatcataatatacatatatacaattcatcaaataattatattacattgtctctaaaaaataatgtatatattacatatatttatttttatatgaaaaaagaatataaaccatattgaaaaaattggtaattttataatatatagtgcagtgtagtttaaactgcaattattaaatttaaaaccgcaaatcgtagtgtattgtgtaatttagcaaaagtacaaaccacaattacactgtaaaagattttaaaacgtattttgtatacagtgtagtgcagtgcaaacaatttattctgtgtgggtagtttaatgaacaccacacacacacatatatatatatatatatagggatatgattttgtctcgttattgtactttcacgga

SEQ ID NO: 388909 - DNA, 812 bp, Cannabis indica
gtaggttgatcttgtgatagaattctcaatgtacaacaattgatcgatcaaatcacccaaaagctcgttgtaaatcctgcacgagtgagaaacgtaagagccaaatggaaatcgttttagtcctcctattcctatatagctcacaatgaatattataacataccttgtacctcatagcctgaatcatggtgagagctgtcatgatactcagcatcatccatctcttccatttgaggcataagaacatcattcgtgtcttctaggctgttgtcatgatgttgcatttccatggcttgttcggaagtattcggtgatgatcgaggactcctcattttgttgggcagaacaatctgataagacaacatatgtctttttgtcaaggtaaggcctggccacatcaaatgaaacccaaacaattttaagatctaataaaattaggatactaataaaaatttaaattaaaataattatcatttaaataataaggtttggttaagtataattaggatactaataaaaatttaaattaaacaattttaaaattcaattaataaaagttaatgtcacatagagatttggttgatcaagataactaatttttaaatttaaaacattttaaaaaattaatcaaataaaagataatatcacaataatagggatttagttgaaatactaataaatatcttattaaattatttaatttaatctaattgattgattaaaattaaaaatatttccaccacaccatatatataataggagactacttaatggttatatttttactgtaatcatcatagttacattttttt

SEQ ID NO: 388910 - DNA, 1632 bp, Cannabis indica
tgcttgctgtaaggtttaattagtgaaaggttgtgacgaagtaactatcgagaagaagaaaaggaagtgcaaagaatgattttaaacttttcgacgttgtatgaaaagactgatgtgtggaaattgtgacgataaatcccatcttatggatagcttcaaaattagcaacattggaggatacttttcttcatttggtacaagcgttcttatggatgcaagaggtggactttatcccagttgaattttgtaagaggaaaccaacgtccatctatatgacgctaacaacagcgctcttgagaggcaccctaggtaagttcccttctttagtctttagtgccacattggggacaatgtgtcaattaaatttgggatgaactgaaaaaaatagttttcattttagttattttttgtgcttttgagttttttgtatgttatgagttaattttctaaatgtgagtcaatgtgaaagtaggtagatagcatgatttgaaaattttatttatttttcgaaaaattagtgtgcttggtgatatgacattcttgactaattttaattttgtgctttaaaagaacataaaatcataatatgtaaatttctagcaattgaattggtttatgtatgctaaatgtgaaatatggaaagttgtttgaaaaattctagaactttcttgcttgctatttgaggtaaataataaataatgcatgattaagaaagtgatttcggcattttttggatcgattatgccttttaagctatccttgtaattcttatcttagttaccctttttgagtcttaactttattctttatttctacacattagcctaaacaaaataaacccattaatatccaaaatttgaccctaattataccataagtggatctttaatttggaagaatttgaatggtaagtttgttattgtgtgtgggaataagagtgtaaattgagagaatgtgaaaaaattaattggcaacaacttgaaaagaaaaaagaattgataagaagtgttaaattcgaaaaaaaaaaataaataaaaataaaatttttgcgatgttgtcggaaaaaaattctctcatggaataagaaaaaagagggtatagggattgtttgtgaaaaaaaattattgtgatttgagtgagaagcttacggtataggtaagcctaaatgaccatttcatctacctgtacttaaacctaacattacaaacctaaaaagattttttgattcttggttgtgcgttgatttatattagtggagaatagtaagttttacaagtttatggaataatttggattattggattgatagttgttattggcatgcataaattattttaattgttagttaagtactatttatggttttgtgaattatatgaaaaattaaagtgagtcaagggtgtgattaaactaaaattttatattattatacataggtgaaatttttgttcatgaccatgttatttgtcttatttgaaaatcactcatgttcggttgattgacttgtttaagttgtgtatttttagtgttttacttgaggacgaataaatgtttagtttgggagaatttgtttggttattattagtactatttttaggttaattttggtgtatttttaaataagttttactc

SEQ ID NO: 388911 - DNA, 642 bp, Cannabis indica
ctattacgtttttttttttgctttagggcccatagcatattcatatattttatattatctttacttttggtgtgatgtattcattcaatagtctctttacaattttctttgtttagtgataactcatatatgaatattataatctaccacgttgtatgttacttaaatttatatgatataatattcgagcttaaaatgaagtctcacctattataacttaaaatatatgaatataattcttaaatataattagtatgggacctcaaataatgttggacatattacaaccttattgaaattaacactactcaaattggaagtaaatggatgagaaacttaaaagtgatactagttttttctattgatgaataaaaatgattcaatatatatgaaaaagttttctcttttttatttttcaaattctatgaaaaagttttatcttttatttatacagaccatcccttttatacattgtgtagaaaagtacttatacataaaggtatttataaaataattaatatgatttaattcgcacttgtgtagattaaatttgattgaaaattctaaaatttgtatttgtggggatcaaatattaatttacatacaaaaatagctaattcaattcattctgtacctatttat

SEQ ID NO: 388912 - DNA, 594 bp, Cannabis indica
aaaaaaaaaaaaaacttagcttattagttgtattatatactttttgactttacaattaaataaaactctaaatctaatctctactttctctttatcttttattttttttatttatttttcttcttaaataattatcctaattcatgacaagaaaatgaaattaaatccaagactaaaccaagtcatttgaaattattttttagtcagagtcaaacacatttattcatcaacaataattaaacaattataaatacaaaaaccaaggtttagttgaactaatcctactaattatacttttgagtcaaaaagaatagtgacagaacacatatttgaattagttttcaatccatttagataacttgtatacaaattcgaaaattgtatacggtctcttattactagcatatttttttttatgaatttcataagagcataagcaccaagtgctcaacaaacactctaatgtaacacattataattagttagtagttttttataaggtaaatagtgacataagtacctaaagttttaagtttgtaagcggcataaaccaataattttttttaatggcataaatacccaatgtttataaaa

SEQ ID NO: 388913 - DNA, 1354 bp, Cannabis indica
tgactaaaagtcatgtttaattacaaaaaatatatactgtgacaaaaaatttatcactaaaagtaactgttttttgtagtttgtagtgataaaaaattcaaatcaaagataatattgtaatcaatacgataattaaaaaaaaaatctcaatatataattaaaatcacagttgaaaaactttaatccaagtttagaacataaaaaacaacaaggcattattttgtttgtatataagatttgacaccaatcatggcccagttatatatgattgataatttcttcataaggtcttccctaccagtcccttaaattgagggaaagttgcccaaatattcaatattgatagtggtatacaaaaactataaatacatactccctttattccttttaaacaaatacaaccaatatataaaaagttacatctatcaacatgcttgtttgtgcaacttgtccaaccaccagtactcagtatgtatataaagacactgatattaacatttaatatgaggtgagtaagactttgttcatttgggttgagttgagacgacatgttaagtgggcttttgctttctttttcactctctatccttctttctttcactcactgacacacttatatgatttgttgtgtgcatggggggcctaatgtatggactgagtcaactttggggtacactacaataagctttatttttttcccctgcatgacatgaaagtgtgtactatattttctcacacaatcttatttatacatgaaaaaaagtgtagtgatttggtatggtccagttttatgtaccactgtaattaatatcattatcatattgattctgagaaattttgaaataatcttgttaggagtattctcaaagttttaaaaattatgatgatggcttatcttgaagctgtagtatgtcatccaaacaaaacaaaacaaaagtattagcctgttacactgtaaatatcttttttatttatgtgaaaaaataaactcttagaacaaacattatcagtaaagattttagtgtatatcttcaagaggagaacacatgaaaatcaatgatttggaaacataaagtaatgtttagagggtgcaagtaacaggatttacctaaccatttaatttggattagattccactaatcaaatataaatagttgatagttgtaggataaaacaaattggcatcatatagaaaacatattttcaatctttcaagttgcatttattaaattttgattgagacatgttatgggcctaaacttgaactaattttgtgcaactaattataatttaaaccaataatatgtatcacattattataatcaatgagtaatgagtgtatgcactatgcaac

SEQ ID NO: 388914 - DNA, 1434 bp, Cannabis indica
aataccaaaattgttaataaaaatgatactaaaacttaaaatatgcgataagtgaagtaacattaatgatcttataaatgatatatatatttatatatattaagtttttatacatttgtaggcgtacgttgtaaaattttttaagactataacatggttggaattaaattattataggattagtggtggctagtacaccttctaatctttacactttttaaccactgtttatatctttaaaattttggtagcaatacctcccaaactccactctaattttttaaatttaaggtgttcattaattcttattcttagatgctaacattgattgtccagtgcaatttaattatttaaggtttcatttgatacactgtgttgtattgtattatattgtatactatttaaggacggtgttggatgtgaacccactggccaagaggaattcgaagtctcaagcgacgactatttttttccaaaggcgccaaagggggagtacaaatgggcacgggctgcccaagcccctagccactcctgccgtgctgaaccctaagactaaaagggtaaggagatgctccaattttatcaagacggagtgcttcctgaggtaaacgatcagctggccaagggggaagacatgtccgtggagctgctcatgggaagaaattgaaggagaccacccgagtaagtacttttccttcgatctttttctcatgcttttatccgtgcaaattttaacttttttgctttgtgtaactcaacttgaagatggcttatacttactcccgaggcaagtccgcaaccttgaaagccacaacaaccaccaccaatttgaaaaaaaaggtggaggaagctaagaaggaggccgaggagaagagtctgaagatgggcgagcttaataagaaacttctggctgccaacaatcgtgtttaggaactgctgcaggagatcaaggatatgccgtccactactcagcttgaagcggacaatgagggtctgaccaaagatgtcaatgctctgaaagatgagagggaaagccttcagaccttttttttctaacttaatcggggagaagaaggttttggaggcgagtctcagctttgggcaggtagagcgggagccgcttctgaaggaggtggacaacctggagacagtcaccctggatgttttctatgagtttggaaggtatattcagaagcaaatattgattacctcaatggaaacaaagaggcctatcggcccaaaaagataatgaggaatccgaggcagtcaacctctctaagctttgaccagccaaagtactgataccccagccactgaagatatcgctgacctgtataaagagccaaggactccaaccgtgtgaagtttattcctttcccccttttttttattttagtttaacccatgggccttttttcagtataatatggccga

SEQ ID NO: 388915 - DNA, 1975 bp, Cannabis indica
actttgggtacttatgccactatatatccattttagagtaacttgatttttgtataaaatgttttagtttctttaatattttgtaaaaaaaaattaattctttatttatatttgttcaaataaaaaaaggggaagggggagttttttggcttgttggcttaaaaatagttatcaattgtcgttcttttgataagtattgattggtgcaatatttggtctaattttgataagtttcctatgttaaatgatctcttgttaatgtgttttgtgaaatttttaaccttgattttattttttattttagcacttatttaaatatagtgaaaatcttgattaatttctcatttgtcttctctttcatttttttgcgtttatttttctgtgtcctcattaaataaataaaaaatgaaagtgttccttgaggatcggttattatttggtgagaaagattggttttttatttcttgtttccattttaaattggtttcccattttatcttccctctctttttatataactaattttgattttatttatttctcaccaaccctattcttcttccctaataactctctcttctctcttctttgctttctttgtttacaaaaatcccatggccaaaactaagaacattggtcgatcaagaaagttggtcgacattgctattgctccatccagcacctcttctgagacgacattcctccaactgtcactatcactccaacgattacacctgtaacagttaatttatcgcgtcctttattcataacctcctcaatttgaatcaaagaaagtaatggtcaagaagtcatctgctctcaaattgaaggcttctcactactataaaaaccaatattcctgccagtcctcaaattgctttttttcgaggaccattgctaataaaattaagtgagtgtttaaaactgacacctatagtggagaatagtcgttggttttaaacactcgttgagaatagaaaatggtttagacccatcgactatactgaaatttaattttttaaattggaattgcctatggttaaaaattgtgggcaattccaagcatataataaccccctccaattttttattttatcttcaaatgcaattttagatccaaaatcagacctcatctttctctttggcaattctagcacgaaccacctcgattaacacccgcaccattccttatgtcattgaagaccaccaccaatccaccaccattcttgagaaactcacgccatccctaatctcctctgccccaacctttgaatcaccaccgtcagtttccccatttccaaggtaatggaccccattaacacctctgtctccttggagagaagtcaaccacaatgcctaccataagatccggcacagatttggcaccaactgttgtgtctgaaggggatcgccgcctctgactccataaaagttagtgcttttttatttgttaacttttttctatagatctgtgcatatgtaacatgttttggttttaacatgtgaaaatgtggtatatgcttgtgctttttaattgttggttttagttttctgatcgatgaatttgttactgtcattatcgtttggatcaacaagaacttgattagctttatgttagattggtgagttcttgtttagcttgaggttgatggtgagcgtagtatgatttaatgaattgagatcaactataaacactatagccaacatttttaaattgtaggctataatttctactattgttgacagttttaacccgtcggtaaatttttttgccgacaattttccatcgtcgcctatttcgcccagttttgcgtctgtggaatagaagacaattatagagacctgtgacagtcagtggtcccattatccataaggaaaaataccgagtaagctgtgcaatcgcacaccgcctgggaagatcaagtgggatgatctgagattgtgtaggtatgggactacatagttgaagagagct

SEQ ID NO: 388916 - DNA, 554 bp, Cannabis indica
gcgacttaaaattgcctactgctcgtttagacatcgctcccacaacttggccatccgaattccggacgataacaccaataccaattttggtccttgaagaatccaaagccgcatctacatttaatttgaatttgttctctggaggaggctgccactttgtaactggtgtagaactggtgcgtgaaccagctgctggtgttgtaactgctggcgttgcagtagagttgacacgctaaaattattgtaaatatgcagcagattgtgtcaacatttggataggtgtcttaaccttttttccatgtatataaccatatgaaccagatgaggcaaagaatactctcaaggtctgatttgttgtaaattgtggacaaatgtttctatctattaaacatactaatttaataaacaaaataataatattcacatatgtttattatatcactctatgtgtcatgtttatttttagtaattttaagtattgatttatatttatatacattagtgtttataattttgatattgtattttattaaaaaaattcttattaaattata

SEQ ID NO: 388917 - DNA, 1046 bp, Cannabis indica
ttaaaaagagacactactactaacattaatcaatttcaaaatatcattattgtcttttattttactacataaatactattatatatatgtccatatataattacttgcacaacaacaaaaaataaaggaaaaaagaacatttcttttctcatagttcttcacaatagatatgtattatttgtttagaagtagagtcaagaacaaacacataaaatgaaatttcacataatggtttgttattatttgacacaagaaacagctaataaaccatcataattaattattaacaataattaacacatataaaatttaataatacccaaaactacactataaatacctttcttattagttctcttccactaaacaaattaaactcataacaatataatgaagttaaacattcttcttatttggtttgggatagtatctacaactactattcctatttttaagtgtggaacaagtgcaagtggtgttggttgtcaaagccagtgcggcccaagcccaggcccaagcccacctccactgagcccaccaagtccaagcctaccattaccactaagcccaaaacaaaaattcaaagttaaagatattgaaagaccagacaatagatgtgggccaaattttgaaaacgagccatgtggtgaaggaaggtgttgtagcatatatggttattgtggcaacacacctgattattgtggtatttcttgtgaaagtcagtgtatcccaagcccaccaccaccgaacccaccaccaccaccagtcccagaaagatcagactatagatgtgggccggattttggatacagcccatgtggtgaaggaaggtgttgtagcatgcttggatattgtggaagttcagaagagtattgcaaatcaaggtgcagatatcaatgttggccacctagctaggactttgcttatgctctaaagatgataatgatgatgataataatattataagaagagtgttactgtcaacttcttattataatcttttagttaattttcgtgtctgaaaatatatatcaaaatattatttt

SEQ ID NO: 388918 - DNA, 1179 bp, Cannabis indica
ctttttctttgttcatgagaactttcattgtctacctttcaacaaaagaatagtaaactattttacactaagttattttaggttatttccacatataagtttttacacagagttatctaggtatttccatatatctattttacacaaagttaaacaagttttttttttttttttgaaaagttaactattgacaataagagtgaaaacttaaaatgattgataaaattaggggaactcaatagaaaaataaacaaacaaagagaaaaggagggcattagccaaagcattagttgttatactctgattttgcaaaaaaaaaaacaatataacattttatttaggcacctaggtggtaaaaccatcatgcctcattacctcaacctacacttaggtggtggcacaatgtcaactcaccttccccaaggttggtgtactcttcattagggcatcatctcgaccctaaccaagatgcacatcatcaaggcatcatctcagaccaaggtcaagaatcacactccaacaacctcacctcggcacaaggccaagaacatcactttggctcaaggccaaaatgatcacctcgaccttgtctcaaagatgatcacctcaaccttgtcttaaagatgatcacctcgtaccaaatctcatcatttcgtaccaatgcacaccttgtaccaaattgctcaccatctcagaccaaagctcatcatctcagccttatctcaaaggccatcgtctcgaccttgtcttaaaggccatcacctcgaccttttctcaaacaccatcacctcggccttgtctcacaccatcatctcatcctcctcatgaaggcatcatcaccacttcaagtcatcatctcgtccctagccgagatcacaacatcacgtcatcatttgggccctaaccgagatcacagcacaaagtcatcatctcgaccctaactgagatcacaacacaaagtcatcgtcttggccctagctgagatgtttctcacttcaacacgtgctcctcacgactcatcaacatcatggtctcattatgtgttattcatcaacatacatgtgtttctcatgatcggaacaagccaacacatgttaactaaagatatcttcgatagtttatcattttcttagatattaattttaaaatatgattttgttatcattttgtattttaaac

SEQ ID NO: 388919 - DNA, 1599 bp, Cannabis indica
aactatgaaactcagaaaccggcctttttgatggtttcaagccattgactaccaactgtgaatctgtctcaatgaaatgtactggtagatcaagttcttgcaaccacttcaagctatgcatgagtgccatggcttccattatttctggtttaaagcaaccttgatagggggctgccatagcagcaacaatatctccattgctattccgaaggatagctccaaaaccagagagatgtttcatcttgtcaacagccgcatcagtattaagcttcagcctacccgaaggtggattcagccatggagaatcctttgaaactgatgagttctggttccttaaagttaaggaattgattgcaggatctttccttgctgaatggaattctgcaagataagaaagagcaaaataaaaaagaacatcagcaggtttcggtttggagccatgaatttctctattcctttcattccaaatactccaaagtagagttgcaaactgttccaactttgaagaagaccaagtagcagccaagtgcaggatgatttcattcaaggacatgtgaggagatataattttatcgaggccaaatgcagaaagctgccatacttgtctagcccgtttgcaaaagaaaagagcatgagtaatactttctttgtcacggttgcaaatggaggaatttgctgaagctgcaatatgtctggtgtgaagtatttctgcatcaggaaacactcatttattgcacgccaaaggaagattcggatctttgaaggtaatgacagaccccagaattttttccaccagagttgagcttgaataccgcttacagaggggctttgttcctccaaggacaatgctaagttgtaccctgatttaaccgagtagttaccatgggattcatggtgccacatcaaacaatcttgatgatcatccaaagcaagaggaatattaagaatcttgtcaacatcggaatccagaaaaagatattttaaaagaggagagttccaacagcgagagtccaatatcaaggcagagacttttagtgtgttatcaactcctttaaacactaaaggcttaaaagtagtaatgcctgacagccatggttcagaggcacaatgaatttgagaaccatctccaactttccaacggagacctttgatgagcaattctttaccccacataattcctctccaagtcaaggaagggtaattattcataccagcatccaagaaagaacaattatgaaaatgtcttgcctttaaaacacgacatagaagagaagatgggtttgagaaaattctccaagcttgttttgctaacaaggcttgattaaaatggacaaaacttttgaaccccattccaccctcaactttagattgcgtgagaactttccaagttttccaattgattccattataggaagagttagatccccaccaaaacttgttcatcatcgtttctatttgattgacaagtgatttagaaaggcgaaaacaactcatagcatatgttggaatagcttgagcaactgccttgagaagaacttcttttccaccaatcgaaaataatttttcttgccaagcggataacagattccataacttttc

SEQ ID NO: 388920 - DNA, 733 bp, Cannabis indica
aaagaagatccagaaacaccatctgagaccatgcttggagcctgagctgcaacactacaagtctgaatattttctgagcatcaagatactggaaaaaataattaacactccaatcaaagatatcagcagcaggcataacagtattacgatgtatataattatttctttgattccacaaggcccacaacaagcaaaacaaaatactaatgtaatctttctccagagcctcaaaagaacacagcaaaaaatcagtgatatcaagttgtttatatttatgataatgatccacaaaccttgatgatttctaagcctttctcaatctggaacaccctagcaaaacatgatgaaccctttctggactattcttgcaaaaagaacaatgtggggaatcaagaatatgcatagcaaaaagattggaagcaacagattagaattttttttgtataaacgtacaagttgttatttgcatatgagttgttatttgaatattatttctatgtttatagtatgccattttaacattatttttatattgttcggtaaacttgtacaaaatataatcaaacattaattttgtaaaagtatttaaaatttatgtgtcagcaaaaaagtataattttttttattcgcccacctcggggctcgaataaaaaaaaaataattcatgtaaaaatatcctttcccaattcacgtaaaaatttaattcaaatctcactttcaaaaaaaaaaaaaa

SEQ ID NO: 388921 - DNA, 649 bp, Cannabis indica
aaaaataaccaaaacaagtaccatgaagaatcttacgttgacctttagtcaacttaaaattgatatttttaacaacaatgttatcttgattacggaataacatgacttttccctgaatcttttcattaggcttgtaatataaatcccattcctgaaacaacaaatgatatacaataaataaatacggtaaaccaaaaaataaatgtcaaaaaataacttcaaagtaaaccataaacatgaaattttgtaaacacattttttcatttctaacacgataaaatacaatccaccaaaaatacacattaaaatactaaaacaacaaaataaaccttaaaattcctaatataaaaaaataaacacagtaaacacatattttttaaaaacatagaataacaaaatttgatatactacaaaattttaaaaaaataaactaaactaatgtataaattgttaaaacagtataccaatataaaatgtaacctaaaaatacataatcataacaaattaacaaataaactaaaaaaatacacataaaccgtaacctaataacatagaatcaaatctataaaaaaaaattaatagacaaaacaaacacaaaaatcatgacaaaaacaaaacataaacaacaacatgcataaagaaaaaaaaa

SEQ ID NO: 388922 - DNA, 1065 bp, Cannabis indica
gatcctctcatcaccaacaccaccattgacaaccgtcggattggaatactcatgatcacgatcagcgccttcgggcaaggccaagtaccacatcaagtcgttggctgccaaaggcagcatatgatcgctgacgtggcccaactctgagtccgtcctatggacaccaccaaagtaaggttgattaagcaacagccctcggatcaccataggtgagagatccagatcgagtgcacgtagacccgcgtggtacaccatattccccccggcgctactccccatcacaaaacacttggtgaaatcggcacactcgctgagccagggctcggctgagacgccgcctgctacggcggatatccagcgaagagcttcgacggcgtcgtcgtaggcggctgggagacggtgttcgggagcgagacggtactcgagtgataggactagtgcgcggagctgggccgctaagccggcgcatgattcgtggtaagggagggatgtggcgctgaagaggatgaagccgccgccgtggaagaagaggatgacgggaagatttggagtgttgggaaggggattgggcttgaaagctcggaggaatgttccggtggcggaattgagagggaaatctttggagatgacggctgaatcgtgggattcagatgtaggggccttggggatggaggagtggcgggtaagagtgccgtctggattgggtacgagtttgaggaactcgtaagggtcaatggagtccgccattgttattaattagttaaattagttgttttgttattttttgggggagagcaagttttctttatagaaaaattgtacttagttgatggtcatagactcatagttaagtcaaagttgtatagtatacgtaagaagatattaaatatgtgaacaatgattagatagctcactagataatgtgcggcaaccgtagcctatcctaattttcgggccaaaataaaaaatggataatgaaaaaaaaattaatttgcgtcgtaaatattaaaatttaactcttaattgtaaattaatatttaattttaatttttatcagtaataata

SEQ ID NO: 388923 - DNA, 668 bp, Cannabis indica
gaagtgggaatatcattatcaacttgagttgacgatgatggaatattagaagtcaaactttgctctagttcttctagtatcaatttgcttcaaggtctatgattgacaatgtagtcactttttatgaatgatacagctagtccaaacacaactcctggcaaccaacgttctggtctaggttcgaatttgggtctagtctcgggtttcggtctcgagtttggagttcaggtctcgagcccgagttcgggtctcaggtttgggtcccgggtatgggtcctaggtctggatttgggtttaagtctgggtccgggtctggtcctgggtctaggtcccaggtcagggccccaaactgggttccgagttcgggttcgggtctaggtccaggttcgggtgtccaaggctgggtccgggtccgaactcgggtgcaggtctggcacccggaacgcgggtctgggtccggtcctagtttcgggttatggtcatggtccgggtccgggtattagctttgggcttgggtcccgagcttgggttccaagttcaggtccgggtctgatctcgggtcccgagttcgagttcaaatcttgggcgggcctctagttcctggaatggaaaggcctctagtcctgctttgtgataacaatggagctatagccaacagtaaggaacct

SEQ ID NO: 388924 - DNA, 2825 bp, Cannabis indica
agtttgaggaagaattcctatctgcatgggaagttaaggttgtttcgtaactaaaatttagctcgtggaacccaccattaatctagcctcttttcgaggctatctacacatgctggccgaccaggcctgtttttagggcctggccaacacataggacttcattggctagccaggtgtggtctggacagggttccctggctggccattttctccttgcttgatcttgcttgattgccttagaacccttgacaattgacatgtcgtgcaaggtgacttttttcggttgttgacggaccatattccacgtggttttgatttttgtctatgtagacatgccacgtcaggtgggtaaaaattaaaataatatttaccccctaagtccctatgaggacgtctgttcgattagggattttttaactctaatcttaactgtaaaagccttaaccggacaactttgcctagttagatactctcttcagatgacttatctttataacaaaaaatgattttattgccaatcgttatggagatttgtgtaacggtcgtacactttcttatttttgaaattttagtcttcttctcatctacaggctatttttgtggaaaaataaccacccattaagttttttggggaaaagactttagaacctatataaggttcattttgcttcattttgattcactccactttatcccctctctctctccttcgtactctctttgtaaaaaaaaaagaaaaagaacacttttcatcttcctcttcaagcccgatacctcaggcacctccattccttgatgtttttcaatttttttcaatgattcgatcattccctgagtatctacatcggtcttcatcggtgggtaagtcttaaaatctcacttcctcattattttcttgaatctgtcattgatgacttaaagcttttttaagctttttgaaatttttgattctcacattgtagtgtagtcttttttacattataatccgcttgatagctttggggacgtataatacatggctttctgatagaaaagatcagattttgaactccttttagattcttgactctttgagtcacgaagaacattgtttgaattttagaaaaatagaactttgattcttttgagcttctggccgacacacatggtctgttcatgaccctggccaatttgtgttttcaatttgggaccatggccggttcgtgactctagcccaaaaacttagtcagttcatgactttaaacctaaaacctggtcagttcatggttttgtacccaaaacctagtcggttcatggttttgtacctaaaacctggccggttcatggcgcgcagtttaacgtcatgagtttggccgattctggccaatacttagtctttgtaaagactctgtatggcttctcgagcccatttcacccttatccattaactttgtatggtatgccttaggtagaatctatctcggccaattagtggcctaaaactcaatgtctatttaatttttttgcacctgaatcttgtattttgtcgattaacggctttgtacattagggttgtctggctaatacccttaggtttaggccagttgactcgtgctttgtctaagtctttttattcgttcggttgttcacctccctctactttttttacataaatgaacttgtgcgactttagggaggtgacaaccaaattggtgaagacttattcagccttctctacaaagaccatcgtccagtctagacagttagttcttcttatgatggtttttcggatagttccttgagcaattttaaggtcaacaaggttctccggaacttgagatttagcaccaccgctattctgagcgaataggcagtgagttctatggtcagttcatctaggaactgaactaggaagatttttacgtggttcaagtgtcaattaaccttagtccacgaatcaaccattagcctttaagggtagtattgatgaatttacagtattttgcaagaaaccctaactctttacctttagtttttcaaagaagaagaagattaagggcaatttcagcagagtttagctatgtatttttggcttgacccaattgcatgaaaataaaggggtatttataggttaagtggcgagtatgagtagacccatgatccgcgtaaggtttctacttaaatccaactattgaagtaaattacatgcaatgtagagctgactggttgatcccgtgggtcgtcttatgcctgtgcctatagcaattgaataatgggaaccattttgtactacttgaacacgtatcacacaaaggtttaacctttaaaagtgagggacacatgtcactcaaagcttgctcctttatgggtagaagtctacattgtctgcctggtaaaaagatggtagcgatgcgtacactaccatgctcgattgtaggggataagatctgattctgtcagtaaaagcataatcgtcacttttgtgacttgtcgtatgagaaaagtcgacatctgcgattcctcatgagggtcgatattcgcgttaggcctttctagtgcgtatttgggaaccaattgaacaatccttctagccaagcccttccgggtctgagagagacacttttcatcttgctctttgggaagcaagagctgctgcaagtaggcttccgcgtatccctttgcctttgatgcctcttagttcggggagacccctcagcaacggagcgccttttggatgatgtttattaaagtggaaaattttaacacctttacacaataagaaattatattgtatatgttataaatattaataattatgtggatgtccaaatcttttatttattacc

SEQ ID NO: 388925 - DNA, 852 bp, Cannabis indica
tatacaatatatatttccatggtgaatcacatcataaaagtctttaaagagttcatataaaaatagcgtgatataactcaatacaaaatttatttaccaaacaaaatcaatagatttatgcaaaataacaaaattaaataatgtattagccatcaatttcaatatatttagtacctattttttttaaaaaaagagtataggtattacatttaccataatctcttgactcttttcttgtcttagatttcagtcactttcactttttcagtccaaaatgaataatcttaaaattttctctgtaattctattaacaaagaatttttcaatattagtttgtgcacaatattaactaaaaaaattatttaaaaaatatatattacataatatatataacagtataatataatatacactattaataataatatactgcaatgtatagtatatactagtataatatataaaaatctaaagttctttactgtgtgtacaattaacaacttctaataatattatcccaataaaattatataaaaataatttattatataaaattaattaaataatttattatcacagtcagacaccggtatgggtgggtggacacgggcggatagtggacacgggaagaggagaaggcttttggactttggatgttagggacgagatttgccagactgagtcagtcgctgggatgcgaccccgccagagaagaagaagcagccgcctttggagaagaagaagttttagtgtttttttttggttgtcttggtcttgttcaaatagtgagtatgtaggtattaaatgaatagtgaaaagtaaaaactaaaaatgaagtgcgataaataaaaa

SEQ ID NO: 388926 - DNA, 1291 bp, Cannabis indica
agacaagttattttacttgttggtttgcttgttgcgtatttgttagaattggaaagtttcgtggttggattcttttttgtagctctaaggtgttttcttttgtatttttatatattcctcctcctattacattgctactgatatctctacttgagcttcaaggtttttttgctttgcttaaagctttttatgtgttgcttttcagggtctaccagccatctttactttgacttggagttcagtaagagagattgcagaaaaagatggagatgaaatggttgatcttctgatatcggttatttttggaagccttgggtgataaattctcaaatgaaggaagtagagaatggatagtagagctttattcttctactcgtggaatgattagctaggagatgtataatgtacagtccttgttcattttggaaatctttgtatgtgtattttcaattatgcaacaaacaaactttatgtttgtgcttatgactttattgtgttatttatatgatttctaaacatggttatctttaaaggattaattataaattacattttgaattgattgttgttatatatatatccatttgcagggaagttctctcagtatttaatcattcgcataccaaaaattgtttttaaagacaactcagatgtgggtacatttgtcaatgaggtatgtattgataaaggaataaacactaactgtttattacatcaacattatggaattatctattagatctcccataaatatgacttattttaggtggaacaaaaggcatagtcttagttaatgactgttatttctattatgtttaattattgttgtgaaaaggattaagctgatgtctcaaaagcgtacgttctaaatggtctttagagaacacgtttgttgagacatcttgctggtctatctgtgttctaatatttgtaacgaatgcacacttaagtgaattaatttagggtctcagttctctctaggattggaaggaattatatcatccaagcaatggttgtttgatgaacaagttacaataaaagaaattactcatttcattcataataacttaattatatataaaatcaataaattatggtatcttttctgtaggatggctcttgaggttatggaggagatgcatggttatgacttcaagtaagtctatttcattttaaccgtatatgtttagtttgttggacaccacaacacgtgaaaacgtaattactttattattgaaaaagtaattacaccaagacttgaacactttttttttattagaccacaatacac

SEQ ID NO: 388927 - DNA, 697 bp, Cannabis indica
aaataatgatactgttcggtaacctttaaaaaagtaattttttatgtaatcataaatctgaaaacaacaaatcaaaatagtttatagtggctgttcgaaaagggagaaaaatatgttttcacaattttgaattagtaattcatagattaatatatgactgaacattgatatatttttcaaactaactgaacacaatttcgagcagtagttaaacttatcacttaaaggctcctcacctttcatccgatcaaaacgaagtggacatactcacacaattgtatacaagatacaaagtgggttttagattcaaatcaatactaaaagttgtttaaaaaaactaccaaaagagtaaagaattttacatataacatctgacatgaattcagaagtgatttgtaaatttttttatgatcctaaacatacggtgaaaccttcagactacatgatctcaacaaaaacttgtaatgctgattatactacaatattttaatatagacaagtaattttcacaataataacttaatatcaaacaaaaattttaatattcacttatattacctctgcgcaaaaaatatgaatgatggacttcttcagtgtgtcacccaagccaaaggtcctccgcagatgaaaaccctccaaaatctctgttttataacagctgcataaaatgaaaaatagataagagattaaataaaaa

SEQ ID NO: 388928 - DNA, 1039 bp, Cannabis indica
cgttttttttttttacaattttaaagtatggaatttgatgttggcaagctcatgaatgcatatttgtttatgtagagctctttagttttgatgagaaataaactacagcatttttcctttgcttaagatagacagtgcattgtctgtttactcataaattgagtttacaaaagccacttgatttctgcctgtcattaatcattgaattgccacacccaccttccaaaatttatgctacaccaaaatctcaagtctccattcagcttcaatttaaaaatgttcatgactcatgtaaaaggccttctggaagaaaaagctgaaaaagaagaaaacaagtgaggctcaataaaagaaaaggagattgaaattttgggaaaaaggctaataaaagagaagaaagaaagatagaaatggagagcaaacagagaaaggtgatgactccaatatggatttccgtaccataaaagtgtgtgcttgtaaagcttttgcacaattgagcagcttctgcaaagaagtacagaatggaagattggcagtttgtgagatcataaaaaattaagagaacattgttaccaactaggtgtaggaattattatcactctatatattactatttagtacaagttaaagttttggacaaaaatcctaatttacataaaaattatttctaattgaatccaccactacccacaacaatgtaaactaatattaattgtttatatataagagcatttgtagtggaaatgcaaataagtgatataaatataaaatatagctcattgtataaaaaaatttactttaatagggtgttaaattataatgcaaatttattgcataataaaaagtgatccaaatttaaatcacaatatagcatgatgtaaaatttatattacaataaatgttatactattataattaccattatgtcatttttaatattttattactaaagttagttaccatgctgctttgcattaaataactttcataattattattaaattttatatttatttttgtattattattattttatttt

SEQ ID NO: 388929 - DNA, 1584 bp, Cannabis indica
ctaatatggtattagtcgcttaaattctctctcatacacgatcgtttccatggatagaataagagctacttgtttaaggaactccgacaaacttccaggctgcacaattcatcttccataccaaatgctcctctaaattctctgatcatttctccagtctctaccgtaaccttcgacattgttaatatacagcctaatgtgacaacatgacctatccatgaagataggtccagtccatatttcttgaattctggtgaatctcctggcctcacctaagtcactcctccgttatgtgacaagaaatttcagtcatgtcattgtgatttcaagctttttgttagtgtgcgaaacaaaaatgtcttcctcaaacgtaccttccacaaccaccagtcgacgatcctttgcatcatcttggcttcgctgtaatcagatggtgatgttatggattctccactccgtcacacctgacattaaaagcagtattatgtcttggacatggctgctgagatgtggaggatactcaattcgagatgtgatcaaggtaatggtcctcgcattttcaaactcaggaaagtgctaatcactctgcatcaaggctatgactctataagttcttattttaacaaacttaaatgcatgtgggatgagatctaagaacttcgtctatgaattccatgtgcttgtgttgcttccggttaaaatatggcattcttgaatcaagaacaggttcttcaatttctaacaagactaaatgaatctttctatcctgttacagctcaagtccttctacctgatccttttccatccctatccaaattattctctatggttattcatgaagaaagacaatgtaaactcaacaatcctcaactcccctctctcattgcttctgtccaagattctactcaaacatcagctcttgctccaaatccctcaacatcaactgctaatcccaatcaaggacgcaataagaggatgaggccttattatactaactatcacaaactcggtcatcttaaagaaaactgtttcttcctcattggattttcacctgggtatggagataaaaggaaaactgaaaactaggcatctgcatctactgatcctctctctcttttggaatatccgactaaaccaaaagatatccagaccattatttcacttctgcaccgaaagcttcatccaacaacttccaattcagatgcttctcaaccattcgcatcaaacatttttggtaatattaaacaaccttcaaactctgtatggatagtagacagtggtgctactcaccacatatgttgtgacatatcactcttctctcgattgcatgatactgctattgctacatctataaaattaccaaatgatttgagcattaggatacacaaatcaggagatcttatgtaataccctagaatttagaatggattagcaaaaccctaattagataattgtgaataattgaggaattatattattatatagttcagtatatgtgaattgatatgaattttaatatgttaagaccctgttggtgagccaggggcattttagtaattgtgacccgagaagggtaaaatgatg

SEQ ID NO: 388930 - DNA, 1013 bp, Cannabis indica
atgatgatgatgatgatgatgcggtggtggtggaggtgctcggttcgaggccaaacgaaaacaagaaagattccttttttatacactgagagaagccatggatagatatagattgggaatttggggggattgggttcttcttccttttgtgtgaagaggaagcttctgatgacacgtggcaggcgttggtggtcgtcagtcggtcacagcagataacgcctctcgtcgtctttcacggtcatctgattcgacggttcccaggtttttgtcattatcttatgtacaatatatgcagacgagggccgttattttagtttgttttttttatatttgtgtaattgcaaataagtccttatttttatgttttgttttcctttatacccctgcctcttcctttctgacgtggtggtgaggcgaaagctttatctctctctctaaattcttatcgactcagattagtgtttaagcttacttggcatgcatttatttataatttataaattgaatttattagtggcatagaatcgggttatgtgtgtaatttagtcaaaaggaattgttaatttcaaggggtattaatggctaaattagacctattggttcaaaactattataacttaattagtgagcatcattactcggcggtattagtaatgctcaatattttatatgagtgaagatacttaattatacggatgatagtaagatactatacttaattattttttttaccccctgtacttatgacactatactattatgccccttaatctattcagcttgttacaaatagtccttgtataattttatatgcatacatttagtccttctgtttattttgtttaaaaattccgtttgtattgatgatgtggtattataacaaaagatagagtagtaatttcatctctttttagagggaaaattgactatgaggtagcataataactgacaatgaaagatgattaaaaaatgatttcataaccttttaaaaaatttaataaaaataattttat

SEQ ID NO: 388931 - DNA, 1300 bp, Cannabis indica
gactagttcaaatgttcaaatccataagaagttcaaagatagttataaactcacgaaaatagcgggatgttatcataaaaaacaaacttcaactacctctaaaaatcaaggagacggttgagatagctctgcgttggtcgcgtcttctgaagcgagaagcaccgaccttttctcctttataaagggtcacccatggcctggaaaagggatccacgattttgagcacttagaaaaaaaacaaacactttttcattctttgcaatcaagagcttgttcttgacttttgcaaccttgattaataaaacacaaggggagtaggctattaccgacatctggggccgaacctctttaaattttggtgtctttctttacatttattgcaatttctggtgtcattaattatctttattgttacaattttggtttaaatctcatttattatgactccgcgtcggttgactaaaaatccaatcaacattttagtattttcattgagagctttaaccaaaatcttgaagttttttactgaaaaaaatggtgttgacccgaagatctcaagaacgacctgaggaggagatggataatgcccagcaagttccatcaacaagcaatcttgaacgacctctgcgttcggggaacagtgatacagccaccacccatacaccaccgctcaggctactgctggtcatgggacaactagccaaactactgccactgggcgtaccaccaacgccaccaccgcaggaggcgatgctactagcggcgccaccagaaggggtaatactggaaagtttgtcccacctactgctggcacgggtcaagctcaaactggtcgaggccctgacatctttaggccacaaaatgaaccccatgtggatatcaaaggaattgaccccaagatggatcagttacgagatgtgataggccgaatgtaaggccaattctaaactgtgcaccaagagcaaactcaagctagagtggcctttaactgaaagtcttgctaaccaaaggagagaattccaatcttggctggaagatcatgctcgagaaataaggaggcagcaagacgaccaagaccgtcgcacccaagaagttgtcgacttaatacgaagctactttaaccaaaacactcaacgttgggtactgacgcccacaaccaacaaattgttatttcactggctataattaatatttgattatttccttaagattaccagtaagttgtattgtggaaaattttaattgttatttctattatagaagtcagattcaattattgttttgaggatacatctcgtat

SEQ ID NO: 388932 - DNA, 843 bp, Cannabis indica
aagacacgatatttaattacaccaatatatagcagtataacacatcaaggaaaatactaggcaccaataatttcatttagtatttttgtgatgaatagtttgtaattatagctacatttagctaagaaaatagctcataaaattctttagctaaattagagaagagtttagctcatttattagagaattttttttttaagctttagctatttattttcttacctcctagctattacaaatcatttattgagaatactcaaataataatatgtagtaattataattaagtttatgatataatagtgcgtcatatataatatatagcatatttgtaaacatttatattatttgtaacactacaggaatccaagagcaacaatttatccaacagttgaaattccaaaattatataaacctgcaccaatggtggctaacttttcatcaagaggtcctggatattttacagaaaacattctaaaggtcacacactctctctctccctctctttctctctatatatctatatatctatatcctaataatgatgtgagtgtaatatattaaaacaaaacagccggatataatggctcccggagcggcaattttagctgctgctagggacacaacaaatttcaggttcgattctggaacctctatggcttgtccacatgtatctggggctgctgctttcatcaagtctgttcatcctacatggactccttctataatcaaatcagcacttatgacaacgggtatatatatatatatatctttatatattaaaagtgtctatctaacggcaattcttggtttaacagaatatacttaaaaataaaagaatat

SEQ ID NO: 388933 - DNA, 984 bp, Cannabis indica
  modified_base (939)..(939): a, c, t, g, unknown or other
taagtatattatatgaaagatctgaaagacctaatacaaattctagttaaaaatctaagttaatacaagttatctcataacaacaacaaatgaagatatggaaagaaattcaatcattacgaaagcacgccgaaagtaaacagttgagtccatgattatactccgcgatcttcgctagttcttcttgtgctacttcaaccttttgattactcgttaatttggggctaaataaaacatcaaggaaaaataaaagtacaaaaatgcatataccataaagaaaaaatttagaacataaatgaaatattgaagaaattattacctcattataactttatcagctggtcatgcaattgtattggcaatagcttcttcgatacaagtaatggctggagtaggcctccacaaaaatgcaccaggttgtcttaccacatctattcctactttcatagcattaggtccgagaggaatttgatggacgagatcctttggatcgcttgagacgaagtgcccatctgcaatagtttcaccagatccacaccaatccaaaatcttgcatctatcgccatgcgtgttaacctttttgctcttcaataacatttcaacacaaaatttaagtatgaacagatttagcaataaaatatagtttcaaatataaatgagatgttaccgtatcagcaggaacatgattatttgattgctccacagtctggtaagaatgattctattaatatcatcaattaatcgttagaaacattgaaagcaatctagtctttaagaatatcacttacttgatttttcattaaagaatgaattagttgatccatatgtgacattcgttcttttaactctttgtatcgatcttctaactgaatcatatgctccatatgtatcaattttttcaattagtcatacgacctatctttcatcaattccaaattnttaactttgttttgcgctaactcttcttccattaacgctctcaca

SEQ ID NO: 388934 - DNA, 2268 bp, Cannabis indica
ttttctgctgaaaattaatgattctggcacaacattatacatgcaagctttatatcctagacactaagaacaggggtgtctgtgagcctcttgaccatttaaagttgatggaatgagagtagcatattatttaaaatgtttgcaagagatgagccacaatcgcatagctgacacagaaatctatgaatatcaatcaagcatattataatggcgattgcagaggatgactttttagcatcagtataaatgcaaagtgcaacatgagtcaaccattttaacgtcaaagatatcacaaatttcatatgaagaactggtaaagaactaaacaaaaacagaaaataaaacaacaaccaaaatattatttgagtcaatttaggttgttatgaaaaagaataaagaaaaacgggaaaaccttcaattttgtccaagctattgtcctcaactgaagcggtttcagactgctcatcgcacgccttgcaatgttcttcatacactatatgtggatacttctcattattaacatcttcccactgatgacaaaaagatatttgttctgtcaattgcagccacattacttaaaccacatccaaaattatggagagtatattaccttcggcaaatcaacattacgccttattgatgaagttctccagcccacaatatctttgaagtcatttattatggacaacaaatttattttttttaaaaaaaaaacactttagaaaaagaatacttcaataagaactaaattaatatgtaaaaaaggatacggtcatagcccgcatttgaatatgccacccgacgtttaaatacacgcagcgccaacctgcagaaatgacttgaatgtcattccatattttacaaattctgatctgtagcagatcttttctttttttatataaaaacatattcaagataaaacaggggaaacaatagaggttacatacataaatttacaatcatcgtgatcttctatcatgcgtttaagcaaaggggcctttccttcatcattatcagtaaggaaaaggtgtcgccctgttcgcctaaatattaaatgaataacacaacttgctgttttttcaagggcagttaaaccaaatagaaatggcacctgtaagaaaaagcttagttccatattcgaagtaccaaattataaacacagagatgttgtgtaccaaattataagcactgaaaagagagaaagataaagcaaaggatgtataagatgagatgttgctacctggttattacccctagaaccaagatgtggtgtagcagaagtaataaagttcatggcctccaacccaccaatagtaccaaccaaatctttgtcacatatattagtggaggggtcctcttccaaatttcttatttccgggggtctatatagtttcccgattgcatatcttgccacaagtcctcccactgaatgtgcaacaaatgaaatttttttaaagtttggattcctttgaatcacttcaaggacctagagttcaaatattcagttagcaagtataacattcaagctaatgcatcttctataaaagtaaacagaaatagttaagttgacaagatcaagaatacaataacctcttctgccaagcgtgcacccatcacatccacaccatctaaagtcagggtggagacattttttacactacctgcaattatttttcattaataacttgagcacactgtgcaataactcttttaggcttaaaaacaaaaatcaaattgaatgtgattgcttaaaatttgcactaaggccaaaaacaaacttctcaaattttggccagtcaatcccttatgcagtgattgagtagcataatttggtcaaattaaggtaaccatagaaaaatcccgatcaagacaaaacagaagtaatccatgacagagagtaaggaaacaagcagttagagtatagagatatgatcagatatgcccttctgaaggactgtgttatgaaacaataagcaagaaccagaagaagacactgacataaagaataagcccaaaacatatatacagacaaatagctaagaatgcgatataagaatcaggctttacaattaggtaagaatgtaatataagaatcaggatttaggatgatataattgttacaactagaccaagtatcttaatagtcaagactaataatccaatccaactgaaagctccttacaatgaacaaacactttgtcggggagcattttaacaaattgctctgctgcaaatttccaatccttggcactgcaaaatcaatcatta

SEQ ID NO: 388935 - DNA, 2280 bp, Cannabis indica
cactttttcatgtcaaacctgattactcaatgctaagagtctttggatgcttgtgttatcctaatcttagaccttataatagagttaaactcaattataggtctactccttgtgtttttcttgggtatagcttgtcccataaagggtataagtgtctatcaaaagagggtaggttatatgtatctcgtgatgttttattttgatgagcacatattcccattttcctatgctgcatattcatctaaaaacactcctcatcctacaccattacctactgctgtacctcttgttacccaaaataatatacaaactcctcctacagtaccagctacatcgtcccctactcctacttcccatgttcattcacctcataccaactttaccatttcacctactgtaccaactgttgtaccttctgcacaacaagacaagctaccaactgtaccaactgtccttgtatccccttctcagcacggttctatgcagcctaaccctgttgtgtcatgtcagcaacctacacatacaacacaacctattgctacagctgacaccaccacattacctgctgctaatgtacccggttctcactctactccaacggtccaaaatgaccatgctatgtgtactagaggtaagtctggcattagaaaaccaagagttctaatggcctctctttatcctaagacagttcgtgcagctatgcagaatgaaaaatggcttaaagccatggatgtggaacggattgcattactcaaaaataaacttggattcttgtcaatctacctgaaggaagagaacctataggctgcaaatgggtctacagaataaaagaagatgaagaaggcaatgtcattcaatacaaagcaagatatgtggcaaaaggttatcatcaacaagaagggtatgatttcaatgaaacctttagtccagttattaaacctgtcactattagaattgtgttaactattgctcttacaaaaggatggattgtaaggcaattagatgttaataatgcatttctaaatggtgatttgcatgaagaaatctatatgatgcagccacctgggtttattgatcctactgctcctaacaaagtttgcaaacttcaaaaggctatttatggccttaagcaagccccaagagcctggtttgacaaattatcttctgttttacttgctcttggctttgcttctgcaaaaactgatcattctttgtttgtcaaaatagattcatcttgctgtttgtatgttctggtctatgtggatgatattttgatcacaggttcaagttcaacccaagtttcctctttgatcactaagctgcatcagtcctttgcacttaaagatcttggcactttaaattactttcttggcataaaagctttgtcaacagatacaggcatgattttgtctcaaaagaaatacatgcaagatttgttgtgtaaagctgaaatgcaaggtgctaaaacacatagtactcctatgaatagtggactcaaactctctaactatggcagtgatcttgtgcttgatcctactcattataggtccattgtgggagcactacaatatgcaacaatcactagacctgacattgcttttagtgataacaaagtatgccagtttatgcataatcctcttcaatctcattgggtggctgttaagaggattctaaggtacttggcaggtactcttgactatggccttcaccttcaaaaagtctcaaattttcaccttgaagcctactgtgatgcagactgggcagctgatcctgatgatagaagatcaacaacaggtttttgtgtcttccttggtgaaaatattatctcttggcagtcaaagaagcaacccaccatctcaagatcatccacagaagcagagtttagaagccttgctgctgtggtatccgaaatcacttggatacagtctctattgtctgaacttcatgttcctactgtatcttctcctatgatctggtgtgacaacatcagttctgttatgctggctgccaatccgattcttcatgccataacaaaacatatagaaattgatctatattttgttcgtgacaaagttctcagcaaggccatccaagttcaacatgtcccagctgaacattagcttgctgattgtctcacaaagcccatctcaagcagtcgctttccactcttaagaagcaaactcagtgtctcttgctcagaggacacttcatttgaggggggctgtaaagagaagaagagttagttagtggttcttattagaatattttatttatggaaat

SEQ ID NO: 388936 - DNA, 1050 bp, Cannabis indica
ctccttgctcaagcaagtgttccccaaaattattggtgggatgcctttcaaacgtcagtatatcttattaatagattgcccacttctgttcttggaaacaaaacgccttatgagcttgtattttccaaacaacccgactatagatttctcaaagtctttggttcagcatgctttccttgtcttcgcccttatcaatcacacaagtttcaatttcattccacaaagtgtgtcaatcttggttatagtgatagtcatagaggatataaatgtttaagtagcattggcaggctttacatctctcagcatgtagtgtttaatgaacatgagtttccttttcgtcatggttttttgaacactcatcacgttgaaactcttgtgtctgtcactgtcccttattggtctgcatctgttctaaactcaccttcacaaacattcacaccaggtccttcagctgatgatgttcacgggggaaacaattctcagcaccagtcaccacctgcatcacctctgtcctcaacttctgctagcacaagtcaggtacgtggtagtggttattttgatcattttgagatgactaacccccctgaaagtatgactgagtttccagctccaaacattgctcctgccaaccctgattcaagagcagctgaaatcgaaatgcctactgctgaaccagatatttcagctgaggcaggaggtgctaaaaatatacaaccaacacatcccatgatcactcgagccaaagccagagttttcaaaccaaagacttatctaaggagtgcaaaatgggagaaaattagatcagaaccatgttcacttgaagaggcattgagacacagtggatggaatgctgctatgaaagaagaaatttgtgttctaattcgaaataaaacctggaagatggttcgaaggaccgccgatatgaacgtcattgaaaataaatgggtttacagagaaaagagaaatgttcatgggtcattccaaagatacaaggctcgattagtggcgaaggggtataatcaaagacctggttgttggaaattattttac

SEQ ID NO: 388937 - DNA, 781 bp, Cannabis indica
atcctgtagctatgttgctacctattattctgtgctgggcatgagctggtgctgtgcttctaagtttttgttctccatggctacttcaaaaggaaaagaggtgatggaaacggcggaatgcatttccaaagaggaactaaccctttcgttggaactgggcgacgatggcaaagtgggtaaagactatattgatcgagctcttgttgacagagttttctctaggagagggatcttcaaaggtctgctacgaaatgttttatctcaaaaatggaggtttgccaaggcatggagcttgacgtaggtggagactaacgtctacatgctgaaattccaaaagaagagtgaagcggaaatggtgttggtaaaaagcccgtgggcggtctgtggcggacatcttgctctgcaacccctggctgaggacggcagatggcagtcaacaaacttagactcagttcccatctgggtccgggtatatgacgttccccccagattcttcactaaaagaaatgcgacggccattgctaacaaaattggtgagataatcagtattgaccgtatgtggcgcaatggttttcttgcggcggaatatctaagactcagggtggtgttgaatatgaaaaaacctattctggtaggccttcacatttcgatggaagaaggggtatgtctatggtgttacttcaaatacgaaaatctatcccgaatttgctttaaatgtggtctggtggggctgttgtcctcaaaagtgagtgttttaatatttatactcgcaagtgcacga

SEQ ID NO: 388938 - DNA, 1463 bp, Cannabis indica
ttagtgataggttctataggaaccggaagatccaatcagtttttcatagtgtttgtgtgcaattttagctaattttagaccatgtttttgtgttacagcaaacaaatcgagctctgagttgcataaaggaggaaaaggagtgcatgttgctctggtaatactgatcactgctgttgtttccactgtattggtttttggattgctagctgtgtacaagtattggcaaaagaaaaagagacagcaagatcaagctcggttcttgaagctgtttgaagatggggatgacattgaggatgaacttggtttgggaatgtaatatgattggtaagaatagcttcgtttaaactgtgtacagtacagtaagttgatcttacagaaattttgctactgtgaagaggaaaaagggaaagaaaaaaaagctaatgttattattgatagggagcaattaactttttacggaagtagtttgacagatggcgttgcaatgacatagcatgttatgcaatgtacaacaaactacaagtagttaaagtgcatgtggtgcttcaacatgttatgagaaacccagaacaaatagtagagaagaaaaaaaaagtattggtatttgctagaaattatgttgagtgcgttatgttaccttcgaaactgggtcgagtatctgaaaatagagaaagaaagtggtattgtatggtatgtatgtaaaatatagtataggtcgtaacttcgatttctgatttgtacaaacattttaatacaattgaaaaggagatgtaaagcttagttataattttaattacatagccgcataaatacgtatatcacaaaatagggcaaacataagaaaattctatgaagtgagcatataggagcagatcaaaaggcctaaaattctctattgggcatatcagttactcacacaagtgatatgtgttccactgtaaaagcatcaatgagctattgaaaggcacataaaattaaccattatttacttacattaacatgcactatgtgtatgatacttacattctaaagatattacttttgggtgtgattggtaattttttttagggaaatttataaaaatactggaatttgggttaatttttacaaaaatactgttacacggaaaagttttcaaaaataccgtgtttttataaaacaccagtagaacacaaaatagattaactcaaaacaacagtataacaactgaaaaagaccagtgaaaaactaacacagtatattgcagtatgaaacttataaaaacacagtaaaaaagtaaaaaatactgcatggcagtatttttgtaaaaaaatagcaaaagtgagtataccatgtaaatttcattttttttttaagagaaatgcaagtaaaaatggccctatttctaactttattgatagttcatgtcgtttttttaaaataataaagcaaatgtctttatatactttttaatacctaaaata

SEQ ID NO: 388939 - DNA, 1229 bp, Cannabis indica
aaataatctttaaataaaaaaactacaccatcaatcacaaactcagtttcttaaacttataaacttataatttggtattttaaaattaccaaattatgtttctaataacttgaaaaaatgttactttgtttaaaaatacacatcaaaatgttatattttcgattatatcacaattagtaaaaaaatcaaatttaaaaaaaaaattacaaaagtttggcaacacatgcgcgacttagttctctagttttataataagataaagaaaaattaactgtgattgcaatttctattggtgaatgtccaaggcctgtgtagcaagcagttttcttaaaatgattttttcttctctcgttttcaaaagcgtctgtcttccaagatacaactgaaaaagtaacaagacacaccaccttttactttgacaaactaatcttctctcaaaagcgtctgtcttccaagatacaactaaaaaagtaataaggcacaccactttttactttggcaaactaaatatgtttgaattatatgacactgtgataacctaattactctgaagagtattttaagaaatttataacattaacaacttatcttcaaaataatacttaattgattaatgatataaacttgttcatgagtaagttttggtgtaaattacactcaaagtcttaaactatatctataacataagaagtttatcatttttaatttaaatgatgcgggattgaaatccacttcaattttatccaaaaataatgttaataaagtcaactttttccaacagagtatatattatatttttatataatatgatgttaaatttaaattatattaaaatattatatatttaggtgtttataaaagtcaataccgcatataatttgataaggtgtatagggttctttcttaaaattaattggtcaatgagatgagtagctcatgcatcttatgtaggtttttaaattttgatcgaatactcattagagtttattttagatttgatatcatattagaatttgataaggtgcaaggagtctatctcaaaaccaattgacaataaaagaagtaattcatacattttatgtgtggtatttagtttcaacctaatatcaatgcaaaccctcaaacataacttgctgccactctttaacaccttgattgtattttaaaatttggattaacgcaagctcttggattaaattaagaaaaaaaaactttctgcatagattttt

SEQ ID NO: 388940 - DNA, 1333 bp, Cannabis indica
tgctctgaagcatagatttctttcttcttctattgaggttagttgacagttttagactttttatgttgcttggttgaaggagtcctctttgcattttcaacaactattccttttcctttgtctttgtgaatgcctgaaattctaagatcttttagatctactctcttaggagcatcagtcgttggagaagcttgaacatgaggagtccctttggtcagtgcggtcgtcatggcctctattctggtcatctatgtgagaaataactcattaaattgatcctaatgagttaatttgctttcaactagttgaagttgtttagccataatgaacacgaagtctggatcatcaagttgattctcttctccaacattatcatcagtggctttgttctaaagatcatcttcttgtatgtgcttaggagtatcctgagaattgtctttaacgttgtcaaaaatactctctccagattttgcatcctcatttatagcttcgtctcaattataatcttcatcatggtgacctttttggggactggttgcctcgtgtgggtcattggtgttccctgcttggtgttaggactagtaaaatgaagaccaaactttgttcgggtgagtacaagaattaattaaacgcaatcttcagatggtatcactactttcttcaactctcaatgaaagtaccaaaatgtttaccaagattttcgaaaaactaattgtaaataatcagaactgaagaaataaataattaaaagataaaaaacaggaaacacaaacaactttttacgcagttggggcattaactagccttagtccacgagtcgatgttattatgtaactctttagcatgaaaagcctttaggggaatacaatgaatgtaagttctcaagttttcttgagcaagtattacaagagaattcaacccttaatccataggattgattgggtatttatagtattttaagaattacacttagtttctcttttttctctattggggagtgtacaatgaattacatatttgggttgtctcgtgaagtccagcccatgaaggagaagatatgctgactcaatagatgggattcggttggatatagtcaaaattgtttaccatgattgtggaaaattaattatgaattaattgtctgatatctgttttaggaagttttcccttttagcttgatccgatcccctatcgagatctagcaaacgaatatttccttatttgtgcttaagaataaaaaaggaaatcagactagtcttccaggaatacatttgtaaagaccgcttagctttaatttacaaattagcagataaataggacttaattatgaaaa

SEQ ID NO: 388941 - DNA, 2088 bp, Cannabis indica
tgaagaacaacaatcattcaagcaaaatacttgtggttcttcaagtggatctttcagaatcatatgtgaggacattgaacttgtttcccccttgactaaatttccaaatgcattcagcaaactcaaattatgctttgggctatattcattttctcttctaagacgagataattcacgcctaccaaataaaggactagcaggtgaattaggattgtgactcgttgaacttgtatctacttgttgctggaatagtaacccaaaaggaagagcccatattgatgtgacggagcgtgaaagagggatggatgttacttcacctatcaaaagcaggctataatttcaaaaaatacatcacatagcaagaaaaaacggaagaaagagcaaaaaacgaaaaatggcttgcaacatagtatctcatggctaatataataaatttggatgaattaacttttcaaaacagttccatttacatctatacactatatgacgttttttcactacaatctgcttttattaagtttaaatacaagttgtaacaaaacagctcatggtttgtaggtaagatttaaattagcataagcctaaaagtatacactataacaatggaatctatgtcttgcccctgctctatacaatgtgctgctctggtcagctcacctgatgtgttgtacatcgtcaaagaagcaatttgtaaaacacaaagaagggcttcagccatatcacccaaacgacaccagcgagccttaaatttgcataggaagtttagcagaaaattaatatataaaaataataataaaaaagaaaaggaaaagtgagtcacttcttacatatgtgagttgagtatagatttaaatttccctaactttaacattacacgaaaacagatacagagaagtaaatcaacttctgaaagaggccaaagaatatctctaaaccatacaatcgctaaaaagaacggtaagaaaaatatagcaaattgctaggtgatagaacacaatccatcacgataactcatttgaacaaaagatgagcttccacggtaaagctacactacccctcatgtctcatgatcatacactaaccacaaagaaatattatattgaatatataaatgtagcaattcctagagggaacagaaaactggagagtgaatacagcaagaaacgaacaatacgagtaattcaatgaatcacgaaccttgtcatgtaatgtaagcaaaagtctcgatcatctacggtagcaaaactacaatatttttgttactgtatcatgtcatattcgaatacataccataatgactggggacgacaacgtgaacctcttaaacactcgtgcacctgttgaccatattatcctgttacaaagcaaaatttacattaggcacgaattaacaactgttattttgtcaagttgaagcaacggaaaatagaatttgattctccttaagttttaaattttcttctttctattttcttacggctttttcaagcagccaaaacaagattaccgatttcctctaatgaaaagctcgtgatcgcatcgatcacgtgagggggggcagccgaggcatcgaaatcgtcggcttcatctctttgccgggtgagttcagaatcgaagaggaagtaatcgtagtggtcggtaaaattatcagcgggttttccgtcgagagcttcggcgatcaagccgaagggcttgaactcgcccagcactttgagttcacgaacccctatcgacatttctgtgagtggactggagtagactggcgcaggactcccctcccgctcttttcttttcttttcttttcaattctttttttaatttttgtaataagacgttaccgccatttgaaaccctagaatgttgcctgtttggctctgtggatagtttagttctgccccgaaaaggaatgtcgtttgtacccttttttttttttttggtaataatgtcgtttgacccttcatcgaatagaaggaattttcgtaaaccgcccaacccgaataactcgactaaaccaaaccggcaaaaaccgaaaaaaaatacaaaccgacataacttagacaaaattctaaaccgcccaatctgtaaatt

SEQ ID NO: 388942 - DNA, 1115 bp, Cannabis indica
ctctctctctctctctcattttccaagcattcgtggtttctcaaccaccctcacaaatccaatccattctaaggatggtctcacctcctttcaccattgatacattgaagcaccatggcttttttttaaaaaaaaaaagagaaatggtaacttcatatattaataataactcctgctaaatttatttttagctgattctcttactaaatttattttacaaaatacttctagtattgtggtatagttacttcaaataaaaaagtctctgcaaatttcatttctagaaagttgttcactcgcagttgtcagttctggaaggagttctatggaatgatagtcgagtctgaaagggagtttcggatgactatcatgtccactccgggtccagttctcaggataggtaacctaactctgggatagagttctagttggctagtcctcctcccttgaatagcagttctggatagtcgactccagtagacttacacataatatatatgtgatgttaaaagcactattgatgtaattaagtattggatcttatataattaaatgtaataacttttatgaagtattgctatgagaaatgctaaaagtcactactagcacctttttaggtgtcatatcgttattggtcccatataattaagcattgctattgggcatcgagtttgacaaagaagaagaatatagagatttctattcgggtatagtttgattttgtttctgatgtgtgggttaagatctgggtttgggttcattggaaatgagagtgattttccataccaatctgacatacctcgtgaattaaattctattgaatcaatgattgaaatatgaatttgttggatatactgatacaagtttgatttcaaaaaaaattaatttatggcatctacattgttaggatttttttttcattttatgcaatttaagaattttttaacggttggaggtcggggtgtggctagatgaagaagacggtgaccgtgagtagtggctctctagagagctcatggattgggatgtgactgggatgagggtcgaggtgggtgattcggtgaagaaaacgaagaagaaaaataataataataataataataattgttgctcct

SEQ ID NO: 388943 - DNA, 1066 bp, Cannabis indica
cgtgagaaagtttggccaaagaacgcagctagttctcttttacgagtttcaagagagccagtagtaccaaagccggaaaaatatctagcagcatttatgaaggcgtcgtaagtgtagaagccattactttcgcatccagaaatatttcgaaacctaagcatcttgcaaaaagcgaggaagtaatgatgtcactaacatcatcgggagatggggttggacattggctttggcagtggccatcgccacaatagggctctgtcgtaccacagaatccatccttactacaacaatagtcggtatcacagacataatagttatgttgttttccacaaactccatctggaggattggacctaattcctactaccaacaatgctataatggtagtgaacaaccacaagtaataagagtatttcatttttcttttccttttctttatatcaatttgaatgaggttgcgactgtatttataacaatctgtggcttatgaaattctgcctactaagtttactagtactcctatctacactaaaatttaatcacttatcacgtttttcttaaaccaaataataaataaataaattttcaatcacattacctaaaattctatgaattattctctgtgatttattaaagttacttcacacgtctcaatcaaattaattatatatagaatataaataacatgtaccactcaattttaaaatataatgggccaaaatgtaaatatttatatgatggaaaaagaaattggccggctacctatttaataattactcaaatttgtataacttgatttttatcatagtttagtgagttcatatgtattgattattgattctagatattgatgtgatattttgtaattaattaataattttttttatattatttattaaattaaaatttatgaaataatattaaaatgcatcaataagatattacacctcttacagcaccttgaatggtaaaaattttaagtaggatgtttggtgaggttactgaccgacccaactgaaggaccagtgtgggcgttaagcccatgctgaaaaaaaaatatttcttt

SEQ ID NO: 388944 - DNA, 1965 bp, Cannabis indica
tttttttatatatattttaaacatgaagacgttatttatacttatttaaatattcagttatatgtgaaacgtgggcagtaaccacccattaattgtaactttttactaagataagattgagtaaccaccatcctattcctataaataggagttcactcaaagggaaatacggagaggcaattctgatttacaaaaattttgccaaattgtaaacacaatcaaaactcaaaataatatggactcatggagcatgtaaattttaactacaaaactacgtaaaaatatctggtgttcatttattatttttatctcttcttttcttgaatttattcttgaattaataatcttcttagattaagttgacaaaaaatcgtgtcaacaacgtggagttcaaataaaagcttaaggcccatcattgggaccaaataacataaactggattgagcccagaatccattatgccttacgggggaacaacaatgtaactcgcccaggcgagggttcgccaagcaaagtcagcatctggaagtccagtctccgtgtatctagaagagatcctttgcgtgtattgggaagattattatagtttcttgtatttttctaaatcacacaagattggaaattactttctcaaaatcccggacagagactaatatcttgctaaaaatggaaattgaataattggaaatcaagtaattaatatgtcatcaattacccatgaatatgagacacaatatggacaactatcgtcatgataagtcctccacgtcaacatacacaagatcatggcccgggcttcaccagataagcccaaagtcaatgtattatttgtaaactccctattagaggaaaaagggaaacaagtatgacatctataatcctaaaaatactcaccgaatctttcatacaaagggttggaaattcttgacttacttactcaagtaaagaatagagtgctcataccttattgtaattcgttaggctattctatcctacttaataataatactgacttgtggactgaagctcgttaatactccaacaatgtaaaaactttgggtgtgttcttcatatatttcttcttaatttatattttccttagctcttatatttaatatttagttttttttaaaaaactcaataaatattttggtgttttcattgagagctgaagagagcagtgccatcaaatattacgtttagtaattatggtactcacctgaacaaaatttggtcttcactaccacgaaacctcaaaggatgatgttaatgctaatgccaaaacaagatttgatgaagattccaccaaggcgaccagttgccaaagagagaaagatcaacatgatgagacaaaccttcatgatgatctcgtcgatgaaggagaagaagaagacgagtttgaggattagatcatatggatccagaagataatgacgtcaatgagggagatgaacgtcatgagccaaattttgaggtcattgaaatggccaaaaaaactagaagcagctgaacaaaaattggcagcataagaagagttttctcgattaatgctcgagaaatttatgatgttggaagtaatatttggaggaggaaaccagaatcctgataaaaatatacctgatgatactaatcctcaggataacaatgccaggaaaatgaatgctaaagatctcaacacctgtaaccctcctaaggataatgggaaaggaaacataagagaaaactccaaaaaaaagttgcttccagtgatcatgggatgtaaaaatgcattggtaggggagcgttccgcctagagggaagcacctgcgcgagcagtggtagacgaagcggaagtaaactttcgttattgggttagccatatcaccttgggaaggtcaagtggggaagattttgagactatgtaggtatgggactacacagttgaagaggcttaaatgaattgattggtactacctatatcagcaa

SEQ ID NO: 388945 - DNA, 872 bp, Cannabis indica
atttgggataacaccacctaaccctaatttaaaatatccaaaatgccctttcttccaactcaagtaacttataggcttaggggtaaaatagtctaaaattataacctcgcctaaacttgatattccaagtatctcatacattttctccctataagaattaggttctcaacatacccatgtgactctaatagccatctatcgcattttctatcgtcaccgaccgaaaatcataaaaattgcatattatatatttaacataaataatacccttaaagtttaataaatctccaaaattgagaaattataactctaatgctcatctctaaaaatagtgcccacaataaatataaaattatatataaatataaaatgtcaataattgatgctaattgtctttactaattcataatctaattatgcggtcattacaagattcaagtattaaatgtttaaatgttatttaattttattagacaattctaattaaatatttatgtttccaataatgattccttaatgaatcattaatcatacatgattagaatagaattctatatccatgtatatatttgaatagtaattcatacctctcaattaaatctcatttaatttttaggtttagtgctatagaatcaaaaacatatttttaatttattataaacttaattgtagaaacattgataagtcactataaaaaataattacttatgtattatttagtcaaaataaataattgaaacatttaaacttgattttagaattatactatgagcattggagtctttaattaactttgcacacataagtttgcaattcaataaactttattaaaaaaaaatataaactattcaaaataaaattattaaaataaa

SEQ ID NO: 388946 - DNA, 547 bp, Cannabis indica
ttttttttttctctctttatttggtcagcattcgtggaccattagccagctcctctgctttggtcggttattttcgtatcttccatttccgtttcacacactttcatctttatctattctcttctcaaacttttgctaaatgttcaattttacatattaaagacaaatttggtcacaccttaatggataaagaagttagacaatttacttaaataaaatcaaaattatgaatgcttcaattgcaatgtctgttgcttgtggagtttgaactcaaattaacatgccatttgggtgtgtgttggatgtattgaaataggccacccgcattttacatctttattttttgttcatactatattatttataatacatctaattgatattaagttttttattcatattttaaatcgaatcccacctacacaatagggtgaaatttaatctaatttgcaataatgtatattgaatcgatattttttattgatttatttttaatattaaattatttaatatatatcaaaataattttttttcacataactaacaa

SEQ ID NO: 388947 - DNA, 904 bp, Cannabis indica
cacgaaaaccaagaccaccatagtgtttatgttgagaaagcttcttccaactagcccaactcacgcctctgctagatgaattagattgagatttccaccaaaacttcgccatcatcccttcaaggcttgtgcaaacttcttgagttaggagaaaaacactcattgcataacttaacatattttaataacaatcgagttactaaaaagcattttcttttttaattttcacttttaaatgttactctatagtattttaaataagttatttttattgagttattaaatagatttataaaaataaaatcttaagaagtaaaacgttattttaaacattataataacattataattaataagatgagttacataagacaatactaattttattaatgaatttttcatatttgctatttaattcattatattcttaattagattagaatataatgtaaaaattgcttaaaagagtaatatattagaatttaaaattaaaacaattattttaagagcaactaatggaaataagaaattagaaagtagtttatgaatttttgttaaatttaaagtttggttacttatttcttaataaattaaaatgttactttttatttaagttatctagaaaaattttggaaaaaaatctaccaaaatacctctttaaagaatgtattgtagtctctctcttttgagtgtgtttacgtatgcaaaagtgaaactgtgagtgtccttttcgtcccagattttttggtttgtttgtgattggtgagtttgatactgacaggttctaaggttgttgtggctttaggttgtttgtattccttttggctgtgcgtgttatggcttctagtagttatgtaatgggtgatcttgctgaacaatatgagaacttccagattgatgatga

SEQ ID NO: 388948 - DNA, 762 bp, Cannabis indica
attatattattataatctatactataatagatttgactgtagcaatatcttgccctatttcatttgcactaatttatatatatatatatatatttatatacacttgagatatatgagaattagttagaagataagtgtatttctttttactacttttatattttaatatatagtattttgttctttaattaataaggcacataaaaagataccctacaaaagaaaatataattttattgcccttgattatacttaatggagacttctattgtaaattttgtaaataatattgaaatgattagtaactataataaaccatgaagatagagttagaataaaaatattattatagaattgttatttacattcttattatatatctatatataatttctatatataataaatataaaccatgaaatgattatgttgtttttattaataatatctatatataatattatatgtacattcttattatatatttcaatattttttttaatattttcatatttaataaatatgtaatgtttactataataaaattaaaaaataaaataagtaacgtatatattattatgatagcattatcttactattatctctataaatatttcagttaccttaatgacattatttgagcaatattaaggaaccatatattttaccataatgtgtgtttaaatatacacttataaatctctatatattataggtgtgcataaatggatccaatattatgagaatcgaccgatccaatta

SEQ ID NO: 388949 - DNA, 1661 bp, Cannabis indica
atgagggttgatatctgtatccgatcctactagagcttatttaggagcctctcaaaatgagcttcctcgttaatcccttcaggattcaggtgcaacacttttatcccactctatgagaagcagaggatgtcgtaagtaagcttttgggtgtctttttccctagatggctctaagcttggggagacccttcaacttctgtgtttcatttaaagactctaactcacggaggaccaatttagccttttccattaaaattccacgtgtcatgtcttgcataaaatacggataacagcttcattacgtcttcaacctaccttcttggaagaggaatcgcttgaagtctattatatgtccagtttaattttcacctttattcttggaagtgaagccatcacttgagccctagtacaactttaaccctctttcttggaaggaggaatttcttgaagactactaaagggttcgaaatggtcctaacaaaaagcacacccaatatggcttcaacatgatccctcaaaaggaacatcgcttgaatgccattgcagtcgcttcgacttgttggccatattgacaagtttcccatgagaagtaagaaaaaaagcacgcctggaaattctttacagtccagcagctctactattacaactcacaaaaaatctgtctgaatgttgaatcagcattgctacttttgattaagaagtgacgtttaaaatagtaacacaactccagcctcgtcctcttgaaaagaacctggctaggactctgttgctcttttgatcccccctctctcactaattcaaataacataagggtgttgtgatatcttgcctaaggtagttaattggggaaaatgtggacgaaaggcaaactcttctactcttgtaacgatctgagagcatagtttgcaattcttttgggtaaggttaattcaccaaaagcttgaggaatgccatgacgagaactttaacaaaagtttacacctacaagatgtatgaagtaacatacttcaaaaggtttaacaagacaatgattaagttagaaagatcataaagcatcatgtttagactgttagaaccaaaacctttgcaaagtcttaaatatcgatctatcagttggaatatcaagcaaacaaaggcgagaaaaagaagcatgtaataaaccttgaaataaagcaagcataggtacaacaaatgtctctaagattgttacaaacggccccacagttagggcatcactaaattattttcacaaaaccaaagttgaaacataatgaagaaagggaggaattatgagatgaagctcatttcccaatttggaaaatgtgctgctcctggaattagcttagaaggacttccttggtcgaaatactaggtagctcttaggttgggactaagggttccttttgagtcagagtcgaagggtctgttgggttatcttggggaagaccctaaagatcttgggaggtagtttcgaaagaagccactgcctccgctgagtgtcttgcctctatacggccagttgagtctttgtctgactcgccgttgttatcttcataaatgtactttttgagatatttgtcgacagtaagaaccctttgcaggcactcttcatggtctccctcaaaactgtctgaggatggaaggatccttcttccacaagcc

SEQ ID NO: 388950 - DNA, 2002 bp, Cannabis indica
tttcatttttctactatgagtttatataaattgattcaaataattgtgctgatttttgttctatgtaattttcttcagcttcagctccttctccccagacccagcctcccccaggtgaatttacttgtctcttctcaattctcattgataaaataaaaattattacttttgactaaagaataatataaacccttaaaaattatggtttattaaaatttttgtgatatcgtactttgaatataatagtcaatatcttagtctttacttcacattatatattgacaaatgagaaatggtaaaggaggtagtggctagcacctttttacgtgtcaatatcactattagtctaattaagtatagagttccatataatttaatataatagcttttagggagtattgctagccaatcgcaacgcgacatgtcgagaaggtgctaggcaccgctggtaccttatagcaatgctattgacaaaaatatctttggacacaagtgaacattgattttgagctgttttgttgcctttacttgtttctttaaaactcttagagcaggttagctgttataattgacctaacccaactcccacccaccatagcatttattttttgtgtcctttatttaattacttattttaatgtatgctcgtataactttctaggacttaatcaatggtcagcttatttgatcaatacttagattaacattatggaataattatgtttaaattattgtcaattttactattctgttgtgtatgttggggggcaatatatgttttaagcttgtttttttattcattaccctgcaaaacgaacaaacacctaagcagttggtgccacaaattttcaaatatataatatagatgttatcttgttgtgcttccctttgaataaataaaaatcaaatgtgtgagagaggaattttcaaaagataagcatttggaaaaaatctcacttggaaaagtcgtgttttgtgaacttgttcccacttgaaggtcgtttcgtttttatttgacccaaaaccatttacccttgtaccaattcacacaaactcaaatgctgtttggtcttttcatgtgtaaacagtgacttatagccatgtggtttgctttgctcacactttttggtccttgaatgttgtattgttatgtggctaatatagttttagaaaacaatgtatataaaaacttgtatataatcacttgctgttccatttcaaaacagtcaaacaaaggattagtcttcattgtttttcaaaagattagtcttcaaatctcacattggctcatgaaattgaacatttgtttttgaatcaatctttacaggagttccaggaggtgatggcaatggagcagagagagcagtatggacaggaatgtcttctctgttgctattgtttgtgtcagtgttactttattagagaatgagaattcaaatctatacataggattacttatatttgatcagacttacgatgagagagtgaataaaccggtgatcattattgcattattactattcatatcttcagtttggagatttctgttatttattagtttggtatttattgatgtgagtagcattgttgttgtcctttgcttttttattttatctatacataaattgaatggttcttctgatttatttgttacaaattgtgtggtcatttcttaggttttgtattttgggatggaaatcggtacatatatgctatcaatcataagataacagtaacacaaacccaattatttttctaagaatttttaggatttataaaacacttaataatatatatttttttaaagtaaaagctaaattatgtttctatagaacttttggtaaatgaattaagaaaaatatatgaatacaaaagctgaggtactagaagttattgatggagattataccaaagattttgatcttccaataagaatttttagaatttataaaaacacttaataatttttctacaaaaaaaaaaaaaaaaaaaaactaaatta

SEQ ID NO: 388951 - DNA, 1076 bp, Cannabis indica
ggagaagaggagggaatggtttgtctttgtccatccttcttaattaattcgtcctaattaatttcttactaaatatagcctaagagtttctcataataaaacttgattaaactatttaagtatagcttatttaattattttcttaaagctgcatttataacggaaaaagagacccacgcaaatttaaacaaattggaaatttcatatcttttaaaatattgcaaaaaaaaacatttttttttaatatggcataagaaaaacacatagaaaccaaatttcactaatttttgggattgttttaacccggttgaggtattatacagttatttgataattcaaatcaaatattcaaattgattaataactatttattatatataaactatttctaaatatattacctaagaaaactcaaaatctaccaatatattatgtactttttaattattttaatttggatatgtatgtatatattgtacttattaatgtaattaaaattatttatggatttattttatgatgttattttattgatgaataaaaagtactgctttattacattttcaaaaaataaaaagcactgatttattaactatagttaataaaataattcttttatttaaagcaaaaccttatatagctttaataatattattatatatctacattaattatatttgtaaacgataaagctgtaaaaaaaaatcgtttttttatattcataagaagaagaacagaaaacgcccaccgtggggctcgaacccacgaccacaaggttaagagccttgcgctctaccaactgagctagacgggctacggttttcacttaagaaacattttcaacataacatttaagtatttactttctaaagtttatttgtttatcaatttttttatttcttttttgtttagaaatagtggttatttaaaataatttttaagtttaattctgttttcgataatggtgtttacaagaccattttattattgttattgataatagaattagtttcatgaagattattatcactatacgaggagttttagtgcatgtttgacattataactaaaaaact

SEQ ID NO: 388952 - DNA, 1984 bp, Cannabis indica
accagtgcacatacttccccttcttttatttctctcaaatatctcttttctgtgtttcaagtactttcggtgagatgggatccaccagagattattgcaacgtgtccatccacatgcggtggagcaagtccgggaggatacgaggttctcagtcccaggggaagtaatgccaccccagccgaggctggtagagcagaaaggccaagcaatgttgttcctatatcttgagagcgtcctaccctctacggaggatttatagcaccctggtgtcctagaacaatcatgtgcccatgtgcgacccggacccactgccccgaatgtcctgcttggactaatattgcaatctcatccttcaaataatcacattaattggtggtgtgacccttctctccatgatattcgcactcttttaatttggtcatgcatattccttcctctatgcgacatacgaggaggtttccaataatggaccatattgtaggccactttatatacattttcccgagtatctatcaagcttgtatactcagtatatttcagatcataccccttcctcgacttattcaaagaatcactacagttgtggttcttaccccctctcttgctctagcaatgccctgcattatgatttgggaccttagtttcttcctatcctagagccccattcccagaaaagtaggtttccataggggcgagagcaaaggtggttgacctgtaaaaatttggagaacactaagctctgggaagggttagagctagagtaggaacttagggagagaagttaggagtagtcacggaaggagttggagaaagagggactatgaaagcttgtatatagacatcctccaagttgcgggtgccttgtgcttttgccataaattctcttaaggtctctgacctctttctttgcatttctccccatagcagagaaccaacaaccaatcaggattggagggccatcaacttcatatcatcattgactatggttttgttagccccctccatcatccgttgaataaaggccttcatgctctcattatgctactatttaacattggtgagcaaaccaacctccatgtccttgtctcgcgtggtaatgaactgcttgcagaaggctgactgcatgtctttccaactgtcaatcaatcctggtgctaactacttccaccaatcctctatagacttatataaggtcaaggagaaccacagacattttgcatcatcactgactcgagcaacctgaatcatcttgttgtattttgccaaatgtgctcatgtgtcagttctccctttgtataactcagtgtggggcctcttaaagttttcttagagtggagtttccgtaatacttcttacacaaggttctagatcctcatcttcttacacaagttgtcctaaaggactggccagccgtattcgcatcccttcaaggaggtctaggtgcgggcttttatgtgtgcttgcccaccttgcccttgaccttatccttatgagaatttgaggtctcaggttgtgtttgtttttaggaacgttcatcgaacaccacttccaccgagggttcatcatggagtcccgccagatccttaaacttactctataaatgctgcatccttttcttcatttttgcagtgagaattttctgctctgctaactccgcctgagctgcctctaagtcattggttactcacagtaagtttgggtcatggtcatagtaataaccatcatagtaatacccgtctcttatggagtcatcatcatcaccttcttcatccccctctagggttttggccattttcaaggtcatcgagtacgttctcggtgtcatcccctcaatttttggcattggtcgggccttcttctttaacaccacccatctgaaggtcgaaggtgtgggagttggattcctccataactatgtccaatgtagttttctaactggtgttatttcgtgtattcaccatagtcaaagtgagacaacaactaa

SEQ ID NO: 388953 - DNA, 756 bp, Cannabis indica
ctttccaaacgcgccctaaattattaaattcttggttcataaagatcaatattaatattattattaagtatgatagaatgactggtcgaatccaaataagcaaccctaatatttccatggatatgagcaacatcactatcattttccaacaaatagtactaagtatattgcatgaatatattgctcttattaattaatagtgttacttatatgatcataattttattcaacaatttttttaatttccttctccattttcattttttatttaggagttgtctatatttgtttcatttacattaggttaaaattatacaaaatgtaatactgctcaatagtccataatcttacccacaatttgttcaaaaatgaaataaaataatcttacccaaaaagaataatttacaggtatattttgattgcttgagttaagtgaggatatcatgataataaactaaacatatatgaattgaatacattattacatttattctagtaaaagggaaagtagaagatataatatatgttactttagtaagtttatgccatacgacagcttcttgagagaaactgttgtgataaatccaacacgcaagtatgcgtatcgttttaacaagtaatactcaggtaagtgagatcgttcccacaaggactgcagttaagtaccaatcaattaaattcttgtttctatttgacaatcgaataaataaactttgaacaaaataaactaagcaaaattaaataaaacaaacaaat

SEQ ID NO: 388954 - DNA, 1364 bp, Cannabis indica
caatgtttattttgattattattttatgtttagaatgagtattactagccaatttttttagggtttctaattgaatcacactactacaaaagaacttttttccatcggtcctcaaattgatttttttgagattgatgctattggaattgtttgcctactataaattgacgactatagtttagtagtgccatttgttaagagtacctagttagttattagttagtgaggttagttagagctagttaggacaactgtactattgttctaactaactttctattgtggatttgatcaatcagctgtataaataatcaatcctcagtaatctcattcattcaatgaaatcaattactctttctttctttttgtttctctggttttgagttgtaacatggtatcagagcattaatcgtcactgtcatggagcaatcaacagtagtcaacaatggaggttctcctgttgccaacaatggaggatcgtcgactcctccaggttcttcttaacaaatctctcttcgtaaaactaatatggattcatcttctcactctctctcaatttagttggatgaattcaactaccttccatggaagcatcaagtgcttgctgcaatcaaaggaagtcgattacagagatttcttgatttgaaccttgctccgcctcaatatctgaccaatgatgatcgacgccataatagagcgagtcctgaatttgaagattaggaacaacaagacaacatacttgtatctttgcttctctcgtccatgttcgagaaagtactcaccagaatggttggatctgattccgttacccagatctggatcaatctgcgtgagtactacacttcacttaatcaagccaagattggtcagttcaagactcttcttcgaaacactaaaatgcagtcctccttcagtgactatcttctcaaactaaagagtatcatcaatactcttgcttcgattggccaccccacaactcctcaagatcatattaaagctatcttcaatggtttaccagctgaatacaatgtattcatcacatttgtcaacaccaggacagatgcttatagtgtggctgaaatcgaagcactcctaatggcttaggaggttcaattgtataaagcaactaaggatcttgacattaccaaaaatgaagcaaacttagctcatactaaagctcaaccaggcaaaggcataacatctgtctctcaaaactcccccactcctggatcaggaaacacattcagaggtaatgccccacctttttctcaatctaattcctcacagtatggtttctttatgcctgcttccagaggcacagggtgttaggttttatgcccttaataaaactcatttcatataat

SEQ ID NO: 388955 - DNA, 785 bp, Cannabis indica
cctgtcgaccggttgctacaggttcacctgaaccggtcgaccgatttagtgcaggaaccaccaaaaatgtccctagcaccacaaaacaatcccaaacttcctaatactttccagaatacctgtatacgccaaaaccaactcaacccaagcaataaaacacaacaaataacacagaatatcaaaacaccattagagcactaagcttaagttcccaaactccaacttggctcaaaccacaccaaaacccatcaaactagcttaaaacatccatcataaacctaccttaacttcagagcacaaaatcatactaccctaatacattcagcaacctaaacccaaaattatacattatacttaacataagcttaagaaattgagattcgagaaactaagaatggataccttgaatcaaagcattcaatttttccaccaagaatccttgatacagatcaaacaactccaccctagttgctgccttgaagaagagagagagagagagagttgtgaagagaaagagatgagtctctttctagatttctctatttttctaaccttaagtaaaatcattttcttttaattaaatctaactttaatatcagcctctaatgttcacaaaagacaaaaaaggaaagtttctagtataatgactattttgcccttaacaaaagacaagcttaccaacataaaagtataatttggtcatttctaaatcctgacactttcctgatatttctaatgcctaactattttgccccgctattaacattctaaatcatacaaaacgt

SEQ ID NO: 388956 - DNA, 1073 bp, Cannabis indica
aaaaaaaaaaaaacttaaaaagacaatgtactttcagacctaataaatcattctgcaaaataccctttactaacacattaacgaagaaacaccacaaaagttaccttcatctgttcacacactgactttaataggttttactcttcaactcccaacaaagagctcgtggaggaagctccatctcccctagaagtttttggatgtgaagaaaactgaaaataaaacacatacaaaaaccaaaaacattttcacatccaaatttagaaaaactaatcttgcaaatttagaaagtgagtttgccttttttcataccaaactcacaccagaatcatgtgagggctctatgtcagaatgttgactagaccatgtccttagacctttcaactgatcagtacttccagttctaaccaaacgtttagtctcatctaaattcaaattcttactcccgaaactcttcactggactacattctagctcagcttcactctgcacaaagtgcaaacagcaaacatataaaacccaaatcccagtattacccaccaaaggaaaatgaaaaaacacaaagcccaaacctcggaattcatgtaagacttcctaggaccaggacatctggacacagatcgattgcggcgaccggtatccaccctcgacagagtccgacccacctctttggttgcccccaaagaagcattgtcattcctagaaaccgatcgtcccctccgactatcggcggagacggtgctcggcctggagtcggtgggagcggggttatcgaggtccggaggggaaggagtggcggagaatagagggttgtctctcttgttgaggaaatcaatggaggcgtttgagaagtcggaggtagtcctggataaggcgctgacgcttctggatctccgagctgcggcttgtctcttggctgaaatatcaggggcgcgtctgccattgttgttggggattgttgaagaagaagaagaaggaggagttgtgatattgtttcttctagatgaggatttgaaggctgaaagagccatggatggattggattctatttttagctccaaatttttgttttt

SEQ ID NO: 388957 - DNA, 2513 bp, Cannabis indica
atggaaaaattgtttttcttttacattgaagatcgtaacacattaattttaaataattcctaagggctgatctccatccatatacttgattaatttgaaaatcagtcacaccataaatcacatggatttattatgaataagagcccctcatagatttgagaataacatatggcctactcaaaacccacaacacttttggtcctttcctccaactgaaggttatattttgattagaagcaccaactgacctacctaccaaccatgtgatgttgttttgtaatattaacacagcaacaaataacatcactctgtttggtagatctagaaaattgataattatagcaataaataactatttacagtatgaatttaattagtaatttctgtgtatgtaaagagcatctgtggattagctccatagtccgaaagtgactgaattttcacgtaaagaaatatattattgccaaattactgcagcattttaagagtcctgaggattaaaacatgttgacatatgaatgaaagtgaattgggcagaaattaattaaaaaatcttgaaagaaatagaaaattcatttttatagtattatgtaatcatgtttcaataacatcctcattcttctgggagccataattaactcctcaagaaaaagagaataaaaaatctaacatgaaaaaaaatgttctatattgtgttgacattgttcactttacaaaaatgttgcaatgaatgtgcctaattttgttgagtctcatgaagcattcagattggagatgacatcgacaaacacatgttgtgtgcagggaattgttaggcctcccattggatgatcgtatccatattcttcttcagcttgagtaagcaactcttgaaacaaaggttggcttaagaatgagacaggaacaacaaaccgcttcttttcattctctccaacataaactgccaaatgtcctttaggaacatctactgccattgaggcttctttgtttgaattattggaaaaagatcgtcgaagcaatttctttgctggaactatgcttggcacacggaaacccatagtgatcgatgtatgtagagaaagaacaagaacagttgagaatgaagaatggagagaagatctcaaaggaagtggaaaagctttggttatgcttgatggtttagcttgcaatgttatgcttatttatatataaaactagtagaagaaggatatcttgtgttggtttgaatgagtggttgatagagtgagttaggcttatgaagtggggtagtgatatcatcacatcacatggtattgtcttacaactcttctttattataaatttaatgaaggagacaccatgtccattgcaaggactttgatgttgctttggacctaaacatgtttattgctaacaactctctttgaatgactctataacacccaacttaagctcataggcattttgatgtggtcttttgagaaatattatcttaatatacttagtcacatgtaatgtctaaacatgaagataatgcaaaataatgattttgaatgcacagctacaattccaattttaatagtcaagtttgggtcattttttttatcacttgttaatatgtaaataattggttcattttttttcaattatcacataaaattattaagaacaatttaagtttaaaagttgaaggttcagtgccacaagtatattggtgaacctttcatgtagttaatttcatgcatacttatcaactatagctagttatataagctatgctctcaaaatataattggttatatagaatatctatcctacataatatgtgcagttacattgaaaacctatgggatattagcaaatattacctctgttttggctaaattagaatatacatgtaatataattttaaaaataattaaattatcttatgagtatgtaacaaaatctatttgactcaacatgtggtcaaaaagaaagaaagaaaaaaaaatgtaaactcattttaaaattaaatttaatatttgaaatgggtaaagttatttaacattttttgtcatctttattgaaaatgtacatgtacactaataattattttatttaaatttgaaacaatagaataggatatatatggacaaggaaataaacatcaaccatataattgatttgaatgaagaaaaagtgttgtattgatttgatttttatcaatcttagggacatttttaacttttggtccccaagcaaaaatatttacatagtatgggcaatgtctgccttacaaaattgtaacaatagtttttgttagacagtcaataatcagtgtgtaagcaaaattattaggcattcaagcgagaaataagatctatcaaggcatcttcattgcagggaaatgtaagagctcccattgggtgatcgaatccaaattcttcttcagcttgacttagaaagtcttggaatgatggctggttcaaatatgccacagggatcacaaatctcttcattctgttttctccaacataaactgccaaataccc

SEQ ID NO: 388958 - DNA, 3278 bp, Cannabis indica
atcctcaagcactgttagggtggatccttttatgaccatgtcattgtcttactttagggaatatggcagcttcattggtcaaagaaacataatttctccacgtggcttcactttttcaattttgtacctctcatactttgggtccaatcatcgacgaaggtctacggtggaccacctatctttagtgtgcgcctcaatcatccttccgtcttgattgatagaattactagggcaatttttttgccccttgggtttaggtagttttgtactttgccctttgagttttgcctctaggagagaagggcgtccaggctcaaaagcaacggtggccttctgcatcttaaagggttggctggctaaatttgtgtcctttcgaggaggtttaggaacagacttttgtgcaggttctcctaccttacctttacctttatcctagcgtggatatgaggttttagttttggttttcttaaatcacgctctttagacacaacctccattgagggatcatcgtcagattgtgccagatcctcaaacttgtcctggagatgagccatcattttcttcattttttcagtatgtttttcctgctcagctaacttcatctaagtaccttctaactctttagtcactcgaagcaggtttgggtagtggtcataataataaccatccttgtagtatttatctttcacataaccatcgtcgtcatcctcctcttcgctatctttaggattttggaaattgtcaacaccatcatgcatgtttttagcatcttctcctcagttttcaaaattacaatacctccttctcttgcaccacctaaatggagaccaggcgcaagggagtccatctcctccataacagtatcttgaggagctttcttacctacatctttttgagtgaacaccatggttgaggtggttcagcagctatcaagctttcttcagctctcaatgaaagaatcaaaatgtttaccgaaatttttggaaactaaataaacagagcttcaaaaataaataaaatagtaaataatagacaagtgatttttatgtgggttaggcgttaatccttagtccatgagttagttgtattggccctttggctaagtgtttgaataatacaatatgtgtgtacagtataaaccttaactctacactccttttgtttctcttaaagaagaataaaacttttaggagtttttgtagaggttcagctagtgtaaaatttgttaaccctttgtacataaaaagtgggggtatttataggcttacatgacggtaagggcattccctttacccagctagggttttgtattatagcccattgcaagggcatgaaaataaaaatttgaatctgaccatctggtcttgaagaaccttcttaatcgagcgatgcataggaaatgtaagtagtaccgcctggatcagggacatgtgttgcccaaaggtttctccttcataaattactctctggacaagcagttaggtgaaaaggtgtgtccagaggtacatacgtgcactacaatggccttgcatgtgggacaagatctatttctatgtcagaaaaaggaataaccgtctataggttgatttccatataaaactgatggggccatccacattcgcgtaggaatcatcatctgcgacaagtttagaaagtccttacctagacgttaggtagtcagactgttgttctaggacttcttggagttaagggacgagtatggtccttccatgtcctagagacgctaactgggcttgagatagctctctgcattaagcattcattaaacccctcctggattaacggggcatctctgcgaggaatcatgatggtcgtctttgttaatccaagaggttaatagatcttggcctctaattatgccatgtatctactgcttaaaaacacgaatcatatataaaatctcacagtcataatccttgactagttcaaaccacagtctttgtatcatatttaagttaatttgatcgaagaagtacttaagactcttctggtatgtatagatctcacacttctccctgtacaagtaatgttgccaaatctttagggcaaacacaacagcaacaagttctaaatcatgtttcaggaatgttgctcatactccttcaactatcgagaagcataagcaatgaccttgtcagcttgcatcaaaacgcaccctagaccctatttggatgcatcacaatatactacaaacctttcctgatctgaaggcattgctaacactggtgccattatcaattgctgcttcaactcttgaaagcttgtttcacacttatcagaccatacgaaccgttgattcttttttgtcaactttgtcagtggcattgaaatcttagaaaatccttccatgaaatgccgccaataccctactaatttgagaaaactttggacttcagtaattgtctttggcctcggccaattcttaactaaatcaattttccaaatcagccataattccatcctttttgataatatgccctaagaaggacacttgtgataactagaactcacactttttgaactttgtaaacagcttatgatctctaagccattgtaaaaccattcagagatgttgttcatgctccacttttgtctaagagtatataaggatgtcactcataaatactataacacagttatccaagaaatccttgaacaccctattcaaaagatccataaaggccactggagcatttgttaacccgaacgacatcattaagaacacatattcgccatatctggttcgaaatgatatctttgaaatgtcttcctccggaattctcaactgatgataccctaaacataagtcaatcttggagaaaaaagtcttaccctaaagttgatagaatgagtcaccaatcctaggtagtggatacttattcttgttcatcatcttgttcagttctcagtaatcaatacacatccaaaagtatccatccttcttttccacaagaaaaattgaagctccctagggcaacacactgggtcaggtaaaccctagatccagcatcccgtgaagttgtatttgcagctccttgagttctactggggccattcgataaggtgtgtttgacacaggctctgctccaagtgccaagtcaattatgaaatctatttctcgttgttgtggtcatttaggtagatcctcgagaaatacatttaaaaattcttttacaactatgacatactcaggcacaaatgtttgggtttgctagagtcaatcacaattgctaaaaatcctacacatccactgtgca

SEQ ID NO: 388959 - DNA, 1027 bp, Cannabis indica
ggaaatactttactttttatactaaacataaggattatgatattgatatgaacattactaaagcatttgaattgtatgataagcatactttggctgtgttgttttgtctaatttggatgctatggaattaacgaaataatctttttataataaaagaggtcttcctcctatgaagatttttgatcatgttgttaactatttgtctgaatatgatactgcttaccatctaaactttcagttgcaatcacaagggaaagaaataagcgaacaggtacctcaatttgcttctggtcgttagtgagtcaatacagatgctgccattgatgttgtatcaaaaaagcacaattttggagttgtggccagggatgattatgataacataaaggttggattagttgttccagttgaaggagtggttcctcctgaagtggctgaagctaaagcaattcttgctgctatttcttggatccatgcagccaagctcccaatctctattcttgcttcagattgcaagagtgttgtggataaaattaataacttttattgcagtaattcagttcttagtgatattatcaattgtattaataattcattgtttagtccagacctgcttataatccatgttccgagagaaaataacaaattagcacatagtcatgctagagtaggtttaaagttaaatagtgggtgtgtttggaatggttctttaccttcaattttgacctgattactttgcatttgttttttcttaattaaatattcaagtttctctaaaaaaaaaaaaagaaatccatataaattaaaaatatatatatggatgatttctcaatgggtaatacccattaatgggtattaaaaaaagttaatgaggtggcaatttagtgacttgctagaataggttaccaacaagttttaaaaaaaattatatttcctttttaattatagagaatgatgattttgagaaattatttttagaaattaatttattttacttaaattattatattatccttacattaatatcaaa

SEQ ID NO: 388960 - DNA, 941 bp, Cannabis indica
ttcttttgtacttaactaattaagttccaaactttcattgttcacattttttgtattaaaatataaataatcaaagtaataatgatgatataattaattttgtgatttatatttaattgtgaattcaaaaaatatttataattttatctttcaatttttttatagaatttatattataggaaaactatctcataaattatttttattttttttcttaaatttatagtttgagtttctctggtggtttctctggtgatttttatatggattgttatgtaaattttggttgcgatttaaattattccgttagttgctatgagagtttctatatgtaattccgtaaaaattaaaaaaaatatattttaaagtataaaaataaaaaagttcttttattatattaattattaataaatatattaacaaccatctatattgcacctacgtgagtataaacacaattaaaatttatataaactctagtttaaatatgatatatttatgaatataaaataagtatgaaatgtatttttttagcaatattttttttttaaaaaaaaaaaaataaagtacgctaacatgttcgagatctaagtgatcggtctatgcactaaaatttaaattttataatataattaaaattaaaaaaaaagtgtattttacatattgggtaaatactattttagactctgtgttttgcaaaagttaccgactgaatcatgtgttttgttaaatgacaaaatgacccctgtattttttaaaatagtacaaatagagcctgaattaatttttaaagtttaattataatccgatctaaaagtgttatgacaaaaccatttacattttttgtatctgttcttattaggaattgtcttcaagttggttgtattaaaaaaaaagttgtcaaaaattaactataacgccctaatgctaaggcacgctac

SEQ ID NO: 388961 - DNA, 1326 bp, Cannabis indica
ccggttctggccaaccggtttacagtttcaggtagcctctggaactcgggaattgtatttttgccataacttttcactcaagtgtcttcttttgacattttataaactgtttcaaagtttgcaacgagctctaccatgtgataaatattttagagccaaaatataagtttcattttagtgtattagaactacagtgtttggttggaaatcctaggttgtcatgttccactgttaagcactcttttgggataaacacttattgatttattattgttaagacatagggctcggaatcattaatcattctccaagcaggtcagccaacataccgaaactggaacttgaggtaagaaaattataatgtaccacagagcattacaggttctagaattatcgattgtctaattagtcaatgataatgtgatgatattatggacataatttatgggctcacctgattaggtgatccaatatacctagaaatgtaacgggcataggtacgggcgtcagtgacatatgatgagtactgagcgtaggttcgggctcacctgattaggtgatgtgatattcttagagacgtatcgggcgcaggtacgggcgttagtgatatgaaattgcctagttatggcttaaattgaaatcattgtgggtttcttcctagtgacgtatcaagcataggtacgagcgtcaatgacatatgatgagtacagagcgtaggtacgggcgtaagtgacagataatgagtatcgagcataggtacatgctcacctaattacgtgatgcaatattccttgtgacgtatcgggcataggtacgagtgtcagtgatatggaaatgcctcgttgtggcatagattgaaaccattgttgggtttcttcctggcaacatatcgggcgtaggtacaggcgttgatgacatatgagagtaccgagcgtaggtattggctaaccttacctgttgacgtactgggcataggtacaaacgtcactgacctatgatgagtaccaagagtagctacgggctcaactgattaggtgatgcaatattcctggcaacgtatcgagtataggtacaatggtctgtgatatgaaatttcctagttatggcatagactgaaaccattgttggatttcttcgtggtgacggattaggcgtaagtatgggtgttagtgacatatgataagtaccgagcataggtacgggctcgtctaatttgacaatacaatatattggtgccaacttatggcacgggctcacctatttaggtggtccaaagatactttatatgataaagcattatgacacgggcttgcttgattaggaaat

SEQ ID NO: 388962 - DNA, 820 bp, Cannabis indica
ttaaaactgacattacctgaaccctcaatattgcaagtattattgtttcccaaaatgactttacctcccttagaatctctgtaatcagtcagtagagtcctagagtttttcatatgaaaggtgcaaccagaatcaagtatcgaatcatctttgaaagatgtggatgcaacatagacttccccactgtcatatccatctgaaaaatttgcttcttgttctttttcattctttgttttgatctgttctttctggaaaccttcctcctttcttgtttttgtacttgttgttgtagaagtagcaatctcttttatagtggccagttttcccacaataaaagcaaccagtagtgtcaccaaaatctcttgatggtgacctacacttccctttacttgaacctttgtgcgtgatgtcctgagctattacttcttcctctgttttgataggatttcttgtgagatggccttcccctactcagattcacttctccattcccagaacctgtcttctcactcttcatctccaaatccttagattttagggtagagatgacttcatcaagagttatggaagtccttccattcttgatggcagttttcacttctctgtatgattcaggcaatgaattgagaatgattattgcctgattttcatcacttagtacctcattttcacctgaatttgccaattcaatataaatccttagaaattcatccacgttttgatcaagggttaatgtatgactcacactactacaaaaagtataattcacgtcggtttttaagtgtcacttaaagaatttacgtcggtttataaaaccgac

SEQ ID NO: 388963 - DNA, 835 bp, Cannabis indica
aattacccttacaagaaaaaaaaaaacagaattaatgttagattagagataattaattaattagctaaaattaaaatggaatatatatattttttcttttcaccttgaatatttgaaaataaaagcaaaatcttttttcttcatgacaccaaatgagttcttatccaaccatatgcttctagctagtgctaactcatgcgtgcacactattaataatttaatatatatttatataaatatgattatatattttataacataaatatgattataatgagttaatacatttttttcctgaccttttttaatcattcttatttacgttatacatatagctagtgattattattaaatacaatatgtattctaaacgggtggtatttttattaattattatttgatgaattaataaaagaaaatataatggatccttttattactatggcagcaaaagcaaacaagaaaagaaaagttgaacacataattcttttccatatgggttagaaaggagcttcgatatcatatgtacttctgttctcttctgttctgttctgacatattagaatactaaatagtaatatacgttactatgtaatgtatctctcattgtaaaatttccactagctgttacaaaatcttacatacattaatatacgttatatatatatatgttgaaaaataaaacgtattcttattaatacatttatacattaatataagaaaagtaataatttaagataatattgcccatatatatatataatctaacaaaagttccctaccggtagggaactttttttgaccattgattttagatcatgtggttattaagata

SEQ ID NO: 388964 - DNA, 662 bp, Cannabis indica
atcatgctatgccatttcatttttgatcatggccatggtacctggaatccttatgttgttcctcccacgggtggccttgtctcatgtcactctcctactcctgttgttcgaggtagcatttctatctcatcacccactttagcctcgaatccttcttgatctcatcccatgtgtcaaatgtgttctaagcctggtcacctagctgctcgttgttgccagcattttactatagaatctctattggaacttattttaccaggatttaaatttattaatcatgtatgttaattataaatattataatctaacatcttaaatataaaaattataaaataataattaaacacgtaaaagttcaagaaaccttacattgattgtagcaaaaacaatatgacttcttctgttcagtactctaactcttgttcttttctgtcgcagagtaataacaagtactaagcctaaatttttctttaaatagccaaacacctttctacatagtcctccacactgatcttagtacaaccttaattttattgggttttgtgccctaaataaaactcatttcaatataatcagatttacttactaataaatatcagaaataacattttaagttacatggttcacatgatttatttcatgattatatacatataatgtat

SEQ ID NO: 388965 - DNA, 1466 bp, Cannabis indica
agataagataagaaaaccactcaaaaatccaagacaaaaaaacttgcatattgacaggaagagtaataaaaaattgagccacattaccaatgtaaccatataaaaaaactcaaaatgtttttgcatacactgttgttaacctaaaattttgtaaaggagagaaatccttgggaattgctaggttggtcctcataaggaatccaacccagatcatgacagaaaatataatctaacactttccgatagaggagtatattataacagagacaaatgtggtaaactcatgaattaaagtcattttgtttgtttctttcttctagaaaattgttgattgcagagattaattaataatagtacaaagaaataaaaaaattctggtgccattcaacaatgaaataatcgacatggcagggagtaatagaacaaactatatactcctttcatttaaagccaaaatttatagttgggtaacaaatgttgcaatggtatattcaaccatacatcattttttttaataatattaaataaataaattgacaagaaatcataattagttaataaacaagaagtgaaagttctcacactgagcaagcaagaagtaaaagttctcacactgagcaagcacgttgttgttggaagactcgttctcttgactcatattatcactagctgtagtagtactacttgaggtgcctgcaattgccataaatcggtcgatgaaaccaaaaataccaagttacaataagaagaagatggttaatatatatatatattctgtgagcgtactgatggtcaatggatagagagttaggcgtataaccctcttaatttataccacttggacagaaaacaaaaataaaataaaagaaaaaaaatttacgagtaacgtagacaataaaaaattgtagagaatataattaataatgttgtgtgtagtagtactctctgaaggtatagtcatatactatcccttcatcctctttgtttcgatctgtctcctaggctgtggttctgctttgaatctttgtgtctcgattccttggtgtgtgtcctcctctatgtgttgagtgttgggttcctcttccactgtttgagtggtgtggtccttttatagcttttctcctttgtattttgtttagttatttgtttgtgtcgtgaggagtgagctgtgttgactttgtttttagctttttggtgtcatttacttttgtttggagggttggtaaggttgttgggtctttattcttattcttcttgtctcctttgtccgtttgtgttgggtgggtaggtatggagactgatggtgcttgttttcccctttttaatggcaaatgttactcttgcattgaaaccactgtcactttattccctagtgtctcatctctaaaagccctctccactttatgcttgcttggaaaacttgtggccccaatggaagtggatgaaaatactgttgggttttatgc

SEQ ID NO: 388966 - DNA, 2189 bp, Cannabis indica
gtgaacttggaggcattttctctggggtgtgttcggaattgcctatgaactctccctttttcctgttgccttgcatgccattgttattagacctttttctgctcgtagttgagctactagggtgttgcgtactgtgaacaggtgctcctacggaggaaatatgtggctggccctacttaggtttgacgacgtccactctccgaataggctcctcgagctttataaacccatttgctcggtccaaaaactccatcatagaccccacggggctacatcttttaatgtcctttcacaattctctcagtatctcaatgcctcccagtctggtggccaaccttccctctttagttaatcttacaaccttcgtagcctctatcatgaacctgcttatgtaggctctgaggggctctcctggtatctgttttacctcgaccaagtcttctagatgtgaggggagttaacgagaagaggagaatgtgcgtggaattctgaggaaaagtctttccatgaatttaaacctcccaggtgatagcttgaagtaccactgttgtgtggcttctgtaagtgtagtagggaataccctacaccgcacatcaccccgtactccctgcagatccatctgcatctcaaaatacttaagatgtgataagggatcttctttccctgtatacatcttccaggtcagcatcttgaattttaagggtaattcaaggatgtcgatctccagggtgaagggtgatccacgagctcggtccagctcgagatcagtgagttttgggtcggtcaggccttgaaccatatttttcagttgatccaattgtgcttgcacagatggatgaaccggttcagcctcttgactgacctgtgttacgtcaggatctcttggagctcggtcctagatgcgaataccttgttgagcagttggttgaacatattgttcgtccagacctcttcttatgttcaggtcagccttgagactatgggccgcgcccaacctattgactactgaagtactaggaggtctcagtgtctgactggtttggctggtgggttggctagaactatcaatttaaatgaagttattaggtatagctccacctgaagaatggtcaagtaggatctggtcgtctaccgcttggcccacaaatgagatctatgatcggggattggacggctgaccattatgagtctggggtatatgcccagtagcaatttcttctgtactgcctagtgggatactggacgcagcaatcggttgctggttagcaacttgataggctctccgtatcagtacggtagcctgccttgtgcggtcatcgatgggtacttgctgagccttcaatgtttccatctccctatccctccactaaatgaacttgcgtcgctgctcatcgaatgcaaggtttatagcagcacggagatcctcctgatcatggtgcaaggcattattatggccttgcatgagaccaagggcatcacggaggatttggatcttagtttcatcccccactgtcctctaagcattttttgtggatgggactccagtgttgggagtagattggtcggttgcataactagtatttctagtctcttgcacacccgttgcccaaccagaggggaagtcacactgtggcccacagtaggtggttgtgggttggattgcttgggattggtccctggtggcacccttatgttcctagggggttgcacagcagggtccgtcaccattgggtcactctgatcgactaggcctctacgggtttgcaccaccattttgtgcgcctgttaagacttaagacaaagaacagacttgggttttggctctcaatgaaaacaccaaaatgttacctcgcttttagtcaacgacaatgagtcaattattaagcgattagaaatgtattaaaaatatagcaaagaccggtaagcagtaaagaacaccaaattttgaagaggttcggcccctttagtatggtaatagcctactccccttggattgtattaactagagaacaaagaatacaatgttttctctctcaaagctcttacaatgaaatctctgagtatttctcttagatctctctctgaagcaattctcttgatcctttttacagtgaagctagatcactatttataggggcttaatgcatgagggaatgtttccctttgcttacaatgtctataataggaag

SEQ ID NO: 388967 - DNA, 1642 bp, Cannabis indica
agagttgacaaatatcagtggagaagagcaacagtgggcgtgtgtgtgtgagagagagagatcagacttagaacttagggttttgagcctctcacttatgacttcaggcttatcacttaggattttagagtttagttaaggctctttatataggagagcttaaacccttcaattaggtaaaataaatatttacatattaaattagtaaaatacagatgactaaaatgcttcttaaaatatatatttttcctctatttttgtgggttgtaaggccaaattccaagtctagcttgctgtccacgtgtaaagttgtgcaccaaagtcctgccaggccaatatttgactggccatgcatttgcatgatgcatgctggccggccttgtggtgtccagaagctggccgacctatgctggccatagggccgaccacccctcgttaaggtagttggtttgtcattcgacgtcctatttgagtgccaggactccccgttggttgaagtgttgagtagatgatttggccttctttttggcgagctgtatttccatgtggtgctaatattggccatgtatacatgccacgttaggtgggtaaaaatcaggataacattttcccccaagtccctatgccgacgtctgtgcagatagggactttccagcttagttgggagtgatgtagccttaactgagtaaattttgttgcatatttagtttttgaaataacaactcttgactttctgatctcatttgttagagtaagttaactgtattgtacttctacatgctttttagttgaacattgcatggcaagtaaagaagtggtcccacataagctatataagcctaatggagggaaaactctcttcacttttcacatttcattctcccactagaaaaagtaatttttaaaagctcatacttctctctataggtcaaagccccacattgctccatctcttgagatttttgcgccatttcaatgttccaagcttcccactctctttgccaaaggtttcttgtagtgggtaagctttctattctcactatttacttgatttagtttatttttccttgattgcatatattttttttctttgctttgaatgttttacaattcccatgttagattgtaatccttttagtattttgattctcatggtagtcttaggatgtataatgtgtgatttctagatagaaaagatctaattctaaccttcgttgtgattcttggctctttgagtcacgaagaacgcgaagaacacaaagaacgtattcgagttcttgaaaaatacatgtttagatttgacatataccttggccggccatggcagtcttgtttaagacctggctagccttagggggttaccccaaaagctggtcgacgtatgcctagaaataagattcctagctggcccttggctgggtcatgggacctgactggccctcttgagcttgggaaccctggtcggccaaggccaagattccaagtgggcaaccaacttttcatccttttttgaccttgctaagggtctcgtgacgaccatataggcatatacaactgtgatcttatgcaaggttcccttgggaactctgtataagacttggtagtgagtccattatagtcaagtgcacaacttaagactcac

SEQ ID NO: 388968 - DNA, 779 bp, Cannabis indica
acgtgttctgatgggactctgttgggttgggacccaaagatttgaaccctggtatcatcactaatctggaagtggtgaatttcttggctgataatggggtttcttgggatgaggcgttgatcatgagatcttttcgacctgaggctgctaagaagatattggcttgtaatctcgtagaatgccaaagtgaagactcgctggtgtggatgtcaagtacggattgggtgtttttctcttaaggcttcttacctcgatttgcataagaggacatttataacagatgagatatgttcctctttatggaagtcgcacattcatgaaaggttgaagttgttcttgtggaaactatctaaagattgtctcccttttggctcgaggttgggaggtatttttggaaattaagttggccagtgctttttctgtggcaatgcagctggtgacactgctgcccacttcttatgttaatgtcctatcactattagtctttggttctcaagcaaatggggtattcgaattgaagatttccctctattctctggtgcagaggtggttaaatggatgttcaaatcaatagccttttttcagcaacatgtctcagtttgacggagctgaattcgtaacctttgctgctattctgaacctttttaagcaaatgatcgggggctgggtccgggatcacggccagggtatgttcgggttccaaggtttaggttggagtcaggtccaaaatattgattaagaaaaaaaaaatatttaaaaaaatataaaaaatgattttt

SEQ ID NO: 388969 - DNA, 1118 bp, Cannabis indica
  modified_base (41)..(41): a, c, t, g, unknown or other
tataaataatatatacttactctttcttacactactttttncttctctctcaattttattcatcatacaacacactataccatatcccattaagcctaatttttttttttttttgagagatcccattaagccaattaacaatatactatatcaaattcttcttttaaaataaaaaaaaatatcgatattgtcacattcttttataaaaactatatcatccttagaatttagattatactctctttttttattattgaaaattggattgtgttgttaataatataagtcattaatttatatatcttgtatgtattaatttttatgtttatgtgagtgcatgtaaatctgtctattaaggtacaatttgaatttttcttcttctttatctattgattaacctttatgctctaattgtaaatgattatttataatataattctttttactatatattttttttactatctactctctccttattttgcttagtgtgtatacattcttgctcaaaacaattaatattcatccatcaacttctgatttcccatcgcatacacattcttacttatttgtggtaatttttcccccctaatttcttatttatatatttttgaccgaagcaaccaattaaatgatataatgagggctatggaagcattaatgcatgtgatttttacgtgattcaggtattaatgagcagtagtccacgagtctttattatttatgagagttcttatacagagaatgttcttggtgaatctctctctctcttcttcactcccttcgattccttaatcgatcgatcgatccctttttccttctattatttggggtatttatagtatttttgtaaggatcaccagaaagggatcacttgtctttaagtgtctgccccttaggggcacaaattcctacccgatataaaatagggcatacatgacctataccgtaggtatcttagggattaggtgaaaataatctttatccttccttgattgatgtgattcttcataatggagccgtaactagactcgtcgattattgtgtaatcgccgtaaaaaaaggcttacgccatctgtcaaatccttttatgggggttctgatacatttcccccatg

SEQ ID NO: 388970 - DNA, 2019 bp, Cannabis indica
tgaaggataattcaaagtttgggtcttgagatgggcaccagcttgggcgtgattttcaaaggtgataaagagaggtcttcactgaacccagtctctttatttgaaaaatatgttggcatgatacagttaggtaatgagggtattgggccggttacattagtaggccatgttgccttggtgaataagcttaatacccatccgaatggggaagctgatattggggttacttcgggccacgtgcttaagggccatgacacattgggttatgtgaattataacttgagaggtgggcctggatcaccgtttaattcttttgggctccaaccttgtgcgatgcctaaggcgaacatgttggaaggttaacatttagtgggtggtcattgtgaccctaatttgggtcgtgactactctgcccaacaggaggagaaaaaaggctttggctaatttttttcaagctcaagaagactacatcaaggaacttgaagccctagggtcctcgggtaaaagtaaaaggaaatcatttggtgttgacattggtgtccaaccgacttctgaatgtaatgcgagaactactccggtcaagaagtgggagttggaccttgaaactttctccctaggaaagagaccatttgtgtctttccgtagggttaagaaagttgttagagattacccaagaggaattggaccggttggtgaggctccagaatctatttttcatgactttgatgtatcggaggagcctctagatagtgacgaggttgcgaagattggaggtgttaagacctcaactgaactgttagaataagttgataaacggattttgctgggacagtctctagacttacggcccggaaagctagggctagactaacggatatttctattctgcttcctaatgtgctacttattgaggatgtgggttctgtggtgggtgtgccaggtgcggagatgacccctgtggaggaggatgtgttacctcctctagaagagccaagagccatgaaagcccttatttggtcatgcaatcctgatttcattttcattacggaactaatggtggatgcttcaagtctggtatgttcccttaagaaacttcacttttatcataatattattgttccggctgtgggatgtgcagggggattaattttagctttgaaagggggctttgaatttgaaagttttagtgtttctaaaagtcaaattaccggttttgtgtactctaaccctgtaaggagcccctggttgttgtgttgcgtttaaggttctccgtacttccatgaaaagaagaaattttggtctagcttgatggttaatggtgaaaattttggtggccctttgttaatcttaggcgatgtaaattttgttctgagcaactcggagtgggttggattcaaggggagggaccaatttatccccttcatctcggagataatcaaccgtcatgcgttggttgacttggctattaaaggggatatcatgacttgggacaatcatagagacggtgctaatcacattaagttggacctggacaaagctcttgtaaataatggttggttgtgaatctttcctaaggcggtggttcagtctctcaccacctgtaattccgaacatcgacccctctttattaatactgacactctggtcttcaactccagaaggccttttcgctttgaagcttggtagacaagggaccctcgtagttccttggtggtggatcaagcttggggtctatttcccatgattaggcccctgctagagtgtttaagaaagttggtgcgacccgcctagccctgagtaactggaaccaggtgcagtttggcaagttggattcttgctctctaagtttgagggtcagttacaagttatccaaagtttgcctgttggtgacaaaaattgggctaggaaggttgaggtgagaaaagagattaataaggctttaaagcagaaattaatttagtggcaactgttgggttttatgccctaaataaaactccatttcaatgtaatctattttat

SEQ ID NO: 388971 - DNA, 536 bp, Cannabis indica
aatgtgaatatttatagtgaaataaatatgattttctcgtattaatatcgtggctacagttgcctttttccttttaagaaacttttggttgcaactaatctttttcttttaagaaacttgtcatataagagagggaattctctttatacaaatttgcctaaatttggaaaatttactttccctcttggtaattgataatattggttttgttatgaatatagcagattatataatctttatatacaagaattaaagtccaaattgtgatattggattaatttagaaagtttcccgatttggccctgatctgtcactgcaaagtgtgattttgttgctgtaaattagggttttgaaagttttgtacagatgtaacgtgtttgtagctgtctctatggtttttatgtattataaatagggcctagagagtagctagccaaacgtttctcatctcttctagtctcattctcatattttagttttgtgagaagagtgtttcttttgtaaaaacttagagtgttcaactaggttttggtttt

SEQ ID NO: 388972 - DNA, 578 bp, Cannabis indica
cttcctttttgcctagcaagttgttgatgacaacatgcagctgttggttctctgatcttacatgttcatgttttatgacaagggtgcctacttctttaacggcgctctccctcatcaaggtcggctagcacacgaatcaaatgtgagaaaacataaaaagtacaaagtaataagaacgagaatatatagatcaaagctcatccccactacttactgcttggtggcatacggaaagggtgaatgcgttagtgctgttgcaggttgcccatgtctccaagggcaagtcaacgcactgctagctaattggtcgagaagctcggctgcaaaaggtgtagcttccttccctacctgagctgccatctaattttctagcgcttcaatttccaccattggtccaagatgagcaatggtgaaaacacctttagaggtttcaatcctcttcaacaaaagaaagtttatttgctctcacatgcgaaattctttgttcttcctcatgatgcctcctcaaagcgtgttcggcatcattttgttaggttttatgccctaaataaaactttttacaatctgattagttatca

SEQ ID NO: 388973 - DNA, 1432 bp, Cannabis indica
aagagattacacaccaactgaaattgtggatgatatatggcagtacgactacagtgtctcaatatcttaccaaaaagtatggagagatagaaaaaaaaatctattgtggatgctcgtcactgcccgcaagaatcatatagtgagatactatggattttatacatgatgcaaatatccaactcaggtattaagttactttgcctacaaacaataaacatatcaggaatttaataaaaatactaattggttaccttgttgtttactgaactaatatactaattgattacttctgcaacaagaaccattacagaccttgtcacaatgaagataacaaattcaaatatttatactttgcaataggtgcttcaataagagattggcaacactgtactccaataatagtcacaaatggatctttcttaataaacctacatgatggcactttattgatagcaagtgtacaaaatacaaatgacagttcttgggaatggttttttaacaaaataaaagaaacctatgaggaaaaaaaagtcaatgcatcatatcatatagacatgaaagtatactaaaagcagtaaatgaaacatttctatctaatgcatggggtatgttattactacatgatgaagaatataaaaatgaaatttaaaaaatgaggtgatgaactcaagcttgcatttaacagtgcctcaaaagcttataatattgaagagtttgaaaaaggcatgaaagacttggacaatatatatgtaagaataagagattacttgatgaatgaaattggtgttaaaaagtggacaaggctatatggcatgagcagaaaatacaaaaaattgacatcaaatattgtcgaatcagtcaatgcaatcctaaaagcagtaagagacttaccaattataatattactagaatgtctacattcattggtgcaaagatggtattaggaaaacaagattagagcccaaaaaacaataacaatgctggcaaagatactttaaaaacactaatgacacaaaggaatatgaatttaaagtacaaggtaattacatatagtgtttaaattgcttacaataatatctctgttgtaaacttactattggtttacttgattactacaagttgaaacatcaaatctccttatttacaaagtacacgacaacacccattctcacatagtaaacctggagaacaaaacatgcagttgtcaaatgtttgaatatgatgaaatgccttactctcatgcaatggctatgctgacaaaaatgaacctatcttgctacaactattgctcaactactacacgaagcttttatggcaacatatgaagacaacattctaccattaagtgatgcacctgttaggttttatgccctaaataaaactccatttcaatgtaatttattttattcaacatcaataaagaaacagaagt

SEQ ID NO: 388974 - DNA, 692 bp, Cannabis indica
gtagcacttacactcttcctccaaaaagtgtctcacgagcaagtcttctcccgaaacttaatgagatatccaaatgtgttcaacttctacaattttcactaagaaaaaaatacaaaaataacatagtcataaaatactaagaacttgttggactcaaattccttacacaacaaaagaaacactctctaaacttgaaaaaaattaagaggaagatacgccaagggagccaatgaaaaccaacaacctgatgatgtcttaatatcctttagaaaccctttaggttgtggaaaaataattaaaaaccaatcaaacaataaatggaaaatcttccccaaaaaaaaaagttagtgtctgttcaaacagactgtctttctgttcaaacaaattcactgtacctgtacctggacagtttttcaacaaagtttccctatatattaagaaacaaatatacattaaatctacaagttgtacacgattcctagacacacaaattaaaccaaataaaataaaataaatattaatattttcgttaaaaacaaaaagtaatgataagatattttaaataaaaaaggaataattacataagacactattttttgtaaaatatttacatttttacgttcaaagaatgtttttttacatttttacggtttttcaaaaaataacacgaaaacaacataaaatcaacaaga

SEQ ID NO: 388975 - DNA, 1030 bp, Cannabis indica
gacgtgaactcgagatcgtggacgaccaaacgttacggaccttacgaacccaaacccaggacttggaattaaaatttaaacgttttttttttaaaaaaaaaagataagtcgagtcggataagatccgatcttaataagttgagttagatttgatccgattcgggtatcttatctagcagggcaaggcaaggcagatcattgcatgatttggattgagttagtcatatctagatgagattcgatccatttacactcctacttgtgtatgaaatttttctatgacaacggaagcattgggatagtgatgggtaatctaaaaagtgcacaaaagtgctacaatgtctcggccaggtcaatttttgtggttagagaagaaatggatatgccagttctctaggcacccgcccagatagcacagagggtggcccgggaagagatgagttaaaaccttgtgtaggggtaaaataaatgatataggtgctagaggatgtggaaaaagtaagcataaacgagacagatgccacaaaatttatgaaagtgggccaaaccttacctttaacaatcaaagataagattgtgtccacaattatacagaaccaagacatcttggcatggagccatgtcgaaatgatggggattagttcccatgtaatttgccatgctctaaacattgactcgaacactaattcagtcagaaacaagtagaggccactcaatccagtacgttcataagtcctcatggaagctcttatccagtatggatggacaatccagtacttgctcctaagccaaatgggacttggagaatgtgtatcgacttcgccgatctgaacaaagcgtgttcgaaaaatttctttctgcttccacgaatagactagatggtggatgctacgtccgaatattagctgctcaatttcatagacgcctactctggatataaccaaaacaagatgcatgtgccagatcaagagcacactagcttccaaatagacaaaggtgtgtattgctacttagtcatgctattcagact

SEQ ID NO: 388976 - DNA, 1100 bp, Cannabis indica
ccccactcaaaattgcacccaatcaaaatcgcaccccattctttcttcatctctttctcttctctcaggatctctcttgcacgcccatccaagtctcacactgtctagttgtgggctcctaccgtccaagggccactatactgctctctcgcacaatgcctatatggtggtggccactcaaactaaaaccatcgtgcagtgtacaaaccaccatcaaactcagagaggtaatgttccctctctctcactctctttctctatctcgggatctctctctatctctctccgtctttcgagatctctctcgtaaatttgatgtttttctatttcttttgcaggcttgatgtcgtggtgtttgcacaatttttttgttggttttcaatttattattttgtaaaaactgtatataattttgatcttcagtgtttttgatgtgtggagggatttcaatggagctaaaaaaaattttttaattattatttagtatgtgtcggtacaaaattgacgggaatacagttaaaattttgatttttactctatttacatcagttccaaaatgaggcaattttttaataccgacaaatgaaaaatgacacaaaataatatttatttgcgtctacggtatatacgttggtttatagaattgatgaaaaaagattaaatgtcagttaaaaaccgacgaaaatagacatatttgtagtagtggaaagagtgtcacatatatatattcattactacaaaatcattatttccatcggtccccaatggtgttaagcagttgggaattgtataccaaatagttttaaaccgttggggattcccatttaaataaaaatttaattatttcgacctcatttttcttatcttagtctctccactacaaaaaaaaaaaacgctttgcaggcaatttatttgggcatatagcgtcatttttggtaaaatttatgatcacattatttcaggtgacgctaaaggggatatgaataactaactccgtaagagacctatggagtcggttattatgaaataactgtggccatagggtccttatgatgggttttatgccctaaataaaactctttacaatctgattagttatc

SEQ ID NO: 388977 - DNA, 761 bp, Cannabis indica
atatatataggtgtattctgtaaatctcccatcccaacattatgtgaaaattttgctgtgattttgctcagctagtgacctttgacattatgtgctcagttttgctccaccgaaattccagcaaaactactagaaacatagcacaaaatgtgaaatccaacccgaaaaagaaaaaaaacaaaaaaaaaaaaaaaagaaaaaaaattaagcattgacttatttttttttttcttttttcttttttcattttcatttttctgcaatttgctttctttgttttttcaatgctaatttgtttcttttttctttttggttgaaaggaaagcaattagagtaataaaattaaaaacaaagtttagaaacttaaattgtctttcaaaaagcacttgatttagggttattggcttaacttttgtaagagttctagtttcgcccataaaaagtggcatatgagtcttcattttcatcaacctcaaacttggccagagtgggaagtggtgagctccaatgtccaactcaattcttggttgctagatttatagtgtgtgtagcccaattaagacctagtatgttacatcaaatttgttatgagatgtccatgatgggtaatggttgtttttcaaccatgtgaaaatatggttgtatttttcaaccatgtgaaaaagttacaatggtaatttttgacttgaggcatatgcacattttcaactatgcatttaatgcaagattgattttttgtgtcttgttcatacatccaagga

SEQ ID NO: 388978 - DNA, 914 bp, Cannabis indica
aaggagtttgaattctacgaaagttcaacaagatttattagttagggtgaaatacatcaagcttgcagcatgaaattagaaagagtttatttatacataagtacaaaaactttgtatttttgaagtcttactaataaattttatctatctttaggcatgactatgtggactagtagcaatttgcataaattgctgatactacatataaaaactttgttgctatttttttttctgtacttaaaagttttattgatttattggtctgtataaagagtgttggtgtgtagtgacgaaaaatctatttgtgtactaaatttattattctacatttaattagttaattaataaattaatatgatagtaattataaaatatagaatttcatttattattattacttttcaaaaaaaaaaaaaaataacaactacaagaacacgatcttttcttgattgtgagaggcaactttacagtaataatgagatgatggattagttgaaattttgtctaataacacatacatgtattggcaattaaggtgaaactaacccgagcaagactcgtatcatcttcttctcttttatttaaattttttattattattttatttttatctcattgtctagtaaattacaagtgaaacatattttatatttctattatcaaaatcattcagttgagttattatcatacatatatgtaggtgtactttttatgggtattacttacaaatgggtaaaattgaaaaaatttgaatttttatgcttaatttttctatctaattaaaaaattctcccatttttatatcatatggggtgaaattattctatcggtaaaaataaattaaaaaaaagttttttagcaagaaaaataagaaaaaaaaagttgagtttgagttaaatatttttgtatgaaca

SEQ ID NO: 388979 - DNA, 1772 bp, Cannabis indica
ttcatcttatatattttattatcattccatacattaacaatataaaattctctaacagtatcccgccacctctcctttctcttcctttctcccactttcttccactcctttcatccctctccatcaatccatacatccctcttaccaaacatagtattaattaatgttacttaattgattttttttttttcaaaaaaaattgttacttaattgaactattaaaaacatgttgtttcatctttatttttttttccaaggttttatttataaaatgaaaaaggttattttactaggatatataaatatgctacatattctcattcatatattttattttagttattgttttttcctttgatagtttaagtgattatttactaatttaatattttttatatcacattattaatgtttagagttttttatttttatattttaaagtagtttattgttataattttaagaaaatttacatagcacaacaatttaaatcgcaattcaaatttacataataattagagcaattaaaaaaaaattaaaaataacatataaaataattcactaaaaattttattatcaaaggaaaaaacgaaactctattccacattttcagctagaatggcaaaataaaggtaaatgagttgctttagcctaaatttattgagctatgcgtaatttttatattatttaagataataataataataataataataataataataataataataataataatgaaatctcacagcataagcatatgcacattaatcttttccatagatttgtatgattctaaaccaaacaatacagtactcaatagatatcgtattatacactaaatatatccgactaggaacaaggaattattgcatcaagtattatatttaatttattcttaaaataaatgtattaattaatactaaatagttgtatggattttgaccgtaacagtgagatctgtaatatatttaaatttatttttaataataataataaaggatgtttctttcgatctgccaatgaactcaacactcaagagactcactctatttcagctccatttgttcccgatctaatgagtagtaatgtcggtgtatcaataaataattaatatgctatgaacgccaacatgggacgcgccatgtgctggatccagaaacaataccaccgactctaaaaatttaataattatttatttatcttttatagaattccttattttatttcttctttaaaaaacaactattaaattaattaaaaaaaaatctgactttttattaaaaaaacactaaaataaatgaagatggaagcaagatcggtggtggtgaccgacaagtgagtgggccctacattatgtccaagatatgcgcagctaagtgggggcaatgttatcatcaccgagtacttggctattcaaccaattgaggctagctcaattggttatagtagggtgcgtgtaataattgaaagttttgtattggaacttcaagttatatatgtttgtaatatataaatgtttaaattaaaaaaaagtacttagttatttgtatttattttttttgtttgaaattggttgtaacttcttactataattttttagttaatttttgtcatttgaaaatatttgctgaaatatattttttaaatttttttcctatagtgaaaataagtctaattttttttaaatacacacgataaattaaaataataaattttttttcctcttttaaaattatacatttttttttaccaattttgaaaaatac

SEQ ID NO: 388980 - DNA, 1970 bp, Cannabis indica
gtataaataaagccaatcccaatttcgcataatttttccagaaaaaaaaaaaagaaggaaaattcgcagaactactagcacagccagctgaaatgtcactatcttctagtaattttaaacaactttcctctaaaaagaaaaaagaaagaaagaaagacacgtgacaatcacttttttttaaaaagaaaaattatcgttattgttatgggcctagtgggcttgggccgttgatgaaaatcgagtccatagaacagtaagagtgcatgataactgatgaagaagcactcacctaacatttacccaaattaacaaaaacccaaattgtaatttagtttcaagtccgcctctgaagtctaaaattttgggggcaaaacacgtctggggagtttgtgtgtgtgaaagctgatgtgagtggcttaaagcttttcgcctgcggaggtgcctaagataagaagctgaggtggcgaaccctaatcctttctttgtaagtcgtcgtggtcgtggatgggccagtcagcttcgacggccgcagtccccagctgccgtgaaaataatcacagccatcgattgaagttcaaaccaacggccctgatctccccgatgcaggctgaagagaccgatgcctggcaagtaactatcgatggtttcgccgattatatctccgatctacccgaagagtgtttggctgttatttttcagtccctcggttccggtgaccgaaaacgctgctcgcttgtttgccggaggtggttgaaaatcgagggacagagccgtcaccggctttctctcaacgcccaagcagatctcttgcccatgatcccttccctcttcgacagatttgacgctgtcaccaaacttgctttgaaatgtgaccgcagatccgtgagcatcagagacgatgggctcgtcctcatctctctacggtgccgtaatctcacgcgtctcaaactccgcgcctgccgcgaattgacggacgctggtatggcgtcttttgcaaagaactgcaggggtttgaagaagctttcttgtggatcttgcacgtttggagctaaaggaatgaacgcagtgcttgataactgttcgtctctagaggagttatcggtgaagaggctccgtggaatcaccgatgtagctgcagcggagccaattgggcccggtgtagcagctgcttctctgaaaacaatttgtttgaaggagctgtacaatggacagtgttttggacctctgattattggcgcaaagaaactacgaacattgaaacttttcaggtgctcgggggactgggataaacttcttcaattgatcgctgatcgagtctccggaatggtcgagattcatctggagaggcttcaggtgagtgattatggtctcgctgcaatttcaaattctttggatctggaaattttgcatctcgtcaaaaccccggaatgcacaaataatggtttagtttctgttgcggagcgatgcaagctcttaaggaagcttcacattgatggttggaaggctaatcgtataggcgacgaaggcttggtagcgattgccaaatattgccccaatcttcaagaattggttttaattggtgtgaaccctactaaagttagcttggaaatgttggcttctaattgccaaaatttggagaggttagcattatgcggaagcgatacagtgggcgatgctgagatatcttgtattgccgcaaagtgtgcggcattgaagaagctttgcattaagagttgccctgtttcggatagtgggttggaggcattggcgagtgggtgtcccaatttggtgaaagtgaaggtcaagaagtgtagaggagtaacccctgatggggctgatttgttgagaacacgtaggggttctctggccgtgaatttagataccggtgaacctgaacatcaagacgctagtgccagtgacggtggggctcaagacaatgctgttgaattgcctcctgtaggcggtggtgg

SEQ ID NO: 388981 - DNA, 686 bp, Cannabis indica
accctcacaaccaggaaacaaaggaaaagttgtagctggtggcattcagaaggaaaacttcccaccaagccctgcatgtgaaaaaccaaacctctagaaagggaggtttaaccaaacctagggcaatgtcacctaaccaatccgccaaggagggctctgcaaggaaataagacccatgctcagggttcatcaacctagaggagccgtacgtccaagtatttggagtagcttcgacacatgtcaacacactcaaacatgggggacaacccttagttccctctttttaggtgcccgcgatagtgcctcttggaactcaatacacaatgctcacagtctacggacctgcttccccaggtacacaccttcgtagacaaatgtttttgggtttagtgttatggatttttctctacgcaagtgtacgtatcgattgtaagtatatacttataggagtgaggttgatcccacaaaaattgtagttagatactaataaattaaatttctaattctatttggcaataaaaaatttaaaggagaaatttcaaattgaaagtaataaaaataattaaattagaataaacattaataataattagagtttagagttattgacttcaacgtatttatcttatatggcataatataatttaatttctaaatatcaatttctatgcaatagcaagtttact

SEQ ID NO: 388982 - DNA, 1325 bp, Cannabis indica
tggtatttaccttttttttacatatattttttgatatgtacgtaaaaaatcttaaatatatgtatttagaaaatataattaagatttttaataaaatattaatataatatcttaaaaaaataaattaaataataataaaattattattattattattaaataataataataaattataaaatataatattttaaaaataaatttgggaccattttcttaaatggctttttaggctagggtgaaggtctttgggcgtggctcttgcttgctgctccatctttgaacttgcttgttactaatacagataaaattacatgtgtcacttcataaaaccttattctaattttgattgcttaagaaaattgattggtgaaacaccaacttcatttgttcaagagaatagaaaaacactaattttattagataaatgtttacaagtaccaatggtgtttaggattttttctacgtgtcactatcagtattggtccaattaattattgaggtggcgttggttaggaaaaataaaaatataagaataagaatgagaattggatcaattggaaataggaatagaatggaataaaaattaaaatgcataaaaaaattaatagaaaaaattattaaatattttcaaatcttgcattggaatgatctttccttccattttaaaacgaaatagtcattccaccaaattgatagaaaggttattccatcggaatggtattccagtagttttaaatgtaaccaaacaaacgaataaaatgaaaattatttcctttcgatttcattctatttcattacctccaaccaaacgccacttcagttttatataatttaatataagaacttttatgaaatatagccaatcacaaaatgatacatttaaaggtgttagataatactggtatctaatagcaatgctcattttatatttaattagaggaaaaaaaaattaaatacacttgtcagaattcatatcttcttaatttttttgcttcattaatttctttggaataaattctacaaatattttaaatcataactcacgtaggtcctcaatattagagaaggataattaagtgtatgataaggaaagttgcaaagattatttatttgtaaaaaaaaatattaattttaagaaagttattgagataagaatgggtgcaatataacataaaatgataaagtagagaaggaattgaataactaataattatctgttaaaacattattttctttttgttacacatcacacaattaaagatgtagtaataatttttaattaattttttattcttttaattaaaaaagtaaaaatatatttt

SEQ ID NO: 388983 - DNA, 1216 bp, Cannabis indica
ttgttgaaaaaaaaaatgaaaagtacgctagaaattatttccatgtggcggtacttttataattttataagtttaaatggataatgctgtaaaactttacgcttacttgagattaacatagtcctaccaaaacaaacatagtcctaccaagtacaaaccttccagaaccagtgtctctgcagctgaaaaagatgaggcttgttatattagtaagatataagcttttttcactgcaaatgatgatgttaatgaacacaatcagtggtaatacccttttttttttcttcttgaatcagtggtaatactcttggaagctcaatagaaggatggtaaggacaccttgcagttaaagggaaaaacaaaattcattggcaaggatgctgctccaaaaaggccaatatctcatgaccaaactcattgttaccgcattcagacaggaaaccagaaagaaattctgaatgtcacatccaggatttccaagcctttttcattttactaccaaggtatctcattccattaacacctccgacagccaagaggccagagatggcctgtcttgcacttgaaaccataacttttcgctttagaatcttctgcatgcattttgcagcctcttctcttgtgttaatcataagttcacatagagcttgacctgcaataaaacatgagaactctcgtgtaaatgtcaattgttacatttattactccatcaaggacaggtatcaacaaattggaaggagactccaatacaatgcttgtatgaatttgacaatcaaacattttccacatacacatgcataatgaagataaaggccccatttattctacataagacttgttggagcagtttcaaattcatactttcagatattacatttgactatagcaattagaatctcaaatcaactagtacttccagactaatttgttatgattattcattgcatatgagatggagaacacaccagattcactaaaatgtttctttcctcctaaattcaccgccatttcacttctgacaactggaggaagagaagatacaagagtgtgaactgttgatatactacaatcctgtaataaaaactagcaataaattattaatttatggaacccaaatggaacgtagtcacacacagtgtttcagaatcattggaaattttattgttgactgagaacactatctagtatataactttatgaataattatctttttta

SEQ ID NO: 388984 - DNA, 842 bp, Cannabis indica
agtttgaaaagttattattctacgttgaaattctaaagagtgtgtatttaaaaatatttatagtattatctatttgaacaatttttgagactaaatttactgtcgacaaaaccattgtttaatgttcttttcttgctgagtcatttacttgtgttagtttagttagtgtttgctaagggactagcaacatttaagtgtggggaatttgataagagcctgttaagctctaaaattattgatttcttcacagttaaaggatgttgttacttagtaattttagtattttttgtcattttcggaatgactcgagttttggaagaaaactgattttgatgagtaaaaagtaatgaatttggtgttttttatgctaggtgatgttagtggatggaatgacacggaaaaacaatattttcctagcgtttcggaagtccatgacgagaaaaagcccgtgggttgttgatacagcgaaggtggaagcgagcaaaaatatgaaaaaaaaataaaaatcttgaatcaagccccgtcgccgcggccacgagatggctcgccgcggcaaggacctcgtcaccgcggcgagcagtttcgtggccgcgacgagaagccaaatttctgcattgcgattttttttaaagatgaattatctttgttagtgagatatttcctagtactataaataggaccttttaggttgtgattttatcatcctagagctacaaaattgagagagaaacttgtagagagagcaaggaagagagagagatcgcaacttcgaagtgttcttcattctagttgttttcttctccttaaactcttactaattaattattatgatttttgttata

SEQ ID NO: 388985 - DNA, 675 bp, Cannabis indica
ggcactaattttattttcataagattttttattgtcattgatatttatggtcagcggcgaaatcagtggagggacaaaaatcttattttttaaaataagatatgaatgaaaaatattaattttttgttggataaaaatttatagataaaaataaatgtgtgagaatataaataaaaatgtacattttatgcagataaatataaaaaaatatgtgagaaaaaaataaaaagcatatatttatagacaaaaagagaaaattaattttatggggaaaaaattaaatttattaaataatttctatacaaaattacaatttaggaaaactcaagtgtgatcatgtgcccccacatgaccccatgtggccccgcctagttagatttcacactgcttttcctcataaaaaagaggttgcaagttggaatctctcctttctcaataataataataataatataataataataacgataaatagttacataaatatctaaaattttaattttataaattgtataaactcaatatttgtttctagcggtataattacttaatatttaattgtaaaactgtaatttctttcaatttcgtcaataaagaatctgttttgaatttattaaaagaacgtttaaaaattactgatactacatgtttctgcctagcctcaataatctagaa

SEQ ID NO: 388986 - DNA, 969 bp, Cannabis indica
ggtttttaaccgcctattcggccaattttatgacggttgtataggcaacggttatagaaaccgacgggaatgctatttttgtagtagtgttatttacaacaatagtaaaaataagagaaggaattattcacattcaacaaaagtcttgatccaactccaaagcatgttttgctaaaaccatgttcaacttggttagtgttcttccttacatgagaaacaacaacttcagaaaaaaaaaaataataaaaacaacaaataccaaggattaaattcgagaaataagataaatcttttgatgtagagttcaaagtatcagagactcgctatgcatctatttcaatttgtgtaatctgcaattgcatctgcaacacccttttaaggctataaaaaaaggctttagctttcatttcatcaaagcaaaaacaaccatgtactagcgatcacatagccattatgatctcgaacgatcgcaccaatacccaatatttttgatgcagagttcatggtagcatctatattaagtttaagccatgtgcaatttggaggtttccaagacgtttcctttgttatattactagtggcagtttttgttgtatgcgcacaacagtataaataatcacagaatgttcttgttgttttgcggttagaaactgagcgaaaattttccatataattcatagcataaccatagatatgggcaccatcaattctatttccaccatgaaaaatattattttttttcgtccaaatactacaagaataaatggtattactaacaccactattacaaattatggcaaaaagtcctcattaaaagtgagtatatcactaacgacatttcagtgtcgttggtggattttttttgtaaaatttttaatcaataacgacaaaagacattaatagcgacaatgcattgaaaaaaaatattaatggcaacattgtcgccattaatatttttttttttaaaaa

SEQ ID NO: 388987 - DNA, 1061 bp, Cannabis indica
atttcatacctgctgggggacaaaatggaaagtcaaagtaagggtacttgtcactgcaattggtaaatcattacaacgagttaaaaaaaagcaagaatcacaaaaactaggcgattagttctaagtattcagatttcggtgatgaactttttctcagcaacaacacatctgattcaacaatttctttgagctatgtttgacaatcaagaatgaaggaaaaatctcaaacagataataagctaaagttactcgaaatcttttacaatgataaagtaaaattaatcattccttatttcaacagagtacttttgtttttcttttatttcttgtctctctcttttcctttcattttctcaggaaccaaacaaattaaagaaccacaaaactcaagtactaaactcaaattaataaagaatttaaacaagagagtgatgattaaactgtaccacgattttcaagagaacgaagtctgttggcgaaaatgggaatcttatatccttggtagatctttccacgcggtggaacgggatgaagtgttgagaattttcttgaagaaattacgagaggtagtaacatcgccattaaaaccaacagactcaccaataccatagtccttttatttctaaaacccaataccatagtcattactcgctccaacgccatggattctagaaagaaagagagagaacaagagtttgtatcgcttgaatgaaggcatgaaaaggtgtttctgtgttcaaagaattaagaaaatcgctatttatattgtttggtttcttgaaaggttgtttgttattttccaagatggcgggaaaatcagttagagactggtaagagtgacagttagtattttaggaaaacagaatcaactcacattattccaatacaaaattttatcacaccagtattctgttactgttggtccacgtccaaagaaaagtccttactgaccaataaaccatgccaataccctttttatattgttctcttttatttttatcttcttttttaaaatctatcatttttacctcttttttaaacattgtaccaattttgcccct

SEQ ID NO: 388988 - DNA, 643 bp, Cannabis indica
atattaaaggtttgaaaaaaaaaaaaaaaaaacgaaacgaaaccctctcccttgctcttcatgcgacaaaacctcccattaccatcaccaattttcttcgaatttcttagccaaacctagtgtttctagccctgttagcaattaggttgtgaatcattaaagatgaagaacttgaggtaagaattggttctctttttaaattgaaaatttaaattttatatgttgacttagtgttttagaacggttgtggaatctatgatctcgtggctttgtttctgggttgctacgagactgattttaatgcatacttgctggatttgaggtaatttgaagtagaaactgagtttgagcttttaaaactcaaacctcgagcctttatggtgtttttttgtttaagtactcattttttttatttctgctatgttgaaactatattgtatggataatatatatatgtgtcttgtgaagtttagaatgattttgataagtttcggtggagtgtcgagaggaataaaattagggttcatatttcctgcaacaaaatggtccaccgtttgggataaacggttaaccatttcattccaggaaacacgaggaaaaggttaatcgttttaccaaacggtttgtcatttttggtatttgt

SEQ ID NO: 388989 - DNA, 931 bp, Cannabis indica
caacaatttgcttgtgtaggcgaaaatatggtattttctgaatccttaataaattaaaaatctaaatttaatagttttgttatattttttttataggaataatttgttacaattttttttatttaatattaatatgataaatattgtatatgttaaatattaagatgaaaagagaaattgagaatgagatatgagagattttaaacaaaaatttagaaattaggctctaaaaattaaattttttagtgagatataatttgttatatatcatgtatatgtatagaaaaaaaataattttttgtatattgttatattttgattgtgtgatcatgaaaattaagttggactaatttgttagtgagacataggacgtaggtttaacttgtggctaagtgtacgggtgcctgagctataaaacaaattatatgattatatgttttatgcttttcttatgggtctgtcaactcagatatatggtttcatgtgtaggtaaaggaagaaaagaaggctcagcaaatgagtttggagctcgttggtaattttatatatcgagatggtaggcctgaagagtttgattctttgggacaacttaagcttgtattttgtagttgttgtgcgacactttttgtttataaagtattttgaaataattaaaaagtttaaatacaagatcccaaaatttataatgatgtatttatttaattataaaagtttaaattaatcaagttttttcattaaactctttgattaacaaatattggtaacattaatgtaaaaacaaactgtagcacacttaatcaagtatggtgttacaattggattggttgtaagatgaaacgtctgatccaatgaataactaatagaactgatccaattatcattcaattattatatatatttttaaatttgttataaatattaataattatgt

SEQ ID NO: 388990 - DNA, 2411 bp, Cannabis indica
gaaactgatgatagcaaagacacttttaacacaagagtattataaaaatcaattggtagttctaaacaatttcggaattcacaaagagaaatagagaattcgaaacatgaattgacatgaatatagaacacaagttaacacgattatagaacatgaattgaatagaaaaacacaaaagaaaggccaaactcgatgatcctaagctttgataccaaatgatatgaaccacacaaacaattgtcatgaaacccgacaccaaatatggcagcctccaagaactcacaaatttggaatgtggaaccgcgacccaatgcttagttaagcatgaaccttgattttctaaagtgtttgcaagactttatatagccaatttacaactaagaaaaaaaaaaagaaacaaaaaaaacaatgaaaaaaaacaaagacaaattcatcctcctaatgaaggctttccaaataataaggacagaaaaacaaaggaagcaaaatttaaaaaaggaaagttgataaaaattcccaaaatccaataacaatgatcgaaaattgtgatcagccaacaatactcctaaattgactctactttaatgagaagcacaaatttatgttctccttcagtgttgaccacagtctcctcttgttttagaattttgtcgactaggatgttaagttcctctttgaatctcttggctcacgcccttgtcactggactaactggaacttgacttgtatctttagccttagtgtcctcatcaaactttatcgctgattatcatgtccttgtaaatctagtgcacagataaatcgtgggactaaatagtttgaaacgtatcatcacaattactttccactatgatgatattattgtaattgtgaataactatatgttctaaatttaatagatcttatatattaaacctataatcatgtataaaacatgtgaacaaagtatatgacaaggccaagatatgatttttgatcttcattgaaaataaataagattacaatgaaattggattttatttaggacataaaatcccaacaatagcgcaaatgtatacttttccaaacatatatctgtcggtatttagtgcaactctaagtacactaataccactcttactgatatgttatctaataagtaatcataaaatatgcacgctaaacatgtaaacacatatgcaattattatactaatcttaccttgatttcgaattcaagtgtgctggtcaacctgagtggaaactgttgctcgacgatttacaggtccctaagtcacaacttatgtaaaattggtaagtgatatgctaaatcacttttcaaggacttaaattcaaaactaaaagtttctctatcgataaatagcgtatcaatactataaaaattaagaaaacattgaaaatgagatttcagaaaaaacacccccaaaaaaaggtatgccagttttcctggtcctgactactaaaaacggtagacctttttggacaaacgccctaccgtttttaactgtagaaacacaaagaacctcatttctcctagaattctaccccaaattgtctataactgtcaagaacacctaatgaagccatacacaacataatccaacaggaaaaatcatcatcaagcttgtaaaacaaaaatactattaaagggtcaactttaagcttaaaagctcaccacaagtttaatcaaccactaaaaccaacttaaaacaactcaaacaacaacataaaagaagcctactacccagtctgggtctcgaaccccgtactagttccaaagtcgaatggcacctagagggtatgcattgactttacagacttaaacaagggatgcccaaaagattgttttcccctgcctagaatcgatcagttggtggatgcaacagccagccatgaaattctaactttcatggatgcgtactcagggtacaattagataagcattgtaacgccctaaataaataggcacgctacccaagatatttaagaaaccctaatcccctaaacgggattactaataaaattagcgcgcaaattaaactttaataacaaacggaatgaaaataaacttgtgataatttaaactttacaaactaaaagttacacatgtcgggatcacaaaaattattttacaaaacattattacaagtcctttttcactggccaacctaggcggcaaaacagtgtcacaaaatgcatcactggtagaccctaacccgcttggtctagtgtggcccgaacatgtacaatcgtcgtccagctcccatattcatggctaatcagaaatagctttactgtttcctgcacagtagagtacccgtgagccaagcccagcaagacagtataaaatatcaataacatgtttatcccactatataaacaaaaattctattctcatatgcctgtataaca

SEQ ID NO: 388991 - DNA, 1318 bp, Cannabis indica
attctcttcatttcatattcaccattgttatccattttttttcacattgacgtggcagaagaattaggtgacacgtgtcttgcatttcttttaccttggcggaggtgaatattttgaatagactctatattgtacatcagcatgtataacctttgattactcgagtaggatgaaagatagatcctccgggcaagtataagtctggcttgtcaaactacctccaaagagttaatcacttcagagtaatcctgcgatgccaagacacgaaggcaatccctacaatattgggattgaattagagaaatatggcaacctgttctagtttcctacttcatgtatcataattatgtaataaatataatttcctattttatagattgtaagcaaaaggaaaaccttccctcatgcattaaggccctataaatagtgacttagcctcacagtgaaagggatcgaaataatttctttagagagagatttaagagaattactcagagattcattgttagagctttcagagagaaaaatactttattctttctctcaagttaatacaattcaagaggagtaggctattccacactcacggggccaaacttctttaaaatctggtgttctttattacattatggtttttgctctattttaattacattcttgatcacttattaattgactcatttttgttgactaaaagtgaggtccacatttttgtgttttcattgagagtaaaaacccaagttttctttttatcttaagttttaacaggcgtacatgagtgtgctataaactcgtagaggcctagctgataagggcgacctgatagtgacatatcctaatgtgtagacccctgggaagacaagaggaccaccagggacaaaccccgaacatgccaatacacaaccacctactgtgggtcatggtgtgacttcccctctcgctgggatcacaccaggcgtgcaagagactgggcacaccagttcagcagtcaatcaatccactcccaacactgaagtcccatccaccactaatgtttaaggacagtaagagacgatactaaaatccaaaacctccgagcagcccttggactcatgtagggtcacaataacgctttgcaccatgatcaggaagatctctgcattgctataaatcttgcatttgacgagcaaagatgtcaacttatggaatggaaggatagggagatggaaaccttaagggctcaacaagaagctattgatcatcgtacaaggcaggccaccgtactgataaggagggcctaccaagtcaccaatcaatagccaactaccgcatctagtat

SEQ ID NO: 388992 - DNA, 809 bp, Cannabis indica
aaattacaggtatggaacaaatcgtgtgtgtgatcaaatatgaggaccaatggacaggaaatacaaaatataatgactacacaatgactggaattctaattccaaccaattcttcactagcaaacttgatggagctgataaaaacagaaataaattgtaacagaaggaacatagacttatcgtaccagatatcactgggaccaacaccaatgaagctactgagtgataattccctcaagttctacattgagctaaagaaaaaaataggatggagtaattgtttctccactatccatcacaactacggaagagatagctatacaaacagtggaaaatcaatcttttgaacaaccaatacaagagcaaagcaagatagtggaagaattggtttataaacatttaataatctttttcttttagcttcgggtttttctaacaataggctctttcttatctttgactggaacatcagaactagttccagttacagcgtgatcaacgaaatcatcatcatttaaatcagtagttgccttgaaacacaaaatatggcaaaaatatagtatttagattgttttataaaaagataatatttttataaaaaattccgtgtggcagtaaattgtaaactttgacccaaaatctaatatttatgtaagaatcccaaaataaaacccataaaagttaaaacaaaaattaaatctcatactacaaatactttatttaaaaataccataagaaagtaaaaactgttataaaataatataacataatataaagtagacgagaagaaagaagaagaagatgaagag

SEQ ID NO: 388993 - DNA, 1152 bp, Cannabis indica
aaaagaaaaagaaaaatgaaaatgcaattcttacatataaaattaagagggggctaaatattttcttgagaaaattagatatctagttttgattggatgatactaattaagttattaacatccaattcaatatatatattaaatataatacaattatttaaatttatacatgatctcttaatttttaaaacttttgtatcatgcaccaagcatcattttaatatttattttgtttatagtattaaaaagataggataaatttggcaaattaaaacaagagccttaaatagatattaattcagctcatccacgtacttcaattaaaataatcccaccttcagtttttttttaattaaaaaaattctcaactatacataaattacttcattaattaattatcttcaaataacatgcatcttatacatttaactaatagtaacaaaagaaaaaacaatccataataataattcaatttatttcaatctaactcaccaaaggagctactaacatctaaatgaattgagttacataattattttatgagaaatgctaccattaattttctatttcaaccttttaattaatctatgtgcccaaaaacatatgctaaaaaatattttttttttcaagactatgttcgttatagttacaattttaagatgtaaatttttaaatttttttgtaataattcacagtaccaacaacagagttcttgatattaaaatgcaccacacatatttttaaaaacttcaaatatgttttcaacactgtaaactattcaaaactttttaaaaaatttacaaaaatgatattgtaactataacaaatatcgatatgattaaaaaaaaaaacagtattccgacgtgtattttcgaatgcaaaagttgactaagaggctgcaattaacactcctctaattttataggggttttacaaaaatactggatttttgacaaaaatttataattttactgccacacgaatttttttataaaaatactatctttctataaaacaatcgtaaaatactaaatagaataattaaaaataattgtgaaacaacagataaaacttaacacagtatacagtataaaaaatacacaataattttttaaaaaaaaaaaaaatacgtcccataataaaaaagaaaaa

SEQ ID NO: 388994 - DNA, 954 bp, Cannabis indica
tggggttaaatacttttttattatttcatgatgtaaaactaaaagcataaatcacttaacgacacgtatataactcatgttaatcatttaattattagtctttgcttaaggaaaccaatagtagtgatgatcattttatttataaaaaaattaatatatataattaagtaaaaacaattcatatatttgtcttattaaataatatataagagaaagcgactaatatatataacaacgattcctataactgcacataaagaagaagaaaaaaatctcttaaaaataatatatttaacaaaaacaaattcatcatctacacatacatatagatctatataaatatatatatatatatatataatacctcaatggttgtagaacgttggttatgagtggatccaagcaatcccatttcacttctgtatctaacaatgcttctgtccatgctgaaccatgattaacaaacattaattaattaataattagattaatatgaagaaagggtaattaattaattaattaataagttaattaataattagtactaactcatggcttgcatattggtagagcttgccagaagaagagaaaatgataagagcaagttcagcatcacaaagcaaagaaagctcaaaagctttctttaaaagaccatttcttctctttgagaaagtcacttgtctgcttgttggattctctattctcttcacctcaactttccctctccccatttctctctctctctctcttctaatatctctcttctatctatttataatatatagccattcatcatatcactgtacatatgtttattattattcttaattaattatttttaatgaaagaacatcttatatagttagttagtgtaaataggggccgccaaagagggaaaaacaaaactagtactatcactacaaaaaaaaaggcttatctcggcagccctatctc

SEQ ID NO: 388995 - DNA, 594 bp, Cannabis indica
agtaacaaaatataattaagaaagtatgttggtagtatttactataatttgggtagttttcccaaaatgaaaaaaccacaaattcataaaacatataattatttatcctagtttataataattaatattatttatgctactttataaacttattttataattttccatgagaaaatttaaataattcaatatattttttttattatcatagttaaaataatattgttcaaaaataattaaaaatgataatgttaaaaatgtagctctttaatatatggtctagttataatgttctccttatataaacaagtcatattataaaaattattattattattgtcattaaatatttggaggatttcatagtaattaataaagaagatcaatgatatttttgtaatttactacaaaaagtcccaaaataacattgtctctttttatatagttatagatatagatatattgaatattataatatctattctatataaaatgtggctatataacaaaatttttggtttatgagaaattattgggtgattttttttttaataaaaaaaataattaattattagatgttgccacgtaaagggt

SEQ ID NO: 388996 - DNA, 636 bp, Cannabis indica
aaaaaaaaacaattacacaattagcaatatgagtatagatatcacttgcataaattattttgctagctatagttcttcaatgagtttctttaactttgttaaagattcttcaacacttttaatcgtatttttaccttctaaaacaattaattcaacacttttaatcgtatttttacattctaaaacaattaattcaactcaacaagtgttgtccatttttggtactttttctcttcttcttcaactttaattttttaaaagaagaaataatttcatcactatgttcttctgaaatattcaaatgataattttgaatctcttcatgacaacttccatcgaaaatatataaacaataatattacggataattttttttttctatgcattgtttttgaattggtttaagaaataaaaaaagaagataataatgaagaacttgctatctaagaagttattttgcgtctaacataaatcaagaaataaatatattaacaacaaaaaaattaataaaattattacgaaatattatttatggatgtccaaattaccatattaattatcaccattaatgtttgattgtattttcctttattgcatattaatttagtttctcattcctttagttaatacttttgt

SEQ ID NO: 388997 - DNA, 686 bp, Cannabis indica
cgcttttagaaaatttaagagtgtgtaaatggtaaaatagcatatattgaaaatttagaaacaataaaataaccgacagtaagaattataattagtttatttacgtttcgggcaattgctttttttctttttgtttttagaatcgagagttctcacgatgctaatttttttcttttttttttcctagaaaacagaaactttataaaaaaagtttagaaaaaaaaattaccctggaaacaaatccacctccctgtcaaggaggaaaccaaaaaacgagagagttaaaagccactgagcaagattatatgacacattagctattaaattcatggaaattaatattaattaatccaaaagaacccaccacccgaaactaaatcaagcaaattgaaaattcacgatgcaaattataaacactcctcttcttgttttaacatttttttatttcttcctttccaaatttttgtgcgatgaagttaggatataccaataattgtttgcattcataataaaattaagttctttttttcaacagccccatgatatataaattaagttcaagtacatatatataaccataaccaataatgaggtggctggtctggttaattagaggatatgtatatatacagtagaacctttatttaagaatactctataaaaaataacctttaatttgttataaa

SEQ ID NO: 388998 - DNA, 1839 bp, Cannabis indica
caatattatacttggttttttaaaaatatattaacgcagtatagctagtgatatactacatttttttttttctaaaatactcaaacataattaaggaaaagaaactctcaaataaattatttaggataattatgataaaatatattaacgcgaaacagtgataaactacaaattttttcctgaaatacttaaacataattaagggaaaaactctcaaatataagatatatcaataactatatatattatattgtgtgatgggttaattattggacacacaaatttaacagattgaaacatgaatgacggatcaaattataatttaaattttttaacacgaaatataaatggatagttcaattttttttttctgaattatatagtccaaaattattattaatttaactttatatatatagatacaaattaatctatataaatgtttttatataaaaaaataaaacaaatacaactataacatattatatgctaacatttaaaaaaatttatttttttttactttcatacaagctacaaaattatctcctttaatgtgttttcttttaaatatgaataaaaaaatattaaaataaaaataattaatattccattaaataaattgagaaagcaaactaaaaataaaaattaacaaattataataagtatatgtatatcaaaacgaaaaatgtctaaccttatcatatgattatgcaataagtgtaagagctggtgatctctaagtgtttagctaacagaaaagaaaaaaaaaattattgaacatgaatatatatatataactatgtatcaaactaaatatatatatataaatatcaatatataataaataaatattaaaacttacatggagtagacgaagctgccattgtgcgctagtataaaagccactgttcgcttgttcgaaaatgccactgtgcgcccgtcgaaggggaagagatcaagagagagaaagagagaagaggcaagagagatctagaaggagaatagaggcaagagcaaggaggagaagaaaagaaatcaaaacgaaaatatgtgttttatatacatcaacttattaccggcgggagttcgctggtgaaagtgtctctgccggtaataagtataatagtgataatttaccagcgagttctaccgatatatgtccgccactaataataaatcataaataaaagtgagattttttccacacatttcgcattttgaataattagcaaaaactttcgctgctaatacttcgtttcccgctcctattaataaataaaaataattttaaaataaaaaaattaatttttttgaccattaccggaggaaagtgtactctgttggtaataaaccctattattaggggcgaatctactccgtcggtattaagtccactcctaatgatactttttgttgtagtgtaagtagaaaatgtgtgtaagtaatcattggtagcgtacatatgaattacacctaatatagatgtataaacagttctctatgggcccgtttggtacgcatgactagattggattagacaggctaatttgtccaatctagtgtttgggcatgttagaagtttggataactaatccagctaacctcatatgtctgggattatttatcccatctagcagggtgggataaataaacccatgcaggtgagattttttttttatcgtttttttaattttaattttattaatatattttaaatttaataaaaatttaaaggaaataattatcacacatttatttatacattttttttatcaaaaacttattcattaaaattagtgaaaatgtataattttggaattattatacataagtttcaaa

SEQ ID NO: 388999 - DNA, 2097 bp, Cannabis indica
ttaagtacaattcattaaatgaatcaatgatgttcaatagtatgaagagcacaaggagaaaaaatctcaatccacatagtactagttttgttgccaaagcataattggctaataaatgagccaccatcttagcctcacgaaatacaaaaataaacccaagacacccaagacagaatgatgctgcaataacatttggatctcaaaaacaagcccatcctcatccctgcaacccctatcttccctattaataagattcacaacttgtacacaattcgattgaacactaagctgtgccaacttcttttgtaaactagcttgtaatccgtcccgaatcaccataaagttcagtggccaatggagacctaacctggcgcaagacaatggcagaagcaaacagaacaaccccctcactatctctaacgaccataatagtagaaaaaccacctctgaagtaaacaaccaacatctacatttatcgtgtagcactcatctaccacataacctcatctcttctaacatgacctctttctcctcttgaaacttgttagaaatcctgaataaatttaccacatcactctaaaatagcccagcccttggacaacaacccccatgaacaatagaatttctaacagaccagagatgccaagcaacaactagaaaaaaagcaaaggaagaagaagactaaacctttaatagcctataaaaaaatgatatgatatcagttaagcgaaattggcgaatttgatcccaaagaccacacttcttccacactcaatggacatcaccataacttatgcggtccatcctcaacccgctcgcccctacatcaagtacgaagaggcgccactgttattcccattttgactaaagcactattcgtaggaagccaataatgacaccccttccatacgaagtgcttaactttcagaggcacatttgtcttccataatttttttcaccaagattatttctccttctcatttaattggtgggatatctctctcatataagatgctaaaagatacccactcctcactgtatattctcaattttttgtataatgctacaacactttgtccttcactccccaatccccacttggtaaactaagaattaatttggcatcatccttattaaaatttgctttgataaaatcctcatcccaacaaccatctgtaagttgtaaattcaccacatagagctgatctggaaactcaagcttgtcgtaagctcagaaagtgacaggtctaggcagccaaggatcatccaacaccctaacatcatttccatccccattctctatcgatatccattcaaaatgagtttcttctcccaaatcaagctttgtcacatgaaggatgcattacttccgcacttcgcagccactatgctatgattcgaaaagtagcatgctttaaggactttactacaaaggaagtttggaaaacgcaaacacctcttgattccataatcaacataattagtttgtcctccaattattagttcataattagagttggtcaaaatatcattttacctttctaattatctcttgattccttatgtaccaataattcaatgtgaatagttaatccataacttaacatagatttggattcaactattagcacactcagaattaacactataatggaactaatattcgttatattaggaaagcttggattctattattgtataacatgtttctagtcgctcatgttattaagctcccaaaatagaagttgtaagaatcatcttctctgagaaactttaacgagtgaatcaaagaactcaatgaacacaaatagcagttcgtgtatgcacgggattcaggctgatctactaatgattatcattgtgatatgaataactcttttatggtaaacgacacgttaataaaagatgtttattacatatcggtccaatcatgcataatctaatgatacacagtacctttactacatgtccatctacatacgtgatccgaatcaaaatcacacacactagaagtataatgtacagtaaaccgtactagttgttccatattaagattcccaatacttaatacactaccgacttgtttatttcatatca

SEQ ID NO: 389000 - DNA, 624 bp, Cannabis indica
tttaacagcctaaaaatttaatagtattatttattagtatataaagttcaaaagagaaaatgataattagccaaaaacgtatataattttttaatgggtgagagattacattcaaaaatttcaataatagctacatctcttataagttggttatatgatttatgatgaataatttcccctctattacattgtgtaaaatttatatttcaagcaaagattaaaaaaaaaggagggattgattgttattttcgtagtttgttctcataatgagtaaatgattaaacaaaaagttacttaccacaagaaaaaatcatcattattttatttctgaatgtagtctcatgaaaatagaatttcttaaaaatatttgaaccacgttaaaacttttatcactttatattactttttgtttcagttcattagttttgatcctgctattgtagctaatgtgttggatcgaatatctctatttattcaattaacttgattccatatatatcaatcaagttgtttattttaatcattgtatcactactacaaaaattagaattcgcaacggtcttaaaaatactttttttgggcgaccgttgctaaaaaaattaagtgactatttaaaaccgtcgg

SEQ ID NO: 389001 - DNA, 933 bp, Cannabis indica
tataaatataattgtattggatcaatttttaattaaatttggagattgacatgcaataactgatttaatttaattagaatttaaatattaacatctaattcaatccaattataattagagttaaattacatcgttatccacccctatatccacctacatagctttttaaagggtgccactacagatcttttcaaaaagtattatttagaagtgatgtgatcctttcttagaaaacgaaatatatataattatgcaataatgctaaatgtcaggatcagattgtttttttttttttttggtaaatgtcagattcagatgtggtactgaggaagaagagttagcagaggttacgcaactgcaatcaacaacgccaataaaactacacgattacagttttgggtagccatatttttgcttttctactctaattataatgtaatactatcaataattattcaagagaaactttatatatatatatatattgttatattatttggtataatatgatatatagtgaaattttgagtataatatatatatatatacatatattagattaataatataattgaagatttggtgattttatttatgaaatttggaaattttaaaaattaagattttgatttttctttaaataatattgtaacttaatattttgggctttaatttcaatgtatatatatatatatattgaatttttggttaatattcggcgtaaaaatttttaatttatgaatatatatattctgattagtgttatgtattattgaatcggaattcgatagtggctttactgcatcgatatatttttttggtagtttgactcttttatataaatatatatatataagggtctcttcttttctctgctgcccgtagctacaccacaaagggaagctcaaatttttgctcttctatattctcatt

SEQ ID NO: 389002 - DNA, 3259 bp, Cannabis indica
gaatgtgacacttaattggcatacgtaaatttttttccataattctaaatatatgtaatagcatacactattagtattagaatacagaaagtataaattgtacattattcaataagagaacagagtatatatgcatgggataactcacgaggagttagtaactaacacaatcggggaccacctgtaataataagctagtgtaactaacctataactaactctaacaaccaatatacataacaaacttctaatactccccccaagatgaggtgtagagatttgtgacactcatcttggacaataagaatttgaattatgtagaaaagagagcctttgtcatgatgtgtacaatattgtgctgagaatgaatgtgtgagagtttgatgcagtttttggtgacttgtcccaaaacaatgtgacaatcaatgtcaacatgtttagtacgctcatggaagaaaacattcttgaagatgtgtatagtagcttggttgtcacagtaaagggtagcaggttgtgagtgtttgatcccaaaatcaaagaggatgttgatgaaccatatatagaatctcgcaggtgatgttagctagagaccgacattcagcttcaatagaggattttgacattgtggtctgcttcttggacttccatgaaatgagagactggacaatgaagatgaaatatctagtaatggatcgccatgtatcaaggcaattacatcagagaaagctttgagatgaaagagttgctttgctaagagctttgagttgttgtttgagtgaaaagataatccctgtccaggagtgcccttgaggtattggaggatgcgataaggagccttcatatgtggttgtctagggtaatttaggaattgactaagtctattaaatacataggatatatctggtcttgttatggtcagaaaaggaagtttaccaattaggcttctgtaagaagttggattagaaatagggggtccaatatccttgctgaggtaaagattttcttccataggtgtagtaacaaccttaaaacctaaaagaccagttccagtgaagagttgtaaagtgaatggatgttgggacacagagatacctacttttcatctgccaatctcaagaccaaggaaaaaatgtagagggccaagatcttttagttgaaacttggaattgagaaaggttttaaaagcagcaacatctagattattattgcttgtaataactatgtcatcgacatagactaatagtacaaataaatttgttggagaggctctattaaacaatgagtgaccataggcagattgagaaaagccatgctcgattaaggtcatgctcaattttgtaaatcattgtctagatgcctgtttgaggccatagagacttttatgtaattttcacactgggtttggaggaagctccccctcatgcacctatcccataggaagagacataaacttattcatcgagttatccatgtaagaaggcatcatcaatgtctattttgtgaagtgaccaattgttaatggcagttagagcaaggaacaattttagggtattaaactttgcaataggtgcgaaagtttcaccatagtcaattccatgttattacgtataccattttgctactaagggtgcatgctttgtatctttcaacttcacatttggaattgcatttgattttctaggacgcaaggacacaacagtccaagttttattctctttaagagaaaaaaattctttatccatggcattcagccattgaattaattgagtagcatgtttataagatttaggctctaattcagtgtatgcatgtaaaatagcatttcgaaatgaagttgtaaacctatcatagttgagaaattcagtaagggagtgagcaacagatgaatggtatacagtctttgaggtgaggtggtttgcaaacttgtgtccatgctttggtgattggaagctggacaagtgatgatattgcaacaggtatgggaaccgtggtgttgacatcatctggtaaaggtgatggtggtattgtagatgtaggagtcatcgtattatctattggagcaggagctgaattagatggaatatctgcaacaagatctagtgcaacaagatttgaaagaggtggaatatctgcaatgtggtctggtgcagtaggatctaaagcagatggaatatctgcaatgtgatctggtgaaaaaggaaataaattctccatatattgtattgataaagaacctttgagaggaaatatgttttcatagaagatgacgtctctagaatagaaaatagtgttggtagaaatgttaaggagggtataagttttcatgctgttgggatagccaatagaaatacaagcatgagctctaattgaaaatttgtgccttttgcttaataaggaagaggcataagctaggtagccaaaggttcttacatggtcataaataggggttttgttatgcaacaaatcaaaaaagagttttatgttgaagtaaagggattggagttctatctatgaggtatactgctgcgtttactaagtatggccaataaacaaaggccatagatgattgaaaagccaaggctcaggccatattgaaaatgtgttactgaattttgttgaggtctttcaatacatgaattgtagattttgatacatttttcagtataaaaagaagtaatattaagttctttggcattatcacaccttactgccttgatattgacaaagtatctggtgtgaaccatgatataaagttgaggaatactgtatgtacatcagattttaattttagcatataaacccaagtaaaccgactgtgatcatcaataattgtaaggaaatatcaaaaatcttcaatgctactaatatgaaaggccccaaatgtcaagatgaactaaattaaaacatagttgagcaatattttgttggaaattgaaaggtaagcttttttgtttagccaaatgacatatagaacaaggggtgatattagtagaagtattaaaataaaactttttattgatgttagttgttgacatggatggatgtccaagtctagaatgccaaaaaaaggcagtgttacatgatttattacaatttaaatttatatcataagagctagaagaattggatgaaagcagcaagaagtaaagatgaccaatcctcttagctgtcccaatcttcttgttctgtgaaccctgaagaatgtgttagggtttataatacacttaagaaatatataaatcacagatctaaacatatt

SEQ ID NO: 389003 - DNA, 500 bp, Cannabis indica
tttctcagaaaaccatttgacattagaagccaaatttgactacagtttaaaaaattcttagttctaatgctgctaccaagattaagcaaagaaacaaactaaacaagactgaattacagaaacacagtgttgaatctagtagaataaaaagcttgttttattatttcaattcactagtgaatttcccagaaaacaatttgaaatgaaaagccaaatttgactacagtttctaaataatattagttctaacgcctttaccaagattaagccaataaacaaagctaaaacacgattgaagtacagagatacattcaaatacagatatgtttcttgtagcttcaaaataatatcaagaacttcaactttcagaagatgaccaaattcatcggcaattgcataatacaatctctcacaaacaacccagtacctcaaaaatggacttggaaaaaattacaaagtacccaaatgacaattgacatgatttaaggagaataagagta

SEQ ID NO: 389004 - DNA, 873 bp, Cannabis indica
tagttattatttataaagaaaaaatatatcaaataaatttgtgtacagaacaaacttcagttatcatgttttctttaaggaataataatgaaaagttacaaataaaatgatctaataataattatttacgactcaaaaattttattatcttgaagtgaaattaacaaattaattagcaatagaatatttttaatgctccttaattataggtatctagcttattttgatagctaatatttaaataagtgttgattggatttttagttaactgacgatgtagagaccacttagttttaatttggaattagcacataattagggtttaattataaaactagaatattaattatgatttattattttatggagatttatttgaattcaggatgtattgtttgttagaatattttttaccaggatctagatttactaataagtatgtttttaacaatctaaatatgaatttctaaaacgatgaaaataaacacataaaaggtatgagaaaccttacaatgattgcagcggaattgaatgactccttctgctcagatctctaacccttgtatccttcctgtagcagagtatcactaagatctgagcccgattctcctccttattgtttggattcttcacagtcttacatactatgattgaggactaacttgttatgtgtgggcatgcactcaatcactaatggctaaattttattttgtgaagaacactatagaattcgaaatatagagaagaaaagaataagaagaagtctcaaaaacgtagagagaaagaaagctaggttttcttgcctttgaagcattagttggataatgagactttcttttccttttataccacttctcttagggttagggttga

SEQ ID NO: 389005 - DNA, 1807 bp, Cannabis indica
tcacctctttaggttaagataaaaggatgcatataataattttatccttgtttacctaaattttaacgatggggacatggtaagaataacgacatgtgacacgaggataccgagactggattgatgaagaatatgtaaattcatgatcgttggtgtggatcgttagtcacaaccaattgtcatgaccgttggaagagaagtttgacggtcatctttccccctagcttgagcaaggtggctgcctccaggggaacagtggactaacaccctcatagataggataaacgatcatcacacacctacggagtcaaagtagtctaggggttagataccactacccttaccttaaatataatgatatactcaaagggtggtgaagttattgtagaggtgtactcctaaacccctacatcctcatggtctaagaaattcattctcttacataagacatgacagatatagcacaccttcatgatgctaaggctatccacaacattgaagatcaagtggaaggggtctcgggggtaacgccttaagatggcgactgtcacccccttcacgatgggtcttgggggtgtcactcccaagtattggctactacctccagaggaggttaacgatcataccacactcttggggggaccctcatcgtcagtgactaattcaaatattcaaatcctgaaagaagctcaaagatggttacaaacccccgaaaatagcgggatgttatcataagaattggactttaacaacctccaaaaaccaaagaaagagttgagatatctctgcactggtcgcgtctcctaaagcaagaagcatcgaccttttctcctatatgagaggtcatccatgacttgagaaaaggatcaaagtacttagagaaaaaagaactcttccattgtaatcctttgcattcaagagtctattcctaattttgcaactttgattaataaaatacaaagggagtaggctaactgacatctgagtctgaagttctttaaattctggtgtcataatttacatttattgttcattttttttgtttaaatctcatttattacgactccacattggttggctaaaaatccagtcaatattttagtgctttcattgagagcttgttagtgttatggtctagtcacttagtcttgtacacttaacatcacttcatttgttagatagatttagttagttaagtttgtttttgttggttagtctacaaatgtccaacccgagcaattgtattaaaaaaactctcccatccattgttcaatttttctttagcttagagtcttagacagttggtataatcttgagcattgtccattggtttttactgccattatcgtcttgttgtaaagctcttaagctaattgatcaagaagtgaaataaaggctgagccattcttatgcaactctttctcctcatctatttttcttattttattttttttggtttagattcaaattgattcttgctactattgtattgtttatacttgatgttttatgttcttgatcctccattgtgttattgtttatcacaacaaatggtatctgagcaaggttgaaattggagtaatcaagaactgattgtttgaagaactgggcactaagaactcgatcatgaaatggcaacagcaaagtatgaagttgacaagttcacaggtgccaatgacttcagcctttggagaatcaagatgagagctctgttactgcatcaaggaatctcataagccattaatggtgatgcactcaaagtaattgaagatgagaagaaaaagatggagatcgaagccaaggcaca

SEQ ID NO: 389006 - DNA, 1023 bp, Cannabis indica
cacaaccatttctatcttacaaacaactgaaaaatcatcatcttagtgaaatatttcaatgaagaagaacaaacttatttgtcacactctcatgtattttatgatcaatgaattatctacacaaaattattaccaattgtactctgtacacacacatatatatattataaggttgtcctagttaaactttgtggtaaaccaaattgtgacattaaaacttgaaagaaagaaagaaagcataatacacagtacatgaaaagtagtctctgcaacacatttcgtttcttatatttcaaaactcatcgttctcttctacttcaaactttccctcatctttcacttttttcctcagaactactgctaaaaatctttggttgcactacttttgttcaaatctatgatcataatcgatcaaaacttgacccaaaatcacctaaatgtttagttattggatattctagcaacaaaaaagaatacaatgttattcaccagccacaaaccaattctatcatagtctcgctatcactttttttgaaccaaagatagaagatcatagcaataaattaccttaatgggtagtcattctaataaaatagtaaatctatacccaatccataaccaggtacattgttttccacaacaaaagataaagaagaagaaaataaagtcgagaaaatagttaaagaataaattcactaaccagccatcgagttgtagtcattgttgcaagccgaatcggtcgagttgttctttcacccacaatctttagggttaaatgacgattacagtgaaaattgagcttaattgttagcggcagaagaggaagaagaatttcagaatcattcacgtcatttaaccctaacgtaagccaccacattgacccaatcttggaacaatatcctctccccattccatgtcgtaccgtatctcaacacccagacttggtttgtcgatctcttcacccacaaatcgcagagaagaaagaagaattacaataaaaaaaaggatcaataatggtagaga

SEQ ID NO: 389007 - DNA, 527 bp, Cannabis indica
ttattatatcttattattgtgttctatgttatatagaaatagatcttgggttaattgttaatttatctaacattcgtttcctcctttgtttttttttttttctgtaaaacacataaggaaaagagatttatcatttattttttaataaaaaaaacatttaaagggggaaaaaatgaaaaacggaaactacatacacaaacaactcatccaccgtatgcaaaacgcttattattctgatattgtattacataataataaaaatgtctgacttactaaaacaactttgttctattgcacttgattgcattcgtttcactattatttttatttatattgatgatatataagttatttgtttttttcggcggagtgatataattgcaatcaaaaacataaatattagaaatgattttactttaatttgtcatggttttatctctttctctagctatatagaactctgacataataaggaggatacagtgaagcagaatttcagtcgaaaataaatattaaaaaaaaaaaat

SEQ ID NO: 389008 - DNA, 208 bp, Cannabis indica
aataaataaagggattatttcacaaatacagattcttcaacatcagtcggttcggacctccacttagtttcacccaagcttcatcgtggtcatggatagatcacccaggtttgggtccataagcagtgacattgccctatgaagactcgctttcgctacggctccggtgggttcccttaaccaagccactattgggttttatgcccta

SEQ ID NO: 389009 - DNA, 772 bp, Cannabis indica
gatttttttttgtttttaaaattttgatttttatttataaaattgaaaagtaaaaacagttttatagaacatattttttgaaaaatattttcactttttcacttttaaaaacaaaaacttgattaaaaaagtgttaccaaacgccaccttaattaatattggaacttgttgtattaaggtatcgtttagtatgtttgtctaagttaattaatggcatatggaaaatacatatagattaattaatatgtgaattattctatataatattttttaacatagattaattaataggggaattatccatataatatttttttattttttttctttttaatttacagtttaagtttcaatgtggttgcagcgctagttgcaataggagtttttttattacaatttaagttgcagcattaatttaaagtgtaaaaataaaaaaaatccccaaattaataattataagtaatggtaatagattaattaaagaaaatatgagatcgacgtacctgaggaagtaaacaatgaacatgagcaacgaatttgcagtctccacaataataaacacaaacacgttcatctctagtatcttcgcaaatatcacagtaaaattcaaccatcaccaccatcatcatcatcatcatctctgttatcaataaccgagcgagtaagaacaagagggtgaacgtgatactcgtaactaatggtgcgtggcaaagggccacacaacaagtgaacgatgttgaaattgcaggggacacagcggcaagatgaacga

SEQ ID NO: 389010 - DNA, 898 bp, Cannabis indica
aaaaatacaaaatttaatttttaacttttataaaatagatgatctaaactaaatatgtgaagatgcaccctagaaaactcccaatagtttaaagacaaacatcttccaatccatcatttagtctctcatcgtatctgttagtatcacaagttgtttttatgcgaagtgattcattcagcggctgttatggtgccacgtgtccaacatctatagctttatcacctacctaattaattaattaattaattaattgaatagaggacaaaacctaagaagaaattaaacaaaaagagcccattaacgtaaaacttgggcttttgagcacaagtaaacgggccttgttgttaatgtaataattaaagagacagagagagttgggccccatcttaaagttcaacggcctgacgtatcacaatccacgtcagcatagggctcccaatccatgttaataaaattacattaatacccataaccacttgccacttgatgttttataaataattaagggggtgtttggaatgggttaatgctaacaagggaatggtaatgtgaaacattaccttgtttgttttgagtctttagccttggaatgttattcccttagtattataactacccttgaggagggtaatgttgatactttaaaaaatggtaggattgaatcattaccttctattatattaatttgaatagaatttttgaattaataaataaatttaaataccaataatattatcatttattataaataaaatattacggtatatatttagtttgtgagatcggttttttttaactgagttatttttatattattagcaataatatatgtatattcattatacataaattttatgcggatggtgtacacataaatgacatagcaaacaaaaataaa

SEQ ID NO: 389011 - DNA, 2032 bp, Cannabis indica
gtcatgaccgtcaaccatgaagggtgatcacgactgttagaatggaagtcagacgctcacttttacccctagcttgagtaaggtgggcgtttccaaaaaggaaaatgatggactaacaccttcgtaagtagaatgaacaatcattatgtacccacacgccaagttagtctaaggggtagatgaaactaccccaaccatagacataaaggtccactcaaaggtagatggtgacatccacataacactataactactgacaacatacaagggatcttgggggtcacccaagatgacgatggtcgccctcctcaagttgggttttaggggtgtcgcccccaagtatgggcttcatccccaaaggtggtcaacgaccgtgtcacacccttaggagacccttgtcgtcagtgactatttcaaatgttcaaatcctatgaaaggctcaaagacagttgtcaacccacaaaaatagcaaaatattatcaaaaaatcagacttcaactgtaatattctggaaagtactattgtatttaataaaacatattttattaaatatgtacttattccggtaatgacgtaattatgatcttacttaggttaattagtgtaaatttattaaacgattaaataaattgtaatttattaattacggagaatatattggattatgagggtatcgcagatacgatttttgaagtaaaatgttttcgggctcggcagcagtggaaactcgacggggtagtgagaaatctcatagcaattaagttgtgttgtattggaattatgttaggttaggttaaatgttcaggagtggttgacatcgggaaaactagtaaatgaccattatacccctaggttatgttatagcttaggtttctaaagaggggtagattagtcattttgctagattaggtgttttgtcttatttgattttgggctgatttttattattattaaagtttaatttttttaaaaaaaaaataaagggaagtttatgtgggatttaggaggataatgatcaaacttaggaataacttggtgtagctcttcctcttccatcttttttgaccttagaaggaaccaagaaggcagcttgctcatcttaatttagactagaatctagctaagaaactaccctagttgctgtccttattggttgaggtaagttcttgatgctttcttctttgattttcttaagttaggattagttttgggttagggtattaggaatttggggttgaaatgatatgttgaggtaggattatgtttataggtgtgttttagagtttgggtgagtttagattaagtggtttagtggctgcttactttaatttgacttagaagatgatttttgagtttaatttcatttcactatgcaatttggagtttatgaaagaattgttttaaattaatgcttgagatacattgtatttatggttttgaagtgtgctgggctgtttgaacaagtcgttggtggtttggttgggttttgatgcaaaaactcgagtttttcttttctagaaactcagaaatcatttaaccggtttcaccagcattatgaaaccggtcaactggttttgccagcaggggaaaactctagtattagcctcaaaattggttttgatttggggtgtctctcaaagcttatattagggtattttagtgatatttaaattgttctaaaccagtaggaagtttgatgctcggtttcggagattagggtttggtttcaaagattggataagttatttatcaagtttttattgtcgtgacataggacccgggatcatcgagcgtaattccactcaggtcggcccgtacacctgattcatagattgaggtaagaaaagtgttatacatcacttagggttaagtgattaacaattgtatggttgtagtctcgattatgatcgagagcctgaataatgtgtgctaagcctcggttatgatcaagggatggaaacggtcaatactgttatgagtaattactcctgaaactgtggataggtttcttacttatcgtttgctttatcgg

SEQ ID NO: 389012 - DNA, 1115 bp, Cannabis indica
agtgttaccaaacggcaccatatattagggttgttcatccaatacccaatacaatctgctctattttgttcatagtatattcgatccgcattaagtgtggattttatttttttggatccaatccaatccgcataatagctcaaatccaatccaatccaatttgattgattattttagattggttactttatttaatatttatgaaaaaaattatatataaaaatggaatataaatttgatctattaagtttgaaatataattgtactatatgtattagatttttaaattattattttctttacattaaaatgttatttgaatatataattttttatttttttataaatatatgtggattggattgtgttgaccgagattttcagtaactaaatcaaagatagtttaagaagagtaaatgcaaatgtttttacatggttgggacattaatgagtcttagtcctcgagtctctgttattaataggtggatatttcttatagagaatgttctttttttttttcggtctcccttcattaatttggttgaggggtatttataatagttgtcaagaagaagaaaggtctcaattgtcctaaatgcttgccttggccatgcacaagttcccaaatctacaaagtagggcatgcacaacctacgtagtaggttgcgtagggtttaggtgggataagctctcatccttccttgattgatgtgattgttcataatggagtcgtcacttatactcttgattatcgcgtaattgttgaaggatgggtttatggcgtctgacacgtcctctcatatgtgttcacaaacgctttctccatgatgcattaaatgctagctgacagttcatctcaggtaccccaaattcgaaggagctagacgccatcctgctctcggagatgaagtcaagcaggacttctccgaatcggggcctggctcccagagtagttattgagttatctcgagaggatttgacccatgtaattaactttcctttaattatctctgagtcttagagcctgaccttccacgtgtccaatagtgagattgccacgtatattgggagaaaattagggcaacatttacccccaagtcttatttagttcttgg

SEQ ID NO: 389013 - DNA, 1692 bp, Cannabis indica
ctggatcaagtagttctttctgaacatacacatacatatggagtatatataagaggtttgtaattcaatattagattttgcacattgaggagtactaattatatataaccacctattataacttcttagtcaacctttacgttcgaaatcacatgtcggaattattttttttcaaagtttttttatggtggtgtattcgttatagttataatatctctctataaatttttgaaaaaatccgaatatatagtttacagtaccgaaaataaagttcttgatattccagtttaccacacgtgttcaaaaaacttcaaacttattttcgacactgtaaactatttgaaatttttgaaaaatttacagagataatgttgtgagtataacgaacacctctatgaaaaaaagttgaaaaaaaatattccagtatgtgttttcgggcacagaaattgactcaaagattgaagtaggaggttgacagtagaacttctcttcacacattttgatttaatgaacaatatgagaaaccgctaactatccataacgtatcacatcagtataatattatactttaagatacctaatagcaatgctcgtatatttacctttgggtcagtagatgagaacaaaacaggtgaagctgtgtgaaaaacaccttcacatccatcaaccacttcatcaaaagatccatcttctattaaatttgctttaattagatgaagtctttctttagctccatctaatgaaaccaagtgttctatcttctttgaatcatctacttcacccaatatatgtatatgttatagaatttataactacaaataaaaactatattatataatttattagtgaaagaatatataaagaaaaaaaacatatatagactaacttgggttacgaatcgaggctttgacagtgtatccatgttgtaataagagtttcacaagccatgaagctatgaaacctgttgctccacttacacacactaccttatttccttcactactcattatttctcaatatcttaaaaactcacaactcaagagtactcaagacccttacaccatagatctttttgctcttatatatatgcaattaaaaatatatatatgggtatttttgatattttcaatacatatagataagtagaaagatggtgtttggtttaatatatgtaattataatggtaatagtaatttttattttattatagaatcacacccaataggaacactaataatcacacttgctttggctcttaattagatgtgctggcaaccaatgtcgtatacttgttggatttctcttagggctgattttaaatgattttggttagttttacaaactttttaaataggcaaacttgttgcattgtcttaaagggacggacccaagatttttactttgtggcagcttatttatcataaaaaatacttatagttacattataatcacttttattaaatttatctaattttgtgggggcttttctattattttggcctataattattaaattaaaaaataattttttaaaagacaatatttttgttagtgggactatagccccacatcaatcttaatgggtccgtccctggtcctaaaacaattaatttggtgcaactataatttttttactttttatcacaataaaatttatgactaaaagtaaaaaaattgtcactaattataaat

SEQ ID NO: 389014 - DNA, 1307 bp, Cannabis indica
gtgcaaaaagagaatataccagagataactaatttttagttatatcagaaaaaaaaaaaaaaaaaccacgatttaaaaaatatatatctttgactatttctcatattcccagatgagtttgcaccagacagacctctgaagaaattaaaaaaaaaaaatcaaaggcttttattaaataacacaattagattcgctaagaaatcttctcataaataataaaaaagaaatactctagtaaaaacacaataatatcaaacacagcctatagcatatagatagatgcctcaattgttgacctgataacccaaaaacaattttgtttttacaagccaccaaggaagaaattcaaaaaaaaaaaaaaaaaataaggaataaaagaaatccctttaaaaaaaaattgcacttcaaaacttcaaatacaccatcaccaatcatttatattacattctcttttcttctttttctcccatattcaataaatacagaaaaataaataaaaaagttcaaggaaagcctaagaaaacgattcaattcccaccacttgatgaccgaagaccaaagaccaaaaaaaaaaaaattgtctaaaaaattgaataccacacaaaatttaaatcacaataaaacccagaataggagacccactacaaccacgcgtgccaaacccatatgctcaaaacatttatattatacaataaattaaataaataaaaaatacagattggaaatttagacgaaaagattgactttacctataaatcgatagacgaagaagaataagaaaagatttcgagattcaaaggaaaaagaagagaagaaattgacgagcaaaaagaaagcccttgaagagtcataacatcatcaataataccatggaagagagacctcgatcgacccagacctcataaaataaaataaaaaagataactttttttatttctcaaaaaaggaaaaagaaagattctttgaagagaaaaaagagagagagaatgttaaaaaggtaaccaaccgaaacgaacccaaacccctgaaaatgaaagagaggaaagggctctgagaaaaagtggctcagcgcgggttttggtctttaaataagggaaataaataaataaataataaaagagggtacaattacaaaggacagacattcggtagtttagtatcaaacaaaatcttccttccgtaccctgtcgtattaactaatttacctgtactttccttttgaactattttgtcccttcaacctacattcaataaaaaaaaaataaatcatcttctatcttacaattttcttttcttttcttttccaa

SEQ ID NO: 389015 - DNA, 965 bp, Cannabis indica
aatagataaaagatcagcaggagtattactctcattgaaaatacgatctgaatacaaacaagagctacgagcaagacagtatgcaactttgtttacagaacgtttaacaaaattaatcgtgactaaaggtaagaaagccaacaatgtacgacaagtagacacatgttgaccaaatggagatggaatgttaaccgaacctcggattgcttgaacaacaaccaaagaatccgtctcaacttcaacccgaccccattggtgtctctttatccaactcagtggctcataagaattgattagttgtatttttaaaaattattacatagaactcgatattacactaaagtattaaacacgaatgatatacaagtaataataaattaataatgataactccagctgtaatcaataccaagtttaattagcatataatgaccatgcaattgttattgtagtatgggtcctagctacgaaaaccccaaggcaatagtattagtcacacataaacattcgaaaaatttgtcttggcacaccacacacaaacaaacgtcaaaattcatggtctcttccaaaaagaatcactaaaggacttcctctaacactgaaaaatacaatagaaaccaaagaaacaaaattgaccccacttataaaaaataaaaatcttaattataaaataaataatttaatcctctttattttggtcactaatttctttatatataataatgaaattgtagtagaattataataaagtgtacaaacaaaatcatttttcattttccaaaactcttttccacaagcgagtcagagctcactttgcagcctttggcattttattaaaggattaagtttttcctctcactacaaataagtagaaattactatattccactagtggtttccaaaatagttttaattgtaattttttttatatatataataatatataatataattatttaagacat

SEQ ID NO: 389016 - DNA, 542 bp, Cannabis indica
ttactttttggtttggttattttcaccgaaaacaagattggtcattggttagcttgctctttatgttctaatcttgattgtattcccaataagaggtgtgtcacccaaaatatatttattgcttatatttttataattataaatatttaagagaaagggtaaaatggacttttggtttttaaattttacaatactttaataaaatattacaaatcattatattatgtcctatgaatctccctataatgaagcctccttgattcaaggagactagatttgaaaaatatacacatttaaaaatacataaacttaggtagatctaatttaaaactaatttgaaaactaaagaagcaaagtaacccgattctcctgtgtatgtcatctaattagaaaagtaaatgatgtaaaaataatgtggattattcattaataagatttgcacaatcaattttattcaatagtcaatagaatcaaaaaacctaaatttaatttcataaaaaaaatacataaaccctaaaagtttaatcttaaaattctcctaa

SEQ ID NO: 389017 - DNA, 1901 bp, Cannabis indica
attgaattgcggcgagagatcttgggtgaagaaaggatgtggcgagagctgaaggccaaaattgaaaaaaaaaaaaaaaagtagcctactgaagttggtgcttttatggttaaaacaagaaatatccattattagcagtattatttgtattgttattaatagcttttaattagaggaataaatatattaatttaaatatattataaaataatattattaattaaaaagaataaaaatgttaataatttcttgttaatattaacagaacataataaaaatatcgtcatctttgtataaaaaaatataaatagattttttaatcttttaacaaaataggtcgtccaaaagtaaatttttaaaaatataaaaggttaaaaggcccaaaatttgaattaagatcacttgttaaaagtggtattattaaattaatttaaatttgacatattaattaattttttatttattaataatttaaccatagtttatatatttaatataaattagattaattaatgtgtcaaattttaataggtttaatacagaatttaacaccaattgtgaatagagaatcttcgcacaatcggaggcaaaatctactattaactttttgagcattgctattaggcatcagtggtgtctaacaccataacgatattgacgcataggaggtgctagataacattggtgtcctttagcatttctctaactttttacccatacatttaattaattaataggaatcaatgaataactaataaaattaattttgattccaactcgatttttgatttaattaaagacaaggtagaacaggaaaaacccacatataatatgaaaaagctgtctttattacacacatgcatgtaaagttcttacataataatttcagcaaagaaacacacagaacagaacagaacagaggtatgatgtgttggcatctacaagagccaatcttattttagttactattatatatatatagatagatatgatagcagatagctattgattacccatgcgtgtactgggaacgtgacagtagtagtggtctggtagataatagcaaatagaaagagagacagccacacatttccattattagtgatgagcattgaggggaccatcgatgtggcaacacttgtaactgaggtaagtctccatggcacggcgacaatctgggcaattcatgctatcaggaaccttcccagcaacggtaggaacatcaagacggatacagtggcgaacagtttgagtgaccgttgtgtgaacctctgtgaaagcaacttcaaacgatcccttcaccttaatcacttccttcaactgatcaatgtcctcaaccactttcaggacggtagagccatggccggatgtcaccactgcagaacctttggccagaattgcccaggcagtttcgttcttgtaagaaagaagcttttgaatctctttagtgaccgggtcagtgtctttgtgattcttggtgaagaacaagctctctattccctcccagaacttggttagaatgccatggtcttctcctcctttggctgtctttcccacgcaaaacagttcgatgttaatgttggcactcttgatgaagggatcgttctgaagagcagtgacttttttggtgaatgtttggatgaaatcgttgtcttttcctccgtaaatgaaggtgtacttctccttatctttcacctgttcacagttatatattccaccaatattaattaaacataaaaatatatatcatataatatatctatcactaataatctctaacatgtgacgagacttttctttcaagtgaaatttatgaattaaaatcttctcttaaaaaaagagtatatcatagtatattaaaccaatttatcaattaatttgagagtattttaaggaaaaaa

SEQ ID NO: 389018 - DNA, 1442 bp, Cannabis indica
tggtacttaattagagtttttgaacggaagtgtaaaatgtaaaaaggaatgaggtttagtacatttttccgtcaaaaattgtatttatgtggttaactgttacaaaacgtaaaattctggttgttcatgccgctaatatcccttttaagtatttttaatttaatccctcaataaattagaaatatcccttaagatatctacacatttagctcttgacactttaatacctatggcccataattattaaaatgatgactttattagggtaaaacttcaaataataatacaccaatatatatatatatgagcccatattgaggattttaatctaacaatctcctgggctacatatattttcttataatgtgtaaccttataagcgcttaaactttgctatcataattataggtatttcaaaacaatcttgtccattgattatactaacataggatcaaaatagatttcgccacatttagcgtggctaaacccatcattaattgtcacgtatgtcaatataaccaaatgacatagatcaatcatggatgtgcaacataaaaattacacacaaatgtgatcttaccatgcctatctccatttgttcttccttaattaagatcaattctttattctttctaccttatacttaaacatcaatagaaagagtacattcagagtacttaaacatcaatgtaagtacttaagtccatacattatctgtaaaatataaatatgtgtcaacttgatacaacatcccaaatacaaactctcactaaactagtacaatcttaaataataccacatccttatatgagcaacaagctcctgaaaagtcttaagttgtatatcctgaattatcgagatcacacaaaatatggagattatttttattatgttctatagacaccttattactctgaacttcattttaataacaattagcttaaagtcaatgtgcctttgaccttgtaggactcatgttgttaattaaattcaacatgattgatttattatcacaacatatatctttaatattttttaataccatttctaattttatagccatatgtgacaaaaatctcgcagttgaattccttataatatcataatcagaaattgttgttggaggaattttgacaacaccaaataatatattaaataaaatcataaatgaaagtatgcgactactccacctaaaatggtgagtattcaaagaatggacactcagacatactggaaaatataaataacacaaaggaagtatagtggttcagtcagatcatggtctgcttagtccactgttgcaagggttttctgtcctctttatttcatattggatcactcctttatacaaagcaagtgtcctttgattatacagaacttgattaattatcaattcgtttttaaattgaatatcaacactaaatcaataaaaacgtaaatat

SEQ ID NO: 389019 - DNA, 871 bp, Cannabis indica
tcatactcaagtattcctgcaacagtagagttgtcaaaggtgccttgaccggtgacatatggtcttgctagcatgaggaatttggcatttgggaattgagatttggtggttaaaagaagattagtggtttgtccaggagctatgagaatggtatttgtttcaaagggtttaacataaattgcatcaacatcaactactttcaaagtatggtttgcaatgctgaaaaataattcatcattaagtgcagcattaatcaaacggaggagataagtctttcctgccttcaccttcaatttgaatgtatctacaattacaaacaaacattcaattattatgtacaagtaaagagttaaaatttaggggaaattttcttttttattgtttttaaggcacatgttacaaaaatgtgggttttttttttttccaaaaagttattttatggaaaaattaaaaaaaaaataattagaaaacatggggataaggttatcctaagggtaaccaaataactgttttattattttcttaaaaagatttatcaattttctaataaaataattttttgtaaaaaaagactttgtttcaaaatgtgtaatttcatcacaaatttacagttacttaagaaacaaacctttagaagagcaattatacaatgggcctggaagcccattaatggtataagcatctgagacatttgggcctccaccagtttgcatagcttgggttataactgcttccggatcagtattccaccactctcctgtacaacatttattcatgcatattataattattttgtttacaagattcagagagagagagaaagagagaagattaaagtgtttattatttatttgaatgtgggcaatgttgt

SEQ ID NO: 389020 - DNA, 637 bp, Cannabis indica
aaacacttggtgtgcaatgcaaaattcatcatcagaaaggaagtgaaattcataccttaatgtgaactccatggaattagatgatcattctgaagccatggaaacttgtgttactatcgaaaaaagacaatttctatgtgactcacaagttgaccaattctccccaaatctcaaattaaggttggaaaagctcaaactggaggatgatccaatgccaacattagaaaaagctaccaaaattaagaatccttgtcattgattatataaattcaagcacgtgccatcccttgtttttaccaactgtgattgaggttcatatctaattatctatctatcttttagtatatattttctcctaatcactacccttattacaagggtccatgtactcttttaagtgacctaactcctacatcttggggtctaacactatggcttattgaagaaggttattcattgtttttcaagtattttggtgtaaaagtttgaagcgagttcaagctaagtctcgaggggagctcgagctgtagctggagggagttcaacaaactcagaactaggtggcatttggttgggaggaatgaaaacataggaatgggaatgtgaataggaataagaatggaataaaatttaaaat

SEQ ID NO: 389021 - DNA, 596 bp, Cannabis indica
atattagttagttaagttttttttttttgaaagtttaataagtctgctgggtttgtttatattagtgtgtagaaggaaatgacgaaggtgaatctttccaatctataaattaataattttgtatcagagtgtttagtaaaggagatggatctttaaactatttttgtatgcacagataatgcgtttaattttggaaaattgtctttatttgatgaagatataagatatattttttaatcagatgtaattttggctagtgttaagggaagtgtttggtggcattgagaagctgcctccaagtaaaatctaatttatggtgtatctagacagtttgataggaattattttaagttacctttgcatgcaatttgtaacaatgttgtgttgttgaagactggacagatgatttgtaattgtttcaagttatattcagcatattttgtaggagaagcaaagtaggcaatacttctttgaattgttagttaccaattaataacctgtaaaaagaagttgtgaacaattatggtttattcatttgtatttcttcagcattgttgttagtatttgacatgttcagttaaatatttcaaactaaa

SEQ ID NO: 389022 - DNA, 811 bp, Cannabis indica
agtgcccacacacataaagttggtcctcaatcaaagtgtgtatgactgtgaagaatccaaacacaaggaaggagtttcaggctcagatcttggtgatactctactacagaaaggatacaagggttagagatctgagtggaacgagtaatttaattctgctgcacccactgtaagatttctcaaactttatctgtgtttaaattactttcttttataaattgatattaggatgttaaataacatacatggtagtaaatctagatcctggtaaaacatattccaacaacttgtatcagagccatggtaatgatttactttcatgaaatatgaattaaaatgatgtttgtgttgatttggatgctctcatgttggtttatgtgattatttaatgaatgtatgtgaattacgaaatttttcattaaaaataattttattttcgttctaaaaatatttatttggattccttgtcaaaaattaagcaaatttattttttacggaactcaattctgataaaaaatgaaagagttatggatcaaaggtgagtcgagatggtgcactatcgcactagcatctcagacaaggaggcctgatgtgcgcgcttgagccaaacaattttttgtctgaagcccctgattatccctcactcagacacgcatgccaggctgcagctcgcccacggaaatcctataattgccgagatttctcggtgcagggccctggagcttgcttcatccgcgcacgcgtctcggctgctcgcagcctgtctgggctgcacgtgtagcctcctggcagccacacccacaaatgcgat

SEQ ID NO: 389023 - DNA, 722 bp, Cannabis indica
aaggggaaattattatacttaaatttcaaccagtaataagaaactaacacgtgtatcaaggatgaaatatgaaccaactcaaactgcgcattattaaatgcgcattaaaagactcgcctcaagaaatgtagttaataaaaatattcaaactcaccgccatatagacaatagcgagatgaagagtaataactattaattaatgagaccagttagataaacaggtccatctcggatacaatgaaaactgttcagaatgagtaaacaatgagcttgcagcttattgatccacatactcttgagtaagagcttgctgcttattgatccacatattcttgagtacatttaaggaatgaaagcaacttcaacattcattcacctcgctttttgacgtgtagaagtaaccacctcgctaatacctttctcaacgacaaaggagagtcatgagatgcattgtaacttaacacttaacattttctcctagaaagatggttaagaaagataacatgtactcggcaagaaccatcaaccacagtcagtataatcgtctgtggataaagacaaagagcggttgaacgattgtttaagattatcccatgtgcacaaagataaaacatggggaatgtccatgtttcatgaacaactatgaatgaaaagattccaagagcataactttcaccacatgcatctataaataggggcagaagctgttgggttttgtgccc

SEQ ID NO: 389024 - DNA, 999 bp, Cannabis indica
catatatatttttttttaatatagtatacattttttatggtagagatggaatctatggtaagaacgaacaatctgtagaacaaagtaaaagaatatgaaaatttaatttggtaatctgagtgtaagtaatggtagtagtgaaatgagttttagtgtgcaatagaaattcattaagagaaaatcttatttgatgtcctgcacaatgacctattatgggccccaaaggtattgttatccagtctctagtagggcgacgagcgaaatgggctgccaaaagaagttaagagcaaagtgttcagtaaattaaatatagtcagagcatcatgacattatgaaagatgaaaccttattgattttactcagagatttgatttaggatgaattctctttatcatcatatgcgttttaattagctaaattagtgaaccaatcctttttcacgagtcacaacaattctaaagcctcattctgattgaatgcactacgctagtacttgatttggtcatacagattatatacatataaatttacttgaaggatttcttaataatcatcgttaattactttacttttacacctcgtacgaaatctagaaagtgacaaatttactccttaattagtggctttaaaagtaaaattaaatgagccaaaaagaatatttatctttgttcctatgggttataataaaatttttgaattttgttactgtcctagtcgtcaactcatctttcttgtgtgccactgaatactgatcacttaatcatcaattttctacaaaacataataaatgatgcaatgataaactaataattttgacctgatattaggaaaattaatgatgatctctcttttttaatgactcattttcacattcagacgtatgtgtagtagagtagtaggtctactgttttaatttctatggtcatggactcatcaacatagaaaacactagggttcgtttagaacgccgtattaagtcgtattgtattgtattgtatt

SEQ ID NO: 389025 - DNA, 1781 bp, Cannabis indica
ttccaataacagaaatcccccacaaactctcagcatctctcttccctcaggagacacatcgagttcccacttaacatcagctcagtgccaagaactaatatccatgttgacacaacaacttcaaccaactactgatgcttcaacaccagaaggtccaacaatcaacaacttcacaggtaacacaaatcgacaacctcccatgtcttgggttatagatagtggtgccactcaccatgtatgttgcaatattagatgtttttcacatatcaccaagtccacaacacacaattcagtcactcttcctaatggtgatactttccaaattcaattaattggaactgtcaaaataaactctgcaattactcttcataatgtactgtttgtaccaaaatttcaattcaatttactatccattacttctttgattgatgatagttcataccatgtctcttttacaactaatacatgttctattcaggaccattctcagacattaacgattgggacaactagaagaattggcaagctctattacctacatgaagatgcaaactactaccaagcttatactgcagtttcttgtaatgtagaaaataaaaaccaatggcacacacgccttggccatccgtctgtactaattacaaataagatcaataaaacaatgcaatttccatttgatgcatcacatgtccatcactgtcctacttgccatctctctaaacaaaaaaagttaccatttgtatcaaacaatcacttttcccaagcaatctttgatttaatacatttagatatttggggaccatatcccattccttataccgaaagatacaaatactttcttaccattgtggatgaccattcaaggcacacaggggatatatcttcttcgggctaaatcagaagctccacaaatcattcaaaaaaatttcacctttgttaatgtccattacaaacagaacataaaatctgttaggacagataatgcaaaggaactaaatctcaaaagcttttatgctactaaaggcactactcatcaaaattcatgtgtggctagaccataacaaaatgccgtcgttgaacgaaaacatcagcatatccttaatgtcgcaagagctcttgcttttcaatcaaatttaccattattttattggaactatatggttcaaactactgtataccttatcaacagaacaccatcggttcagctcaaagataggactccctatgaactgcttcaccaaaaaccaccccaatacaaccatcttagaaattttggttgtttagcttatgtttcacccattcacactacccataaatttgctcctcgagcaaaatcctgtgttttcataggctaccccaaaaatatgaaagcctatacccttattgacatagaaacaaaccacatattccattctcgagatgtcatattttatgaggatatttaccctttcaaaaacaacactcccaatcaatccattgatcatttttttccaactgatttttctccaaaatctgctactgatgaaccactcaaatcagcagccccgaaaacttcgaccaaatcaggcagggtcatccatacccctgctcatcttaacgactattgctgcaacaccaatagtaaaacaagcagttccctctatcctatcacaaactacatttcataccacaatttctcacctgaatttcgagcagcagctttagctacatatcacatatttgagccaacttcttatgctcaagcatgtaaagaaaagatttggaaccaagccatggatacc

SEQ ID NO: 389026 - DNA, 2215 bp, Cannabis indica
ccccaagaaacttaagtccatgtcaggattttccatctaagctctgtaaatggaacgctcgacaatagcattgcaccgttccttagcattggcttcgccaccttcaagcttcatagtagctacgttaagttcctcttggagtttctagcaagcctcttgtttgtccttacttccttttgggctgcctcgagttcaatcttatgagtccttctcgcctcctcagccttcttagtcaaatgggatatctccttttgagcatcgttcaattgtttggcaacagccttgcattgctcaatggttttacgaagttcaacttctgagtgctttaccttctggagaacccgactctgggctacatgggataagaaggaggcctacaaggaaaaatatacatatcagaatttacaaaatcctaaaagaagtgttaaaaaaatgaaaagaatgggactaaccaagagagtgaagttaagactcctctcaagcatctctgttggactgccttatttaccaaatctcaatcgccagactggaaagattagaaatggcgccagcaggacactgcaaattgcgagcaatactctaagccagtgcccccagcttcgatgggcaaagtctcgggcaccttacccgaggacgtggttgcctattgcattgatccttgaactagttccataacaggtgcggtggctggagtatgaacctaaacttgatcttcagaagattcgagatttatggattgcgaggcaccctttttatttgcagtggttaatctagatcttttaaaaggttcaaaatttacctctgaagaagtctccgaattagcaatcctctttataccctttttgctcgaagagtgaagaagattctctagatccatatctgtgagacagagaaatacatcaacacttattcaaaaacagataaaaagaaaaatgggaaataaatttccacttaaggaaagttaccataatcatcagatgatgaagaagggggaatatagtattcactaaactatcttgatcatgtgatcataaatatgtcataggggttaattggatcaaaatcgcaatctgaatctgggtggctctccctatccaagtttgtcccatactactcggtaatcccatggtatgaactagtgcaactaagttgaacaaggaattgtgggtaccaactatcaaacctatagattatgcaatctattaagaaaggattccaaatataaaagttataacgactatcttggaagggtactagcaaggtacgttcaaccctaagcacactgggtgaccatccacattgattaccttgggatgctccttctttagctttcagaggggttattctctcgagataatgcacacgagccacataatcttggctctcttcattggctagaactggaaccctctcccacgaagagtacttgggaaacttgtaatcacaagtgtacttatctaaggcaagaaggccaatagttttcagattggcttcgttaagaagaaattcggccgatcgcagtctgaacggaagacccagaaaagttttacgccgctcgaccatctcaggagttggaattggtctttttgagactgatgttaacatgataaatgagataagtcagcgagctcaaggatacaaatatgaaataactcaaaatcaagtttttgggacagagtttacttacgtattatgcaaaatacggttgagttgattgggaaaataccagttgtctaaaaggaaatcctccttaaaagtggcattgtttggtaaccctacgatgatcctacgatcatttgtatgagtcctgggataataaaaaccccatgcacaatgcttcctcgtagatactgccttaacagaacaaaaataaatgatttcttggggagtgggacactcccatcctaaaatatgatacagaacctttagacttgcaaggattctgtaggagattggaaccaattagaaaggagaaattccaagatggtttatgaattctttaaagtactctgtcagggggagtattggtccagccctgatatgctcgaggcttcaagcgcctatcccagtcgatctactattattggccttaccactgtcctcaccactggcctccctatattcctcccgggtaagtcattctggtggatagcaactgaattcaccaggggtaaccagggccggccctgaaaaaaaatgggcccaagacggtttt

SEQ ID NO: 389027 - DNA, 1336 bp, Cannabis indica
ttaaataattaaattttcttaatttataaaaaaataatactaaaaaaaataacaaagataagatataaaagatttgattgtatgacattctttttcactctaatagtgaacatacattaagggttcgtttggtatgtcgtataagggttgtattgtattaaataataaataacactatgtttggataaagttgtattgtattaattattactactaaaatttttaaaacaatgtaagttgtattatttgatatataacaattggttcgtattagcttgtcttataatatttataaagaatttggggtacgtcaacccaaatctccgacccggaccctgacccaaaactggacccggactcggactcgagacccgaacctagactcggatctggacccggctttggatccagactcatacccagactcggactcggacccaaattcggacccagatcgggatagagaccccgacctcaacccagacccgaacctagactcggacccgggcctgagacccagacccgggacccaaaccaaacccaaacccgagacttgggaccaggaccctaacccggactcagacacggacccaggatcgagactcagaaccagaaccggttccaaaactttggacccagacccgagactccaaacttagagacccggactcgggacctagacccgaacccgggctagggtcccggacccggacgcgggacttggacccgatccggagtttgtgttggggtcgagtttattaaaaatatattataattttacacaatctattgatacaagtcaataccaaacataatattgtattaaataatactaatacaaaattaaatggatataaaattaaaattcttaaaaaaaaaaaataagtcaggttggatttgatcctattcgggtatttgatctaacgagacaaggcaggacggatcattacatgatctggatcaagacggatcataaccggattagatccgacctgatccatttacactcctaatagggttgttattactcaatttttattggaaaatctttgagtgataattattgatatgtgttatttgtcacaaatccatttaattttagttgaaagtgctattaagatttttattcctatttttgtaaattgtattttgttaattatactatttgagtgatatataatgtagtattatctgatgtgcctatcaattagaatttctatttttctaactaaacaaaatggtaagcgtttagcttgcttaaatatttcatacagcaaagtatttagttcaggaaatttacatggtatactaacttttgctatttttttacaaaaat

SEQ ID NO: 389028 - DNA, 1078 bp, Cannabis indica
aagaacttgacctcaagttcaaaataaaacccccctccttttcctttattttaataaaaagtcctctattcatgctcaatccataaaatttttaaaggcattccctaaatctaaaagaaatctacaaaatgtttgtgatatctttgttctatacctttgttttgtttgaattggaaggagtggaatttctagcatgaacaagccaagcatacaacttcttgacaaatttctgtaccttcttgagtaacataacctcaattcttctttgataaaactgattactgaaagaaatgcatggtaatggaatgttaaatttttatttctgcaattggagaaggaaacaaaccacataccggtgtccagtgttaaagttatatgtatattattgtatatgagaaaaactaaacaaccacattcttgctgagatttggctaactataagcatcaatagaaaactagccaacatgatggctctttgatagactgaaataagaggatcttctatggcatagaaattcaatggttacaaattttgaagaaaattaaaatttcggtgcagtgtagctgtttggttttttaagaccagggatcttttcaacaatatttttttctcgagtaatttacggcaaaactccaaaaactcttacctcactagcaattaacttccaaaactcaaattttggtggtaaaacccctcaaaacttatatcctgttagcatttagctatttctattcatcttttgcagttaagtgccacgttggctatccatgtgtacacaaggtattgtccatttggacacagtgtacatgtgacacaatttaattggccccgtaaatacataatttaaatataaaatttagattaaaaaatatatataatttgtgttgaaaatatatctaattggttgtgggaattatattgctaattgttatgtttctttttaactggttttgaaatgagaaatgtctaatttaaggtttctaacttttacggttttctttataagttttgaattgaattcttttatttattaattaaaattttaattttcaactaattatatatatattttatttt

SEQ ID NO: 389029 - DNA, 2143 bp, Cannabis indica
tgtgtgtgcgcgtgtgcgtgtgcacgtgtgtgaaaagaaatgggggtggctgggggaattaggttatgttgggatatatatataagtaaggttttttaaagatggttcgaagcccataaatgatttttttaaagcctttttgtgtcggttgtgcaccgacgctaatagtgtatataatagctttttatgttggttgtacaccgatgctaatagtgtatacatattttttttatatgtcatcttttgctttaatgtctattttagcgtcggatagataatcgacactaattaataattatttgcattggtggataactaaaataaaaaagtgtaggtttactttcgcgtcggtcaacaagtttgaccaaatgtgttgactaacgtaaaaacccctttttgtagtagtgtctatcaggtttgttccaatcttgacaaccttggtcgggtttgttgtgtcaagggaaagttctttgagttcttcggtcagaccaaatcccgagtcaatttacccaaaacaagggtcaatgtaatccccgtcttgggcataccttcaagtgactttaggtgttgtctccatcttatccatagtttggactctggaggtatttggaatctttttggctttcatgggagaggccttgctcgtccccctggagtcataacaactcttaatatacatatgcatacaattcatttaacacatattcaactataaacttttagggtaataatcctaactttcataagtttgattatttattcacgtaatacattatcgcatgtttatgataatacatatttagggtaataaacttaattcactatatttatgcttagggtaataaccctaactcacgatagatatacttagggtaataactctaattcacaatatatataacttagggtaataaccctaattcatgctttcatctaactgatcacatataattgtgccatctccctatactctatgtgcataattcactgccttacttgatttctaacgtataaggataaatccctaatccataggtgatcctgaccaagtgccgatattcttattcacaactctcaagtttcacacaatagggttaatcccaattcacatttcataaatattcatatttaagactctaatactgaaccaaataatagagctcaaaacaagatttccaacaatataaggaacgtcctattgtagttcattccagaagggagttcccgtccgaatactagcttacaataaagctaactgttgtccatcatctactttctttatcttgaaagcttcctccttgaacctcttgatgaagttcttcaaggtttccaaaggtagttacttaatgttggttaaggctctaacttcaaggtttatctttttggctgcaacgaattgtcttctaaaattggtctgcaatttattctaacaatccatagattcgggctctaactttttgaaccattctcttgcatatcctcctaatgtcagtgggaaacataaacatttgatgtcattgttgatcctcatgagtgtcataactctattgtatctagataggtgatcacttggattactttcacctgtatgcatggtcatttcaggcattctgtagttctatgggagttcaacctcaagtacatttttggcatgcggctctcgatcttcaaagtttgactccgagtcatctcccttttatctctgggagacccttgctatgtccttctgaaggatagtgagttcagcaaaaattccttcatttaggatactctcagaggctggagcaactttctttttctgttcaagacatgccctaaggtcttcgtgtttcccattgagtttttttcacaaattgatcgaagggtctttcctggtagacctcctctattttcccaactcttggtgtatagatatagtactcctctgatctccacagtcttaggggccagttttccctttggggaacctacaccctgtggacctttcccttttaggagattagaacgaactttttgtggatcctaggccatgtttctcttttcagatacggtcgtagggttctcctttggggtaggcctctttacagggtacttgatgggactaggctccctatccttctatttttggcctctatcaggccga

SEQ ID NO: 389030 - DNA, 1043 bp, Cannabis indica
ccacacatgtgcttgatgaagataaaagtaactaaaacaaagggaaacatatcatctagctatagctatagctagtacgtatcaataccttataccttataattcatttatttattatatatttaaaagaagtttacctgcccttacctaaataaaataatcaaggaaattaatgggtgaaaaatacaagtatatataatattatgaatgtagatgacatataacttaattctgggccatgtatcataaagagccatcccatgtgcatataaatataaataattaattatatttatataaatgtatgtacacagagaactaatggctacaagacaaagagcatatatataatataacattaaataaaattgtctctagacccatctcatgccaaaatagatagagaaaagggccacattacgtacagctcggccgcatgcaatacattttattcttttagtggttgccttcaattttacgtgtcctaaagttatcacagaaaaatggtggtgggcctatatataatatatacttcaatatacatatgtcatatataaaagaaaaacaactaataaatcagtcttccatccatttattaaatataatcacaaagagtacttaaaggctttagcttaattaactgaaacacagagcttacagtataagctacactcttatttatattcgtatcttaattttgacggaataattaaaagagcttagtacttattactttttgtcaatatgattcgatcttatttatatatataattataataattaagaagaggcttgggaatgaagcgatgtatatataggtgatatgtaagaaaaggtccaaatggttataagattaaaagagaggtagacatgtacttttacatgctcccaaaagtgttggaaacatttcagtcactgtcaaaggatatattgggaaacaagaaaaagaaaaaactactggaaagacaccaattaaactaacaaacacaaaagattcttatttttttataacctcatgttagagattttataacaatggaaga

SEQ ID NO: 389031 - DNA, 3322 bp, Cannabis indica
ttatattatatatgaattttacgttttcatattttttatgtccggtaacagtggaatacggcgtatggcctatagagtcactttatcatggtttagtatttttagaataatggagcgatctagttagacatttgaaatatcggggttagggggagttatggttttggaccattttactcctaagctattttgccatttaaaactttagtgagggccttttagtcatttttattgcttggctaggtggctccttttttgttggtagctggacactaaagaaatagataacttgggattacctttagttggaaaaagaaaaaataagaataatcaataaaagacaaaaatagaaaaaaaaaattgggtttttgctctccctctctcttgtttcgtttcaactaggaaaccaggggaaatcaatttgttttcttcaattcagaagggttttaacaagatttctagaggcgtgattctaaggtaagcactaactctagttcttctttgattttagtatgttttgtttaggcttaaacatgcaattcgttgatttagttgttgtttaggttagatgagttttgttgtagttttttgaggttattttaaggttgtctaagcttgtttgattggaatttgatgattgagtgtagtgttgagcaagtttgagtttaagaactcaaacttggtttaataatggtgatttttgaattactatgtttgtatagattctattgcttatttttggtctattatgacgtgaataggtgctttggacagtttggagaagtttagaaattaaatggttgagatgtggggttttggcctatttctgctgtagaaacacatgtcatttttgagaaaacggcctatcgttttaccaggcaaaaaaatctaaaaaaacaacctcccatttttatagtgggggattgccatttttttgggtacttttttccgaaattctatttttcaacgttttctcaatatttaggttttaatcacgctatttatcgatagaaaaacttttagtttcaagtttaagttgccaaaaagtagtttagtatatcgcttattagttttgcgtatgttatgacttaggggcttgtaaaccgtcgagtaacagttccactcaggttgaccggcacacctgaattcgaaatcggggtaagattagcataatgatatgcatatgtgattacaagtttagcgtgcatgattatgattgcttgttagattacattgaaatagcagtatcagtatacatagagttatattagatactgatgaatgtatgtttggcttaagtactgattgatgctatcacatcggtacgactagagtaccgagtataggctaatattatggtcaatggtattgtcgtacaaacgttctaaactcagtacaagtgggacgcgggtagggttatgattgggtgtatgggcgcctaattataattcggtttatgttatgatatgattatgcttttcttattgagtttgtcgactcacggttattgtttacatgtgtaggtaagggcaaagctaaggccgagcagtagtgagtgcgagcaaatgaagattagacatagagcgtttgatcctcagggctacagagtttattttgaatagccgccaggcgacaaattttgtaattaatattttgtagcagttgtaacttttaaaatacaggattccagtttatgtaaagtttattttatttaattaaaagtttattaagtaaaattttgattaaacacaatttccaaccaacttattgattagttcggattgcacaattaactttaaatcacgataacaggcatatcctaataaagtgttccaattattttttcgactggaaacatgattaaattaaattaaaaattgtaaaaacagtggcgggatagaacctttttataatattatttacctttcaagaaataattgacaatgccaacacaacttaatataatatttagttatcattatatcatataatatattatattcggtgagcacatatataaattatcttactacttaattaaaatcttgacataaaaaaattacacagatatttggtttaattaaggtttagacaaaataaaataaaataaaaaacaatgaatacacacatttacattattgaaattataaaaatttatacgagaattttaacttattattaatatgaataggaaaatttcatttactattcataaaaaagtccctattagaaaaatcactttcctaataaatttatactattttatcttaataattccacattatatccaaaaaaaactcttcccatttattttatttacaaaacttaaaaacttaaaaaagttttttctctctctacgtctctctcatcatcccatccaaaaggagccaccaccttctccctctatttcttcctctagatccctctaattcgcccaaagatcctactgccctcaacccacccgatcctccgtggaagcccaaatgtctgccatggaagcgtcccctgtctccagtcctctgtggaagctcgttgaatacccaaaatgtcccaccacaaagttcagaggtcggagctcgtggattaatgggtaagtgtttttaaaatatttttttaaataattataaagtatactctacttttcagtagatttatgtggttgttgtttgtatttattttattttgatgtattcttcgctgaaatcgtgagatctagttttcttgagtattctgtgtgtgcataattttctcgatgctttatcgattcgttctcgatgcaaatgttccaaggtcaaggaggacatttatggacagttttttgataggttctcgataggttatcgatagttcaagttttgtaaaaaaaagcttagaatttgtttattatcgattgattatcgacaggttttcgatagattatcgatatgagtgagaattctttttattgtcattatgttggttactctcgcttgattattgataaattattgactggttatcgagaagttcttgacatgttatcgatagttcaagttttacaaaaaaaaaaaagaaattttgttattatcaacgggttattaataggttttcgataagagtgagaattttattttgttattgttatgttgattattgttgcttgattatcgatatattgtcgacaagttcttgataggattaagaattagttttttagctgtcatgtttggtgattgtctactgattatcgatgggttctcaacatgttctcgataggatttagtattgcatttttgtttcatgtttacattttatttctattattattgtattgtttaacttt

SEQ ID NO: 389032 - DNA, 1790 bp, Cannabis indica
ttacttgaactcacaaaattagaattttaatggtaaaatttatttagattttattttgttcttcacactttcatccaaaaattggtatattagactgcttacgtgtacacaaataacaaatgtatatgttctaattttaatgttcacgtatattattattattattataaaaataattaaaattaataaaataaacaataataataaaaaaaaaattaaccttttctccttttttcttcactttctctagaaccctaatttcagcctctctctctctctcaagaccgaaaattgactgttgttggcgtcgatggtcccaggggaccccaaaactcagttctctactttcgaaaacctaagaactcgaccccctctctcctcctagccatctttccctcgctccttctcttccatttttcaggtgcaacaacggccaggctagacagtcgtccacggtcgtaggtggtccaacaggaccacaggatcgtgttgcctcagtgagtcacttcttgttgggattactgctccggcaaaggggattggagatggatagatggtgttcccgaaagtggtgatggtttaagcagagaactatcatcgctcaagtgtaagtcttttttaccttgggttcgggattttgatttggttgtgatattagttttaggttttgtttgtagttttggagtttgattttgtttgtgttttacggtggtggtttaggttttgttttgtgattttgggtggtggtttaggttttgttttgtgattttgggtggtggttgtggtgttttcttttatttttgattttaggattcaagaagtggtggtggtggtggttatggtggtactatgctccatggagatctggttttgggtagaaggaggaggaggaggaggaatgtcttgatgcttctagagaataaggggaaaaaaaaagaaaaagaaaattttttttttttttttattttttttttgtaatttattttattcattaaaattaatgtctaaattttagatattttttacaaaatcttataatatttaaacaattaatattagtgtacccctaaaaacgtgccacatgtacactagtgtacacgtaggcagtccagtgtagcacttaactaagatttttggatggaagtgtgaagagcaaaatagaacctgggttcagtaagttttatcgttaaaatttcaatttttgtagtgaagtgttaaaaaaatatatcgtttaagtaattttgctgccaatatccttttttattttggttatttaagattcttgccccttgaagtatgttatatgcaagatataatttttgtgctaaatattgtacaaaagttgagcttgccctatatttagcactatttagtatttccaattgagttctaatacaaaagatgtaaactaaataaaaaactcaattgttattgatgttctaatattttattggaaaatatatacatatatatatctaaaaaaaattattattaatatacggtaaatatttactgaaatttttagaaaacaaattatttaatatagaataattaacaattttgttccttaaatttttaacactacttgattctgccccctaaaatatacggtttgttaaaaattttccttaaaatacaataattacataattatgctctttctattaggttttgtttcttttaccgttaaaaattagtctttttaccccttgaactttgaccaatacaaaattttatccttttataaaaaaaaattattttaaaaactataattgttatcccaatttttg

SEQ ID NO: 389033 - DNA, 1238 bp, Cannabis indica
attattattattattataatgaaactataaatatcatcaagtgtttgatgcttctcaaacaaaaatcttaattaattgatcatttcaattttaaaaaagaaaaacagagagaagagagtaaaccatgaatcatcatcaagttcgaggtatgtgctatattttacatatttattattatactatatattattaattcataataataaaaaaagaacaagagtacgtttcttatatatattttttttttctatagattgggcaggacttccaaaacatgttgtagaattaattttggagaaagtggagacaagcatagatttttcaagtttgagtaatgtgtgtgtgtttcatggcattctttggccattaaagacaagtataccaaacacaacaaaatgttgcaccaccattatcttccaatgcttctagttcctaaccaagaagaagatagttggagtgtatacaatgctattcataataataatttaaaactgaagttatctttattatatagcaaacgttttaatggatcttcactaggttggttagtagttgtgaatgaagactacactataacacttcataaaccttattatttcatatcatcatcatcatcatcttcaaacccactaactagtcatcaagtaagtcttccatgtttacttcctccaactctttctcatttggaggcttatttagaagaagatgaatattttgatgataatgaagactactattatgcaggaaagcaatatcatgtaaataaggccttaattacagctagtccattattaagcaataattataataatgagtgcattgttgttgtgatatatggagaaatatgtgaattggcttgcattagatatgggaaagacacaacatggacaaagattaaagataatcaatttgatagagaatttgaagatgtagcttattataagggcaagttctatgctcttacattcaatggaacacttgtatgttttgagtacccaaatccaaatgctgaaataacaacaatttctatggagttggttattgccccaaatcttcgaagactcagaggagatttatttatacgaagatatcttgtggtttcatcatttactggagagttattgtgtgttgaaagggaggtattttggaatgaagattgttatgatgaatgcattaccaaaaattttagagttttgaaactcaatttggatggagataataggtgtggtaagtggtta

SEQ ID NO: 389034 - DNA, 596 bp, Cannabis indica
tatatatatatatatatccactttgctttcaaatacacttatatttatatatacacatttatccaattaattaagggacatcatattctctcaaaaataaaaaaaaattaacatcattttcttattctacttcttttttatgcatccctctttctgaaaaataaatagtgataataaactaatttgaaagaactttgttgatataagtgagacgggccttagctttcttaaaagtattttcactaaacaagtttagagaatctataatcatcttatctcgtttgttgcttaggttcttaaaggtttttatttctccaactcttcctttctcctcaaaatgaatgcatttttccttatatcctttacgcatatagttgatgtaagaaatcaatatttgttataagtaatggatcccaaggaggaaaggtttactattgacttctcgaatagttctacctctttaagcaatagttgattctttgatgaattggaatagtatttggaactgagtattggtgcgtagtgctttaaataaataagaagcagatgatgttgtctcatttgctaagatagctttatttatttttttttatttt

SEQ ID NO: 389035 - DNA, 3026 bp, Cannabis indica
agatgaggccttaccaacctttaccaagttcaaaacccaagttgaattacaactaggccaccaaatcaagactttacagtctgattggggaggcgaattcggatcatccaccaaccttcttgagcaatgtggcattgttcataggcttgcttgtccccatactcatgaacaaaacggggtagttgagagaaaacatcgacatgtagtggaaacgggtttaacactacttgctcatgcctctctacccttaaccttttgggatgaagcctttcgcactgccacttttctcatcaaccgaatgcccactgctgtcattcagcacataacccctctgcaaaaattgtttcactccccactcgattactccctcctcaaaatctttggctgtctatgctatccgaaccttagaccatacaataaaaacaagatgcaatataggtccacaccttgtgtgtttcttgggtatagcatgtcccacaaaggttataagtgtatgtccaaagataaaaggatttacatctctcgagatgtcatctttaatgagtttcagttcccctatgccgagtctcacaaacgatccattgacactcattttcatgttcacacaccaggtttaccacctctatcctctctacttcacactcaaaacctgccacctgactctcctatgcctcaatcacctgctcaatcaaccgacagtaccccaaccatatctcccagccccaatcacactgctcttatcagcagcagccaacttgatgatgttgctgtacaatctacttccaacttaccccctctcactacaacaacacctgatactgttaccactttacctgtgaatactaatgtttccaatgcagataacaccaggcctaccaatactaccagcaacaagctctcacccaatgataacacggattaaagcaggtatttgaaagcctaaagcatttttgcttcctgcactcccggaacagtaaaggctgcacttcaaatgcccaaatggaatggtgcaatgactcaagaattcaaagctctcaccaataacaatacttggattttagtcaaacttcctgccaacagaaaacctattggctggaaatgggttctaagagtcaaacacaacaaagatggctcagttgaaagattcaaagcaaggttagtagcaaaagggtttcattaacaagctgggttcgattttgatgaaacattcagtcctgttgtcaaaccaataactatccgagttgtcttaaccatagctgtaacccggggttggtcaataaggcaattggatgtcaacaatgccttcttgaatggagagctccaagaagaaatttacatgcaacaaccacctggttttgtcagtaaagagcatcccgactatgtatgtaagctcaacaaggctatttatggccttaaacaagctccaagtgcttggtttgagaaactctctacagtcctaatcaacatggggttccactcatctcaagctgaccactctctattcattaaagtcacaaccacatactgtatctacatactagtgtatgtagatgatatattaatcatgggaaacaatgctaacgttgttaactcaactatttctggtttaaatgaaacatttgctcttaaagatctcaggctgatggattattttttgggaatacaagttactaaaacagagtagggccttcatctcacacaaaccaaatatctccaagacttactcacaaaggctgaaatgcagaatgtcaagactcaaaatactcatatgaacagcgatttgaaattgtataattatggaagtgagccaatggaagatgtcacactttataggtccatagttgggggattacaatatgctactataacacgacctgagctttcatactgtgtaaacaaggtgtgccaattcatgaaaacaccattacaacaacactagatgcctgtaaaaagaatacttcgctacatagcaggcacacttgactacgggctacatcttcaacctgccccagatttttccattgaagcattttgtgatgccgattgggctacaaaccctgatgatcgtaggtctacaaccggttactgcatctacttaggagggaatcttgttgcctggaagtcacaaaaataagtaaccatatctagatcatcaaccgaagctgaatttcgaagccttgccagcagtgtcagtgaaatcagctggattcaaagtctccttactgaactgcacattcatcaacccagcattcctactgtgtggtgtgacaaccaaagcacagtacttcttgctgcgaaccctgtcctccatgctcgcacgaaacacatcgaaatcgacctatactttgttcgagacaaagtactgcagcatcaactacaagtgcgacatgtccctgctgctgcgcaaattgttgattgcttaaccaaaccagtgtccaactccaagtttcctgatcttagatccaaactcaatgttgtttctcaacataccttgagtttgaaggggctgttaagggatgtgatagttagctttttacagttagttagttgagtttgttaatttctgttatgacttgtttgtggcttataattcttgtgtatatatactctgtactgaactcaacatcaataacagactttcaattcatttcaatctttgtctctttccttctctcgttctctctctctacatctatgaaacataacaatagtaataatttttaattttagtttcatttgtaaaaataataagataaagtaagaacattattttttttttcccgagtaataggatcataaaataatgaaagggtgagagttgtgataatcactaactttttaattaaaaaatgctatattattattaaataataaaatgaagaaaaaaataatgatagaatgagaattatgataatgaaatttactgatttttaattaaataatgcatagaaaattgagataaaagaagagaaagagttaggaattgattattagatattatatacctaagggctcgtttggaacgc

SEQ ID NO: 389036 - DNA, 1023 bp, Cannabis indica
cgaataaaaggttgctataatggatttcatttatatgaactgactactctattcaatgaatgatatcttaaactcttgcctaaacgtgacagtgtatcagtttgttggaaaccttagaaataattgaatatgttttatttttatatttttacaaacgtattttcttgttattttttgaacttgtgtatgaatttgtttgaaccaaggaatttatttctgtttattgatatttgtagtgtcaaaatgaacaacccacacccaaatcctcatctgttacatgcctttgcaaataaactctatattgtgaagatgtctcctagttagagcatcacctcacacttgctcatgatgaacttgaagttctagaaagcaaatctactgggaattgaactattaaaagagcgatgggttcaatttactctcaacagccttccccttgagtataatagatttctaatatcatacatgatcaacaattttaactcatccgacatagacaagctggacgttgaactacatgcttttgaacagactttgccacttgcaagacgggctccttcaatattacaaacaagggtaaaaggaaaggtgaagatattaaggatgacacctctgacaatgctgcttctttgagttaaactttgagagctagaattaatattgaaccaacaattgaaacaattaaagaacaaatgagcagacatttgaaatcgagatgtcccagacttctgaaccattggaacgaaggtaatgcttttatttttaaatcatgtgttttagagaataaaaaatctatttggattgttgattctgcatctactaaccatgtttgctcttcattctagctgcttgaaacttgggatcacttaaatccagggaagttaaagcttaaagttgggaatggcaaattagtatcggtccaagctaggggaaaaagtagcctcaagtttcagaacaaattttcttttagacaatattttgtttattctgaattttagtagaaacttgattagtgtttcatgt

SEQ ID NO: 389037 - DNA, 1246 bp, Cannabis indica
taagatatataagtactatttttagatatgtacaaatgtcatctcatatatagattaataattaccagtattatttatttcgttttttttttttgatggaatatcttggtttttttttttttttttgcaataatatctgttgatagttgtttctctttttgatatgcacgaatagcatgaaaaagaaacactcaaccgcctggtattgttcatacctaatttagagagcttttatttcgcaggaacagaaaagaaacaaggaaaaaaaggtagagatacttatacaaaaaaaaaaaaggaaaaaggtaaaaataaagttatttttttgactgaatgttcttatttatattttcttttttattattttattatttaaatctctgattataaataatgattatttgagtatttttgagattgtatataaatgaataaataaaaaaagtcctacaaaattgaatatacaatttttagtttgataattatacactaaaatagtaaaaaggttttccaaacaattaaaaaaacgattataattttgtttaaagtaggcacaaatatttttataataagtaaactctcacagagtaaaattttagatctgtcactagttaagaaaattactatttgacaccttaaagtgttcaacaatatatatatatatatactgtgtcattcaataatgggttagtgatttttcatattaattatttattaaatcaaaatgtgtgagacttgatattaaaatgtaccattagtggtataccaccttttgtggtgcttgacaatttaaggtatcttttgaatcctctctaatggttgtaccattttggcatatcttttttatcactttagtgtagaatatattacttttaaatgcaacaattctaataattaataccaaataaatatattttgcttaaaaaataataaaaaacccctcacattttatactatttttaaactaacaactaataataatgaatttatgatataactatttatatatattgtcaacaaatattttatgatgatttcttaaaagtacaaattaaaaaaatggttaaaatgaaaaaaaagaaaagtcatgcactaattaattcggataaattaataattcaacactattaatgatgtgaaatttgatacatgtaaattttagtgtaaccttagagtagaatgttgtgaaaacttcacaccaatttgataggaaatggttgctagctcccatagagatactcttaac

SEQ ID NO: 389038 - DNA, 653 bp, Cannabis indica
aggaaggcaattgtcaattgggctttcaacaaagacagaatctgcatgtgcagctgctactttggcgccgttaaagctttttcttaaacgtctctttcacatgcatttgtcacatagtagtacccttgaaacaatttacaatatattttttaaacccctttctaaaggtcaaaaagctccagtaactcgtttaaaatataaataaataaaaatgaaataaatacacttccaaacaaataccgtaaaccctttcaaaaaaaaaaaaaacaaataccgtaaactctctattttttataatgtttcaaattcaattttattttattttattttttattaatatgtaacatatatatgtattgcctaaaaacatattacttaaaagatataaaaaatatagggaaaaaaaataaagaagttgatatataaaaattattaagactaataataatgtccctccaccaatttgacaaaattattcaatttcttatttacaaaatatttgagttttaggagggactggataataatttccctctacaaatttttttcatttatttatttaattatttttgccaatagagaattttattagacaccaaattttgtattgcactatcatcaaatataattcattgtagtattttttttttttt

SEQ ID NO: 389039 - DNA, 1502 bp, Cannabis indica
acaatcgatttatttctccatatatataaatataaaagttcaaggcgtttaattttgtttttaaataatgttattacttttgttgttgtttaaacatagatgcttttgtttttaatcacaaatttgagtttatataattttggtatttagatatcatatggtattcaataaaaagaaaaaagaagaaaaaaatgaaaaaaatttaaaactgttatatgaccaaaattgatagatgtttctttattttgtttttagatacaatttggtatatttttgtgtgataatgatagatgtttctttatttttgtgtaaaaatccctatatttttcaatttttattttttttattttttcataaacatgtttttattgcattttatttattgtgttttcttttattttatggggatttacttttatttatttatttttttttgtgtaaatttaggaaacttgttctgttaattaattaatagagtacataatataaaacttgtacactatttttaaaaaaaaattctactctacgataaaaaaaaaaaacgaaattaaaaatttaaatcaaaaaaaaaaaaaaacaattttagtaattaggagcggaaggccggtgaaacctgccctataaaagagatggaatatagaaaatgaaaataacacatttcctttggcgggaaaaatcaaatctagcgtgatctcgtatcttactctttgaatttgggagtgaccgagaagtgagaatggaagatactcgaagcgacaccgtcttcgattccctcaatctcaatcctcagcttttcattaatgaagttctcaataccgtcgacgacttggttgacgacgctttcaattacttccaccagtaagcagtaactccctccctctatctatatacatatacgtatacatctatatctatctatattcttatgtatgtacaaacctgtagtccatatgtatgtgtataaaatattgatcattaattttcggtatactccagacaggcttcatccaatctgaaaactgatggccccgataggtcactagatctaaccaaggtagcttcattttgtccttttctctttgtgttggttcgcgcgctaacgttttgggtataattttcgaaattataggcaatcttcctcgattctagggtttgcgagcttttgcctgttttgttttgtgttcaatttgttcggtatttattatttttgataataaaaatatataaaattcgttttctcagggtgttgctgtgattcacaaaatgataatttcggttttggataagcgactcgctatgtgggagcagtactgtcttaatcactgtttcgaagttcctgagggattttctttaccgaaaactgtaggtttcttttatgcaaatgatttgatttgcttatctgcttaagatgtcttatctttggcaaagaaagcttggagtattgtgacaactccaatataggttttcttttcatcattttttatttggaaatttgcaatttt

SEQ ID NO: 389040 - DNA, 986 bp, Cannabis indica
atgtttttaaacagattttattactatttgatacaaaaatattaagcgttattttttcgttgttttcacgttgtagctatagaaaagtaaagtaaaactaatgttttttctcattttcaattcatattatgaattttaccaataaaacttgaaaaaagtaaaaaaataagtgtagttctgcacaaaatgaatataatcaattaaaacaaacttttaaaacactttataaaatgttcctaaattagcctatcatggagtggggagcgacctaggagactggtagcgggaagcttaaccagtggcttgacacctccttgcactgggttatttgcttgtgtgggggtttcatcgtctgtgatgggcccccttttttccctttaacacacttttcaggtgtgttttatttatttatttttttgtttaatttaaagatccaaaatttacttgtagcaaatttgggggtaaatacttgcctccagtatagaagaatttttttaagtgttcttgtagactgagtttggtgagcttcatccccatcgcttggtttcgtggtcacccctttaggccattatgcctaaatgtccttttatgggagagtgttggcactttgagctatatctcgaccctttttgttgcatgcacacttgttataatggtggagtttattgccatttggaatttctcgacctctgtacttacataactttttcattgaaggagtattcactcatatagcagtctcgaccttttctcagttaccattggatgtaagggagcttttagtcccttaagcaacttaaccttttttgagatataagattttattggaggagttttggccccgtaggtagtgcccaactcatttcatgatataatgttgtactaggggagctttaaacgccttctactgcatttgcggtacttagagcgcatcttgaatatttagaaatttgtactcttttcatagaagcatccctcttatatat

SEQ ID NO: 389041 - DNA, 918 bp, Cannabis indica
gtgtcttgatattattggtcgtgcctattacatcaccggcccatttaccttatagtttttcacattttacctttcaataatacatgtaaggacccctcaaaaaaaaacatataaggaatcgtcctccttccccacccctcatagaaaaggactctctactaaaatgaataaaggttccattttcacatgcttcgatgttggagtagataatatgggggcatcttgcaccctcaaagatatagtattagtgcagtgtttgtctttctgcacttgaacatttttaatttttatttttttattataaaatataatgtaataatgtaaaaattctaaaaaaatttactacgataaaaataagattaaaataacttatttcataaggagtataaaaaacaggtcatatgcattataatgcatgcaacagtctaaactatattttcagttagtaacttataatgtctttttttttggattataattgggggacttataatgtaaattattcatatgttgaaaatacggtttgatgctttttttaaataatttatataagaatagttagtatttttgcatctaaactttttatattaccaagttatacctcctatagtatataattaattaataatatccatccaaatataaattttacaataatatgatcattctttcatattgtatttaattttattcactaaacgagtgacacattaattagtaattaaaaaataatatgcaaaataaataaatttcactatttttttcttttaatgattaaaaatctaaaactaaaaatataaagttttatataaaaaaaaataattttcttctattattcattaacatataaaagatgaaaaatatttaatttacatcaatttattaattagcatctaccacttcacttattcacgataa

SEQ ID NO: 389042 - DNA, 1422 bp, Cannabis indica
gagattacttttcattttagtctctaaatggtagatgaaatcatcaacccctgagctttgaagttttcctctgtgtaaattgctgcagaccaaatgaggaaaaagggtattagattgaaatggtaattacactcaactatatatatatatggtgattctatttcaatatttgtatagagagtggatgtgcttttcataacaatcattacttaataataagaacaaaattctattttaatatttgtaaaaagataataaatattgaaaagaaaaatagtttgagcttagtaattataccttggattgagcagagttggagaatgacacattttttattttccttttgaatcagaagaaaatcaaataagtttaggaaacaagttgtaagagatgagctagttatagctcattcattcatccacatatataattatatataatatatatcatcttccctctctgcttctgtttctatttttcttttttaataaaataaaataaataaataattacagtaaaataaattttcaaagaggtaaatacctgtactaactcttcatttgctttaagagagatctgcaacaaaagctgaagaaatgctttgagctgctgatcgttgattgagatatagaaagagaaggtaaggtagggttatggtatcggtgagaaaaatatgtatttatatatagggatttttgggtgtgaaagttcattcttgtccttggtaacattttttacttttttatttatttatttctgataaataaacaaccaaaggtagtaacaaagaggtgcaatttttatctcactcacacttaaaaaaggagcaaatgtggaggagttttaggtttctcttataaacaaatttcagaattggaaaattgaattttgtttggttaaatttttattttgcttatacttaaaaatataaaataagtagtacttacttctccatcgttttgatcctccaacaaactatcacggtaaatatctttctctggttttctttttttcttttttgtagactgaattcattccattttatatagccgtatttcgatattatgtgaattgtgatagtattttagttggtgtatatactgttggatataatctgtgtgattcgtgaaagaattggttatattaaggaccagtgatcacgattttgaagcaactttctgtagtttaatacctcttgatcagattcattgttcaagttaccttaagagttttctatttcaattttcttttgtctatcgtttgttgctgtaaatgaattcaatgtttttactttcttttgtttcacaactcttttatattctttcttttttcaatgttttcttttttgttataagtttattttatattgatttttgttctatttttgcgccattatttatggctttggcgccttacaaggct

SEQ ID NO: 389043 - DNA, 2113 bp, Cannabis indica
atcataatgaacatatttcatgatgataccttacccaattcgcaacagaattcaagttcttacaaccaagtcaagtttgtgcataacttttactacaaccaccaaaacacttaaaaccacttctaaacagtcctaaataaccttaagaagcttttcctaacctttataaacttcttcaacatgttatactacaaacaaccattgaaaactaacaaaaaccctagaaaactaacaaattttaggttaggttttaccttggaagtttggaggagctaggggttgaactccttgatcaaattcagcaagaaagatgcttgaaaatggtagaaatttctggttttcggccctggttcagaacccacgaaggagagggagaaagagaaggtgatgtggtattttttttttttactttactttttgcttttggttccttttcactttgcttttcctttttgttcgcttcctaagaagctagtcatcctaaaaaggatgagccacaaccacctatccctttcaaaaagagtgactaatctcttagggtaaaaagactaaaatttccttacttccttgttaagttatctcgtaaccctaggggtaaaatggtccaattctgttatttcgttaaaccttgatattctaagatattaaataatattgtcacataaaatactcgatacaaatttgtattcatgtgactaaatttccatccgacccatttcaattgttattaggcataaaaatgtgaaaatatgaaaattcacatataacatgcatatcacacctatgattcaataaaatcttcagaattgagaaataatattcataacacatattttcatgaaaatatggtctataaagcatagaatgcataaataatcacatagtcaaagattaattagtgctaagtgccccactaatcccatgtctaagtataacggtcattacaattatcccccgataaaaggatttcgtccctgaaatctaacctggataactctggatatatagtcctcatttcaaaatctaactcccaagtggcctcttccaccttgctcttcttccagagtaccttgacgaaggatatagtcttattccgtagaactttgtccttcctatcaaggatctgaactggttgttcctcataggatagatctggtgccaactctagggcatcataactcaagacatgagttggatcagacacatactttcttagcattgatacatgaaaaacattgtgcactgctgacaatgttggaggtaaagctagtcgatacactacttgtccaacctttttgagtatttcaaatggccctatgaacctgggacttaacttgcccctctttccgaagcgttttacacccttcattggtgaaatttgtaggaaaacatgtgctcctacctgaaactctatgtctcggcacttaggacaaccataactcttttgcctactttggaaagtaagcatcagtgccttgatcttttttgatggcatcactggtcttttaaactatctcaggacccaaatactttctttcttcgatttcatcccagtgaataggagattgacacttcctatcataaaacaactcatagggagccatccttattgtactctaatagctgttgttataagaaaattctattaatggtatgtacttgctccataaaccttcaaaatctaacacacaggcttgtaatatgtcttccaaaatttgaatcattcttttggattgaccatctatctgggagtgaaaatatgtaccaaacttcaactttgtacccatggccttctagagactctgccaaaatttggaagtgaattttggatctctatctgaaactatagattttggagctccatggagacacactatctccttaacatacaactcagcatacggatccactgtaaaggtggttttcactagcaaaaagtgtgcagactttgtgaaggttcgggtacccgcgggtacgcgccccttggggttgacttttggggacgagggcgggtatgggtttaaagattcatacccgagtcagagacggggcggggccgggggtgggggaatagatacccgccccgaactcgccccaatatgatatatgtata

SEQ ID NO: 389044 - DNA, 1291 bp, Cannabis indica
tattgataagcttctctttcatgttttgtatttttgtctttgaaattcaaatgtgattcggattatgtcattagatttgttattttttgtttattaattttagtttgtgaagagtgataattacaatctcctattataattttttcgttaacttctacacctgaaatcatatgtcgatatatgttttttcaattttttttcataacagtattcgttatagttacagtatcattcctgtaaatattttaaaatttttgaataatttacaatgtcaaaaacagagttcctaatattttattttaccacgcgcgttcaaaaaacttcaaacgtatttttggcactgtaaactattcgaaatttttcaaaaatttacagagattatgtagatgcataacaaacaccacaattaaaaaaaaatttggaaaaaaatatgctgacatgtattttcgaacacgaaagttgactaacagtaacagtaacacttttctttgtttgtttatctttgagttacatatggtcgatccctgatttgattggttcaaatcattaaagtcataacgaaccaatagaaaaatatacacataaaataaaaataacagttttatcgtctaatttaatcataagggaaaaactataagtatgtctgattttttgctgaatttttcaatttctttttcctccttaacttacttaacttactttatattaattatatttttattaattaaaaataaaaaagacaaatatacccttcaaaaatatataaataaaaaataattacatgttctatcaatagtaattagtcaaattaagtcattccgattaccttcctgatcatgtaaacaaaataaaataattctaattttctttctggtcagtttagtaaacaaaataaaatattgtttccgattattttatattttaacctgatttatttcttccattaattattcttattttaattacagtttagtaaacgtgtaataaatagagaatacaaaaaaaaaattataaatagagagataaagaaatataaagctaagaatgtaatcgcaatttcatcatttgttataaagaaattgcaattttctcattgccatcaacaaatattatgagaattaattttaccatcgccatcaaacttacaattttttaagaaataaggcttacgattacaaattttttttatgtatatttttatttctttttgggagtttacaagagaactaaagtgtatcgttaaatttaagaaaaaaaaaatagggtatattgcgtcataaatacctaatgt

SEQ ID NO: 389045 - DNA, 691 bp, Cannabis indica
atttgtgtgactcatctctcttccacaaaagtgtgtaccccttgtgcaagcaatctatcaacctcgtcgtcctcaagataaaacaagtcaatcgaacaattatttcgaaccttcattgtagagaaccgttgaaaatactacactaaaaaaatactactatttaaagtgcatattataatataatcataaatcttttttatttttctatatgagaaataatgtctttctcctgttagttctgatgtattatataaggcgcataaaaaataaagacgaagaaagttgttccttttttttttaatcatgggagattaagttgcatcgtgggtacattattgaaaaaaagaatgagaaaatgtttctgtttacccattaattaaacatatttataaaactaattttaattaattaaataaaaaaataataatttaacaaataaattttttccaaaaaaacacacatgcatgtgatgtttattcaggtaagtttttgtgactcatctctcctctataaaagttaagggaaatttacatacattactaacttttcccattttattactttttctactgtgacacgcttattgttacatttatactgttttttttcctctactgtgtcaattatttttcccaaaacatttcatcataataataaaaaataaataaaataatgagtagttagtgtcccc

SEQ ID NO: 389046 - DNA, 1175 bp, Cannabis indica
ctctctctctctcccaaatccatgtattctttttattttttttgaaaaccaatcctatattcaatctctatttcctctctttgctctctgatttagaggttagtttttttaaaaaactttaattcaataaaaatttaatatatctttgatttttgttttttttttttttttttaaatatatttatttaattttcaatgaatttttatttaaattttaagtatgtaaatgatttttttaaataaataaaaaaaattaatgagttcgatcaatgagatgacacgtagacacttatctggcacttaacgattaggtacctataaaagttccagaacattaacagaatgtatttttaccgccaaaatttttacttaggtatttatatgcaactgcgaacaaaacttagtaataagaataatgaaagccctcccatgcacccaacataacatatacttctgcagcccggttttccttttactttttttcctttgttttacgcgttcaagctgagagtagatagtggaattaattaattatatatctaaataaacataacatatatagcactatatttgtaatttttgaaaatgtcaaatttggtacacttagataatgaattatataatgaaatatgattaccattatattcacatgtctatatttcattcgtcaataatgaattattaaaagctttaataaaacataacatatacagcactatatttgtaatttttggaaatgtcaaatttggtacacttgcataatagatgatatatatgaaatatgattaccattatattcacatgtctatatttcatttgtcaataatgaattatttatggttttaataaaatataacatatacagcactatatttgtaatttttggaaatgtcaaaaatgggttcaatgacttattttaagagattccaaagatttttagtgacatttcactgtgtgtcactaatgtgggtatctagaaaagtaatatttattaacacatcagtgcatgtaactaaaaccttttagactctcactgcgcgtcactatagacatttagaatcttacatttttagactctaaagataacaaccacacccatagagtgttactgtatctacctttttctttttttaataattttcttgacagtggccacactatatcatttttttttt

SEQ ID NO: 389047 - DNA, 2399 bp, Cannabis indica
cataccccaaccataaccctacccgcaccctcgacggttctcaccgcacccttagcggtactccccgcaccctcggcaggactcaacgtaccctaggcggtactgagtcaagaacgtacaaacgataatactattgaccataatagcaacctatacttggtatgctagtcatactgtagtcgtactgatgtgatagtgttaaatagtacttaagccaaacatacattcatcgatatccaatataattctaattatactgataccgctattctaatgtaatctaataggcttaacaaacatgtacgctaaacatgtaaacacatatgcatatcactatactaatcttaccttgtttccaaattcaagtgtgtaggtcaacctgagtggaacagctgtttgacgatttacaggcccctaaatcataatatttgtaaaactgatgagtgacacgctaaattacttttcagagacttaaaatcgaaactaaaagtttccctatcgataaataacatggaaataccctaaatattgcaaaaatgggaaaaactagggtgccctaaaatgccccaactgttagactggttctgaggggtttcttggggaccaatcagaattctgattcctacatgtcccactaaattggtcgaccagttcagtgcaggaaacacaaaattcctcctaaacaattcaatttgaccctaaaatgcacaagaacttccagaacacctatacaagccataatgaatcatttacaagtactaaaacctcaaaaaacatagaaattcacaaatcaccattgttgaaccaaatttgagttcataaactcaaacttggtcaacaccacacacaacccttatatctaaccaaattaagcctaaatcaactcaacttaacctctaaaaacatcaacaaaacaaatcaaccctaaacaacaactaactcaatatttgcatgcttcaatctaactttacctatgaaaaacaaaggaagaagagttctaagttttaccttagttcttagcttccaaactcacttgaattccaactgaaagttactaagattgaaggagaaagctctggtttcttgatgaatcttttagggccaaaaataggaaagaaaaaggaagaaggttgttttcttattttgtcatcttctacacttaattatctaagtaaaactgatacaaaattaatttaattaactcaacattggcgagctgccaacacaagaagaggccacttaatcccaaggtcaaaatgactaaaatgcccctcactcatatcaaaagggtaaaatgacttaggggtaaaatggtccaaaaccataaccccgtctaatcccgacattccaaatgcctaactaacttgccttgctataactaaaatactaaaccataacaaatgtgattctattggccaaacatcacgttctaatgttgtcgggcataaaatatgaaaaatataaatttcatatataacgtaaataacacacctagaatttaaataaatcaccattaattcataaatcataattaataatctaatttcataattaagccctaattatctgctaatttccatattgaaattaaactgtctttacaattatctccccgttaaaaggatttcgtcctcgaaatctaaactgaacaactctggatattgagcccccatgtcggactctaactcctaggtggcttcctccaccttactgtttctccagagcactttgaccaaagctatggtcttgttcagaaggactttatctttttttgcctaaaatctgaattagttgctcttcatatgataaatctggctgaggttctaggttttcataactcagcacatgagtagaatttgaaacgtatttccgtaacaaagagacaggaaacatgttatggactgctgaaagagctacaagcaagattagacgatatgctacagtctaacctttttgagaatctcgaaaggctccgaaaacctagggcataacttgcccctttttctcaaaacgtttaatcttcttcatcaaagacactcgtaggaatacatgatctcctacctaaaattctacatttctggtttcagatttgcatagctcttttacctactctaagaggcaagcactctggccttgatcttttctatagcctcgttggtccattgtactaattcgtgacctaaatacttcttttctcaagtttcatccaagtgaattgtagatctgcatttccagccatacaaaatctcataaggaaccatccctatggtactctgataactattgttgtatgaaaattctatcagtagtaaatacttgctctaagagccttcaaaatccattgcgtaggctcgcaacatatctttaagtatttgtattgtcctcttggactgtccatc

SEQ ID NO: 389048 - DNA, 508 bp, Cannabis indica
gagagagagagagtagtgagtggggaatgaaggtgatagacaatgaaaggaaataacattattattggtgttatttatttatgagaagagaattaagggatgagctatgtatgttgacaagaaacaaaaagtgagaaactaattgaacaagagaatcagaaaaaaagttttcagtttctcaatctctcaatctctctcgggtcagaaaaggaggaaaacagttggcatgaaaaggtatcgaaagaaaaaattggagggaaaaggactcagcttgaagacaagtgagtagggagtagtgagtagtgagatacaccaaatttagaaggagatgaataatgaattgttgtggaccatatccttctcccttctcatgccaagaagcaacaccaagtgctttgtccaatcatgaatttatgtaccttaaccatatgcaatattaagagaggtttcatatggaattttatttatttctatatacagtagaacctctatttaagaatactctatt

SEQ ID NO: 389049 - DNA, 799 bp, Cannabis indica
gataagagtatagaaatgcgaaaaaagagaaatgtacaaaaatttagcaacagataagaagaagaaattcatagaagacaacagaaaatgacatatcttatcttcaagaagaacatgtatcatactgtctttatttaaacttaattgataaaataaaatatttgattcacctacaaattttgacggagttacatgtctctaacacatctctacatgcactactatattatatacatggatatttgaaaacaaagtaatgagaaaaaaaatataattaagctactgaagtaattattcatacaatataataaattagaaccaaattaaaaaaaaaaaagttcaaaaagtaaactaaaaaatgaaaaagttgtgcttggcaagtatatgcttagaagatcctcctaccaccatccctacagctacaaaaaggggcactataatgaccaagctcatcacctttccaacacttaaagaaagttcaggttttttgtttgtttgtttctttaatctattattctcatttgcgatcatcttcagtttatgattttgggtaagtttaaggttccaatggaatttgaagtggctgctgctgatgtttatggctgtcgttttgtcaccccaaccaccaaaacgacaatggaaggaatcaatatagagaaatggaaggttaaatgaagagagttcttcaacaaaagtaagggcaactacaaacctttggcaatgtctataagacttagtactttacattacaagtcttcttgtttttaatttttggttccattttatggataaaatgagt

SEQ ID NO: 389050 - DNA, 551 bp, Cannabis indica
tatatatatatatatattaaagcgcaccaaacttatagactgaactaattagtatattattaacatcataataaatcaaaaaattacttttcaaaacaaaaatggtaaaaaaaaaaattaataattatttctatttaatgcatattgatttaatatgtatttttttataatgtcataaagtattattgtaaataaaatttattaagataagataattttagaattaatttatattttaggtatatttggaaaaatctcattaaaattcttaatttgtggctcttattgtagctccactattttattttagaaaaatttatataacagactaaaaattaaaaaaataagtcaacataaaaatattttatttttgtgctttaaattttttattacaaaaatatattttcagtaaaaataataaactgttattttaattattttatagatgtattatagttagagatggaaattgagcggttaatgtacggggaatgcaatccccgcccccatccccactacctatttataaccccatccccgccccatccccg

SEQ ID NO: 389051 - DNA, 779 bp, Cannabis indica
ttcttttgttatatgtaaaatctgtaggtatatatgaaaattaacattaaaaggattggatggatccagttcaatctattacgtactcgacttaaaagattggatggatccgatccgataaaaaaaatgctaggtctgaaatatttgataaactcaaattaaatcaataaatatgtatgaaatacgaccaatatagatagaaaagatctaacattaaatatataagtggatcagatctagatagacttttctaatgaatacccctaatgaagatatgaaatttgtgtcatgaaatttaaggtcaaaatttcagaaaaaaaattaaaaaaaaaaagaaatttatatggccaagttatcaatggcaaaaaaaaaaaaaaaaaaaaaaaaaaacaaggaattatatgtgaaataagttacaatttattttataaaaaataacaaataaaaattcgttcaacactcaatatatgctattattattattataataataattttcactcgtagtaattattttagaattttactcctaaattattatttttttacaaagtatttcttgtgatctattgaaataattttttgttttgaattgatattattattattattaagaaacttccctaattaacatggaaaacgttgtctttctacatcatgcatggccaaattaagaacgttcataattgtaacattagtaatgttgactacttgtagtcaattggaatatataacacggctctactaatataatataatatatattctgttaaatttaa

SEQ ID NO: 389052 - DNA, 1875 bp, Cannabis indica
acgatgacgttcatcacaaatctctattattgtcggcgacaaaagggaggccactaatggctgagaacctgtctcacacaatttctctcaggcaatcatatttcaagacgaccggagtatgattgatcagccatcttctgactccgccgtcttgtgcctttaacttggtaagcactaagcagtcgagaagagggaggataagaagaaagagagagagtatcgagagaaacactaatttttaatttaaggtttttttttttaacttttaataattttataatatgtttttaaaaccatttttttaaaagggtttttaaaaccatttaaggattaattttttacaatttgtttttttttgtaaaagaattaaacgatttcttaaagtggttttttaattatttcataatattacatttttttaaaaacaattataatattacatttattatatttaaattatactattttaaagtttttctatttataacaatatactttttaagtttattaatcataaaattaaacaagatcacaatcaacaataaatgacaataaatgactggacagcaaagatacaaaaatgataattagttataagttattataaaaaaaaaatatacaaaaactaactcttattaatacaaagaaactacaatttttgaatctgatattacacttgaaaatatatattaaatatgtatcaatgttattacttatataagtaatatgttactaaaaccccatgaccattaattttaaatataaaaatcatccatatcaatagatacttacctctacaacaaaatagaaaaattgaacaaaaaataaagacaacaactaactaattttggtacaaaatagttaattttaatgatttcggacccccacatatatgtcttctaaagaagaaattgatagtttattttttttttttttgatttaagtgtttatatattgcaatcatgttttacctgggactcgaattcaggacctccaagacacacacacacctatggccacttgagctagcctcaagtggtttagttttaatatacttataatattttttttctatgcaaatttctcattaaatcaaaaatattttaacattcaaaatgcatatatactagcggtcgcaatacaagtcaagccaccaaaaaatataacaacatatgaaataaaaagaatcttactaattttaacttctattaaaataaattaaatttccttagtttaattatattatacataaacttatcaaatatttctaattttttgtttcaatacaatttatttaaaaatgtagggttactttgtcaataatgaagcccaaaaagtctctgacataatcgatgaaaaactaatcatacttgtaacaaatatatttgtgaaatcattcaaaggtaattactacaatacactatatttaaatttaaatatataaatctcgttagttttaaagatgataatttctttcatttaatgtattaattttatgttaagtcttaactttgtcaacgataaaaatgactaattttataatcaattcttaacgacaataagcaacaacaatcagaaaatgataaattaaaaagaaaaatataattgtaaaatgttgtacacatccatcagcatcttcatcattagttagagttagaaaaattgtaaaaatttggaatattcaatatttaatgacaacattacaactaacaaaggtaaatatttgtattttaaatttttttcaaatccataaatttaattttattactttacataaaaattatttctaactattatatataatttaatttaggttgtaaaattctgaatacaaagaaagattgttatgacaaatttatcgcaatcattttacta

SEQ ID NO: 389053 - DNA, 618 bp, Cannabis indica
tgggttttgaaaatggaaaaaatgaattcttgggaaaaatcccatgaaaatcgcaaaattggtggtggctgtcaggacaggctgcatggagcagcccaagaggctgcaaatcatgtctacgtgcgcgcaataaggggaggacgccgaggattctcggcggatgcaggatgcagctcggcggacatgtagggtccaggggccaggcgcacgggttcagaaaatgcttctccgaggcacacgcgcacgtacggcttccttgtccgaagcacctagtgcactcgtgcacctagcttcgacagccatggtttccaatcttccaaaattcataactttctcaatttttatcggaattaagttccgtaaaaacgaaaattgcttaatttttcacaaggaatccaaataaaatattttcaaaaatagaaaaaatagttttcatggaaaaaaaggttctgtacaacacatacattcattaattaacacataaatcacatgaaaccatccaaatcaacacataacatcgttttaattcatattttatgaaagtaaatcattaccatggctctgaggccagttgttggaaatattttaccagaatcaagatttactaccatgtatgtt

SEQ ID NO: 389054 - DNA, 1279 bp, Cannabis indica
atatatatatgtatctatctctctcatatacccctggacacacacatgcacaaagttttaatttttcagttgatctagtttacttaccctacataacttaatacgcataactgagcttcatttatacctttaatttcactacaaaacaaaaggctatccttaaaactaagaaagttataatttggcattcaataaaggcatgcctttgaatttcttaaaacccgtttaaatcccccagaatccagataattgacaaataaagccagcaataaatccaatactcaaagtttatacatgagtacataactacatatatataatgttatatttaaaaaataaatacataaataaaagaaacaaacccctctttagggcggtcggtagcagaaacgggctcatctttggcggtgaccgcgtggttaaccggcggtggctgaggatggatagaaaaagtctggaaggcggatggagtagggtgaaaattagggttttcgtgaggagcaaaacgatcattgagctgaggaggcggagggtgaagctgagactgagactggtgctggggctggggttgttggtgttgctggggcgcagtggggtgagctcggaagatgaaatggatctggtttcggatgaaatcagccttgtgggaaaggtcttggcctagcttcttctccagctcctgaacaaggtcgtttaaagagttgattccgctgttgttggacgattcctgaattagggtttgcagagcctgcgaaatttcctggtccgttaccatttctacttctcactgctttcatatatttcaccctctttctctctctctctctctaaaagaaaagcttatctctctctctctctcctcgatcttacatttctttctctctctctccttggtaatgacaatacagtccacaccgtatgagttttacctggctaccgcaactgttactgtttgatttgtgaaggtctaatcaatatttgctacgtgtcctaaagagcatctgtattgggacaacactcattcttgctaaaaaaatattgttattgggcactagtactacttagtaccttctaaacatattgttttaccattggttagctataatttctaaaaattattaaattaaactatatgggacccgatacttagttggaccaacaacgatattgaaacataggaaggtgtttgacactactggtatcttttaatatttctcgttgttaaatacacacatcatcctaaattttttttttaatttctctctcatccactttgaaa

SEQ ID NO: 389055 - DNA, 989 bp, Cannabis indica
ttactcataaaataatgcatgctatagtataggcattgtagatttttttttttttctagaatagtcttattatttttattttacaaaaatactttttgaagtcatatgttaacatgttattttatttattttaaataaaataatataattttaataaaaatattattaaaaaaattgagttgtaacttttttttctttgaaatttaattggcattttacagatagaagaactaaaagttagatctcgtagtcattataaaggataaagtctagtatacaagagagatcaaccataccggtaatattgttagcagccgcctacttaactatattatggaccgtgaaattacaaattaaaataaaataaaaaaatataacctaacataaaagtagagagatatttaaagtacagatgtaacttattaaatatgtagggatattattttgtcccgtgatggtacttttacggaatataatccgtggtacattggatgggtttcacggtacattaaatgagtgttaagggtacgtttctacattttaaccttaattaacccttgatcaatctcagccgtcagatcaaataactctatcatctgacggctgtcgtacatcacggattacaatccgtgaaagtacaataacgtgacaaaatcatatccctaaatatgtatgtgttagaaaaaaaatatggtatatataaatatatggtgtggggttacaagaatatggtccaacaccaaatatactattatattttgtttctattccaatcacaaaattacactaaaaataatatttttattgttataaaataacaatgtaacacaaaacataactattaaaaataatagtagaacagcttaaaaacaataatggaacaacataggaaacttaacatggtatatagtataaaaaatacacactacttttgaaaaaattaccctatagtaaaaagaaaaaaataaaaaatttagtttatggtgtaa

SEQ ID NO: 389056 - DNA, 466 bp, Cannabis indica
tgattagtattatggtttttcttattaatgttctgatctcccaacagccctttggtcaagttcctgcttttgaagatggtgatctcaagctctacggtacaatttcaaatttattattcctcaaaaagttttctttttttttgttgttataaaacatgattattaaattgtttatatttgcagaatcaagagcgattacgaaatacattgcgaatcaatacagcaaccaaggaacagatcttgtattcagagacccaaaggaacaggcgatcgagtctctttggactgaggttgaggctcaccattttgacacggctggatcgaagctgaactgggagttagccgtcaagccgaaaatgtatggcaccgaaggagaccaagccgtgatcgaggaaaacaaggttaagctggctaaggttctcgatgtgtacgagaaaaggctttccgagtctaaatacttaggcgg

SEQ ID NO: 389057 - DNA, 1102 bp, Cannabis indica
aacagcaatacaatctgtctcaaatagcacattagacaaattcttcgacttcaaccaactaaggacctccttaacgctcaatacttcagccacagccgggtgacaagccccagaatgcaaagaggaactagcttcgattaacttcccatgacaatctctaatgaccatgcccgtaccatattgagttgttgcctcaaaaatcgccccatcagtgttgatcttcagcttcccagtaggcggcttcacccaacaaacattgcaaccaacaacagtagcctcaaacaacagctgttcaaacctgttctcttgagccaacagccaactagaatgacacgaccttgccactcgaaccacatctgcagcctgagaagaacgatcctgccaaagaaactcatttcgagctttccaaataccccatgctaccatcaagagctcatccaccaaagccactctacctcctgccagaaacgccttaaaccaatcggcgaaggtaatttctgcagaaaaatgcaaccccacacacaacctatgcctacatgtgaaagattataataaatataatggtgtatattttaaatagacatattctcgtatctattttcaattagacatgttaatgaaccgtttaataaacataaacctcaaaagaagtcaaaatcatttaagataaatccaaacacttttgttttttggtgcgagtttagacttagaaaagaattaaccgtctataagctaagttaaaaaattagcgcctgtggccctgtttggctaattaaacgatccattttagctaagtcaaagagctctatggttatctttcttgaattatcttgccggaaccattttgccaccggcggtaatcaatcatattcatattacaaggtaaataagaatcttcccaatatcctttttgcctctctctcaccacatcacaaatggcaagaaaatagaacccactttgtagagtcaacaaaggatgaaaacgcctatatttactctcattaaggataaattgcggcataaatactcaatgttttcgattttatacacttaaatatctaatgtttatttttggtggcaaaaatacttaatgttacaattc

SEQ ID NO: 389058 - DNA, 1069 bp, Cannabis indica
aaccaatttggttgatattagaaatattattatataatttattaaatattattatataatacactctatattttattttatttttaaacaaacatataatgctactccttttgtttttcttttttcttttttgaacaatgcacttcttttttttttaacaagaacaatgtgctctttttattagtaaaatctcaaattattttcttttgttattgattaaaaaaatgaatatattttcatcctataaatatataaaggcaccttgttcattataaatattaaactaatttattttaaattttttttttcatgtttacattattaattttttttttttgtattaaatttacgtatttaatttttcttttcttttatagttttttacaaatgaatatttttaaatatttgttctttaacatgaaaatttatttttaaaataataggtttttttatgtaagaataataggtttttttaaaaataaaaaataaattaaagtaagtataagtcctaagaaaatatttatgttaattttattaaaaagtggggtgccttattaaataattatagtaaaaaactaatatgttcacaaaaaaaaatattagcttaggttaataatattaatgttaaagataaggagtaaaataatacttactttgctatatataaggtaaaataatactatgttgaaaataatacttgttttgccacataggttagggagcaaaacaatatgtcaaaaattaaagagtaaataatatttgtggcaaaattcaggaaacaaatccactaattgttccaaatataaaatattggtataaagttcaaatttatacgtacaccactatttttattattattattttgcaaatctaaaaattaatatgtgggaattattcacatcaataaaacaagatgcacaatctcgttcatgtatattagtaataatttttttaaaaagtaattgtaactaaaagaagctgaaggagaattacaatggttgcaattacagcaagagaaaggagaacttgaggcgtttggttgggaggaatgaaaatatagaaataagaa

SEQ ID NO: 389059 - DNA, 783 bp, Cannabis indica
ttattattagttacaggtgtgtgttgcactacctaaatataatatcttattattaattagccatattttttttatttaattatattaataggtatatgaaattgacgagtatgttaaatactcattatttttttttttgaaagaaaaacactcatatttttaacatttctatatcaatgaaaaaacatttctcatcgaaaaatgtgtcttgctttgatttgggaggtgtgttttatttcccgaattttactgagaaaataataattggatacacgtgcatcccatatacacatagcatgcaccaccatatgtactgcaagaacccacttaacacaattagtggactttcgtatgtgaaagagaagataagaaaatgttggctttcactatcaagatttatattgaccgaagcactattaaagtttaattcttttccttttttttttctttgtattttctttagaaaacatttaatctattttgatgcattggactgaaacaaaaagaatattgctatcagatattatatattatgctaatgctattttgttaataattaaatttattgaagccaaaagtttgtccaataaaaatatgtatatagcactactataaaaattatttttagagacagttttttaaccctttcagcgtcggttttggcaaaattcgctaccgacactgatcagggcgacgttgtagggttataaacgaccgacgccatctatacccctatagcgtcaattattagctaataaccgacaccatatatgactgtatttc

SEQ ID NO: 389060 - DNA, 1312 bp, Cannabis indica
tgaaagaaagtggagttggagtcagattgcttagtagcagtacaagctattaagaaagaatcttatcttttaactgatttagcacattaataaaaattatatatttacttccaaaaagattacacgtgcgtagcacgtagcacgtgttgttgcaactagtattatattaaatactaaaataatgttggactacactagtactagctagtcttcgatccaatgtagctacatttcatctatgtaatggagagagagtacaaatatataaggccgttatataattaatattattgcaataataataataatatataataatgatggaaataaaataatgagtagaaaaagcaaaaatgatgtccatctgcttgattttctccatatccttatctagtatctactactaacatatataacaaatattaattagctataataaataaattttaattaaaaaattcccttaattaacattaataaaataatctatattattagaagttttaacgacgaggttggcacacatttcaatttctaatcagaaatagattatgtatattattaaaaaaatccctggaccctagcctagccagcttatacgtaaataaataaaaattgaaaaaaaaaacaaatatggaatttccattgtatcgatcgatctggcaacatactatggggtgagtgaagtgtcgtccgaatcaaattcttgatgaaggtagtttttttttccttgaagataaagagaaaaatattaattatacatgatatgatgcatatgctagtactttatatactttatacataaaatttattaaaattactgtttatgagggtttaattagctttatttttattttagcccatacatagaaaataatatatatgcgacgtttgataatatttttattttattttttaattttatttaagtcggatccgaagctgatgtcgaggtccgggtccaggatcagagtatagggacaggtccaggggtcggtgtctaggttcaggttgggtctgcattcggggtcgaggtctaagtttggggtcgagctcgagtatggattcgggtctagggccaaagtccaagtcccgatctagagtcggggtcgggtccgagtctgaatccgagtttgtgtttggattagggtccggggttgggtcagtactgttggatctagatttggggtctaggtgtgagttggtcgaagtctaaaagattgaataagaaaaaaaataatttaaaaaaatattaaaagtgatttttttttattttaaaaatttttaagattttaattttaattaaaaataa

SEQ ID NO: 389061 - DNA, 1048 bp, Cannabis indica
catgtacactgtgtccagtccaatatgtcacttaatacctaaaatggacggaagtgttaaattgctaacagaacacgagtattgggtttttactgcccaaatttgggttttgggggttaagtgaaaccaaaataaaagttttgggggttttgccaccatttacccataaaataaagaaaatagaatttgaatgatatattttaaagagtaatttgtggcataaatacataagttaaactcccagttgcaaataaatacctaagtttaatttttggtagtaataatacctaagttataattctgaaactctcataagtacctggatgttgagtgttaagtaaattgccacgtgacaaattctgattagtcaaactcattaaatttttattttcttttaaaaaaattagtttaaatatatcaataagaaaatgacatgtaaataatgacttaacatttaatggtcaggtacttacagagttttagatatataattaggtattattaccacaaaaaattaaacttaggtatttatttgcaatcgagagttaaatttacgtatttatatcacacattgctgtattttaaaagatagaatagataaactattgagagtgctaatgtgagtgttcttagaaaagtataaaaaccaaaccaaacacatgaataacattcactccaaccaaacaccgccttatttctatttttttcattctagaaataccttcaatcccattcgtccaaaaaaaaaaagaaaactcacgcgcattgccagcgtggcaaatcattccctatataaacctgaatctgcaccaaattcaaaatccaaaacagtctttccctccaaaaaaccaaagaaaaccttcaaagtttctggcaagagattctcgattcctaatgaaagatttaaaagccaaattttgatttaactccaaagaagaaaagggtttctcggaagagaaaattcaaaaagaaaatatagggggaacacgactgaggcattttttcacattgtataccagtgaatcaccataaccattgcaaagtcatt

SEQ ID NO: 389062 - DNA, 795 bp, Cannabis indica
aaaaaaagtattcttcaattttttctttattaagttgtctaaaacctgaggtggtagctttctgtcaccctgagccaaggtgggcgaaccttgcacttccagcccacccagcttaagaatcctaaaaaatctttttaaaaatataaaatatttttgataatttttaaaaataccatatatactaataaacgcagttaattataatttggtcatctaaaacccatttgccaaaaacttaattatttctttgagattgtttatcaatttgttaggcatgtacttgtaattgatttcataaatagattgtcacatatgctacataactaggttaattaattaataggtgggtttttattataatgcacaacactattaaattatgacaataaatctaaacaaaaattattccacttatcaacaaaacaattttaagttgggatttggaattgccctaaaatttgaatgattctattgaaatagaattaatcttctaattaattaattttaacatatagtactttgccgggacaaaatttcattaataaatagtataggatttttttattatatattatgaaagtataacattatataatttcatcatggaagaattttggacaggcatataaaaaatcagataaataaatcatcactatataattttgtttgtttgtgtatatatattgcaagaatctatatttataaagggttcgaattcgaaacatctctcaaagaaaaagccaaagaaaaagtatttaatacttctattttttttatttaaaaaaagaaaaaaaa

SEQ ID NO: 389063 - DNA, 1757 bp, Cannabis indica
tatgcaggaagacctagataagtctcatggcaatcacatatcggcattcccaaagtgtggctgaaaaaattctttgcatcagttgaagtgttgggagagaaagacatgattgacttgttggtgttaaggaattgtcctgaagcttgatggtagacctctaatatctttttgattgctaaagcggaactatgattcgcatggcagaataaaagactatcatcagcgaataacaagtgagatactgacggagcgtgtcttgtaagttttaatcccaacaaattcccctcttgttcttcatggtgaagcaaccttgagagcccttccgaacaaattaaaaaaaggtaaggtgataatggatctccttgccgcagacctctagtcggccaaacattgccaacaatttctccattcaactggaatgagaagctattggatgataaacatcgcataatgagagagatccattggtgtgcaaaccccattttctccatgaccgcagacagataatcccattcaactctatcaaaagctttgctcatatcaagcttgagggccgaaaaacctttgttaccttgagtcttatgtttgagatggtggaccaattcaaaagcaaccaaaacattgtcggtgatcagacggtttgggaggaaagcactctgattttcggatatcaccaaaggcaaaacatctttgaatcgaagcactaagactttagagatcaacttgtaaatcacattacaaagactaataggtcgataatcccccatgaccttcggttttttaacttttgggattagtgttatgatagatttatttaatctactcatatcatggccttcattcaacacaccaagtacgacagcggtaacatcagagcctacaagatcccaataattttgataaaacatggcggacataccgtcgcttccggggctcttatcaggactcattgagtgaagagcatccgttacttcagtggcagtgaaagggcgtagcagtgaatagttcattgcatctgtaacagtagtcggaattgcatttaaaacctgctgcaatgcttcttcatttgtgcccgatgcagagaataaatcaccaaaaaaagagcaaataatgtcagtcaagccgtgtttcgaagttactgcaacaccagcagtatcatgcaacagtttaatcgtgttattggactttcttgaagacgcataagcatgaaagaattttgtgttctcgtctccactttgaagccaatcaattctagatctttgttgccaataaacctcctcttgggacagcaattcatccaaagtgtcctccatttttttcagattacacattgatgcattggttcgggtttgctggttattcagtgtttcaacttccttatgagctgctgcaattttctttttaaagttgccatatttgttgttgtgccattgttgtaaagagctggaacatgcttctaaattgttgcagaaattgtcgattaaagtgccttccaaatttgttttccaattctgatgtatgatgtcagttgctgcagtatcattaagccaaatcttttcgaacctgaaccttgaaagtcgtttaacctcaggagtttgggctgccaagggaagaacgtcaacagaaattgccctatgatctgatttgtaatagtccaaatgctttgttataatcggctgaaaagagttgtgccattgatcattgataaaacaccaatcaagcctttctttggttgcattgacattgtgtcgcccttt

SEQ ID NO: 389064 - DNA, 1845 bp, Cannabis indica
attggatcggataatatataatttttcaaattcaattactactcatttattttctatttatcaattatttgattcatattttctaaaatattttaaaaaattatttataaaaattataaattaataactatgatattttcttcaatggacatatactaccccaaaataaatttcaatcactaagatttgtacttatgtatatgttactcaattaatattgatccccctactatctataattttaactcttgccttttttgtaagatttttgaagattttaatattatgaaataaaaattataaattgctaaatgtatattattattttttatagttcatgaaaaaaaaaaaagaaaaaaccaatctgattatattgtaaaattattaatttcatgtagattttaagtgaattgcccgtgttctctcttactagtttttcataaagttattgtattatttcaaattctaacatacataaatttacattaaaataacattttaatcggttcaaaaaaacattttagctaataatttgtacgtacgtgcagccctaactagtagaaaaaagaaagaataaaaagaagacaaaaaaatagatagtattgtaaataacaaataagtaactttgtcattttaatttcaattctatatataaatcttatatcacgagaggcttatgcaattaattggcgatttgtccatatattgaaattaggaaactccacacacacacgtgtatatatacatatcacacagtaatcatttctctatacaatccaatagtggtcctttattaactactttaatagtgactactcgtgatcaaatgcttaattcattatgaaagaagccaaatatatagcaacacaacacatatgtatatatgatatatcaattaggtcaaattaatatatagatataatgttttgccaccaaatttgcttggcactaaatatcatcgtatgtatatatatatattgatgcacccatattttttatcagtttcagtatttgagagaattttttagtttaatttatttttatagttgtttacggtatagtatatttaggatatattgtaaaattttgaaaaaatttaaaaatttgacatactggaaatatgattttcaaatagtgtatttcacacacgagtctcacatgcaacagtttgtttgaactatatttataacgtgttaaattttttaaaatctcttaaaattttacacgatgtcttgaaaaattaaaatagactaaaaaattctataaaataccaaaataaataggagagcatacatgtggatcccttttattaaagggtgcatggtaaaagtatctttatcttttttataattatatattcatataattgatagcttgaataataactcggacacaatctcaaattcaacttgcaaagctctaaagctatatatgtgtatatgtataattaagtacgtatctaatgtatgtgtgtatttatagtttctgcatgcacatgcaacgtgaggctccaaactagaagattcgtagagaatctcaccaaaacgatcatatataatattaccaaactcaattatattatatgattattttgtaggcaatttatgtatatccaaattttgtgcttctttttctctatggatgatcaagtaccactttctcataactacgtgtatagctataatctataatctataatctataactataataaaagtgtcaaaaaatttagtcctctaacaagtaataatttacaaaatagcccctcaactattttgagagagttaatgtctttctctctcatcatatatattattaaagagttttttctaaataacatattta

SEQ ID NO: 389065 - DNA, 606 bp, Cannabis indica
tttattttttatatttactaaaagaagtatttcacataaaaataataaaagaaatagacatattatttactttcaaaaattatataaacatcctaatattgaaaaacaaaaatcaatttaaaataatttaaaattttcattcttaataattttttcttttattaaaaaaatacatgtgcgaatttcaataattattttatcttattttaaaataatatttatttatttatttttactctaataaaattttttatatattttttttattttaaaacacatttatttaagatatatttaattttatagatgtattttcttagaatatgagatagaagaaagaaaaaaagctagtataaattaaaaatttatattatatatatatttatatattaaaagtgattatttaacataattttatagtttaacaaaaaattttaagaatataaaaatattttgttaaatttaattagtagaattagttttataaatatatatataaatattaatataatttattttaaattaatttaaatatatataaatattaatatattatttgtaacattattattttttattgttatttttaggtttttttacacaaaa

SEQ ID NO: 389066 - DNA, 1003 bp, Cannabis indica
ctgcagtgacagaattacattttgctacggcatactgtgatagttaaatattttattgtttttctgttataattggcattttcaactcaatttttcacgtttgaaatgagatttgagcaccgatttaaaaccgttggaatgccctttaaaatcatgtttcttttttggcttgtaactcttgtaaatcgttggaaaaagtacaatagtgtttaaaattgttgggaatagtccactataaccgacaattttaaacactcacttaattttattagtgatggactccaaaaaaaatagtttgaggaccgacgagaataataatttttgtaatagtgtaaacaggagtgggcacgtcctacatgtaattgatctattaatgacctatttcaagttaatttgattaagactttcacaaattatattcgtgttaaagtcattgataattctttaatgagttgacgtgtttaaacaatatacatttatgaacgagctacacatgttatgtcatgccaattcttttataaacgtgttatgtttgagatttttgccccctgaacttttaaggtcattaaaaatatctcctgaactattgagattgtggaatttaagggcttttgtctaatttcatttaattttactatttcaataattatttatgtactaaatcatgctcttcagactttgatatctatcaaatcatgcctcaaactttgacatgtactaaatcatactccctgaactttcatccatgttaaacttttttattgaaattggacaaaagtccttaaatctaacaatctcaatagttcaaagggtatttgtaacgatcttaaaagttcagggggcaaaaaacctaattagccattcattttttatacgattattaaacggctagtgtttggatcaagcatatacttgtaatacatgtgtctcgacacaacacgaatacaaccactgaacccatatttaggggtgagcaaaaaatccaagaaaccgaccaaaccga

SEQ ID NO: 389067 - DNA, 1127 bp, Cannabis indica
gaacatgattctggatttctgtttataaagcttaacttttgttttctctctatcatttaattactaggttcgagttatacaaggaaaatctgtgaaccacttgaagaggattctttcaggccaattcttcatcactatgatggacctaaatttcgccttgaactaaacgtgcctgaggtaattaattaacaccatagttagtcacttaatcaaaatacttatatagcaattaaagggttcaattctgattgttcttgcttttatgttttttgtaggcactttctctcttggatatatttgaagatcaagagtcttgaacagaaatacattatatacaagaactatagatacaaatactagttaaaagaagaaaaagatgaagaagaagaagaagaagaagagttgaggaaatggaaatctactactgcagcaatatttatatatagttatgtttaaaaatcagtatatggggaaagtatagagagtttgagaaggaaaaagtttgtgttttatgggtggtgaaatcaaaactaagtgcaccctatagtgatgatgaagtttgtataatcttcaaaggcttgaccttttttctttttccttttctttctttgtttttggttctttttacagtgtgtataaataagtatttaagtgataaaaactaagatataagtttatgaacaataataataataataataataatactcacaataataatagtgtgagtatgtgctgttttatcttttatgtatgagaaaaagggtttgatctgaaatcaaaaacagacaagtttttcttataattatcaaatttgttctgatattattagatgatcatgattcatgacagcttttttaatctagaaattttcagtgtaaaaatggttggagaaataccctcgaattttgacaagtttggtggtataatttggtatatgttaaacgtataggattaaagttttagtagtatagtttggtacataattaattattaaattaaataaaattgtactgagtgaggttatgtgtgtgacgattttagctagagatcgtttgaaacagttttgtgggttactaagagcatgtttggtgttgttttctgttttttgttttaaaaaattgttt

SEQ ID NO: 389068 - DNA, 1047 bp, Cannabis indica
ttgttatgtataatgatgtttggaagcttaatggtagagattgagtttataatcgagctgaaaatttgacattcgagattgatacgaacataacttatgcacattttattaatcttttgtacggagagctcaatgttgatgggtagatcttagacacaagcctactccgcctacagttaaaaccaattctagggacacataatatagatataattttttatcattaatatcaacttatttttaattaataatttatttatttatttatttagatgtataatttattttcgtgtatgattattatcgtaatttgtggaataaattatataatagagttccttggaacattaaaataagtatcaaatcttctccaaaaaaaataataataataataataataataataagtatcaaattatagggcacagagagattcctagatttaagtttatatgaattaaatcctaatcttcatccccttgattgattaattattaactaataagagcttgttgcttaggatggtattacttccttaattaacttattatatgggcaaattacaagggaaatgttatttattctttaatatgataattatatactaaagtaataataaataaaaaactcttcagaattttttttatgataactaagttgatacttgatacgatatcacataaatttagcaaaaagttattgtataataatttttcaaagcaaaaatcttgaatatatatgttattctcttttgtcttgtacctcacaatataattttttgagtgtgcggcacaataatattatacatttttatgaaggtagattctctttatttggacactaaatttttactctcataacctaactttatggtacctcatcagaataaactatcatattatataaatcaacttatccaaactcatcatattccccttggatatattttggtttatcttgaataaatttcagcatatgtttgcgttagaaaagcatggagatcatcaatacagatacaattttttttttacttttaaaacgtaaaaa

SEQ ID NO: 389069 - DNA, 1287 bp, Cannabis indica
tgtcttagtcgaatcgaacaaacttttcaatatctttgtcaaatccaacaacatgggttgaatttgttgttgttagcaaacttactctcatgttgttggattcgaaaaaagacatttaagagttagtatcccttttggcattgtaacagaatcaatacaatcttcttcgaaaacacaatgtgtttgtcaaatccaacaattgaatttgatgttgtttgggataaaaatcacaaattttcatctcaagaaatgaattgaaagcaaataatcaaagattcaaaactatgtaatcatattgaattgagttaaagaatcatcagaatgaaaggatatttgtcatcaatgaacaaatctcagatgaccgtcgtgagaatttgacatccataatcatcatttgaaacttaattaatatgttataattaaagttacagactcaatcaatcatcatattaaatcatcatcagaatggatttttgttctcatccacagctttggcaaactgtgtaggaaggtgtcctaagattattccaaatttcatcacatgataattcattaaaattgaaatcaaaaacaaatatcatcatcaaatatatgcagaatcaaataattaaagaaaaggcctcagagatcttggtggaaaatcatcatcaaataggtgaaaacctatcaagagtagcaaatattttgatacatcactggcctttttcattaaatatttaacaaaaaatgtaaagattgagattaagaatggttatgatgaatggtcagaagtagctggttggaatatcataatagaaaattgatcattgggaatccgaatgatttttttcatcactccaaacatcataaaccctaattcaacaaaatcataatcaaaatagtctaaaaagatatacctgtgagaaaaagaggaaggaaaatcgaagctacagattaaagagatagaaatgtttggaaaatttggattttctgtgtgagcgatgggagtgattgaggaaaccctagtgatgactccacctttgatataggtgtttttggaaccctagcaaattcggaggaagccctaggttggagtattgggctcggcccagcaacccctataagcccagcccattgggcttttttttactccttagagaaatgctaaaaattagtgggataaattgaagaatacttgtatctattaaacaataataccctcgtattatattatattaaaatgtacctgcttttgtgactgagttgccaatatactctcaccctctacttaagtttagcacataattt

SEQ ID NO: 389070 - DNA, 1037 bp, Cannabis indica
ggattattattcacttttcaattttgtctcacctttgtatgggttcacttcactcattttgaaaaacaaattatacataaagcctgtaaaagtaaaagctagaaaagtaaaagaaaaatggtgcaaattctaatatttatagaaaaacagtagacagttcaacatctgaaaaacttcactaaaaattccaatgagcatacatacatacatagcaaaacaaatcaaattgtgaatctcaatccataccattacacataagtaaaggaaaaaattggaagaacaacaaattaatcaaacaaacctcaattttaaaacacataccgatgattaggatgttatggatgatagtaaatgcaagctcaatctaatagtaaatttggtatgtgactaatcttgttccagtactcctcattcccgctctccttcaagtcgtactttttctttagcagaggacattgttgtatgagtaaagtggtgagggaggttggaaaccattcttctgacaatgtctgcaattcagggcaaaaccagattctgagttgttccaaggaggtgagttgtctaagtccatttttgtccaagcctctaagttttgaaaatccccatatatgaagagaggtaatagtggtaggcagtagcccttcgtccggaaatgattccatatcatcttcattaccatatccttgaacaacaagagaggtaagatatggtatgccaattccatttcatcttcaacattacatcatagcatatagagagttcagacaaactaacaggcagatcaccttcgccttcagggaaagtctctgtcaacggacaataatcgatcaaggactctaaagatgagagggaactcagcttctctggcaaccacttcaatttacggcaattaacaatctccaatttactcagcttaggagcaataaatccaccatttgggaaagatacaaaactatcacaatgccaaatagataaagatgttagttcctcaagagatttcccatttgacactgagatagcttcaaagtagtggctgg

SEQ ID NO: 389071 - DNA, 963 bp, Cannabis indica
aaaagaactttttaaatgattatcagggtattttatcttaacctaattttaaaatattgcatgcttcgggtttttggcagtttagaattttaaggcacatcattagcattaaatgctctgtctcttccaatttgcaatgttctcatccgttagatcagatttcttttgatctaacggtggtttttaatagggtgtaaagaacaagagcatcagtctatttcaccatttttgaatcttaaaccttcaaatttcctctgaaactgacgattttccccctttcatattatatgccctcactgtctttgacttatttcttgcacattttctctgattacatattcaacctcagagaatttcagaacccattgcctgtcatcaaaatctcaattgcaaagttcttcattgcctagaaaccttcaccaaaatagtaagtggctcattcccttatttctgctatttttcttttctgtattggtaatcttgtctttgtgattgatcgcttcagtatctacttcatttgatttaggtaattttagttttgtttttctggataattttagggttttaaggataaaatataggttataaagttcatagactcctgggttagattgtatttagattttctgaaaaatgggataatatttgtccacaaacatgacccaacttttttcaaaaaacacaatcccagaattcttggaaactgattgtcctaaaaaatttgcctttcctttcgaatccaaaacttatgttcccaaaacccttcttgagataaacagtacaaagattagagatcatctaataaaaaccaatcaggacgaggtttcaagtcattctagatgatttttacaagaaatagtcgagggtaaatgtcgttttctgcgagatgcaacttagcctgaatgccaaatttttcttttattcctttagcgagacccttgttttaccttgagtcactgttgc

SEQ ID NO: 389072 - DNA, 1667 bp, Cannabis indica
ccatttttagaattttatttaagtgaagtttttaatattatcactagattttaaaatatttaacttattagtattaaactagtttataaaatcacacacgtggcgtccctatgggatagggtgttacacttttgatcagcatggtggcttgcctagaacggttgtcaatagctgcttcctgagctctcatgacttccatctcctgatccctcattctatggattgacatcttttctcatcaaacgcaaggttaatagctacccgaagatcttcctgatcatgttgctaagcattgttatggccttgcataagcccaagcgcatctcgtagattttgaagttcaatatcatctccaataggcctttgagtgttattggtggacgggatctcggtgccaggagtggtttggtcaaccgtcgtacaagtgtttccagtttcatgtaagcctaatgtgaatccagcaaaaggggaagtcactccatggcctaccgttggtggttgtgtattaatttatccaaggtttgtccttggtgttcctcacgtgtttccaagagtttgcacgttcggatctgtcaccattggatcgccttgatcagtcaggcctccccttcgagtttgtacaaccatcctgttaacctgtcaagactttaagaccagagcttgtgtttttgctctcaataaaagtacaaaaatattgacctcgcttctagccaacgacagtgagtcaagataaagcgattagataaaataaataatagaaagtaaaaacaataaggtaaaaagaacaccaaatttctagaggttcgccccgtgagaatggtaatagcctactcccttttttgttgtattgacttgagaataagaatgaaatgtttttcctctctaaagctcttacaattgatctctgagtaattctctcttagattgctttgctcttttatgagttttcttctaaactaaattttgtctcactgaatagtgaaattgtgccactatttataggagcttagtacatgaataatggtttttcgtaatccataataaataaaataggaaactatattaattccataattacaatgcaaaaaatgggaaaccaaggcgtattgcctttattctctcacctaatcccacgaatgtagggattatctttgtgtcttggatgcaacaaggcttgtctctgaaatttctaactcacatatcctgtccggtgcatgtgagttgatcacgtaattgtactttggttggatgtcccttgattactctgctcggacatcctgctatatgctggtgacaaatatcaaccttcgagggctgctaagagtacttccttccgcccaggtaagaaaatgtaagacacatgtcatccagctcattgccacatcatagtgcaaaaaataggataataataatataatattaataataataataaatattattaataataattttaccatttcttaaccattaagaaatctttaacccttaggtatttggtcaactccgagtaccacaaaatactctgataattctataatcaacttatctcaataatctcatcaatattactaactaagactgttgtgacatttttagcctccgatgaggtctccaggatcaccgaacttgaaaatattttatttcacaaataacttacattatat

SEQ ID NO: 389073 - DNA, 926 bp, Cannabis indica
ttaacttacccctctttccaaagagccttatacctttcatcggtgaaactcacaggaagacatgctctcttgcctgaaatgcaatgtctctgtgctttgtatcagaataacttgtctgcctattttgcaaagcgagaattcgagcattaatattgtctattgccacattggtcctttgaactaactcaagacctaaatacttcctttccctagtctcatcccatattgagtcatacatttccatggttctaggtaaaccaactacgaagtccattgtaatatcttcccacttcaactcaggaagtgttaatggttgtaataaccctgtcagtttctgatgttctgctttgatctgttgacaagttaagcaccttgacatgtattcaactatgttttttttcattctacaccaccaatagtagggcttcaagtcctggtacatatttggtggttcatggatgcaacgaataaggcgtattatgagcctcatcgagtatttcctttctaagctcataactgttcgaaacacaaacttgagccttataaagtagcattccattatttgagattgagaagtccttaggccgacctaccaaaacctcctcccgaatcttaactagctaagaatcttcgaattgtacttttctgattctttcttacaagtctgattaaagtgtcaaggtatgtagtttcccaaccatgaactcaattctagctttaaccatgtttgaatccagctgagttgatatcattatggtactaaaaacttatctgggaccttttttgctcaaagcgtctaccactacattggctttctcgggatgatataaaatctcacaagcatagtctttaactagttctaaccaccgcctttgcctcatattcaaatccttctcagtgaaggaatacttgagactcttgtggtc

SEQ ID NO: 389074 - DNA, 930 bp, Cannabis indica
ctaaatattatattttagtcacaagtaacttcatgttgtgactaaaagttgcatttagtcacaaaacattcatattgtaactaaaatattatcattaaaagtagttattttttgtaattaaaaattaatcggacaaacgacaaacacctcaaatggagaaaagcaaaacatgactcacactacaaaaaacagggtctataacgaggacaaatgtcctcggtataagtgtcctcgttacacacccaatttttttgtagtgtcaaggagctaggggtgatataataacaagactattcataaattaagactatgttaaacagcccccaaaccacaaaatagatataaattaatcaatgatatgaagtagatcaatgatgcttggaggaatttatatatatacatataatattattagaaaaaatagaggcaatatcgcatggcatcaggtatgtcgcctgtcgtctgtcgtacaataagaggcgatatgtcacttgagacatttttttagcttcaattttgagttttaatacttcactcgaagccaacttattcatcaccatttcattacccatttaaataatataaatgaataatatatcacttttttaccacctaaaaacttttcatttgatttcataactcccatatgcacatacacttaattgtatttagttcataaattacaaatcccatatttagatagtaactcttcaaatgttacaaattgtgtgtttattacactatatcacatacaatgtaatctcctcatacattatatattaatctcttattaatatataatatattatcattttaatcttaattttattatattatttaatttataaataatataacactcttctactatattaaaatttttgacacctcattgtatcacttatttagggaaatttgattttttttttt

SEQ ID NO: 389075 - DNA, 2291 bp, Cannabis indica
tcaaggtccgagttcgggtcccatgtgggggtccgagttcaggtcccaggtgtgggtctaggattgggtttgggtcaagatctcggaccagatcttggtcccaagtttcaatcccggtcttggtttgggtctaagttcaggttcttcttcggatgcctatctaggtctgagtctatgtttgggatcgaatcccaaatttaggtccaactcctggtatcagtccggtctagctacatgaccgtctctgagcccgagttccaatctcggtttgggtctagggctaggtttgagtttggttctaggtctgggtctgggtcttcgtcacggtccaagtcttattccagggtcctggtgcgacggttcttggttagtttccaattttgggtctcggctccaggtctagttctgacttcggattcccaggtctaggtcaagtcctcaattgggttcgagtcctcgatatagatttgggtctgggtttcgggtcctaggtccctggtctaggtcccctatccaagtctggttcttaggtcctagtctaggtccaagttcgggtttggatcatgagtcttggttttagtccaggtctcggtctggattcgggtccaggtctcgatcccaatcttggtccgggttcaggttcaggtccttgtcagggtccggatcctggtcttggttgcgagtctcaagtcctgacgagggtttaggaacaggtctcgatctgggtcccgatctcggtcccggtccaggttcgggtcccaggtctcgggtcccagtcctagtccaggtctcagtctatgtttggattattgtttgggttcgattcttgtcttagctttgggtcctagttgggtcagggtccgagtcttagtttgagtccaagtacgggtttttctgatctcggtctgggtctaggtctgagtccctgtccaggtttgggtcctggatctgggtcctaggtttgggtctgtgtctacgtctgggtccaggtcccgtgttaggatgccagtctgggtatgggtcggtatttgagtccgggtctggttcgtgtccatgtccaggtctgaatcccagtttatgtcatgggcttggtttgggtctgggatcgagtcctgagttcgggttcgagttcaggttcgagtctcggtcctagtctaggtttgggactggttctgagcctgagttccgaggctgggtcccggtctaggtataggtcctggtcacagtccggtcctgtttcagggtcctggtcacgatctggttcaagtttcagttttgggtcccaggtctgggtttgggtctatgtcctggtccagcttcgggtccttctctgagtcctaaatcaagacaccgactatggatcttgtccaagccctggttcccagatcccaggataagatctgaatcccaatcacgggttacagtcttgtttcggttcatgtcccaggtcttgatctgggtctcagtctaggtccaaaaccgagacttgcatgcaattcttggtctcgatcccaattctgggtcccgagtcctgttccatgttcgggtctaagtttaggtcttggtttttgtcccgcatccagatcgggtttggattcgggtttgggacccaatcccagggtgggtttgtgtcttagtgtgggtcctggtcctgttgctaagtcctgatccgcttctggttttggttctagtttcaagtcacagggaatgggttcaggtcgagtttggattcgagtctgggttcgggtccttatttttgtctagggcgaggttcaagtttgggtttcggtctcggttagggttcgcggttgggtccggtgccgggtttaggtccgaattcaggtcccggtcctattctaagatcccagtccggctccagttcaagttttgattttggttcccgagtgtgggtcttggtttggggtcaagtcatggatctcgatccaagttctgaggccacagttctggtcctagttcgtgggcccaattcccaggtctgggtccccaatctatgttcaagtcctaggtcctggtccggtccatgttcgtgttccggttcaggttcgggtctcgagtcccgatctgagtccaagtcctagtttgggttatggtcccaatttgggtcccggtcctagtacgagtctgaggttcgggtccctggtctgagtctggttcttacgtcctgggtccggtcccaatttttgggtttgggtctaggtctaggttcgggatccagtctgggtcaaggtctcgatctgggtttacgtcctaagtcacaggtcccgatctag

SEQ ID NO: 389076 - DNA, 678 bp, Cannabis indica
atatcctaactataaatatcttactttcaaatttatttattatattaagtttaatttattaaattataagatttaaaatataatattagaaatattttgattttcaaataaaagatattatattatattatcttattagttatttaattgatttaaataagttagattttttaaaattagttggatatataaagttgaattgagatattttagattttatatattttttaaatattttctaactacctaatttgaattcaaattaagaatatttttaataatattttatttatcaaaatagaaatatcttaaccaacttttcatgtcttgttacatgtttatttatttatttatttaactgtttgattcaattttttttaataaacctattatttatttgacctaaattactatgattaacttgttgatagatctaataatctaaattaatcatagtctaattgtcaatagatcaaataaatgatttgtaacaggtaattttttctaatttgctttcatctgcgataaacatagtaacatgataaggactatcataatcaattgtctatatgagtaagtgtgcataaatctatccaatctaatgacaaccaaccgatccaattacaaccgacttgtcaaatattagatatccaattgtgatcggatcgaattggatgt

SEQ ID NO: 389077 - DNA, 1690 bp, Cannabis indica
gtatatttcagattggatcgtacgtacaaattagattggatcggttattttatgaacactcctctaacatattggattgaattggtttgcatccgtgatgaactctaattacatatatcttgttcttccactagcttctcaactacttcacacaacagtgttatagtagaagaccttttgggcttcgagccttagatgcagcttctttgagaggtgtttaatatagtttgtgagatacatatcttcttccacttgtataaggaaactcactgttatattatttgtgataatataatatagattgaaatattaataatgtgataaataaatgtaaaatattattttggatcatctattaagttaataattagactctttgttttgtaaaataataaatcggaccctgtatttttcaaaatagtacaaaatagtattgagttcaatttttgatattttattaatataaataacttgaagacaattcttagcattcactacaaaaagtcttaattttagttacaataaaacatgtgactgaaagtaaaaaaattgtgaataattataaattgtcacttacgttgtgactaaaaaatctgtggctaaaagtatcagtcacaaaaatcacaatttgttgtgactaaaaatagttttagtcacaatacttgttgtgactaaaactaaattagtgataacttataactaaatactatgtttagttacaaataatttttttattgtgactaaaagtcacatttttagtcacaaatatttttttattgtgattaaaaagttatcactaaagatggtcatttttgtagtgatggacatatacagaaaatatatccagttttatcataaaaactctaggtcggattattattaacttttattttgacaaaaattcagtccagagtactattttgtactattttgaaaaatacatgatccaatttatcattttacaaaataaaaggtcgaattaataacttttataaaatacatggtctaaaataatatttataatatataatttatttatatattatataatttattgtgggcaataataaaatattatgagttagttacatgtaaaaataataaaagtagtaactgatttttggaagaattaaaatctagtaactcttttgtaactcttcatgatcacaatttcaaagaatgtttaaagagaattatgacacaaatctatatgagatttgtatgtttgtttgtgctataaattgactttaatttggtgtattaaaaaaaattgaaaaaagttaagctcaaaatattattaatttagaaaatataaagtctaattttttatttaagaaaatagatagttcaactaataacttttgtcaatacatttttttaaataatatttataatattggatatatttagtttggggtgtattataatattattattttgtagcatttaaatatctattaatatttattacaaagtatgaattgaatttattaaattttagtgtaaaaaatttaatatttcaaatgtatatgtcatcttatattagaagactacaagtatagttatccgttggaaggtaattttttaattttatatggtggtatattattattattattattattattattattattattattattattagaggtcttttttattttttactactttaaaataatttttt

SEQ ID NO: 389078 - DNA, 681 bp, Cannabis indica
aaaaaaaatcgaaaattaatttgaaaatttgtaaatatggaattgtgatgggctcaaacagattttagaaaaaatatattattatacataattattttttctaaaatattaattcttccaccactaagtaatgaataatttgctagatatcttatagtattttcaatatttttatatcaagagagaatagtaataggtgagaaaatatctatgtgggagactccctttgtaatatgtatatacaaatatatattatttatttatgggcatgaaaatttgtatttgacattttcctatttgaaagatgttggatgttaagtttgagtgaaaaaaattgatttggaactataatcaatcgtaaccattcacttgattttgtcaacttttctcattaagacattcaatgacaattaataaacttaattaaaaattaaaaaataatttgtgacataaatatttaaatttaattcgcaattgtaaataaatatttacgtttaatttttaagaataataatacttaagttataattctgaagcttctgcaagtacttgatcgttaagtgtcaaataaattaccacgtgacaatctttgtttggtccaagtaattaaatttttatttttatttaaaatttaatttaaatataccaataagaaaatggcatgtggctaatgacttgata

SEQ ID NO: 389079 - DNA, 693 bp, Cannabis indica
tttttttttttgtgtttgtgatttggatatgaaaaataaattggtgatactggtgagtagtggtcgcgaaaagttaggaggtctgagaaatcttttgaggaggtggcagaagtaagaagaagaagaaaccagggggtctcggatgattgcagaagaaaaagaaatgaaaaaagggattttttttttactttttaattatttttgttaacaaaaataaataattttaattatatttaaatattaaaaattaggtggaccaatcaaaacataacatgtgtacatttaagtacatataaacaattctccttgacattaacagcaatttactaacaaaaggataaatagcataacaaaagtgaagtttggataattctgccgttaaacaattaatttatgtaattaagtgtcacaaattgtataatttaaatagttttgtcgccatcaatatcaatatattaatataaaggaaagcacaaagagtgtctatgtgtcctcttataattttttctttccatttttcctattttttaacacattttcctattttgtttgaaaaccaaatcatatgtgcaaactaaaagtcccacattgtttaaagattgtttaggtttaatatctgtaggttataaataatattcttactacgttactttcctttgtctaatttttttttttatgggtgattgatgaact

SEQ ID NO: 389080 - DNA, 1088 bp, Cannabis indica
agctcgccaaaggaagtgcttcagtttaggggctaaaggaagagaccacatttgcttccaccatgattgggtaatggtattattcgagggtgatgggtcattttggtgcagaatgctatgggcttggtgataaccagagttgacagtgtaggtgccatgtaaggtaagggaccaatagtaagtatcaggagtggtaaagctagtaagagggattgaaatgatggcctgacacacatcgacggggaagatagtttggagaagggtgaggttccattccttattggaagtgaaaaggtttgccactgtcatgtttgcataagaggagtgattgaggtaatgaagtttaccataccctggaatccaggcatcattgaaaatggagaccgtggtaccatcaccaattgatttgcgaagacctgactggagaagctctttgccccaacagatactgttccaaacaagggaaggcctatggcccttgccagagtcaagaaagttggtatttggaaaatatcgggctttaagtaaagtggcaacaaaggagtgaggagactgaagaagccgccaagcctgtttagccaacatcacctgactgaaagctttcatagaacgaaacccaaggcccccgtggaattttgaataacaaaggtaagaccagtttttccaatggattttgcgtgtatgcaccgaacctccccaccaaaattgagacatcattgattcgatctggttgtggaaagaagcaggaagcttgaaacaagccatggcgtaggagggtatagcttgaatgactgatttcaaaaggatttctttaccccctttggaaaagaacttggaattccatttgttgaggtgaagccaaacccgatctttgatgtaattgaatgcatcctttttcgttcttccaaaagtttgaggaagacctaagtacttgtcaaaggtatttctaatagggatgtcaaggatggtagtgatggcggatttcatttcagcactggtattcggggagaagaacatggctgatttggtgaaattaaccaactgaccagaagcttggctatagtcggttaagatttgtttaatgacgg

SEQ ID NO: 389081 - DNA, 1532 bp, Cannabis indica
ttgattcacctcaatcttttataagttcatggaaccataattatcacttaactaacagttgaaacaatttatgcatgccaattacaaccatcaatccacaacccaatatattccataagcttgcaatacttactattctccactaatataaatcaatgcacaaccaagaatcataaaggtctttataggcttgtaatgttaggcttaggtatgggaagttggaatggtcatttaggcttgcctataccataagcttctcccaaatattaatattcaactatttttggggaccaaacgaaacttccaagaggcctgaagttggacccaatgcttaggttgacacctggccctagggcctttccaattatcaaaaaattattctgtgcattttttccatcattaaaaataacaaagatacaagaaaactcgagaagaaaactacaaccacaagggcctgtaaacagagcccaatgcccaggttgacctagtgctgggcccagcgcctaggttgataatcaacctggtgtgctgggcccagcgcctaggttgataatcaacctggtgcgctggtttcaatcatccaaatgctaattctgctctaagcaatctatctagaatggtcaaaaacaaagtaagagaccttgtcttcaagttctagaaccttggaagtatcaagatgatatcccggaagcttcgaaataagcaccttgtcttcattttaattttgttgtatttttaatgggagtgttgttgaaattttcacaacatgtgtatttttattgtgttggtgaaactttaatatagtgtttgtttattaattttatgatagtataaaacacccacactgcactgcatttttggaattttgagatcttgcagtgcggtcgcgtttgagaaattgtaagaactgcatgtgcgatttggttcgaaaaaaatgttaaaacccacaccgctcgcagcgtgaacacactaaaaaaataaacttaaatttgttcccgtaaaataattttgacaaaaatttactttttaatacttttttatatcgaaataaatatttttaataaaataattattttttaaattgcttagttagttttaaaattttaatttcattttaattttcttaatcatttaaaatgattttttttaagatttactaataaacatgttcaatctttcacatttttattttgagggatacaatttgatagttatcaaagtttatatagtaaaattgctaatttataaagatacgtcaactttaaataaaataatgggaccaaatttaacaaaaaatactaaattattgtaaatataaagctcaagagaaatttttagtaagtattatattttaaaagataaaatcaatagtgcggagagtttgggacaaattactaattattcttgggcattttacaaaaatactggatttggggtaatacttttcaattttactgccacacggcagaattaacatttatactgtcctccctttttttttcttttatactgtcaataccaaaacaaaagta

SEQ ID NO: 389082 - DNA, 1099 bp, Cannabis indica
tgtaagtgaaattcaaacttttgatccaaataaaacagaatcttaacgaaacatctcagccactatacatcacacaacatgtcgtggaattagtttcacttgtactaaatgacaaaattattaattgcagttttttaaataaatttatgagaaaggttaaaagatattttaaggtactgttaaataaaacaagatcaagtttgatgtattttaatattaagttctaatttaataaattatatgagaaacgataattaattataaaatatcatatcgatgtggtgtttagtaccttttgtttattaaatataattaattatggataataataaagtttgttgttttaataataatagatgagtgaaaacaacaaacttgctaaggtggagttcttctatgatcgtggagagcttcttgggcaacttgtgaagggagaaaaagttgaagctaaagatggagaaattgcctcaacctgccctattatgaggagcaccggctagtactttagtactactattatgaattttcaaataaatagcaaatactagctataaatctctattattattattattattattattattattattatgtatgagctttataatattttagaataaaaatgacaactttgatcatgagttaaaaatatgacagcatatatctcagtgtggaagtgtttgtctaaatcaacacattattaggaattttctctgtatataaaaaaagataattaaattataaaaataactaaacgggaacccaatgaatattaatacaactcataactaactaaatattactaaaataccacttcttttactactttagccatacggaacgaaataaacaacctcatgcacgcaactttcaatcgaccaacctagcaattcaacacaactgaaacgaaatccaaccaaaaagagaaccaccattaattttggctacttcatctgagaagacgaccaaaatcaatcaaaatagaggatgtttcaaattcaagaaagaaatgcagaaaaattactagctacaagactaaaattaaaccaaaaattcggtttaattcgcataaaactaatattctgacttcaatttt

SEQ ID NO: 389083 - DNA, 984 bp, Cannabis indica
tttttttttttaaaaaaaaacgacaataatgcaaagaagccccaaattgatgtgagtgaacctggcttgcttccatattaaaacagttcttttgcaatatatttgtaatattgcaaatacattattctgttctaagtttgcaaataaaattctccccaaaattcttaagataaggatacgttcataaacaaagacacaaaagcaatagattaacataacatgccttgcaagtatgcctaagaaccccaaaagtcgtagctaagacaactctttctcgagaagtacgatataggctatagccgatttttgaaccttccaatcttggattgcatgagtgaccactattgttttagttacttagcgtgttaccaacatcaatggcattatggcaatggtcatcaaaattataaactaaaatttcaattgacaaatactttaatagtttggtttcattttcttttaaggatcaacaaataaaacggaacctcatttccttttgccttacttttgatgagaaacatgcagtgattagtacacgccacatcaatatgaattagagatttggtaaaaggcactaatagtgcttagcattttttttatgtgttaatatcgttattggttcaatttagtattgggttctttatagtttaatgtaataatttttaaggagtatcactagctaatcgcaaggcgacatgattaagggtcagtttggcacagctgtgctgtgagaaaaagcacctgtagctgtgctgtgagaaaaaacagctgtagttgtgctgtgagaaaaagctgttaagtgtttggtaaatataattttaaaataacggtgagttggaaaagttatatataagtattaggtaaggttgatgattgaatagctgttaaatatacaattaccaaaataagtataatatttgttatctaatttatttaaataattaaattcacacatattaatatatttataattattttttattt

SEQ ID NO: 389084 - DNA, 1327 bp, Cannabis indica
ctgtgagcttcacatttcccacaaaaattgacctcttcatcccgcactatgcagagagtgggggagagaaaagagctttcgaggaacagctcgaagaagagaagggagttttacgcaggcgagctagcatactttatgtcatgaggatggctgaaatcttggagtgcctccatgcctcaattcaaccagaccaacagttgatgtagacgccttggagaaacatttggcacccaaagtggggagtgaggttacaccatttgcagtaggatttctagatctagtggcgggcaatgcatccaagatgcccttagaaacctgggccacttgtagcaaacgcctttccctggctcacgctgccaagcagcaaatagttggggtgaggctctaatatttgcacttttgtttttggcactgcactcgactttctcatttttttttctctattgcactaggtagctttactggcagaaagggccaccaaagaggctggtacattggtcgtggagcttgagaaagtaaatgctgataaccatgagttgtaacaaggctctccttgctaaacttgcaaaagctcaagcttagattgaaaacttaaagagaaaaaataagctgatagaggacaactatgcctagcaaacccgtttcatgggggctatagcgacattcaaggagagagcactgagaggatgcaaagagcatacgcctatcaattatcaaacagtacccaaatatctgaagactgagcggctagctgaggcagtgactcaatccaagaccttgacctgtattttcttccactttactcatccacctttttccctttcccattttgtagaaataatttgattaagccctaaccgtgggggccgtgtgtaatgaatttacattttcacagttttcttttgagtgttactcctgattcgttagcttgttagactgtttcaagggctgtcacattaggttgctttgaggcgtgtggttctaacggccaacacctcagaccttttaccaagtttttaatcccttagctgacttaggaagcatccaaagactctagtctcctacttttaggtaggattgttactgccataacactttttagtcagtgccaacttcgactattaactatcttgacatcacgaactaggtagcaaagcgattcttagtgttgggttctatgccctaaataaaactctttacaatctgattagttatcaatataagaaattagaagtgattgatgtttgcatgaatttgacatgctaatggtttaatatgttcacacacaaaatcagttaaatccagatcatatgtttattcacaatta

SEQ ID NO: 389085 - DNA, 2321 bp, Cannabis indica
taaagacacgtcattttaataatttttctttatataaaatctatatttttaattgtactaagtttttttaatttttttttccaattcatattattatgacgaaaaaaagtaaaataaaaaattagatgaatttttttaaaaagatatttatacatgagttagaaaaaattataaaaataaaatcaaaataagtattgaaattaacataaaataatttgaggaaaaattttaaaaaatttatatttttaaaaattatttaaatttatatatatatatttaataatgaagtgtatttatcattttatgatgtctaaatagaactctctttttttaatcttaaaaacaaccgatttttaaacgaagaggaatagtgtgtttaaatttgatacattatttttttttaattaatacaaaataatgattcctattaaaataaaacatcttgttagcaaaaaaagatataagtataaaagattgttgaataaaagaagcaattatagggaaaaaaaaaagtcttaataaaaaaaattgtgtgacatgactttttttattaggtaaataaaaatattattaattaattagtataattactatttacatttctcgaaacattaattataatgtgtaaaatttcagactcaagaaaaagcaataaagaccaaaactaacagcaatagtatactaacggagagattaaaagcaaaggacacatgtccactttttattagtgcgacagtaatgtgacagcaaaaatgggacagcagatttttattccttctctacacgtacttttcttactttttctttcttctatttttctcttccacccatggacaagcttagatccaccattcttcaggccgcactcataccccaaagctatcgactagtagagattttcatacctcaaatttagtggtaatcggagcttagacacactcatacgggtcgtgcaaagtttcacgtaaaaattttaagttgatatttcggccaactttggcgaccatttgacgaaaggttggtatttaaaatctacaccgcaagaagaacatggctcactaagtcattttgcccaaccaaaaatttagaagagataagagagagagacactacaacaattaagagtagtaccggtagaaacttctgccggtactaattagacatacttattgaatattatcgacagattttgccggtaataattagtcgataatattagtaatagcgaccaaaatatatttcctaatattaataccggcggtattaatagtctatagggggtctgccctgtattaatgtctgttcttacatacgctgaacacattaatatcggcagaccaactttagtattccgccggtattaatattttttatataaaaactatttttcaatttttaatatttatataatgaaaataattagaataaaaataattataatgataataattataatattatatattatatataataattattttaaaaaaaaaatattaattaatatttaaatttacgaaattaaacattaatattaatttatccataaaaatatatactattatcttaaataaaatcaataaaattgtcttaaaaagattttaaaacataaaaatttacttaattaaaaaatctaattatcattgtttagattaataaatggcataaaataatctgcattcgagctaagtcttgaactgtcacgattatcacgagattgaggagccggtagggtagggtaataaggttgtccagattgttgtgtaggtaagatctccacaaattgtcgagtctgcggacgaaccaaagtaggttgttgttgctgactttgcgcactgaaaatctaaccatacataggttgttgtgaagatcctcctatttgaccatacacaggttattactgcaataataacccaaattgaccgtacacagattgttgttatgatgacccaaattgaccatacatagggtattgttgttgttgcgatgagcctccaaaatggccaaccataggttgttgtgtctgagatcctcctgtggcatctgaaaaaaaatataggaggagactgggagggatgcccaaacatgtaatgtaaatgaggcgactgtgaggagccagtagttgggagaattttgttgttgttgttgaaagaattgaggcatctgaggcaattgtggttgttaaaacttattgttctggcattgacattggacgtggggttgaaatggacgcattaccttgctgttgtgatagtaaaaaaatttcaaaccattggtcatgtagagaagggtcactaaaggtgccagactgatcaatctta

SEQ ID NO: 389086 - DNA, 696 bp, Cannabis indica
ggaccagagcttacaccatcctcctctggagtcttgactgcttgaccctatgctatatgtgcacaaagggaataatattattcccaaataaaacagaacattactgctgcaaaccaagttctatttcttatttaattcaaccattttccaaagaaaaagttgttcacttttaattttgtgctctcaaaattatctaccccaaaagaggcctgagtaccaaaatcatgttcgataaatatgtaactttaaggtgggagcattgcaacagagcaaagattttatcactcggagggaaaaagaagtgtgcatacacaaactggcaaacccttctcttttcttatttatttatatatgcatgtaccctaataaggttttgttattcaagaaattttccctccattcaatccatattcctttcacttgtaatttaatttaataagtcaatgtgttgatgaagcagagaagaatgtccattctagcttccttttatgtaataatattcactataataataaaagaaaactttggactcaaggaagtctagagtattagagcatgtttggtattgttttctgtttttttgtttttaaaaaattgtttttagaaatgagaacaaaaaatagtttttgaagtttttgaaaacaagtcatatttggttagtgttttttaaaagcaatattgaccaaaagtgaattg

SEQ ID NO: 389087 - DNA, 991 bp, Cannabis indica
atatataaatatatatgaaatacttcttaattggtattatccggtaataaataaatttaactataaatattaattttaaaaatattaaactattaaattttggtccgatagcgaataataaaagaaaaatttaaatttttatgcgtaatttagctacttaattaaagaaaatataaaaaactatctctttttacacaatttcaaaaatatatttatatgaaaaaatatttaagtcaattttttttttatgaaacttagtatgctaaataaaatattcataaacaccaggttttgttcattctgatgatgttattttggcggagactattagataagcttttagctgctgtagaacaatattggcagcagaggtcacatgttgattagatgcaattggaggatcgaaacacaaaatttttccatgctaaagcttcggcaaggaactcaaataataaaatcaagtttttgaaagatttaaatggcaatactatcacttttcgtgaaggaattgcaaaaattatctcctcatattctgacaccctattcacgcttctgaagaagatcattgggccctatcatgttctctccacaattcctactaccattactgattcccataatgactttctacttaaagaatttactgcagcagcagaagttcttattgctttgaacaccatgggtcctgataaaagtgctggtattgatggtatgtcggtaatattttatcaacataattggaatattgttggaaatttagttacaaaagatgtcctccatgtgcttaatgatagtggtaatcctgttgttattaacaagactttgatcacattgattcccaaagtcaaaaagcctcaaactatgaaagatttccgtcctataagcctttgtaatatcgtctacaagactttgattacatagaaactcctattgcaactagcgctgcaacttaaattacaacaaaaatcgtatagaaacccctattgcaact

SEQ ID NO: 389088 - DNA, 3005 bp, Cannabis indica
tagatcgaccagatactaagtctctgtattagaatttatgtacgtaacatgtatcgccctaaaccctaaaccctagtacgtggtaaaattttgcttaatattttattggaatttttacattaatttatactacaatttcttactttttttcttttttattgtgggacgattttttttaaaaaaatactgtatattttttgtactgtgtactgtgttaagttttcattgttgttttactgttattttttagttgttccactgttgtttttaattgttctgttttgttgatttacggttgttatataaaaagacattatttttgaaaaaattttgtgggacagtaagatctatgattattcatttagagcattctcagtactcacttttaagagtttgtattgcaattatagatcatgcataaggtagccaagcaaacatatgtaataagcacaaagatgaataaatcacacaatcaagaaagaagaaataacaaatcacattaacttttagaataaaatcatcaaacatttatcatattcctaaattgaaaaattagtttataatctcaacattcaaatccatgattagtctaaaaaagaataaaacataagaaattaaagcgaagagaaagaaactagatggagaactcgatcggatcgccacgctccctcccagagtcttcttcttttgttttctaagcttcttctctgaatgaatccataaaaattcaaaacctcccttctaaaacttagttttacaacttaaagtcaagaaaagacaaaaatctccttgacccgtacaaagttgttgctacgaccataggtagtctagtcgcggctactgtagagagtcaaaaacatcaattctgccaaagctccttgccactaccacactagtcctcgtcgcgacaacaattagtcgtgaccaaaaatagacttgtcgcgaccacgcttcataaattcaacatgattttttcctgatttccaactcatcttgtccctaactaattttacactttaaaattccgagaacctaaaataaagaaaaacaaacataaaattgtacaaaaaaataacaacaaagaagaaaaataactcttaaaagtatctgaaaaataggctaaaatagttaactaattccctcaaattaaatccttattcgtcttcgagtaaggctaaaaactaagaaaaaaacacatgaactaacaaacaattatataagccccctttcaatcaaacttccgctgccacctgtgaacaaaaacaatgcatagatgcaaattaaactttttttgtttgaataacatcataataattctactctgttatacttttcacaacccaatgattaatatatacttgcatgacttacctctctccactaatgtcaacaatccttgcttggaatcaaaagggttttcatggttgtaatgtaatagctatgattgagaagcttacaactatgtgtccaacatccctcttatattcacaataattattatatatatatatatatatatttcttttttttttcttctcttagtgatgttggagaacactgtacaattttcacattttcagaatcacccacttttcaaacataagcttatggcataatttaaagtgcattggaaataaaagtagtgaatggatacattataggttttaaattaagtgacaaaattctaaaacaagcttaagctcaaacttgataaacgaaggataataacatcaaggtaggtttgaaatgctcaaacaatctaaagaaaatttcctaaatcatattccaaataagcattgtcaaagatgatcgcctcaagagaataactcatgtaatttatatcctattcaagcaatcatttgcaagccaagatagtacatttatgatacaatccaaattaatattaacaatttacatctatataaaatttccaataagcatccaaattaatccaaagagtcaaagaattaaacacgtgactcacatttttaatctatcccaaaaataacaacaatagcataatagatatcaatttaattaataaccacgctacactaaacaacaacaattaaaaaaaaaactaagctaacaagcaagcaaacaaacaaacatgggaaaaataaaattaaacccctctctcaaactaaaagttcacattatccccgatgtgataaataacccaatgagagaaggacgtacctgaggccccatctatagggttgaagctagctccgtcgcggtgagctgagttggcgtcacgcggtgcctgtagctcaccatattttcaagtttttagcaataaaataattaaaataaaacttgaaatgccttgaaataaaatgaaatactaaaagaattaaaatttgagttgcctcccaatagtgcttaatttaacgtttctagctagacgttcaacctcactactgcttgaacttggatcaagtccacctcttgcatccaatagtatacttgtatatgagatttaagtatagatgatttcaggctttcttgtaggtgttgttagtttgtattggttttaaagtttgaagtaatacaattctctgattatattggctaacctataacaaaaaaaaatatttcattattttaaagggaccacaaatacttatcaagggaatacataatttgcgttgatctttattcttcaattctgatgcgtctagaccccttcattagcttttaattaaactcttttatcttcttctttgtccaaattccatataattgtagaagtcataatgtataatttgcaatctacattttttcaacaattaataaagattttattaaaataaccaatgtataatatatatatagggatatgattttgtcccgttattgtactttcacggattgtaattcgtgatgtacggcagccgtcagatgagagagttatttgatttgacagttgagattgatctaggggtaattagggttaaaagtagaaacgtaccctgacactcatttaatgtaccctgagaccc

SEQ ID NO: 389089 - DNA, 3454 bp, Cannabis indica
attttctataaatgtttcttcgttttatttcagtttcagttttatttttaattttttatttttcagtttcattttgaattttttttccacgatcaaaacgagatttctttcccgaaaaaattgctcccctacgatctataacagccgttgaagctccagcccatgaattttttttcttctaccaatatctgtataaatggtttgtgacctgcttctcctcttctccatctgtgaaaaaactcattgttaagaagcccatttccaaaagttctaaacttgcagcaatgggtgtgaaatcattttccaacaaagggaaaggaaaacaacctataatggaagatgatgactttgattaagattttattgaaccaataacaaaactcaatcatcgtcctatgacggagaaatcgaagaggaattaagctgagaagaattctataccaaaagttaaaagggggaagatgcatgatgttagagtgaattttgttagcttgagtttgttaagaatcagttaggagttagttaagaatcagttaggagtttgttaagaattttgttagtctgtctagctgtcattttctaactaatttcctaattgtttccgttttgccttgtctgattgtaatggtgtatataaaccatgttgtgtatcattttccattaatgaaatgcttccttctctttcagcttctttctccttctcttttctctctttgttttctctttcaatgttttctagtttccctgctcaatcatgtcaaggaaatccaatatggtatcagagcgttcttttccaccattgatggccaatgttgttactaactctggcaatggatttcaagctcaacaaggcaatggatctaacactcaagctcaacctacaggcaatacttcaaatctgaatccgtggaatgtaaaccagaggagccgtggtggtgaagatcaaagtcctgtgttctttaatcataccctgtccattaagctgaatgatcacaactatctactatggagacagcaagttcttgctgcaattcgagggaatcgaatgacgaactacattcaagagaactcagctccacctcaattcttgactgatgaagatcaagaagcctacaatgtcaatcctgattactccaccttggaggttcaagattaattacttgtttcttggctattatcctcgatgacagagagtcttttaacaagaatggttggttgcaacacctagagtcagatctagagcacgttgtagaggtatttcactctccaggtctctgctaaaattcttgagttttgaactaaacttcaaaacttgaagaaaggatctctcagcttgaacgattacttgcttcgagttaaatagactattgatttgcttgcttcaattggagaagttcttagtattcgtgaccatgttgcagccatctttaaaggcctccctagtgagtatgacacctttgtcatttcaactaatactcgaattgaaagttactctgttgctgagattgaagccttgcttcttgcatccgaatcaagaattgagaaaaatgacaaagaactagatctcaatgtcaacatggcctacactgaacttgagtttcctgaagctaattacaccaacaccaatcaaaatttaagagctgtctatcctaggttcaatggctctcaatttccctacaatggctacaacaattcaggctcatattttccccaatataactttggccaacctagatcaacacaagttcgattcaataattccagttctggaccttcaccaccacctagattcagtaaccaaagaggaggatttacaggcaatcgaggaggatgatttcccagtggtaataacaattgactttagtgtcaaatttgcttcaagactggccatgctactcttgactgtttttacatatttgacaaagcctacgctagcaacacacaacctactggcaacactagcaacaacaatacaactcaaatgcaggcacatgtagctagctcaaatattggatgggatacaaactgataccctgattctggtgccaccaaccattgtaaacccaatcctcaaaacaccatgacaccaataaaaaacattggttctgattagttgtttgttggagatggcacatgtctgttgatttctcaaacttgtaattctttgttgttttctcacttcacttcccatcctctattacttaacaacctattacctgtgcctgcaataacaaaaaaaaactattaagtgtttcccagtttgccaaagacaatgatgtctatttctaatttcatggtgatgtgtgttttgtgaaggaggagaagactcatcttaccttcctgaagggacaccttgtgaatggcctgtattcttttgactcatcctagatttagctgcatccctccagttctagccaacatacacactccacagctaaagccagtgcctacatcacaactcgaactcactctgattcccccctgagcactcctattcagtgtctgtcatgtgtcaaatgtaatgcccctttattttctgaattcgatttgtggcataacagacttggacacccttcaatataggttgtcaagtctgttcttcactcctgtaataagcacattgactctaataaaaacatgtcttctttatgttctgcttgttttttagagaaaattcacaagcttccttttcccaagaagtctctcgctgaatatacagcaccactccagctggtggtgtctgatttatgggggccatcttatacaccatccacaaataaatgtaatgtgtattctaggtttacctagctttatctcttaaagaacaagtttgaagctctaaaaatgtttcaacttttcaaggctgaagctgagcttcagcttggcaccaagcttaaatccttgcaaatagactggggggagtatagatctttcacaccttttttgaaccaactaggagtgattcatagacacccttgcccaacaacacatgtgcaaaatggtctagctgaaagaaagcatagataaatagtggaaaatggcctaacacttcttgctcatgcatcgatgccactcaaattccgggatgaggcatttaggactgttgtctaccttcacaacaggttacctacacttgttcttaacaacaagtcccccattgaggtgctgggttttgtgccctaaataaaacccatttcaatataattagatttactaattaataaagatcagaaattacattttatgttgcatggttcacatgatttatttcatgattatgtttaatgtataaattctattaagtccagaacatatataaatatgtatatatttattcatgattatagtgtcgttagcacaatggaatataatcatgattatatgttcaaaagtttaattcccatgatttgtcagttcactgaatttagactgtatgataatcagcgataaggta

SEQ ID NO: 389090 - DNA, 1730 bp, Cannabis indica
tgcagtatgaaccctcaaagcgtatctcagcaaagaaagctatggaccacccttactttgatggtctcgacaaggatgttctataactaaacaaaaccacaagagtgggattgagttggagacagggattgttgctatttgattttgcttttctcaagcattgttatgtttccattctagtttacgtaatagtattagaacttggtagtactgtactggtatgtaacaacttgataaacttgtagtattatgcaaattttaattcccttatgaaatatgtgcacccaccaaatagtagtacctttgttcatagcaggtggtactacaaattggagaagaagaacaaactggtacaatggttcccgctgcaccaaaccgaaatgaactgcccaccttaacatcttaaatgtagtttgcttctgtggtatcttataacctctaagcagagtttgagagaaaagcttagatggttaataacattatatactatatagattagatatccaatatatttttttaactttgtggaaaaacatagtttctaccccaacaatacaacagaaaatgtgtgttaagagttgagagagtcaataactaaaagtaaatgctaaaaaaaatacagaacaaaattttgttgactaactgctccaacaatagttgaaggggccaacaatgccttgagatttaattctctaaatagtttaatcaaaggttgttttgtccctaaagtttctgaattctccacctgcatgcaattcagatgaagactcatcatcgtctccggtctttggcaatactttttcacctgcaacttcccctgaggaaggaagtactagtggttcttctaatcaacctcgtgtctctgctaaaagtgattccctcgaaatttattacctcaaactaaatattgcctttgagttttgtattctatacattttaaatttagcgtttagttagaagaaataaaaatataagaataggattagaatgcaaatttattatctttttgttttatagttgttttcatgttgttgtttgttaagttgtttttttattttactgcaacacagtatttttataattttgaaattttaacacagtatttttgaaatcgtagtacaataaaaatatcaaaagaagagtgtgacagtaaatatataaaaataacaaaaaaaaattggtattttgtgtaaaatcctctttttttttatatagttctatataatttagaactagttagggatcttagtgacgaaattatttaattagcaaattttgtaacacttaatttttttatactgttaaaattattgaatcaaaattatttttttgaaaaaattggacattttttttatataaaattattacagaatttaaaatattattagttagtcatgttttgtcaaattaacaaaattgttaaaagaactcttaataatttatctattttatcatttaaaatatatcattaattttttttaatagaaggtgaattttattaacttataatagccaaaataagccataatagaataatgtacaacactatgaacattgctgacattaaaagtgtgatcagcctaataacaagaaccgcgtgcaagcaatggtggttttgttagcagatcgcgaaacaaaagaaacagacacatcaattaaacagtttaacaaacgtctacactcagaaatcaacaaacctaaaaaactgaaaggcatagaaaacgagctag

SEQ ID NO: 389091 - DNA, 711 bp, Cannabis indica
cagtatttgaatctggcatttattcaaatatccactccgagcagagcaagtaaattaaaattaaatagccacagtggccatatttaaagcatcaaatataacgattaggagctttcttgcctaatggatgtgatagagagtacccccaagtagggatcctcaaatcaataggcaaaaaaaacagagatggaagtaaatgaaaataagcaactctgataattattgttactgattaaagagatagaacacactagaataatgaggtattagagagacctcaactctcccaatagcaaaagctcaattacaatataattctcatgttcctctcctccttaacctattccaaatatgctactctatttcatcacatcaagtgctcaatactactattacacatatacccctctattaactaattctattatttaaccactttgtccctcattctagttgcctatcaaaatgcagtttcaaacataaaccactaaatgaaatgactacagaacaatataggatctccagagtcccgacacgattcctatatatacaaccgaataaaaattcaacatgcttctctcagaaagtatattttagtaaaaatatgtatgcacaatatctctagtgtttgatatgaagaaccaaatatcatatatattgttacgaatttttatgtttactacgcaagtgtactactaaactatacttatg

SEQ ID NO: 389092 - DNA, 1259 bp, Cannabis indica
ggttagagtttcgatacgacgattgcttcgagttttgttttgaatgtggcatcattggcatccactttgaatcatgccataaatttctcgagcaatttacaatggacatgaaccctctcttgcctatggtcctgctatggttggttcccctcttcctgagtctagttatgaccgctatcgaactgattttttcaaaggaggagcgtggcctttaatgacaaggctagcgaagaaatcatttgccactgttattcctgctatatctcaaaggtctctccctttgccaccaaatatgactagtagagaatcagcctcgtcctctaatcactcacagtcttgtgttccgccatcatatatttccccatccattccattcactgcaacatccactacctgcaactctactactgatgtagccactgttattccattcccctcatacctgccacatactccaatgattgctacatatcctccaaactctccctctgttcaggtctcaaatcgattgccctttgcccctattacatcgcctatgatgcccccaagctatagtaccattgtctctcccaattccactgctgcattacagccttcttcgcaacattccaaagggaaagccattattatttctgaggatgaaccagaaaatgttaatcccaacaaacagtttaaaagacaaattgactctgaatcacttcgaaatgttctcaaacgttgtcgatcaaattctattcacatccagtcggcttcttcagcaccaactgggttagtttcaactcttaatgtttccagcaccagtactctggattcagatgagtttcagcctgaaagttcagcggatgttgctttgcaacaccgccctcagccatgaatttcgtaagttggaatgcccggggtttggggaacccgagtgcattcaggcatttgcgcttgcttgttcaagagcaagctccctgtgttcttttcattatggaaactaaattacaaagtggtagtatagataagtatcgtaataaattgcacttcccttatggcattgaagttccaaggcaggggcttggaggaggacttatgcttctttggaaatctcatgttactctttccctaaacaattattcacttaatcatattgattgttttttggaaagccaagatgggccatctatgcacttcactggtttttatggccatccgtgtgcttctcaaaggcatctcacttggactttgttgcgtcgatgctatgatatagcaccttt

SEQ ID NO: 389093 - DNA, 630 bp, Cannabis indica
gagactaaataattaattggtagtagttagaaaaattaactttaaaacgaataaagaaaaaaaaaaaaaaaaaaaaaaaaaaaaagaagaaaataacatactgaaaattattttttttattattattttacatactaaaagtattttttttatttatattggaaagttaatttaggctataataaggcattaatatactaattgttttctttttaatattatctcttatatattttttgttacggtaattatctatttttttttatagtaatttctgttttctttaccttcaaacatatttaaaaatttaattagttataataaaatataaatataacttattattgtttgtttctaaaaaaataaaataggtctaatttattcttttattttaaagtaactcattttatttggtttctttaattttaagtaacaagtgaattgacctattgaattttattttttaaaaaaaagttaattaatgttttttttgacaaaataaaaaatgaaactaaaagtttataattttaattacaaacatctaattcaattcagtgatgatcttgttgggttttatgtcctaaataaaactctatttcaatgtaatcaagattattcaatatcaataaa

SEQ ID NO: 389094 - DNA, 1497 bp, Cannabis indica
gagagagagagagagaggagaacgatgagaatgtaggtttgaaatgatattctatttggactaaattgtaaaagattatttaagattggggtccaaaacacaattgctaaaattcatttattattattattattattttgaataaattatgaaattttattaaataatagtcttcaatttaattgggacatatacgaacaggattacaattaaaaaagcgaatcaaataatcaatcacagttaatcttaaaaatatttatattttatttcatttaccgctcagaaggcacaatagtagaaattgttgcagcaagtttaacctcgtagcttcagtactaaactattgtatgaggtacgtaactgcactactaacaactctttaagtacaagttgtttgaaattcattacctatgctttcttcttaagattgtcgtaaactttctacatatttagacaatatttctttgttgtttattaaagatctgctagcatagttgctcatagttttgttagaattttttattctttttcagactgagtgttcaataagggtgatgttcctgttgagatacagtcttatcttttggctaatttggcaaattaataaaagttgtatttgtgctttcaaaaaacaacctcttaagttgcagaaaatttgttattcccaacactaacagtgatttaatgataagccattaaagaacaaagaaaaaccaataatgaaacaaaataaaatcatgtcatagtcatatagacaagactataacactcaaaactatgtcacaaagataagactaaaacactcaaactatgtcacacagataagactaaaacactcaaaatcatgtcacagagacagaactaaaatactcaaaaacatctcacagaaacaaaactaatcgcagtagcaaaaattgaataacaatagcaaaacataactccgactaagttgcacctaagttcaatgaaggtcaacgggcctggccttctggtagttataaatttaagaacgagaagctctaattttatcttttaaaatagaggaaaaaaaatcctagataactttaaaattctttattataggataaatgtcattttggacttgtgttttgtaaacattatagattagaccatttgttgtgttaaatgataaaatagaccttgtattttccaaaatagtacaaataggaccctgaactaattttttgtcaaaataaaacttaataataatctgacctagtgttataaaactggttaaattttctatcgtgttaataattgtctttaagttgattatattaaaaaaattatccaaaattaagctcagagttctatttatactattttaaaaaaatacaaaatttattttatcatttaacaaaataaaagatctttacaaaaaatagaatctaaaataatattacccctttaaattatatttttttgttggtaaggaggtaaataatataattaaaataaaagaaagaaaaaagaaaa

SEQ ID NO: 389095 - DNA, 1488 bp, Cannabis indica
ttttttgtctttgtattttctatttttattttagttttttcttcttttttttctcttgtttttgttagtaaattagcaatcggtaagaaaaattttaaaaaattccctatagccctgccctacatcttttatagcttccaaaagaaaataagttgttcattctctggaaaaaagaaaatcaaaacgttcgtaaccgattattgaagattcaaactcttatttcgaacttgatgataaagattttgagatatccaaaatgctgaaattatttatgttgttttagattttttttttcttttttcgacgtagatgttttaggttttttttgtgatatatgtcttctactcattttattttcttttttttattgttgtgtattttgctttttttttttttattgtattcatcgttttaatgttattttaacggttgatttgttgtttttctggcttgttcttttgaggtaatttttttcttaaaaaaaacaactgaatacatgtaacactcaaaatccattacttactgatcttttcgtctccatcatcttcaaaattttcttcttcgtcttaagctttttttttttcaatttttttttcttcatttgtttgaaagattgttttttttttaaattgtggttaccattaattattgctcttctcatctccaccatcttcaaaattttcttcagcttcgtaagcttcttttttaattttattttttttgtttgtgcattttcagtctcagatatcaatttaagattttgttcatcactccctgattttgttaaatatatgttttgttcttctgaatgtgttattcggtgtttagtattatacacttgatttttatattttttaacgcttgtctttggttattttgattttttttaatgtatttagggtaagggaaaattttccaaggcaaaggttccctctcgtgatgttatggtagtcttcattggtaaaagagttattgaggtataatatttttttgtgattttatttggttattttattttgtagttttactgttgttttacaattgttttagtaattttttatgttattgttttaggattggaatttgaaatacttacgttctgactgaaaaaataattattttccatctgttcagctgttgctctggtggttcggtccgtaggtattgaagagaggcttcgtatgtgttttggggtatacacagtataaaagaaataaaaaagttctagggcagtatatatgtaaaaaatgccctgtggcagtatttttgtaaaactttctcaaaattctaatatttttgtaaatccccccaataagatagatccaaattttgacatgtaaattttctaacttattaattcttcatgactaatactttgaatcatataatcacaaatggttttcactgtgatgatatcactataaatgtgaatacctatatgaataggatttaatgggctcgtttggaacgccgtattaggtcgtattg

SEQ ID NO: 389096 - DNA, 1741 bp, Cannabis indica
acaaagaacattttcaagaataatattggacaatttaacagttccaacaaaacaaactttaatactaacaccattaggtaatccaacatttgttatcttactgctttcctggacagaagaaaataaggaaggattggagcacacatgatgtgtagctccagtatcaattatccaattagatttagggagtaaagaagccataccagaaatgttggatacgattggttgctctgactgttgaggttgcacctggttttcttgaagcttctgtgcaagaatagccattaatctttgacattgagcagccaaatcttgatgatcatttgtggtatcactgctgtcatggcctgtagtacaatttgcagctgattttccttgttgatttgctggttttctaggtgtttcgcgtgggaatctgccatataacttgtggccaaaaggatacccatgaattcgatagcatttggcgattgtttgtccaggaacaccacaatgggaacaaatgggacgattgtcattcttattatcagatcaattgttgccacgattagcttgagcatttccagcaaattgtcctgaaccatcattaacttgctgattgttctcagattgaggaataacaattcctctctgtttttcctcttggattatgctagcataggctttgttcacattgggaagaggatcttgaagtagaatttgtgacctagcatttaggtaagattcattcaagccgattaagaactcaagcactttatcctcatcttgatactcttgaatgatcttcaatgctccacaagtacacacaggttgtggtctgtattcttgtaacagatcccatagccctttgagtttggtgtagtattgagtaacatcactagaaccctgggttaaggtctgcatagatctttttacttcaaaaattctaggggcattttgctgatgaaacctttcctgcaattcagaccatatacgagaagcatcgtccatatacataatactatctgctatgctaggagaaactgagttcaagatccatgaaattacgagacaattacatcgaatctaggagtcatagttctcatcatcttcctcaggagctggtaatctgccatcgacgaacttaagtttgtttcttgctgataatgtgaccatcatcgaccttcgccatgagctaaaattttcaacactagttagaatctttggtaccaaagatgacgacgcactatctgcactggagaggaaataaggactccgaggatgattaactggaaatttgttgttttcttcaagaactgcaaatcgattcgattcgtcagcagcttcattactcctggttcgagtctgtgttcttcctcctcgcgccatggaaaatcagaaggaacaatgaaaagtcgaagcaagagaacgaacaagaagaagaacagggataagcggaagcagaagagctcaacgaattgttggctctgataccattttagttgtgaaacagagaaaagaaacagagaaatcgacaatgggaatggaagaatgaattattcattgatcagttcaaataatacaaaggctgggctttatatagcaagcaccagcaactaacacacaccagaaaatgtaacagactcaacagaaaataacagaaaacttaactccctaaccaactcaacacactacaccttaacaactcttgataattataaatttcttaaaattttattacttgttcatccataaaaatata

SEQ ID NO: 389097 - DNA, 1891 bp, Cannabis indica
gctaccatccatagacagatgggtaactacaaagattcaacatcatgttggaggagtatttgaggaactttattaatgcaaacaagaagaatgggccacaactataagatgtagctcaattttgtttcctctctcagaaaagttcttcatcaaataagagcccttttaaagttgtgaaaggatagcaaccactcttacccccacacggtggatgagtaccacggacaggatcagcgggcattcaattttacaaaagactcaaagaagaatacaaagattgctcaagcatatttagagaatgcctcacgaagaataaataagtgggtagatcaaaaatgttgatcactggggttcaaagcaagtgacttagtgttgatcaaactacgaccaaaacaatttagattcctaggggacaaggacatcagactcgtgtgcaaatatgagggccctcttctagtcatctctaaagttggcctagcctcctacaaagtcaaactactttcttggatgaaaatacacctaatctttcacgtcagcaagctcaagtcgtatcataaagatccataagatctagtgagaaaccactctactaggaacatcatcagccttcaacgatgcagcaacagagaaccaaaagaaatccttggcaaaagaactgtttgtgtgaagagaaagaagagaaaagagtacttggtcaaatggaagggcctcgttgatgacgagatcaactaggagaaggtggaggacataaaaccattattgcagaagactaaagaccatgcatcaggttcatcgaggacgctaaacaaataattcggggaaaatatggcgtgctatcccatggcacacccacaaggggctatcttgtaacatgagcactttgtcagcagcatgataaaggaccaactgtgtactcccttgaccttccaaggccatatagtaataaaacaaagtttattcgtacttgtaatatcttgataagtctaatggtatataattagggtttatatttatattatgagttaatcaggtaataaatgggattatgatcatactaatttatttcagcataaaatttaaattttgctataagtgagtaaataatcgtaatttgttaatgacggagatttatatagcacgtgtgaatgtaatatgacctatatgtggaacaaaaatattttcaggttcggcaatcctagagactcaataagtggatatataagcataatttgttaattacggagatttatttgaaatacatggatataatatgagttatttgtgaaataaaaatattttcaagtttggcgaccctggagacccgattagaggccaaaaatgtcacaacagttttagttagaaatattgataagattattgtgttaagttgattttagaaatatcgaggtattttaaagtactcgaagtgtgccaaataccctagaaacagagatttcttaatagctaagaaataattagataactataaataataaagttttattaatatattatattattaataacattataatattattttatttttttattaatattagtatatattattattataatataataagtgagaaacttatcagttacctccagtgacgaagccagacatttggctcagtgagggcttgaataaatattaagtcaaaactaataaaaataactgataaatgtatcttttcaaattttcatcttcaacaaaataaaataaaacattgtcataaaaaaataaaataaaaattacaatctgcctcgacgacttttcatgttttgaaatcgctgcatgatgacttcattgtcaagactattgaagatgtctttctcaatgtacacaagtaaacaatcattctaaattgatctcccattcgattgc

SEQ ID NO: 389098 - DNA, 1708 bp, Cannabis indica
attttcctaaaccacccaatggtcctttggggataaggaccacattagttgcattgaagcccttgtgtaaatttctgtttcggaagaaatccaagaccacctcccagaattccctcccaactgtatccagtaatatttgaagaataagatagacataccattaggtttaggagctttaagattactcatggtaaaaagagtacgtttaatctctatttcattaggtaatctcagcaactcatcctgctccctattagagatagagtcgtgaatcaaatggtccatgctagccaaaaggattgcacgagatgccaaaaaaatactacccaagtagtccataaattctttaccagtgctttcacgagtagtaattcattccccatttctgttaataatacattcaatcgcatttctttgattcctaacaatggttgaaatgaagaagaatttagagcatttgtcagcatcttttagccaagagatacgagattgttgtttccagtaatcagcttgtctaatcaaggactcattaagtgactttctgagttgggactcctctttccaattgcgttgactagtgggttgatcttgtaaagacttaagctccttctccaggtcctgtatagtgaaatcaataacaccaaattgccttctattccattgaaggaggcccacccgcatagcactcacctttttgaacattctagttggtgcccagtgatgttagacactagaccaagcatgattcaccactaatttactctgatgatctctactccaccaagctttaaacttaaattgtcgtttaaagtttgtttccaaacaccttgcgtaaaaatacaacaatctatgatttaagtttgctgtgtggagggaatgaataaccgcctttgggaataaagtgatccacggagcattagccatccccgtatccaattcagattaagtatgcttatccatcacggtgattgtcccctttgatagtcaattagaccattagagtagatcagcccatatataattgggataaattgatctttttctttagagacaactctcttagaatgagagagcacaaaattaacatcccctaaaatcaaccacgggcctccaaacctcttccccaacccatcaaatcattccaaaatgtttttttttctcatggaagtaaggaggccataaacacacaagaggagccacggataatgagccagactcgaatagactagacccgaaatatgaattttcttcactctaatgctttcaaagataaagttatttttccagaccaaaataattccacgtgcacacccccaagcaggaaaaacaacattattattgaaatgtaacttgttgagagaacgtaccaactgagacgtgtccacttttaattcagtaagaaagatgaagtctggtgagcacgtccgaataagggatttgagttcaaaaactgtagaggttcgcctcaaccctctacagttctaagagatgcctctcattgtgcttgtggaggtggtgatctatcaacctccatagcagggaacaattttcagaattgcaaacgaatgagcccatatcatcaagaactaatacttttctggttggaatatcaatatcttttaccagggcttgtgctttctgttggaaatattttaccaggatctagatttactaccatgtatgtttcattaatatcctaatatgaatt

SEQ ID NO: 389099 - DNA, 1445 bp, Cannabis indica
attattattaatattaatatttatcaatatattataagtttataatcagaaaacaaaacaaaagtgaaaccctcatcttctttcgacgaaaaccctctcctcctatatttattttttctaatcattaaccggaaacctaaaattctaagctctgttattagtggaagaacaatccttgatgagaggaaagcttcaggtaaggattaattccgatttaagtttaaaacaattagttttatataggtgtttcgtgattagaatagttatgaaatctctgaccttataggattattctcgggtagtcataggaataattttgattttttttctgaaattgaggtaattttgggttgaaaattgagtttggaactttttataactcaagtacgaacactagtggtgtttgacaattaagggctccattttagattttattacgtaagtatggtagtgtgtatggtacatatgtgccctatgaacttcaaaaatcacattttctgcccctgaacacctggtcaaccggttctgaccaactggtttttgtcataacttttcacttggatgtcttcttttgacgttctttatcctatttcgaagcttggaacgagatctaccatatggtatatattttagagtcaagatataagttttattttagtgtatttgagctacgaggtttggtaggaaaccctaggttggcctttacaactgttaagcaaagttttaggataaacacttattggtatatcattgttatgtcatagggcccaggatcatcgatcgtactccaagcaggtcagcccacataccttaattgaaacttcaggaagaaaaatctaatgtatcacatggcatgacatgttttaaaatcatcgattgtgtgattaggcaatgataatgtgatgatacaatggacatattatataggctcacctgattaggtgatgtaatatacctagcgatgtaccgtccataggtacgggaggcagtaacatatgatgagtactaagcgtaggtacgggctcacttgattaggtgatgtgatatacctacagacgtattgggcgtaggtacgagcattagtgacatattatgagtaccgagtgtagttaagggctcacctgattaggtgatgcgatatacctagcaacgttaggcgtaggtacgggcgtttgtgacatatgatgagtaccgagcgtaggtacgggctcacctgattaggtgatgcaatattcttggggatgtatcgagcgtaggtactagcgtcaatgatatgaaaatgattggttatggcaaagattgaaaccattgtcgactttcttcttggcgatgtatctgccataggtatgagcgtcagtgacatatgataagtatagagagtaagtactgggtcgtctgattagacgatgcaatatattggtgccaggttgtggcacgggctcacc

SEQ ID NO: 389100 - DNA, 1650 bp, Cannabis indica
gtgtagtagtgctctatttctattaatttggtttagcattaatataatataagcttttggtctagtttcaaactgagaattattcatatcattaattagttaccaactttatataaaattgaattttagaagtaattaataataatcagtattcagttatatatgaagatttatggtttgatgcaatgcaatgatgttgccgtcttattgggatctcataattaaacaatgagtacattattatatatttatgtgtgtatgatgatatcatcatacttttttcttccttgcatttaaggaaatcatcatccgggtttccaggttttcttttttctctttgttttctgggaatatttttccccttaatatatatttttgtggggcaaagttgtttaatttgtttattttgtttttgttagtgtttaatagtacataatttggagagagagagagagcgagaaatgaaaccaaagaaagcaatcttgaaatttttaagaccggggccaacatccaattgaaagcaatggagtaatgtggtccatgcacttacttcactctatctctcttttcttttcttttttccaaaaaaaaaaaattaaataaaataaaaatggtttaattcttcaaaggaaaattccaagaaataaattaaaattgggggttgaaaaaaaatgataatattaattgtatatttgaaagtcttgtaaagagtagactaaaatttaacacaatttgtctaaattaaagaaacgttaagtttttttaaataataataataatcatttgctaattactatcatacatattaaatattctgtggcattaattgaatctttgttcggtgttaatctcccaagtttctttagaattatttattattcgagagatatatgcattgtatagataatacaaaaagaacatgattatgttgatatacaaatataaattgattttaagtgctcaataactttggtataatgcgttcatttaaaaaatatgctaaggtgattgtatttattaattatatctactatattatttcatatattattttttatttttttttatttaacggtttgatttcttcaatagtttctatgtgaattatatgtagattttaattacgatttaagtaattttgtgagttgctatacgaatttccgtaaaaatataaaaaaaattattttaaaatataaaaatgaaaatattcctaaaatatttgtagatctattatctaattgtaaaaaagaaaaaaatgtagattagctaactaataatagaaaatcacagttggaaaaagaaaacaaacaaaaacaaaatggatataaattccattatctatcattatcattttcatccaacattcatttttttaatattatgtaaaatagtcttccatttgtaatcaacaattatgtgcatgaactaaactattcgactacgattcacattatgaaagtaatatttataataagaattaatatatacacataatactttgataggtagaggaattaatggtgataatgtatgtataaaagattacatacacataaatgattaatgataataataaatgcaatttactgtaaaatttccttatgttttaatttttagacacttaattttttttttttagtttttagtagt

SEQ ID NO: 389101 - DNA, 1761 bp, Cannabis indica
tgataaatctaggaaactttattcacatagtcatgtttactgtccaatgtgttgactgcacaataaacaggatcaagtatgtgaaaagggttttagatgaatttatacattatgtacatataatcatgaaataagtcatgtgaaccatgcaacattaaatgttatttctgatctatattaataagtaaatctgattatattgaaatgagttttatttagggcataaaacccaacagtttttcattatgaagtcgatttccaattgagcccattggatccacatctcagtaggaggaaggtaaatgttgagacgcttcttattccttctgttccagatcagccaagacagaattagaaagaaaaggaagtcgtcttttgatacctgatttttgatgtgaatgagcatgtccagtgtgtggtttctgcttttttttgagaacaggccaaattgaaaatcgcctccaaatgttttctgctgaagtacagaaccaaagactatgatcgattgtctcttctttctcaccacaccagcagcataacgggttgatgttcatacccctatgccttaaaattacattaacaggacgccaattattacacattctccaaatgaagttcctgatctttgggggggcttcaatcttccatatcctttcaccaattctttgttacctcattcgccgaaggacctgctttcatgtcatcttttgttgcctcttatcccgctgctcactgtgtagtttccattcggggtgtaatgccaaacaagattatcatttttgcttgttgagcaaggggctattccaagcatcaaagaagtgtcatctgagtggaagcactcttccacagtttttgtttttcaagacccatcatcattctttaagtagtctagagtggtccctggaggcacattagccttggtgcgcaaagagaatgttgaggagcggggaatccatttatcttcattgatgtggatgtctctacctaaaataaccctccaccgaacccctttctctatgatttttctgccccataatatgcttcgccacataaacgatccgtagcctccaactttagcctccaaaaaacttgagttggtgtagtagcaagctttcagcactcttgcaagcattgaatgaggattatttatgattttccacccttgtttagccaataaggcttggttgaacttttccaaatctttgaatcccatgcccccttcatccttcggtttgcacagttttttccactttccccaatggattttgctttttgaatccgaagacccccaccaaaatctagccatcatcttatggatgtcgttgattagctctttaggaagacggaagcaactcattacgtaggtgggaatggcttgaattattgctgttaaaagaatctctcttcccgcttgagaaaataaactagccttccacccttggagtttggttctgactttagtatgaatgtcttcaaaaacctctttttttcttttcccaattgaagtcggcatccccaagtatttggtgtgacattccacaagattaacccccattacagccgcaagagcaagcccggtctccgttttgatttttgttaccacacaaagctctgatttattaaggtttattctttggccagagagcttagtgtagttatccaatattgctttcaagtgtagacactcggcatgtaggaatatattttaccaggatcttagatctactcacaagtatgttctttaaacaccctaaatatgaa

SEQ ID NO: 389102 - DNA, 1718 bp, Cannabis indica
cataggaaccaatagtgaattatatgctctcgctctcctctagcatgacaacttaactataaaggaaaaagaaaacaataagcaacactattcatcagtcacatgccaatagaaaccaaaacatatgcgctaggaataaaaaacatatatctatatcattttatcacgatagaaagacataaagatcattctgaggaagagcctttccagttcaaagaggtatctataatgatcagtacctttgaagttatagacaaccgagttgccagcgtaatgacatctacttttgatgtagttgtgttttcagcttctgcatgaaaatgttgaactccattacttcacatagaagttagattcaagtttatggattataaagctttggtattgcttcgagagatacatccaaatgcctacaaagttagctggtaaactcttatttgaattacccatgctaggaagaataaaatgataaactgagtgcataggctacttttgtcttttggtttggttactgtagctggatgagtgatctattaggagagcaagagacacaattggattagggattttctggaatgaacaaatactggagctgagctccagtgagaggccaagcctcttgaattgtctaacacctgtgtacttctcgttttccagatttctacattacagaaataacattcagcttactctttctctgtgtttctcctagaatctatcaacttcattagcattaagaaaatgtaatcaatgctcatgcatgacaaatacaaaccttcactttgaggcagtctactccgaaggtacctcaacaaagcttgtgtgggtccagaaaccaatgaactggaaagaaaacaagggcttaaattacagaagcattaaatgcaaatgagcaaggaaatgtctcatgatcacaccttcgaagtgttcgtaaagggttcccagtaagcaaaagttttcgcagggtggtcatctcacctagagaaagaagagccaataccaaaaattgtttgttaatccccaaacttcataatgttaagagaaacctggtctttgtgtgtgtgtgtaagctaattatggttctctcaaaaagtagggagtatctatgctaacttttttttaattactgtacagaatcaaatttaatttgcttcattttaataatctaattggaaataagacatagaaggattgttgaacaaattgagccaatctttatgtcatagaaaactatatgaaacatgtggaataagctcttccccaaaatgatttttatgccttctaattgagccataatctaatccttattgagcaaaaaagctttctgtggctcatgtggaatgtggctcaataatctaaaacatacatgtgttaatctgaaccatgtggaattaccaagctcaggagccaatccagtcaatgaattgtttgagagatccaggactgagagacgcaacttgcatgcctccactgggtactccttcagctaaaaagtacaaacgattgtttagtaagccagtgttagactgcacaatgccttaatgaagtcagtttgcattattgaaatgtttgtcaccactgagaggttactgagttttaattgacctgtttatcattaatacttatatatcctgattttacaattgctgctagtagagaatgaatgagtggcttaacatagaaaattcaatttcacaattaacagctacctgatttga

SEQ ID NO: 389103 - DNA, 1248 bp, Cannabis indica
aggtgaggacatggctgatgattatattatatttttaatattaatatatatttaacactttttttaatatatcatttacatttatttgtaatattattatatattaacactattttaatatatcattatattttattaacatttttttttagaaaataattaatgtttgtcttaattttttattttattttttttatatgaaatattaatatggttgattataagttattttcagtaaataaatatttggtattaatgcttagttaaatataaaaattataggtacctgatacatttaattatggtattgtggtgatcactccaaattgttaaaaaaaattatttttagtgataatattttagttacagcataaattttttgtgattaaatatgacttttaatcataataaaaaattacttgcgattaagacataatatttaaatataaattgttactaatttaattttagtcacaacaaatattgactaataaacagtcacaacaaattataatttttgtgactaatatactcttaaacacagacctctagttacaacataagtataatagtttataattagtaacaattttttatttttaatcaaatattttgttatgactattttttttttacagtaaatagtttggctatctgtaatctttgtcgaacatattataactatatgcatgcttagctaacatgggtaccaaaccttaatgcatgcatataagaaaatatataacattttttatataataaattattattattattaataattattattataataaaatcttaacaacttacaatattataaaatttataatttatcacattcattcaatttctagttttttttttttttttacaattttgcatctatattttgttttttttttcataacataactacaattattttttcccagagtagaatttcacaaaattgccctaattatagtataagcaaccaagagtaagaggaagtgtgatgtttcaagaagaaattattatgaaaaaattatattttattcacttatatttagttagggtttgcattcacaccttttattttttcttttaatttctttcctttataattagtctatatattattttcaaatatagcctcatatagagaagaattcatattttaaataaaaccggctagcacacacacacactatatagatatatatatatatatatatatactagcaaaaaactacgtgcgaggcacgt

SEQ ID NO: 389104 - DNA, 690 bp, Cannabis indica
atttcgtacaaatgaaaaaaaaaaaaaactattttgaagtgtaaaaatgaaaaaagccccaatatatcacgttttaaaaattatattttatcatacaaatacaaattattttgaattaggttaaaactggacatctagagtcaagtggaatctaggtaagtggttggagagttataagattgttgtttattatatgtaaagaaagaatgtagaggcatattattatattggtaacgatttttaattaagctatattagagtaataagtgaacaatttaggccaaatctagacaaactaagatatgtgacaatatttcaactttccttaaagagaatatgcttaattatttttaactacttttttaaaacatacctaagtatataaatgtatataataaccataaagtcctctataccttaaacaaacagaaattttttaattagatcatctcttgtcgtgcaatatacaaaatccattacatattcacaaaacaacattactaataaataataataataaaaatcatatcatataactaattatatgagagaaatttcattttttggccttaataatacaagccatatcaaattttataccctccctattaatttgtacaaatttagtccattgattacatgaacttcccattttacccttttttaaaaaaaaaataaaattggtaaaaa

SEQ ID NO: 389105 - DNA, 1659 bp, Cannabis indica
atatatatatatatattacgtccaacacaagttttctagtccaacattattagacatgataaaaaaaaaatctaatccaaaaatgctgaacttgaaaacttcccaaaacctttacatgtccagcaataattttgttagacatgaaaaagggacattaaaagtgtttattgtagtagtgcctattatgcccaaaatcatattcagaaacatgggatttattacatgtagtacagacagaagaaacttgctcattattctaggatagggttgatgtgaaagcacttggaaaggcagctggtgttgaggcttgaacactaaactgtgagggtttaaaagtgtagaggcgattctggtgtatgccagtaagaaggatggcttgactgatctttgacaaaacatttgtcaacatgaaactcaaaaaagacattgttgtcataggcgaactgagacacacttagtaaattttttgttatttcaggcacatgtaaaacattatttaaaacaagaggatgagatgaattagaattactaaaggattggccatccaatgcgtttgattgacagacctgaaccatctccaacatagagttgatcttgaccttcatattcagtgttggtggccagattttgcacatttggtgtgcagtgatttgttgcacccgagtcaggataccaactggtgtcatcagtttgagatgtctaaggaagattagcttgagcagtgaaggagttagagccttgaaatacccctatgaagcttttatcgagcctgtaaaagcaatcaataacagtgtgtccaagcttataaaaaagctgacactaaacaagctggtgtgggaaacttgccacctctgttgacaccagaaacaccacgaccattagtaccagtaggtaatccatagttgttacttgtgaaagctccacaatttgtgtatccacggccacatccacggggtgtggataatggagaagggtttgattatagttgggaaacctgttgcttcgattaggatagttctggtaagcaatattgacttcaggagattgatcaaaatcaaccaaggaaagattgacacgcagatcagaatcttgatcaggatcagtcttctctattcgagaatcagaggaaatcaatagtgcttcgatttctgcaacaaagtattattctattcgagtgttagaagagatgatgaaagtgtcatactcactaggtaagcctttgaagattgcagcaatgtgatctctggcacttagaacttctccaatggatgcaagaagatcaacatgctgcttgacttttagaagataatcattaagagaccttaatcctttttaaagcttttgcaacttggtccgaaactccaagatcttggaagaaacctgcaatgtaaagtgtttttcaagtgcattccagatctgtcgtgttgtattacaccctaccatgcgtgtgagaagactttcagtcatcgatgataacaaccaagacaccagaagttgatcctggacttcccaatctagaaactctagattgaatgtgttggaagcttgatcagcatcactcaagaactgaggtagtggagctcgatcttgaatatatttgatcagtctatttccacgaatcacagcaagcacctgctgtttccacaaaagaaaattgtg

SEQ ID NO: 389106 - DNA, 879 bp, Cannabis indica
ccatttacaaccaaatagggaatgaacccacaactttacataaaaacttataaacttttagcatttataaaaacaatcatctcaaaactagaaagcttcctatatcttaaacaagagacaatctagttttgagattctctttaatgcttctatctatatatattggagctatacattttccttcgaaaacacacaagttccgattaagccatataataccatagttggcactagctagtgtagcatagtaaatttctattaataaacttctcgacctttttccttggagccaatattcaagaagcaactcaaaagaagttggccaaagccactcccccagccacttcttgatattttgcattgtagtggccaaaaattgctctaagcccaatgaaaaggcccaacgatcgaagtacttacaaagcccacttacaagttagatacaaagaacccataagcccagtggctcacatgggccacgcccaatccatgccttttgggtcatacccatattcgaatatccagcccacaataaagcttgattttaaagtgtaatgttagggttgacgcgtggaggaagaagaacgttaagtttcccaactaacccacgaaaatagcgatcttccctagcatagcggagcgagaatatcaaccctctgagtgatacgctaaggggaggacgctcatctaggaacaaacctaaaagatgacgctcatccctggagaagtgggggaagaccgtttctctagggacggaccacgtttcaagaggtagccgttttcctaagataataaataggcccacactgggactgagagagaaaaggatagacgaatattcactctctctctctctctctctctgtaaagcccgcttag

SEQ ID NO: 389107 - DNA, 1156 bp, Cannabis indica
ttatatattttaaagtttttctacagtgaagaccctaaaattagatacattagtagacagtagacaccctaaaatttaaacagtgattgattgttgattgacggctcacgatattgttgtgtgcatttacacactgaaattttttgacttttaatgaagataaagaaaacaaaaaataaatatataatttaaaagattcttcaatggcattaatttaagttattactttgcagtggccttcttttgttctcttgcccaaaaatctccttttattttctattcctccaaacccacttttttatgcttctaagatttcaattccagaaacactttttactttgatcttcgtataatgctatcatgttctaaactaaattgtttagagaatgttatgagagaaaatacagagcaaaagataatgaaacaaactttattactcaaaattgaatatagaatacaagagcttgagaggtttatataggcagaagataaaacagagttaggtaatatcctaactaacttattaattaactgacattagctcctaggagtgttcataaaataaccgatctaatctgtaggaatttttagataggattttactatcttgccccctacaccaacaaacaaaccaaatcaatattaaggtcaatttagacctttccctgttcaaagacttttcaaagtctgaacagtcaaaacgactgcgttttgtatttgaacaaaacccaaggctcgagaatcttctcagccactttctctctttctctgtcttctcttcgaaaccctagcagagagtttctctctgagaaactcgaagctaggtttcaatcttcccagaaaaatcaagcccctaaacacactactcagatcagatctacaatgatctgatctgtaaacacccacacacacaaacagaattaatttagggatagaaaacaccagatttttcccgaagttcaccaacgagttggctacgtctccgtttgagctgctcctcaaatttgagagctcgattccactatcaaaacgtttcagacatacaacaatgaagattccaagtcacaggtaacttttgactggtaatcttatgtttaatacaagtgtttatgtgtttattcagtgtttaatccctctctctctcttgatctaaccc

SEQ ID NO: 389108 - DNA, 847 bp, Cannabis indica
tcgcatcatctcgctgagtctggctcaggcaaggttcgtactcgaggggtctctcattgacatctcatctttccttgaggaaagtgagtacacgtgtcttttaaataggagtccggtcctgagtttctaggtgagaaaaatctcactataacaataggaaactcagtatttgaggcagtagtacgaaacacaacaactctacctcaagatattccaagattagtatgagtatctctctcgggctgtacctggtttcaacttgtcttttattgatcttccaccattccccactcctccttgtgctagattgtcatcacatcgtctcgagacacaaaacaacaataacatgacattacatgtctttagaacaatatatattttataattaactttacaacttaacttttttaccgaacatctcttaatattttgtttatttactaataattttagaacttttattacttactaattttagtacaaatcgaatatttttgaatattactttgattgtaatactttttaattatcattttgagtaccttttttatttatgcttctttaaaatttaattttctacttaaaattaattgtaatattattataaattattaaaatatagtaataatgaaataaaaacaaattttgagttggtaaaggtcatactggccaaaatcctaattacgcgaaatattttactgatacattgttgtgctggcaaaataattcacgccaattagaaaaaatgcacaaaacttttgctggcgtagtaatgcactggcaaaagttatttaagctgaccattggttgtgtaacaccctaactaacataggcgtattacgtgatt

SEQ ID NO: 389109 - DNA, 1377 bp, Cannabis indica
ccacgattctctcaagtgtgtttcctcctaaaattaggttctcaagttatgtgtaagaatcagaagtacagatttttataatgtgtttatttcgctttagaatcacaataaattatttacttgttttaaaaattatctaaattaaaattatatttttaatattaaactaatgaatatgaaattggcaatagaagagagtaaaagtgggaagccctcactcattctttgcgatgacgaaacctcattcctagattaattgagtaaagaatggtaagaatattcatcatctatttcttttttctaaacaaacattgatacattctgcttattaggttcaaaatagtgctgaatccaatcctcaatatggatctgaaacagttgctcatggatcaggtgacatccagcacacaaacatatatcggggttgaaaccactatctgcttctcttgcttaattatttatttatttatctatttactgataattgattgtatttagaaatatgacattttgcttttctcagttatttctgcaatggctgtgatttgtgtacagtctccataatgtatatcttcggcttattttgtttgtttttttctttctttttattttaataccaagtgatccttggtaggactgatgcttccttccggggtggaaaaacggttggattcattttattaattttagtcaaatgtaaacataaagcttaaaattaaactttaatagcaaatgatttttaaatctagaacataatattctccattaatattgttgcttcgtatttgaaaggaagtttatgtctcccaacagcttctttataatagcaaaagctttaaaaatttaaagaaaagtgatgaaataatgctccaattatttttttttttttgaggaatttaactgttatataaaacaaacagagttattacacaacagttaactgaggtggacgagtatctttaaccatatctactatgtttccattaaaagagtatatttagctaatttatgagtatccctattagcagattgaacaatatgtgatatctgaactccaagaaaattgggtagaagatttttactatcaattaaaacacaatgaaaattagagactaaaacatcagccgattgcaatcttttgaccactaagaatcagtttcaatataatttactaggaattacaaattaattagccattggagactgtacatgagagctataatttccataatttctggttcttcaaaatagagattttttaaactttctctacatgaagagaagtttaaaagcttcttcaaatatttttaataatatattttttttctctcctataaattattttttattagtttttttttctttgtttattttttt

SEQ ID NO: 389110 - DNA, 1592 bp, Cannabis indica
ctctctctctctctctctctctctctccctctctctctcttatataaatatatatttatcacactgtcaacttctctctccatcttttaacccaatatattacgaaataaaatattaaaaaaataataaatatattattttcaagagttgactaaataaagtgtgtattgcaaccttatcggtttaattttcctccaccgcacatataattattgattcaattcctataatttgactcaaataatctatttgtcaacttatatatattatattctgtaaaccacttaacacagatatcatcattgaaggccattaccacttagcagtcaccaccacaatacataaatatatatgtatcactaatatcacaacaatatcaaatctattatttaaacatatatatattatatttatatagtgatgcgtcacctttttcgctacaatcaaacgtgtaattatactatttattaaataaattaaattgttatgatggatcaggggttcatattactgtcagtccaagctcatcttcctcaactaaagccaccaaaatgcaacataacgagcggagagttgtgcgaagaagcaaagggtttcaaagcgttgatattcttcatagcactatatttggtggcgttgggaagtgggtgtgtgaagcctaacatgatagctcatggagctgaccagttcaacccagataaccccaaacagaccaagaagttgtccacctacttcaacgctgcctactttgctttctcaatgggagagctcattgctctcacactccttgtttgggtccaaactcattccggcatggatgtcgggttcggtgtctcagccgcagccatggccatgggcctcatcagcttagtctctggtactttgtattaccggaataaacctcctcaaggaagcattctcactcccattgctcaagtaaaccaatcttcctaatatattttctaattttttaggtgtgatttaatttttctatattttataattaattaagagtacataatacacacagcggcacacgtgttcaaactctttttaaaatagttagtccaagatttaatgtctagctaggtgtttggttcacatatagttacacccctattttatattatgttatatatgtatatgtatattttggtaaatacgctatgtttggtttggtcggaaggtaaatttgagtttcaaaagttgatatagactttgatcacatggacaacagtactgtatggcttttgaacttgtggtcgacacatatttactaagattgaataagacaagagactgtttgaaaataattattgacagtcagctctctactgactcaatcgtaatattacatgttggattttaagtatagataaagtattattacgtgtatatatattaacttaattaattttttatttattaaaaataatctggttaatttttattttccaaggtttttgttggctgctatgtgaagagaaaccaggcttatccatcaaaatccacaaaatgcttcatggaatccatacaatgaactacaacaacaaacgttggctttcgtctgatgctgacactttatttccttc

SEQ ID NO: 389111 - DNA, 910 bp, Cannabis indica
caaaaaaaaaaaattgttgaaaggtaagtaaaaaaaaatcgtattgaaaaattgatatcgttttacttattgcaattaggttaatatttgattattttttttgttgatttgtagttatctatgaattgttttcatgtttttttgttaaattgttctaggactgtttttgagttgttttttaatttactaaaataaagtattttgtaaacttggtactgtaaaaattgtaaaaatctctgtatcccaattattttttttttttttttgttaacattttccctagttttgcaagtttcccacaattaaataagtcaatagtcgactagttattaaggttcaacccattattaaaaattctgtgtttaacttaagcccaaaatgaaaaaatctccttaatgtgtttattgtccctctttatttaaaaattatggtgtttttgaaaaagagttggactttggacccaaaaaacccatttgttaaaatccaaataactctttcagtcgaatatttattttaaaactcactcatattttttccatcaaatttaagctttaaaccctttatttttcaaaaagtttcattattttaaaattatccaaacatgatttttgcccacctttgtacctcttccatttcttcaagacaaaaccaaattggacaaaaccagtggggaattaaagaaacaccctctataaatcccaacagcttaattttaaccaaaaagttatcgcatgacaaagtcaccatctcaaacctgccagttatttattattttttttttctttcaaatttaagggtttcattttgtcaaaattgtaactccaaaactataacaaattataagagaaaattacactttatatcctttttatattgtccttttttatttttaccctcttttttaaagtct

SEQ ID NO: 389112 - DNA, 886 bp, Cannabis indica
ctttctttcttttcctttgttgatccagatattgaaatgagagaaaggggaatggttttacaggctgaatgagggagccaaatgaagtatatatctctctcttatcttctgtttaatttttccattgaagggttttatgtaagtaagtaatattgaaaatttggatcaaggttttctagtaaagttttaatctttttccctttttgaattttcccaaaaagaaaaaagaatcaaaaaacaaaatttgcaggagctgctctgacattttgactggtacaatatagataaagaatctcattcatgtttggtaagctttaacagattgagactgagtaactaagtagtactatctttctactttctttgtctttgtctttttgtttttctactatacatactactttattaattccttgaagaaaaataaaaattactactttattaagctttactttgagatcatgcaattattattattattattttaaaaaaaaagtgaaaagaaaaaaagggaaaagtaagcgtgcaatgttaatttagaaatgtagtggttcattattattgttcatgatatgatataatgtcagagataaaaaatgaaaaagagagtaaaaaaaatcatgatttttcataagctttttaggtatttttcaccattagagttcaatataaattaaggggaaaaaaaggaatggttttttactttaaaatcataccaccccattatttattaaaacaaaataattatgttcaagaagaatggagaggtttgttgtttttttttttttttctagttaaactacataatcatttcctcactattcaaacaatcatattctttaacactaagagaaagaaataacttttatgaagtgtgtctaattta

SEQ ID NO: 389113 - DNA, 1113 bp, Cannabis indica
ttaaactaagcggtctatacagttctcttgctccttcgattattgctgctgcttcatccacccatcctccttcaacccataagaacaacgccaatgcttcttggagcaagaaaactcaccctacatgttctcactgcctcaaacctggtcatttggttgagaaatggtactttctccatgcattccctcctggatatggtgacaaacacaaacaatccgattcagccaactctaatcaagcttcgaccactatttttaggggatatgacactacctcggagctgcaactcagccaacaacttattcaactcatgagcaagcagctccagcatccatctatttccagagatgtaccttcgagtgcctctaatgtgtatggtaactctgatttttctctactttttatattgttgataatggtactacacaccatatatgcaataatattagatgctttactacctttgatcataatattgttgctactttaatcactttgcctaatggtgaacaaattaatgtccctacttctggtattgttcatcttaacaagaatattaggccgaaaaatgttcttttcattcataaatttaattcaatttattttcggtgaatgaatttttagaaaataacactaacttgtatattttttttcttgctatgttattcaggaaccctctcggaatttaacgattagtacaacttagaaagtcgggaagctcttcttctttgagtaaaaatttttttttttacttttgatgctttagtttcagctaataatacatatgtactactgattatccttggcatttttgccttggacatccttcaatgttcatttctaattcaataaataagacattgcaattttcttcgaaaccttatggtacacattgttctatttgtcactttgctaataaaaaacgcctcccttttcattctaaaaataacatgactgctgccccttttgatttaatccatattgatacttgggccccttttcatattgaaagtattgaaggatatagatattttttatcattgtggatgatttttctcgctttacttgggtctatatgttcactgttagaaataatagagagattacaatgg

SEQ ID NO: 389114 - DNA, 513 bp, Cannabis indica
aggtttatggaagttgtgtgtttaatttatagtaaagaggttattgattggactttcttcgtaagaggcttcataaaagttgtacttactccatcccaccagaaaacgagttcatattaactttgtaggacatccttaatttttgtttttgtttttaattatgacatccttctttagccacgcagcttccgggaatgtgccggtcttctcaataataataataataataataataataatggtttatctatttatttatttatttatataagtagtaatagtaataaaaaagggtattcgtcacataaataggttaaatacttcaaagttatatttcaattacttccatcattaatagtacttgttaaattctatagctacttattagagttagtctcacattaataatgtgtggaaataaattattatatttaaaataaatagactactcctttcataattagttttgagatagaaccccatcctgttagacttttatttgggcttacatta

SEQ ID NO: 389115 - DNA, 1130 bp, Cannabis indica
ttactggcttttgaagaaagacaccaaaacacgaaacacaacgcacaaagtcggatcggagaagaccggccaagaacaaacacaaggtcccaaaggaccaaaaaccagaacacaacaaaaacgaaagaccacaaactaaccaaacttaagagaacagacctaaacaaagaaacttaaaaaaactaaagcaaacaaacagccatctgctcaagaagaaagcagggaactgtcaaaattggacagatcgatagtcccaaactggtttgtgtaaggttattattgtaaataatttcttaatttcaattttgaaaaaaccactcaaaaaaagaacacggacgagtattatgttgaatatacggtaggtggaatgttaatttttaataatggcttgtgtaaggttattattgtaaataatttcttaattatatatattaatgtaaagatccctttaataaactaagggaaggtttaggcccgtttggcacaattttgaaaaaattaaaaactattttttaaaaagggaaacttacaaaaatactgtttttttaccaaatgttttcaaaaatactggggtacggcaaactttacatttttattgtccatgcccatttttatttcttttatactgcccagacccaatatatttacttttatactgtaaacagtaacaaaacacaaacggaacctctccttcgtggttgggaacggacaaatcaacaccggaatcatagaaacaccaggaaaaaaccataaaatctggcaaagagaaaaaattactaaatcaacaacaaattactgttttgtagtgttattttactgttgttttaatatgaaaaaaaatgccacgtaaatgaaatattgtgaaaaatgacaggacatggaatctataccagttctcataaagagcaatagacaatgggaaaaaagaacataattatttcaagagaatgtgacaatgctcgaaaacaacacaacaatacttgaaaataacacagcaacaacagaatcatacacattggaacaccaattagaagaaggaggagagtcaaaaacaagagaatttgaaaacgacaaattcaacatagttgactatgcgaagctggttgctaaaaaaaatggtagaaaaactt

SEQ ID NO: 389116 - DNA, 1218 bp, Cannabis indica
ggaaaacaggttctctgcaaatgtattccttaccttggaattgctattgcttggttctctttctttttaccaaaatttcaatataatgtctatattttttatgtactatttctatagcacaatttatagctaatttatgaactggtggaataaagaaagattactcctaattgaatgaatcttggcatatacaatcaccctgctattctgtttattagatatctcaagggatgatcccagattttaggatttaactgaaggtttattaaggaaaaaactaagtaagaaaataattatctcttggtaattataggaaagcttgaaagccttttgcttttagctgtttggtttaaattggctttcatattttcttacatatgtttacttcatttttcttatattgttgttgttggttatttttgtagacacacataagtaataagggtaataaggggttgattaattttttgcatgtattattttcattaattattaaattgatatgtgtatgcattaatttcatcatgtctttcaacttctgtacatcctggttgttacattgaattttaaatacattcaaagttacttgtaatttttattattattcagcaaatgttaatgcttcattgttccaataagtggaagttggcaacttttggaggtttaaggatggcaaacttgttttcctgcactttccactgcttaatttcacaggtgcatcttcttttctcggttgtttttcctctgctatacttattgttccttgctttgatgggttttgggttgactctcaatttatgctgctctttattttttattttttaaaaaaacaagtttctttaattcaatttcttgtatatatgatactatactaagtttataattttcatatgttcttggtgattttctatgttatttgttaatacttttttattctttccttgttactgaagttgggttttgataaatgatcaattgggaaaaagataatgatggttcaaatagaatatttgttttggttttccctatgaaaagataaggtgaaaagggaataaaacaatgaaagggaatattatgaacaaatcaattagaatgtggttctggtttgaactttgttacagctattttaatttggaatggcttaataaaaatatctcccaatcttttgaaacagaaagcgattattttgtggacatatgatccttgcgaaagggacgc

SEQ ID NO: 389117 - DNA, 1402 bp, Cannabis indica
gttatatcttgtgttaaatttggtacaattgttagcagcatgttacaaatttggtacattttttagaataccattagaattgtattaattttaagtgtggtaaaatataacaatacactgtttaacactttattggagatattttatggataacatgttatattctttttttgaaaggtaattcattcactgaaacattcttacaaaaggataaggccatacaacctttgtatagcataaatgacacgagggagaacaaccccaattcacatagtactaattttgttaatcaaagcataatttgctaaaatatgagccatcatattagcctcacgatacacaaaagacaatcgaagcatgattcatcaacgttgaatttcctgtagaataacatccacatcatgacaacccccatcttctccctgcattaagctaattgcttctctacaattcgattcagtagtaaagtgagggagttgtcattgaatgccaatctgtaagccttcccaaatcgtaaggagctcagttgtgactagcaataaatcatcctgaataaattttgatgcagcaaaaataatactaccatgtgcattaggtactaccgagcctatccctcctatcggagtttcattttttaaactggcatcaacattcactttgtaacacccttcaatgggtggttgccaacgtatattttgtcactgttctttatggacatgtttatcttttggtgcctgaaactcattcaaattatttccaaaccaatctagaacatccctccctctcggcttacacccccatgtttcatgctattacatatagaccataaataccatgaaaccagtagaaaaaaaaaataaatttatttgggtcccaaaggtgagataatctctatcaaatgagagtatatcagtttgagcccaagacattatatcatcttttagcccattaagtttccatagttccttattgactgagcaccccagagagtattaaagattccttctttgtgtttccttgagcacaaatcagaatcaggtgtcaccctcaactttcgtttattgagttcaacattagttagaatccatgagtggcatatcttccaaataaaatgtttcacttttggaggtacctttaatttctatagaccaattctccatggcatgcgcattagattatcatctaaaaatcttctcataccattccatatatataatggcatcatcatcatcatcacaaaagaatcgctcatttccttcagatgcaaagatcatcctttccaaatccaaaaagtcaggaaatgaaagggcctctcacatggctgtttatactcacaaccattctctctaaacttggaccccattttcaacatgattttttaattcacccaaagtatcctttt

SEQ ID NO: 389118 - DNA, 1321 bp, Cannabis indica
ttcgtaacagtcttaaagagagcgaccaagtcctcgactcaacccaaatttttatttggtaattttgttcctctttattttctaccacatccattccaataattttaagacgatctatttttgctatgaaaaccgatcagaattctggtgttgttgatattaatataccttttcgttttgaaggaaaccattttaaaagatggagacaaaaaatattatttttcctcaatatgaaaaaagttgtttatgttctgactactgataaacttgttgtttgtgatattgctaaggatgatgaaaagtagaagcaaactactgatttagcaagcttggtcgagaatgattttttatgcaaaaaatttattgtgaatggtttattctgttgatttgtatgactactacaactctggaaaaattaccaaggaaatttgggacgcacttaaaaggaaatacgacattgaggaggctggaactaaggagtacactgtcagccccttcctcaaattccaaatgactaacgataagtcagtggaggctcagtctcatgaactttaaaaaattactcatgaaataattttgaaggtatgttttagatgaacaattctaaattactgttattatttcaaaattgccttctggttggaaagattttaaaaataatctcaggcacaaaacaaatttttttttttagaaagtctgatcactcgccttcgcattgaggaagaggctcgcaaagaagatcagaaagaagaagtgcttgttgtttcaaacaacaactttaagaaatccattgcgattttgaaacccgttaggaaaaatgtcaagaatcaaaatcgcaagtatgctccaaagcgcaacaatttttctcaaaataataatcaaaattgtgttccaaggaaccaaaaaaacaggagcgaccccctaataataagaatgacccaagaccatttttgtgctttatttgtaacaaaccaggtcatatggcacataagtatcggaacaggtctagttctgatccccatgctaatttgattgaagagttgtcttatacagctataattttagagatcaacctaattggtggatcagaagggtggtgggtagacactggcacttctcgccatgtctgctatgatagtgttatgtttaagacatacattgctacgactgaggataagaaagtgttgctaggcgactctcacattacaattgttgctgatactggtgatgtggaattaaagtttacctctggaaaaactatgattcaaagaagtcatggatattctagagatgaaaaagaattgttgggttttatgctcta

SEQ ID NO: 389119 - DNA, 4693 bp, Cannabis indica
tctggacggccaagcaaccttagaaaaaggctgtcgaccagcgtgtcctttgacactaacttgactttgttttctttcaagcctgatgaactaacgtttcacgtggcaactcctgggggtctttgagtgctctttatgagcacgggagaccttggaggctgccctcctggcgagggaccagactatatctgagatggaggctatgaacctagagaatcggagcatgatttccggtttggagactatgctttgtactaggaacaaagaaaacaccacgcaggctgctactattactaggatggaggctgaccttgtggggtgtgaagagtagttgagagcaacccttgctagctagcaggccatatgggatgagtattttgacttgtcttcaaaactcatctatgagttcaagctgcgcaactccaatgttaacctttcatacatgggcaatgaggcttttctggagagcatattggctcaagggaaagcattgttcgagagacggttaggagtgtagcggattgtcgtccagccagaaggcgggatgtcttatgattacgaagctgggatacgttcctaaaaagacttattcaaatgggcttgacccactttacctttactaaaggacccactgatgagccttcgatgctgacctggactccacgtctccaaagctaaaaatgcggataacaatatagtttagctatgcggtcattacaaaagccttcttcagaaaggactctttgtgaagaagaccctgtatttatatctagtcatatagaaggccttttgataattaatatttataaatattttatatatttataaaaaagtaaataacatcattttagtatcaggttaaatgtaatttattctattttttttgttttaatttcctaattaatcacaactatttatcaatgatctattgacttatttatcgagattttgggaaaactaattataaataatcagaactgaagaaataaataatcaaaacagaaaaagcaagaaggacacaaatagttgttacgtgtttagggagttaactagctctagtccatgagtcgattttattatgtaaatctttagcctggaaaacctttggaaatataataaatgtaatttctcgagtttttttgagcaagtattgtaagagaattcaacatctaatttgtaggattcattgggtatttatagtatttcaagaattacacttagtttttcttttccctctatttggaagtttataataaattacacacttgggcttcctcgtgaagtccagcccacgaaggagaagatatgctgactaggcagattggattcagttggatttaatcaaaaccgtgtcctacaattgtggcaattaactatgaattaattacttgatgtctattttatgaattttttccttttaccttgatgcggttttctattgagatctagcgaacaagtatttccttatttttacattgaaataaaaagggaaattagactcgtcttcaaggaacacgatgtcttacccttttggcctcacgatactggacttgcttttggatacgaactgtcacaacggaaggttattcgatcacggagttgtgatacgttcttggaaactcttgtctaaatgagcctgtcccactttaccatttttaggagatccactagtgggtctttgatgctaacctggattccacgtgtccaataccgaaattcaaataatatgacttgttaatgcatatttttgttaaccaatatgagcctcacggtatgactccacacagaagaaataaaagctgtaagaataaaaatatgaacacaagttttttacgggttttgcagttaaaattctgcagagtccacgagtcaatcttattcagatttctgattgttttttctcaaggcccctcttgtatgagttttctcgtccccttttttgatcttgtctatcactattacatagtggacagttaattacaaagttgactgtaatatgtttgcaacaatcatccctaaaatcatgggatttgattacatgtcacgtagtataaatgtggtttatgatttgaaaatcatatagctgtgattttcccgcttttactgggtcataatgatcgtgttttaaatcacgtctttaattatggtttctggagttgtctcgacagaagcttggttcaagttatctcagtagcaagcttgggccatttttccttctgaggtgaacgatgcatgtctgatgttaatcgcggttcttatgtacaatgaattcttcagatctcatatgaatgttagcttctgacttgctagggttgtgagcctcgctgacgctaacgggatgaagttatatgaggtcttcccataatgagacaagtacctcgcttacttagtcttgagtcgatctgtttgtaacatttagctcatacactaaggacttttgaaattggtatacgtcgcttttgttttccaatgtgtactgtccttgatgcctcgcaatttgtattcagcgtcatatggtttcttgccaatatgctaagtacaagtttgtatattagttcctcgcctaagaccgtacagtctacaggctacaaatatactctgattctcatgtaattaagagttattccttataaagcgattgcattgatccttattccccttattgtgacacgtgttcttcactgagatggcagttcaatttcgggtataacattactaaaagtaagtatattcatcatgattacgaatttgatgtaacttttaaaaatattatatatatatatcctacatttatttcttttatataaagttatttatttttgtctatagttagttgcttgtaatagccaaacaaggttatgcttacacgagctcgttgccatgtgtattattgttattagatggacagaacataggagagaaaactttgacaagagatccgccaccattttataataaataaactagaaataaaaaaattgacacataagtgccacataattacgatgcttagaaatgctaagaggcaccaatggtgtctagaattctcggtgtcatattgctattgatgcaattaattatcaggtctcatatactttaaggtaataactttcggaaaatatcgataactaatcataaggcgtaacctctagctggtgctaggcaccacttgcgcccaatagtaatgctctcaatgttatcaaggctcttagtaccactatgagatagcatcgtataattggttagcgatttttataatctttattaaagtaaaatataagaactgatattgaatgacatcaatagagatatttttttttttgatgaatcagtaatttcattagtccaaaaaaaacatttttttctacaaactaaaagcaagagaggcctttaactttatctatacaatattaattacaacatgtaaacccattatctatcactttgtttaatctttttcggcatcacaagaattattctattcttaactacccactttaattgctgcattacttcagaaatcaccacccttttggaatcccaaattttatcattcctagccatccacaccatgtaaacaagagcagcaatcccagctgcaaaaatattcctttttaacctgaaaattttggcttttctcacccatttcatcaagctctgtagtgatgtagcaatggtattcaatctcaaccattccttcaatcgccttaggcaagctgaagcaaaactacagttggaaaacaagtgctctgctgattcagcagaaatattacaaaaagtgtaaaaatcgtgatcaatcagtccatgtttgaacagtctatctcgagttttgagtatatttaccatagctaaccaaagcaggaagttatgttttggtacattcaatctagaccagacttcattgctccaagaaaccttcccccgatcctgttcaaactaactgttaccatttgcaattttatgttctttggcagcaaagacatcttgctgcactaggaactaattttgtctttgagctccaccatcttcctccaatacaaactcccaatcatcggagctttgtactccaaccatgtttgttgtttaatatatacattgtgcaccaatttcacccacaaaattatccttcttttcttaaatttcccacacatgtttgaccatggcagcaatcttccgggcacatatgggcacacccaggtacttgaaggggtcatgttgtcttgtgaagccagacatatctaacacctttctaacttcatgctctctcattccactatagtacactactaacttagagttattagccagcaaccctaaagttgcacagaacagttttagagcttgcatcacaaaaacatgcttttgaagtcccctctacaaaacattaacacatcatctgcaaaactcaaatggtttaccaccatgttagcacacctttcatggaaccaaaatcttttttcttctcaaccttcttcattattatactgagatatttcatacccagaacaaaaagcaaaggggacattggatcacccggtcttagtcctctcttagcttcaaagaaaccatgcatggttccattgaacataagagaaaacattggtgttcttacacatatcatgaccaagttaatgaattgttgggttttatgccctaaataaaactccatttcaatgtaatctattttattcaa

SEQ ID NO: 389120 - DNA, 670 bp, Cannabis indica
aagtgacatttcttgtagtatcaccaccacaactgttgagtcactgccataataacctacaaactcatatctaaaaaaatagagagagaaagagaatgacattgattgagagatacaaagtgagaacataacttaacgtccaaagctgacgatcgaagaggaagagagaaagaatagaatgcatgatagggtgagggagaagattgtcagcatttggacttggagcatcatttcaatcacaatagagaaagaagctagaatgaggtagcaattaaagagtaatgagctggatagggttaggaaaaagaaagaaggatagagttaggattagggtgagggatatgttcataactaacacaattagcccatcaattacgttaatttttcaatacaaacattgagccatagtttctagtgacacaaatattgagtcatagtattttgtgttagttaacagttgagtgatacaaatagtgatttttatactagtgtcgtgatagtataaaatatatatatttgttaagttgtggctctggtgtaatattttagtacatattttgtgtttatatacatcacgattcattatatatactgatcaaatgtaggagaatttttatttttatggttatttttttgtaaaagttcagaaaaatatagcttttttttgaaa

SEQ ID NO: 389121 - DNA, 1493 bp, Cannabis indica
tattgaatgacaatacaatattcgacaaattaatgtgtacaaaatctcataaacttaataatattatcacaaacgagcatgagaatgataataatttctctattaaaatttttttttttcattttatataacgaaaaaattgatactatcttagtttcacattttcaaccccatttttttttaatatttctttataaggagtgtttattaactcctattatttatgagaactgtctttattcttttatttgcgagttgtactgtgatgtccaaagaatctgtgtgtgggaattgttagagatattattgcaacggaaagaaaatcaagatattaccactctattgcaatataatacaaagaccaacaaaaagattaaaaaaatgtcattacaacaattttgataattaggggcggacctattactggcagggaaggtccgcccctaataatgaggttattactggcggatttagggggtccgccagtattagtatttatttaaaaatatatataatttaaaaacaacaataccggcgagttatcattattagcggtggatcccccctccgctggtattaaaggggtggaataaatgcaaaaaaatacccgcttatttattcaaattagtattagcggcggatcaataccggcggggatccgctgctaatactaattttatttataatattaataaataaattaattaatataaatataaatattatcatttatatttatctgaaaaaaaaaataaattacaaatatatttaccgtttcttttttttttttaataaaaaatactaataccggcggaaccccgccgctattaatatgtcagaaattaaatctgagcattaactaccggtggggcccgccgctaatgccccgccgttattagtcattaatagcggcggacgtgtcagtctgccactattaatgactaataccgacggggtattaccgggggcaataccggcagaaccccaccggtaataccaattaatgacagattttgggtttgataccgacagactcttccgccccttgataactctatgaaaatagagttatttatatccttttgggcattaaattagttttgttctcaagtatttttagtttattttagtgacttttatttggtttttatttagtttgcataaatattaattttagtattttttagattaaattttaattaattttgtaatattttatcaatttaatttagtttcctattttataagtgttaatctcaacgttgtgtatttttgtaaaaagattaaatgtacattttgaacttgtctcatggttcaaaatatggagtaactatcatcaaagtggaatgagctcacaaagtccaaataaattgatattcattattgggcctttgtttcaatattgaaaaaaaaacaaaacaaaacaaaaaaaaaatgaaaagaaagctacaaatgggccttgtgattgaatttgcatttcatcatatatatat

SEQ ID NO: 389122 - DNA, 1106 bp, Cannabis indica
agagagagagagaattaattgggtgtttgttgttagagaattaatattatttggggtatttttttgttatgagattaacatttaagtattataagtgaaattctctactagttacttatttttcgtgtgtaattactaagggcaggtttggaaagttatgtaatcggatttgtatgttattagaggtgattttataatttggcatgtttgtttaattttgtatgtaattacattgtatctgtgtgctctgagataatttaggggttccaattagggatttttacaaaattattagattttaggtaaaagtttataattttactgtcatatgaatttttttttataaaaatactgtaattttataaaacaacctaaaataacataaaacaaccacaaaataacaaaacagaacaattaaaaacaacaatagaataactaaaaaacaattttagaacagcagtaagaacttaacacaatacacagtataaaacttacccattatttttgaaaaaattctacccacaataaaaataaaaaaagttagaaatgtcagtatgtggtgtaaaagctctttccaattatactctccattctcatggctcccatgagaatttagtgtaattgctacaaactttctattttattttttaaatattaactactaaaaaatattattttcttgtgtaattactaaatattttttcaaacaagatataaagaattcaaatgtaattagcaactcatatccaaacacacattgttttttaaaatagtataattactaaaatgtataattaccaccttattaattacactaccttttttttttgcaatgaataaattcattaaaaatataataacattatacaagctagttatgaatactatacatcctatgttcatcaaataaatactattcttgctaggatgatcaaaataatactatatagtatatacccaacaaaatataaagatattcatatctagccaaacaagttaataattcatatgaagagcatgcacaattaatcattgaacaacatagattaggtacactctttgaaatctgaataacaaacttgtaaaaacttctaataataatctta

SEQ ID NO: 389123 - DNA, 1745 bp, Cannabis indica
atcattctcgaactcgacaacattggtgtcaagattgaagaagaggatcaaggaattgtcctattgagttcactatcaaggtcttatgaacattttgttgacaccatgttgtatggaaaggagactttgacaatgtccgagatcaaagctgcactaaattccaaggagactcagaagaagtctgatgataagaatggaccaaatggtgatctaatggctcaagttaggtctgcgaaaaaacaaaggacataagggcaaccgttcaagtggaaatcaataaagaaatcacagcaacaagaacaatggttctagtcattcaaaatctaaattcaagactggaaagttctgcaattactgcaaggaaggtcatctcaaagatgaatgttatactttgacgaacaaaaataatagagacaagagcaaagacaagaatgacaaaggcaacaagagtgaggctggtctgactgctatgggtgttcgcggtgcaggtggtgcgggttgtaacatttttttcaaaccaaaccacatatgcggtttttataatttctcaaaccacaatcgcaccgcaatatcttaaaatcgcaaaaaccacactgcactgcggtgtgatttgagcggtttacactatcatcattatcaaacattataatgaaaatttaaaaatcaatctaataaaattttaacaatacaaaaaaacaatcttgttaaagttttaacaacataacatacatactaagggcaattgaatgcctatctcttggctaccctgatggggtaaaaggttacaaactctagggtcttgaactaggtttcaaaagatgcatcatcagcaaggatatcatcttcaatgagaaggaaatgcccttaaagcagcagaagcaaatagactacaaggtacagacaacaacaaaagaactcaggttcaacttaccaatgatacagctgcatcaaaagagaggttagatgaatctacatctactgaggcttctacatctcaaggtggacttgagacttaccaatttgctagagatagagaaaggagagatatacacccaccagacagactggaatttgttgaacttgtagacttcacagggtttgcattgtatgttgcagatgagactgacattgtagagcctacatcctatatggagaccataaacagcaaagataatacaaagtggcttctaacatttctggaggaaatgtcatcattgatcaagaacaaaacttggatcatagtcaagagactacgtagacagaagcttgtagattgcaagtggataacgaaagtgaaggaatgtattccagggattgaggataaaagattcaaggcaagtctagttgccaaaaggtttactcaaagagagggagtagattacaatgacattttttcatcagtgttcaaacaagcctctataagagcctgcaaagtgtatgaaatccagcaaatggatgtgagaattgtaaccttgaagagaaaatctatatgaggcaatctgaaggttttgaaagtggtgatccaaatgaaatttgtctattgcagaagtccctctatgacctgaagcaggcacctagacaatagaacatcagatttgacgaattcatgacaaaaatcaaattcaacaagagcagcaatccaaaaggtgaagttgcaggtatgtggacagtgactatgtagacactaggagatcacttacatgttatgttttcacagctcaaggtggatgcataagttggaaatc

SEQ ID NO: 389124 - DNA, 1032 bp, Cannabis indica
ttctcccagctgatctcgtcatcggcgaggcccttccatttaactagttactattttctcttctttctcttcacacaaacaattcttttgataaggatttcttctggttctttgttgttgcatcattgaatgctgatgttatccctggtagactggttgtgagctggatcttctagatcttcatcatacggattgaggttgctgacgtgaaggactgagtgtctcttcatccaagaaggttgttcgaatttttaagaggctaggccaactttggagatagctggaatagggccctcatatttttgcacgagtctgatgtccttgtctcctcaaaatctcacttgttctggctgtaatttgatcaacattaagtcacttgctttaaactccatcgattttcatttttgatctgcccacttcttcattcttcgtgaggctttctctaagtatgcttgggcaatctctgtattcgtcttccggacttttgtaaaattgaaggcccgtggattccgtccgtggtactcatctactgtgtggggtaacaatggttgctgtctattcataacttcaaaaaggctcttgtttgatgtagaaatcttctgagagttgaaataaaattgagctacatcaagtagttgcatccaattcttctagttatcattgataaagtgccgcaaatactcctctaacatcccgttgaatatttctgcctgcccatctgtttgtggatggtagctagaggagatgttcatttgtgacccaagaagcttgaatagttcagaccaaaaggtcctagtgaatctttggtctcattcactcacatattctaggtactcctcagtactttactatatgttaaaagaaaagttgaaccgtctcttctgttggacactgcttcaacactgggatgaaggttgcatactttgaaaatttgtccacaatcaccaagatcgcattcaagtttcctatccttaacatactagtaattgttgggttttgtgccctaaataaaacccattacaatctgattag

SEQ ID NO: 389125 - DNA, 1795 bp, Cannabis indica
aaaaaaaaaaaaaaaaaggtatgagactaataagcaatcagagtttaaatatataagaaactaaacaaaaaaaccataaataatgttgataagatttctaagaataaatatgactagaaaaatcgtcggggcagacatcatcgctagaaaaagtttctagagcagacacaaccgtcagaaaagttgtcggagtagacatttttgacgaagaagtagtcatcgccgaaaaagtcaccagaattattatcgtcactgaaaaagttaccgaagttgtcatcgtcgtcgggaaagttgtcggaataacacacaaaaaccagttacatgaaataaatgaatcaaaaattagtttcttaaaataactaaatcaaaaatcagttttgaaataactaaattaaaaattggctccttgaattaatcaaatcgaaatctgtttctgaataaagaattcaaaatcactttttgaaatgactaaataaaaaactagcacaaataaaatacaacagagtctttgcaacttacttgctattaatagtttggatcaatcttcaaatatgctcactagaaaaaaataaaataatataaaaaataggagccaattaaaattaagaaaaaacacaatatacaaataagaaggaatcaattctaaaaatactgagacatatcatattaaatagaactggttccataacaaaatgagtaaaagtaaataatacacaataattcaaaaactgattataattaaatatacatatatataatttaaagcataccacagaacaaaaactagtgtgctttttagaagatccttttaaaatagaactttttccctttaactaatttaaaatccagctgagaaacaacacaaataaaaaacaacacggccttcgcaacttacttgcaaacacatggtttagatcaatcttcaaatatgttggtaagaaaaaaaaaaaaaataatataaaaaattatgaagaatttgttaaaattaataataataataataaaactatatttaaattggagggaatcagttccaaaaatattgtgacataaattataacataaccaaatgagtaaaaataaataacacataataactcacagaccgttctaattaagaaagaagagagagtcagttccaaaatataaacaaaactagttgtacaaaaaaaaatgcataaaaacatacaacacacaataactcagaaatcagttttaatttcaaacgataaaaaaaacataaaataagttggtgtgagttttgaacatcaagtcctattaaattatcaattatatagcaatgcagtacaaaaatacactagataataagctaaacccatgataagttgacataatccaatgagaaaaagatgagagatttccttataagtgttgaaaggatggccgatggagacaatggaaacagtgatgattaagctgacgacatactccttgtaagtgggagtgtgatagtcagaagtctcgtgatccttaagggaaaatactgagtaagctgtgaaatctcacatcacctggggaaggtcaagtgtgacgattctgagactacacagctgaaaagtgctcaaatggatgatttgtactgcctatatcaacaaggtgcatcttcttttctggtagttgttacgaaaattgtaaaacagtacgcaagtgcacgtaatcaagtagtaaactcacgcaagtgaggtcgaaccacaggaaattggattaattaccactaaactatacttatgattctattcggcaaatcgatcattttcaagattttaacagaata

SEQ ID NO: 389126 - DNA, 575 bp, Cannabis indica
ttttatttaaaattatttagtgtttaatattttactgttgaagatttgacacagttcacctcttattgtttgataaaaagacacatagcagcatcacattccctcaaataattctgattaaataattattaacatatattttaatatgttaaataatttaaaaatcaacaaagaaaatcattaaaaataaaagataaacaaaaaatatcttaaaatcatgaaaaaattagaagaaaatcaataaattaaaattttaaatataagctctgaaattatatttgttttaatttttttattttgatattgtatttttttgttttacttataaacatttgatgatttttaaattttttaatatcctaaaatacattttaatttatttttaataatttttaaattagaattatttttgagtcagtatgatgctaacatgtgtttttttagtcaaaattaatactaaacaggattaaattttacaaaataaattattcatagagtttattattattattatttttattgacagaataaactattaaataaaattactaaatgtactttttaaatctaacatt

SEQ ID NO: 389127 - DNA, 765 bp, Cannabis indica
gcaaatatatctaaccataacagccacaaattttcaaattacaatatcaaaccaagttataacttaaataacaatgagatgagagctctagggtttaccttgatggaatacttccacaaactgttgaaccacacccaaaaatcagcaagaattaatcagattaaggaagaataaccctaggtccttggctgcccttcttggttcgaaaagagagagaggatggacaaatgagtttattgttttcttttgatttttcttattttccttcaaacaaagctatctttaattgggctgaataaacaaatatggccagctgccatcactagcgagagccacctaacccgcttaaccaaattactagaatacccttttacttatgacataagcaattttaagcctaggggtaaaatggcaaaaaatcataaccctgctcaaattcggtattccatttatctcaaatatttatccctctaagaaaaaggttgtagatttacctatccatcgcattttctgttgtcgccgagcaaaaatcataaaaattacataatgcatatataactcaaataatacctctagagtttaataaaatctttgaaattgaaaaattataactctaatgcctattttaaaaaagatacccacaacataatatattcatgcataattataaaaatatcaataattaacgctaattgcctttactaatccatattttgaaatgcggtcattacaattatcccccccgttaaaaggattttgtccccg

SEQ ID NO: 389128 - DNA, 1331 bp, Cannabis indica
aatttactatgaaccgcatattaatgtagtgaatggaacatttatgaaaacgttttttggcttttggaattatcaaattgggtggttttacttttcaataaaagtcttcaaacgcttctatgtactgtacatttgacagtcaagtcaactacgagttagcataaccacaattttaaaaataaaatgaattaaaaattaaaccaatcaatattttggtgtgttaattatttaattaatttgtgtaattgttggtaagagaatattaattattaccaaaaaaaaaaaagtcatggatggttgtggaaagaggtgtttatgagtaagcggaattttagagaaactgtctccaatttgggtaattaattatttaattacaattaaaaaaacgctcatttttttttgcagaataacgctctaattatgtatttatttattttttatgacaattttattaaatgtgaattatccattttggccattctattgtgtaataattttttttttggaatgtcaaaactatttgtgtaattattaccgatgtaagtttatactttatagtacctctgttaaagttgttttgatagactatattcgtgtatcatgtactactacatggaatacctataaattttaatttttttaatactttacaatatcaaaaataatatttaaataattttattaaaggcatgattgtttatacacttcaaatattcataattttttaattttttttaatattaatcttaaataactataatatacatataaaattaaaaataacgactaaaatattcttataaatactcaaataaataaaaaaaatattctatgtactattttctattttttttttgaatttacagtttagattactctagtaatttctctagtagcttacatggaggttgttatgtggattttaattgcaatgtaaattactctattagttgctataagagtttctatttgaattttcgtaacaatgaaaaaaccctaacaaataaactttctattttattaaacgacaactcaaatctagtatttttcaaaataatacaaaatagatcctaaaattaatttttgtcaattttattttgatataatcaatttgaaaaaaagtcctttttagtataaactgataaaaaaaatataattagattagtcgtaatatctccaaattaagttattattaaattttaattcaataaaaattaaatttataatctattttatattattttaaaaaatataaaattatcatttaataaaataaataatattgcaaaatgagaaaggtatttaccattattattatctaattatttttt

SEQ ID NO: 389129 - DNA, 3006 bp, Cannabis indica
atggagtattcttttcttcaagacttgaacaacgacaatgatagttggatgataaggattagaatttgtagaatatgggagtctactaacaccaagaagaatgatgaattaattagtttagacatgatttttattgatgagaaggtatatataaatagtttgatcaaattatttatttattttatattatattgttttagtcttaatttaacaagtttattcgttacaggaaaatgttatgcatgctacaattcggaagatttttgtctccaagtttaaaaatcttttgagtgagggttctttatatagtgtgaagaatttcaaggttattgcaagtacataggagtataggtctgtttcaactgcgtacaaaattatttttcatcgtaatactttagtgatgaagttagaagaaggaagcattaagaattcgactcatggatttcaattcatatctcaaaatttgattgattcatgtgttaatggccacacaatcctttcaggtatttatatgaagtttaatttttctatgtggtgtgtgatttaattttttaagtcttcatattcagatatttgtatgttatttttagttgttattgttagatattgttagatgtttatgtggtgtgggagaccttgaaattgttagtggagattggaaaaaaagagacctaaaagttataacagattattaagtttaattaaactttcatagtctatatcattttttgttattataaattattttaaaagtgtttcataatttgctttagtattaatatatttttgtattttgtattaatatatttttgtattttttacctgtttttacagctcaatcacttcaaaaattactttatgcggtaagttggcagagatgtttgatatgaatgtgtacaaaaaagatgagggccattttattgtgatagtaacttctacgacaattaaacaatttcaaggtcattactatatgttcatctcaatattacatcaaaaaaatttttactatgtctttcaaatataatttacatgatttcacaattactataaataggtgaaaacagttatttttcaacaagtgctacccaattatacataaatctagaaatagattatgtagcatctttaattgaacaattttcaactgtcgttaatggggtgcaaaatattgaaagctctaatgtgaataaggtatcacttgaggaagagatgttcatcaattgaatgagcattaaagaacttctagagattgaatgggatgataaattgaaggtaattttaatttctattcattttatcttctcttaactattgttgtattatataattaataaaagtaattgaaaatatttgaatgtaggaatacaaagttactataaaggcaaagattattggaatagatatttggatggtgttatgtgtcctgcaagacatgttggagaaaggttgattacaaagatggtgtttattattgtagccattgtaaaaaaaaatgtgactatcctcttatgatgtaaggaaaataatttaatgatttttcttttaaaaaaaaataagattatgttattgaatagatttactctaattttattggtcaatgtaggtaaaaaaattcatataaaagtaagggataaaagtggggaaacaacttttgtcttattcaatgttatagctgaaaaattacttgacacatcagtgaagaagctattacctacaaataataatgatgttctggtagtgattcaagcactgtgtggaaagaattttgtctacaaattaaggttggatgattataatttgagagatgaatatgaaaatttcaccgtgtctaagatttttgagccaaatgatatattagagcaagcacatgaatcgaaaatagaaaaattaacgttatcattgaaaataaaaattttgaattaagaagaaatacttgataaattggttaactgttatgtaatttagaaaattctaatgctaattattttgtaggaaaaattaagatagaataaattctattaattgttattattaaatttaaaagaaaaattagtttagataataatattttcctttataatcaatatatgacaggattgtaatttggaagatgaagatgtggacaacataaatgttattagtgctggtgaaagtagaaagagaaaactcctcattcttaatgatgaggatgaagaagtcgatgataatgttcaagatgaaaataattagttaattagtgtttattgttggagagttgaggtggttggacctgtaggccattttcatttgtgtgatttaagtgtgattttggtttttcattttcttatgcgtgtttattttttgtttggttgttgggccttaggccatttctctttgtgggtttttacattacatggttatgtaatggtactattttcactttatgaatgttttaattggaatttaatatgacttcaaataccattttattttatcagtttttacaataacaatactaagtcatttataaattaaatataataatacagtgaaaatgtgataaattatataataatactaaaatatataataaatatcaataatcaatatatcaatatatatataaaggaatgcccaaagaatttcacatggcaccctaattgtcattatctcctatagggttgtatagaaattttcgtaaatcgcccaaaccaaaccgaaaagccaataaaaaatataaactgaaataacccgataaaattctaaaccgcccaatcagttaattgtgcgggttgaaaatagattcaacacgcccaatgaaaccgatttaacttaaaaatgtcaaaaaagtatataatttatatatactgattaatatatatacaaaaatatgatataataatagtaaatcgtttttttccttgagataataacccattagaattaatattattatagtaggtatggttctttttttgaaaagatccattgattacttttattataacataaatataataatatata

SEQ ID NO: 389130 - DNA, 923 bp, Cannabis indica
ataataataataataataggcttcttctagatgaatttagttgcagggcagtgataaagattggggctgtagcccttatatacattaaataaggaaaacaaattatatgcaatcagtttaatttatcctccaaatcataattttccctagtttcatctaccatttagttcaacacaagtgaatcaatggatctttctcattactcattactatataaatatatagatgcattattagtgggcggaggatcgatcatgtgatgaggctttgtgtttgggagccattttccaaaagtacatctgaatttgatacatcatttacattcatacatggctttgcatttctgtacattgcatacagtaccagctgggccattccaagtcccaatccagttccatttggtacctaaaaattaaaatcaacacacaaacttattatatatatgtatattgttaaggcaagtaattatattaattaatgagaataataaataatatgtaattacttaccatgaggaaataatcttgaacaagaatagcatacaaagtccaaattccaccgttgagaaattgaaaaaatgatagaaggaatggcatgtactccacgctcttgctcgtcacaacagttttctgcttattaattaattaattaacattcgtcatcaaattatattaattaattaaatcaactgattgaataactgtttattaaatattaattattgtaattagtgacaaaaagataaagcatatccagatatatatataattatatataagggagtcggtatgtatatcaatatataataatatttatttatttattaagtatactaatttgtaaagcatagccacatagattataaagtggatggaggccatgattcatgatattgactatattttttattttcattttagggc

SEQ ID NO: 389131 - DNA, 1508 bp, Cannabis indica
ttctctttcttctcgatagaacccccctcccctatgaagaagttgactggttttcccgacaaagctaaggcttacgagctttttcagctacaaaatcttacccacctcacactctcacactgctttcacttttagctattgtttatttctcaaactcatccacaaaccctaacttctctctctgctgccactccagttcccactcccccacttttctacctccatgagtttctctttctttttcatttattttatatatggtttggttttaaattttagaaatgtagcaccaagcttagattcttgtgagtgttctctgaccaggatttgaatggaaaattcaagaaatgtttttcgtaccttctatgattgacatttttatttttaattagagttttgagaatatatcacttcatgtgaaactcactgtttggtgtttctttaatcagtttcgagaatgtttatatataatatacttttctattgtaataattaatgcctatttccatgtgaaactcttaatattatcgagctacttttttctgtgttgcgattgttcatgaaaagtttatcttctatcttgaatgagtgcaaaactagagccaagttggtgtatgtaaacacatttggataacaatcctttctcagctcccacaaatcaagtactttcatggcttctttcaattttccactatcacaaagagtacgcaatatggtattgtatgtaacaacatcaggatcaacactcattcggttcaaaacctttaaagcattatcaatctctccttatttgcaatacttactaattagaacattgtaagttataacatcaagaacagtcccagaattctctaacatatttatgatctaagtagcctttctagtctttccactcttacaaaaccctagaattaaactcgtacaggctataatatcaggatgatctccacgattgaccattgcctcaataacacttagccctgcatccaatttcccatgtctaacaaattgatggagctgattgttaccatcgaattcctcaaaattaatagaattctcaactttcagcaacttattagcattggagctaattaaagtttcaatcttggagagagcaagaacaaggttctcctatgtttacgataacccccttcctatgaccatggaatcgtcttcgctgccttcctccgccgactgcctttgcctgacggagacggtcgtgagggtagggacgatgaaggtgaaggcgtggagaaaattaagggggtttctatcaataggaagaagaagtagaagggttaggggaggggggttctgtcgagaagaaagagaaagaaaaagaaaaagagagaaaaaaaaaaaagaaaaagaaaaagaaaaaaaatagaaaaaaaatttaactttttttaatctgattttttaatttttttaaatatttataattattttttaaaactaatattacatggaccactaaaaatttaccacgtgtacaagtgtgtacacgt

SEQ ID NO: 389132 - DNA, 720 bp, Cannabis indica
gggactactgactgtcacataccatctccaattgtaagtcatttagttcctgagtatgcagtggaggattctaggttttctatgccttgagtcacgtgatttgtggcatcagtgttaacaaaccaacttgaatcatctccaaagtcagggaggaaataagtggcaaaagcttgtggatcgtaattaaagtcatgttctgtgatataggcacgtgggtaggggtttggagacgtgatggattacccagtggtacctggtttaggggtgacccaatttttgtcaaatttgtagtgataaacaagagcaatgtggccatagcaaaggcaaagttggcataggggacgattgttctggtttgatccacaaaatcctccacgaccaccattcttgggaccctgtggtggtctgtaaggattggttcttgatccagagaaagccacattagcttaaagcttcatgctcaaatctatcatggtattgtggtgttcaagtcgactctcatgagagagaaagagagcttgaacctcttcaaacgtaagaaggttattgtgtgcagtgattcctgagacaaccgagtcgaactcaggcccaagagcgttgagaaactagagaatgacatcttgattaggtataggcgagcctgttacagccaatgagtcaccaattgactgaacttttttgacatattcagagatggattagctgttggaaatattttac

SEQ ID NO: 389133 - DNA, 858 bp, Cannabis indica
aaaaaaaaaaaacggttttgaaagaaccccagaagctacaaatatattatttatcccaatccaccttcggaaccttaaattcttacaaatagataatggtccattaccgaattttggaggaaaagaaaagatttttataatatttctgcataaaataaatgtagtcctgtatatgtttagatctgaaatatccctactgttgttgaaacaatagaaaaaacagaagaggaaaagaattatatacataaaaagaataagtaaaaataactggatttgaaagagtgtgaagataaaatgagtagtcagagacacagaggattaagaggaaggaggtatcgaggtgtcgatcaaaataatatttgttatatgaaagaagaaagaggatgaagagaagaggtaaatagagatattaaattaatttaaataaataaataaaaacaaaatattggagacaaggtggctaggtgccaatcaacaagaaggatatacctgcgatggactgggccctcttagcatttctcccatgatatctatccccttatgagaagtagtggtgttcacaaaattaggggtgctcataaccgcttaaaccgcccacaccgcactgcaacaaaaaatacggtttgaaattttttatagtgcagtcgcagtttgaatttttcttaaaccgcgcagtgcggtacggtttgcagtttgcaattttgaattgtcaatatacgggttcaaacagcaccgcaccgtatattataaaaataccaatttttatatttatttaggttcaatatgtgaaggcccaacccaagcctactattattatattgttaaaacttaaaacttttttttatatttattttcaag

SEQ ID NO: 389134 - DNA, 586 bp, Cannabis indica
aaatcatattacctatatatataatattagagctcattcgagaaatattaaaaaggtactgttggagagaaaaaaaggcatgtgagatcattagctccctcaatttttttatatttatatataaattttaattattttatattctaatctcataaaataatatatattttaaggtttacattttttttaattttttttctacactattttttatttttatttttattctcataaaatttatatttttcattgatattatttataagaaaaaaataatcacctccactaaaagttttaggtttagcactaactaaattaaatattaaatttcatataatttattataataattttcatcaaatatctctaattggtaaataatataaaagctagcgtagtactctaatattgaagtgaaaattacatgaaatatgggatttcataacaaagttagaaaaatatggcatttttaggtttgccacttttctatggcattttttcacatttaagttttttatggtatttgatatgccatatttttataaacttattatccaatcccatattttatgtttttgtttttagc

SEQ ID NO: 389135 - DNA, 513 bp, Cannabis indica
ccttttttctctcctcacgtagtcacctaggtaaggaagttactttccttctttcttttttctggttttgggtatttattttaaagtgttttatattttcaactacccaccattcccacgatcaccactattcacttctctttctaatttctttccagaagtctaatctttttcaagtctgagagtgtgatttttctagggtttcaaaaagaggcctactcgaggttcagcctctgcttctccaatcacgccacctgggccatctgttccagtggctggagttcctgggtcgtcgtctgctctgacggaaactgccaagaagtcgaaatcccaaactccaaaattgacttacaatatatctcagttatcctcccatcattgtataacgtccccgcttcaagcctccattgagtcctcacacccacggaatgaatggctcttatacacgagtacgccactctggctgcttcttggattgatgactgaccctacagaccaacacgagtatttcca

SEQ ID NO: 389136 - DNA, 837 bp, Cannabis indica
cttctctctctctctctctctctctctctctctctctctctctctctcatataattactgggtttcattatatactaccaactaaactcaaactcaaaaaaagaaggaagagcccttggtggtggctgcttgctgtctgatgggaaccaaaatcataagaaaacaaagggtttgagctaaacttttttctgctagtgaacccccaaattgatatatctctatctattgtattttttttcctctattcttttttttctgtaaaattttttcatgtaaaaaaaaaaaaccattaaatccaatttaatggaccttgttaagttcaaaccgtttaaaaccgtttataaccacggtcgattacggtcggttttttgatgttaacggtcggttacggttttgtgaacaattacaccgtaatcgcctggtcggtctggcaacaggtaaaaaccgacagtaactgaccgaatttcacccctatttactgctatctaccccacgcgctcgcatgtggaggtgcgtgtgactgggattttgacggtgaatcttctccagttcttttttttgtctcaagcatactcccatctgtctcaagttatcgtttggtatttcacccttctttgtattttggtgtactttacttactcttcgttgtttgcttctatcttgtctctttcgatatttatttttgaggttatggcagagacaaaattagatccaaaaccggtggttgtttctgacatggttcccgtgatgtataaaatcacctaccataaattgattgattcgaattatttggaatggagtaagacgattcgactttatctaaggagtattgaaaaa

SEQ ID NO: 389137 - DNA, 1578 bp, Cannabis indica
cctccccatttgaaaagtctctctcactctattttccctctcactcaactaactctccccctctctctctaaatctcaccgagaatatccaccaccactctaaccggacgaaacctagttgaaacctagccaccccaatgacacccatgacctctgatgaaacctcaaccacaaaaataagagacagttgcaagtcccacaatgaaatcgcaaaacccacaacaaaattgccaagaagaaggtatattactaaaatttgacttggttttaaataatgttatccgcgtttccaatagtggacacatggactctaggtcagcatcaaagatccatcagtgtgagactctcagcgggggtaaaaatggcaaagcccacctggatatgtccttccaggaacgtatcttggttctgcactcgcaaagccttatgccttcagcaagccctacccgaaagcatgtcttgtactgtgagatcattaggatgagatagtgcattcctggaagacccttccattttccttttttattcctgtacacaaataaggaaattctagttatcaggttatgacagagtatcgtatcaagattaatggggaaacttcttataacaaatattatgaaattaattcacagattaatcgcccacaatcagtgcacgcggtgttgaccaaattaatccaaattcaatctacctagtcagtaaattgtcttctttatgggctggacatcacgaggtagcctaagggtattatttactgtaaactccacattaaaggaaaagggaaacctaatatatttctcaaactacgataaatgccccacaaatcctatggattaggggttcaactctcttgcaaactttgctcaggaaaacttgagaactgactcatggactaaggcttgttaatgacccaaccacgtaaaaaactatttgtctcttgttactctttctcttttgattatttattcttcatttcttttcgtttatactctatttttgaaaatctcggtaaacattttggtgcttttattgagaactgaagaaagtggtgagaccacttgcagattacattcgagttatcatggccctcacccgaacccaatttggtcttcgtttcactggtcctagggccagagctggagattctaatgaaccagaagaggtgattagttatcagaatagtcatcaagacgaagattggaatcgagacgatcccatcattaaggatgctaaaatttggaaaaattagttataaggatgttgaagttaataccaaagatgcactagaagatatgcatgaagatgaccctcaggataaaatcgctgatgatgatgctggagagaagagctagcctgatgagtcaaattccttggtcatcatggcaagacaaccacaactggccgaaagaaggttaactgggcaagataaattcaatgagttactacttggcaagatgaccagaatggaggctgtaatgactgccttgactaaactatctcttgacgtgatagctcccccaacaatagacgcacctgagaaagtaggtctgaaggacccaagtgttggaattattttac

SEQ ID NO: 389138 - DNA, 920 bp, Cannabis indica
aatgattccatctgggagattgaccaaagaattaacagcttcagatcatatggcatgatggagttttatgccaccgaatctggagtgcagaacattctaggtctgatgtggcatagactatctactgcagaagagtcaacttttgtgagcacaaatgggttcagtgcttagagttgtgcccacattgtaagcgaggcacatcaccccttgaggacttactttgcaaaatttattgcacgaatcgtggtatccccctttcaactgatatctctagcttacaagctcctagttggatatatttttagcaagatcaaaaaaattgaggtgcctacatggaggacatcttgtaattttatggcatgaagcatcaacccatgtgcaccaattgcaagaagaccgagtttacaagctggagaggtactgagaaaacatggccctactagcttcaccttacgcttggttgaacttattttactaggatctagatttactaacatgtatgtttgattataatctataatctaacatcctaaatataaatttcctaaaacaatgaaataaaaacataagagattaagaaacccatacattgatggcagcggaatttaatgactccttccgttcagatctctagcccttaattcttgtttgtagtagagcattatcaagatctgaacctggatcttctctccttcaatatggttaaaaacaatcttctaactatgctaggtcttgctttgacatgagtgggcatactctcaattcaccatgcaccatgaaattgtatgaagaaatctcaaaaggaattcgaaaagaataatagaaagtaataggtttgcttttgattcagtttgtcacataagagagagtctagactcgtcttttcaatcaaaacccttaatgttctatttatagggatt

SEQ ID NO: 389139 - DNA, 1142 bp, Cannabis indica
ccttgttccacacttcaagctttttaatgcctaaaccaccaactgattttggttgaaaaacatcctcccaagcaactactcgagctccatgaaataatgcttgtcctttccaacgaaaagctcgacatattgtttctatgcttttcagaattttccttggcatgatcatcatttgactccagtatgcttggatagcaactagtacataattgatttaagtgattctccctgcaaaagacagatttttcaagctccaacttttgattctagcagtcatcttctcagccaaaagctcacattctttccttgagattttctttgaacatattgggatccccaaataagtaaaaggcagctcatgttttgtgaaactagacagctgcaacacctagtttataacgtcctgctgcatattactgcaatatattgtagttttattagcattagggtataatctagatgttagggaaaacaattttagggcctgcagcatatagcttatacttctaatctcccttttgcaaaaaagaagtacatcattagcaaaatctaaatgatttagcttaagatccgagcatctgtcatgatagtgaaaatcctccttctcacctatcttcctcattaacctagataggtattccatgcccggtacaaacaaaaaggggacataggatccccctgcctaagccctctcttagattttaaaaaaaaaaaccataaaggttccattgaacatgagagagaatttaggggttttagtacaattcataatgagctcaataaaagggctagggaactttaaacctgtcaacatctcttcaatgaaagcccactcaatagtgtcatacgctttttgaagatctaatataatcatgcaacttggtttgttggatttccttccataatgtctcaccaagtcttgacatatcattatgttgtgcccaatgaatctccccttaataaagccaccttgtgagtgagatattatttcatgtaagattttcctgattctagagctcaaaaacttggttgcaatcttaaagataacattgcaacaagcaattagcataaaatccttgactgtgtttgggcaaataatcttggggaccaaagtgttaacgcaaattttcgttaaccaaatt

SEQ ID NO: 389140 - DNA, 1348 bp, Cannabis indica
acgtgtgccaaatatgtattatcgcaaccctaatattaaaaaaatttaactatgattaatttttataatttttcttttgtgtatgcttgtattaatttctcaataattttgttatgatgttttcacattttaaaaaaaataatatatattttttgtttttcttctaaaagtattatatatatttcattttaattttattgtctcaatattagaaaatatatttcatctgtaatttttttataatgtgaaaagaaagaaaaggaatgataaaaaaaatatgagtataaactaaaattatttattttcacaaaataaaataataaaaaagtggaatattttataattttttttttttttgagtgcaaaccagttttgtaaataaagtaaaaacggtgtgtcgttttaaaaccacttgttttaaatctaaaacatggttagtcaaagataaaacggatatttatgagttacccacagtattattaaaatgattaattaattaattaattaattacaaactcaaacgaaacgacaaatttatattaattaatagcactaaatatacggcatgtcgttcacactaaactaaacacacgatatatcacctaataagttaaaaacataatatattttcatttgtatttattgatatttccaagctaaagaaaaaaaaaacatttaaatcaaatggaaatgacagtttctaaaataatcgtaatattgtaacgtttcttcctttaaatcattaaaaaaaagtaaattatgaaattaagaagaagaagaagacagagagttgaataaaccaatgcaccctattatcttttggacccattataggttaatgagcattttacgattgattagtgatattctttaaaagttattttcttaagttatatgagaatcaatacataattataccaatagtaatatgacatcaggagggtgcttagcaccagtggtacgttttagcaattctcatcggttaataccattttagaccatatacattacaaaaattatcgattggactctctattttgttaaagagtaatgctagaagaaaactatggtacttagcaccgtatcaacttataattagttagcgattctctataatatttattaaaataaaataagtagggtccgatattgaattgcaccaatagcaatagggaaatttacaaaaatactggaatttgaagtcacttttacaaaaatactgtcacacggaaaagtttacaaaaatactgtgtttttacaaaacactagtaaaacacaaaacagaacaactcaaaacaccagtagaacaactaaaaaaacaccaataaaataccagtgaaaacttaac

SEQ ID NO: 389141 - DNA, 545 bp, Cannabis indica
attggattaaaaaatatataggacaaaccgcccaaaccatgtacaaccctatatagttcagaacataactaacacaatatcaaataacataatttgtcatataaaaacatgacacttataatattaaattttaatttatactaaaatattatatatatatttttgaaacagaaaatattaaatatttaagtttccataaaaataaatattaaatatagttatataaaaaaatatcacatcaaatataattcaattcaatacaaccaaataaaccattatataacaacgttattcactggtccaaaaccaaaatatgtacatggactaataaaataaaaaaaagtcattaatttggggtggttaggcatgcctttttaattttgtttttttcttaaaaagtttcgaacacaaaaaattttataccatcttataattattgtataggccgatcataaaaaaaaagaaaaaaacaaaaatatacaaaaaaggaaaaaaaattacaaaaatatcttgggccggcccattaaacatttatacagtccaca

SEQ ID NO: 389142 - DNA, 1546 bp, Cannabis indica
agaccattcaagttcaagttttagttttttattaccttctgaatctatcacaataggatgtgaccaacatgaaaaaatggatctccaagcattcttgtcttcagacttgatgaatgccctcattctaacttttcaataaggataattgaaatcattaagaagcagtggacgagaaatgaaaattccttatccagaagatgagatatttcaacaaaaacataagaaaacgttgaaggaccacactaaggtggcgtttggttgggaagaataagaatgggaatgggaattagaataggaatggaatagaataaaattaaaaatgcataaaaaaattgattaaaaaaaattattaaattttttcaaatcttgcattggaatggtctttccttccatttcaaaatggaatagtcattccaccaaaatggtgaaaaggtcattccattggaatgatatttcaatactttaaaatgcaacaaacaaaggaatagaatgaaatttatttcatttccatttcatcatctccaaccaaacgccacctaagagtttagtgtcctgctctgataccaatagaaaaacagtatttttgcatataccaatttatttcttcaaaaaaaaattaattaaaatgcgactgtaatgacttgcagtaacagattgaaaacttgttactgcaaaacacaaacttgctgtaatagaatagaaacataaataaattgtgtagaattcaaaactcgacataagagaatttggtatcagtattttttcaaacactactattccacgaggccactctcaaagaatgaaatcaattagtatagtcacaaaaattattaatacaattaacttaaataagtttacacttcctatatagctttgccgcaatccttcaacttttgatgtgagtgtgcttacttcctcccaaagtaagccttggacaagtcctctttaaaagaattcttctcttgttcaatgaagctcttcaccttattccaagaataatgaaagaataataaaacaaaaactaaaacctagtagaacactttagattttctcacaagaaaatactcttaacacaaatatgaaaatataaaataataagacttgaagagataaatttgtttggttgctctctgggtcctatttataatacatagaaatcctagagataaccataacacgtttttacaactatacaaaatttttctaaattaaaccctgatatgtagagacaattaagcactctgtaattataactcagaaaaaattagtacactttctatataaagccaagatcataattttgcctttatttcctaccataaaaggattatacaatttgttgtattcatagtaaaatcgaaatgatcaattaccatcaattaagagtaattatatcatacataaatactttaatcaaaccttccataaagagaatttcttctctcttatgaaaactttcttcaaacataaatgaaagtcataaaatcaaatttacacacaagaaaataatatttaattcacactaaattaaataatattttgacaa

SEQ ID NO: 389143 - DNA, 585 bp, Cannabis indica
cgatcattttaagtctattatttcagttttccaaatggtagaaaagaagaagaagaagaaagttatggcaattgacattaaattaaactgtacaaattaatacccagaaatatgaatattgcatgatgatgaagaaaatgattatgaataaacctacatatataattgaagattaataataataataataaatttagtaatagaaatgctaacctggtattaattagaggaggaagtagagattagtagattgaaatttttgaagtataagaaactaaaatggatatttctatttttatttccattttatataataattattggcggttgttctttaaaataggagagttacactctccacgtctcaaaataaataactattgtttatttatttattaattaattaaattaataatagcctttatttagtttgtttattattaaacaaaaatggaataagttacattattctcaacttctccgttatgctctctcaattatctattatttattattattaagttaaattaaattaaggagcactattatattatgggacattaaggtgtttaatatttttatgat

SEQ ID NO: 389144 - DNA, 1981 bp, Cannabis indica
ataattaacatactttaaaccaaatgattaattccagctaacaaatcaatggtaactatttcgacataagaatattattctataaaataatattagaatatattaattattttcactaattattacttgttcataaataataataaagctattcatgccgattggaacaacttcactattttcggttcatcaggcgatgccctgagcatagatgggctagacttgtgcctagggcctatctaacccaaggacccaaaaaaaattctcctcgtcaaattatttatttttttcacaggatctaatttttttttttcaatagcccactaaatttcaaggccggccctacagcccatgaagctgattagtcaacaactttgaaaaagttacttgaaacttttttaaaatatcgaccgatctcgctatccaacataaataatgaaattgctctaaacacatattttcgttaaaaaataaattaaaattaattaagaaaattacctttacttcaagatttatcacataagcaagaacaactcccaatggtatcccaatcaaataatagcaaaatatatttactatagcaactgttccttgtaaaccagcaccaacagccacacctacaataaaataattataaaaatatatttatatattaaatatagatataaattaccaaattttattttttaagtcattttatatttttgctaaattttgataattctttgcaagatgaccctcaagctctgtttagtgtcagaggccattttgcaaaatattatcgaaactagaccaaattgtaaaacaacccttttaataataaaacctaataaaattgaataaatacattttaatattatatttttaagtcattttatacttttgcttagtttaatttcgataattcttatataattatcgaaactaaaccaaagtataaaataacccttttaataataaaacattaataacaattatataattaattacctgatagaactggataaatactatttaataagatggaaaaggcaagtagaacagagagatctgctacagcatcagccaccttttcatcatctgtaaaaatataagaaatttgtcgaccaaatatcaaacacaaaatccaagagataactcctatcacaatggatgtccccataatcacttttattgcaaatttcgccgcttttgcatttcctcgccctagctcgttcgatactcgaacactacaaatccaccaaacaaaaaataattatttcgatattcaattcagatgacaaatgataatagagtggatagtttattagtgtttaaatagatatcacgaatagtcatattgttattagtgtaattcaatatcgaatctctcttatttactattaaaaaaccgatagcaattaaattaaaccaaagtataaaataatctaaaaagaattattattattttgcactttggcttagttttaataattttttgcaatatagactaaagatcaacttatctaaaatttacaaagaattatcaaaactaaacccaagtacaaagtaacttaagaaaaatatcattttgggaaaaaccccattaaaatgaattaatatatatatacttaccatgcagcacctaaaaatcccaagcaaatcatgaactcccaagctgaaatattgagactgcaaacatgtaattaatttttgttaattaatataataagaattaagaaatagttttacaatttggatttgtaattaattaattattaattaccaaatagagaaagcagagatggcagttgttgcatctttcatatatccagctaataacaccagaatcgaattgtaccataactccaaactatacattaaaaaacaaaacaaaacataattatattaatttcatcaataatattagtaattatatatataattattttatatgaatgtcattttgcaaaattattttctattggtaaaatagactctt

SEQ ID NO: 389145 - DNA, 1260 bp, Cannabis indica
tttaatccatgtgggacaatgttatccaatacaaatcaaactttctggcagggcacgaaactataggatgagctcgagtgacttgaacacgaccagacacaaaaaaaaaagatgggcttgaaaatgatataacttgatgctacaaattggcacgatatgactcgacaagtccaaaagacctgccacgagtacataaaatctaaatataatgaatatttataattaaaattatatattaatttatttgtagaataattttaaaaatttgaatatttataaataaatgttaaattttaataattatagcaattttttatatatgttgtctgtacaatattcttacaaaattatataaaaaataactaaagctataaaaaatgaatacctataatttagtaattagcttagtaatagtaaataaatggagggaattgcattgtatatctactttactttgtctgttttaatttttatctttatttttatattttttaagatatatccacttttatagatgatgttctcctaatacctcttaggtaaatcacgtgctatatttaagtagagggcaatagtatattaggcaacccactcacaaaagtggatagattttaataaaatataatatgaatgtatttttgattaatggatacaaaaaagaaatattcctcaacttatcctaaataaatgtgaaaaagtaaagtaagaattcaagcccaaatatgataaacaagctcacctgttatgaactggcctaagaaaaggacgttatgaaataccgggcctactcttcaaaaatattagcatgctacggtgcatctcatattctttttatgacatgacaataaaacatcctatattttaaaaagcacgacaaaatatgaaccaaactaacacaatacgaaacgtatttacagctctacctgcacccatggaatattatagagtttatctcccaagttttgtttttggtttttcttttgttgtacatttaaggaagggttcaaatttgaagttcaatttttgtgaagactgtacatgttgtcgatcatgtaagaaagtgataatgctttaaagtaaactgatagttaaattattatatataaatttaaaaattactactatatattaattttggcatttatttgatatttgaatttagtcttttttatattattattttcttatagtttccgaataaattaaataatatcctatcaaaaaaaaaaaaaaaaaaatggaagtaccatcaatctatac

SEQ ID NO: 389146 - DNA, 874 bp, Cannabis indica
acgcctatatatatgttcatatatacataatataatatataaagaacgttgactctctttgtcagagattaagagcttatattattctatagtattatatttttttatagtcttctttatctttttcgagtgtcattagtgttgagtatattaccacacatatcaaggaaatacttaggtgaatgtgaaagactgtgtagtctttaacatcctgaaggagattcgagattccgttcttgattactttatgcaacagaaaggaataggtatgagagaacaaaactgaaagagacattaatttctgatgtgatcgttgtacggatttcataaactccttatatgtttaatttaattgctttagaatccatgttaggttgttaatttcaacatacttgaatagtaaaataagatcctggttaaataagctttctaacaactggtatcagagtcgtagtaaccttttattgttcatgtaaagtggatttaaaataattttttatgtatttttatgtgagatttagatgttacatattaagtgatatatgcattgatgattgattgtgtttttgtaacttttctatataagataatatgaattttattacctaattattatatattaaaagattaggaaaagttatgtaagttttctatttacgaagtcaattttgatgaaaattgacaacacacgcgtgagctagcacatatttgcatacctaaattcatatttagtatatcttgagttttaagtaacatttttgagtgattaaaaataggggtattcatcaaaccgcccaaatcgcttaaatcacccgcaccgcaaaaaaaaatgcggtttgaaattttttacagtgcgatcgcagtttgaattttt

SEQ ID NO: 389147 - DNA, 608 bp, Cannabis indica
caaataaaggaacaatgtttctccagtaattggtttggccaaaattggtgatgtagaaagatgtttctttatttccttgaatgcctttttgcactcttcattctactcatattttttattgcctcgcaagatattaaaaattggagatatttatcaagttatttcgagatgaatatattgagtgctactattcttccagttaaagtttgaacatcctttggttttgttggtgaaggcatctcgagtaggaatttccccaaagcttgaacttccattcaattcctcttgcatttgcaataatcatgccgacaatttttgctagtgcatttggccaaatgcatcggtaaaagtcacatttcttctagtgattccttattcatatatgaggttgtgactagtagttgtacagagaactaagatcacttagctatgaataaaatagtcagtaacatattaaagttatataatctttaatcaacggttgctagtacggttcactgatgcccattcttcggtgcaagtaatcttggttcggatgactgatgtagtatgacatctaagtgaaggtgttgtatataatagagattatatatgacaatgatcgatat

SEQ ID NO: 389148 - DNA, 675 bp, Cannabis indica
gctaatataaatactattactagtactaaactatagttgcaaaacaaaacacttaataattaacttataatatgatatggtttaggttgattagggtgtagggagattctctttggccataggagcaatttcttcaccatcaattccagcttcacttccagcaacttccaaactcagcaacaacttttcccattgctttgcaggtccctattataataacatcatccatttaacaaagtcttaaatacatgtatatagacttattataaaaattatttaaaatatatataatttttaagatatatttttttatttagatctgtaagatagatgagtcttagatgcaggcttagcccgtcttaacttagaatttgccttgtaattaatgtactagtagtactaaccttccatgaaagatcttgtgccatgcaattttggatcatctctttcataagaggagtaccatatgttgttagagctctcttgattgttttagccacagcactcacatcaattggatcaattttctcacactgaaaaaaatacaatcaacactttttcttgaatttaactcataacaactcttatgttagcaaaatatcggtaattagtcttattaataacttaattaaaataaaatatttaatataacatattagtttgagctgtatttat

SEQ ID NO: 389149 - DNA, 1281 bp, Cannabis indica
aaaattaaattagtgacaatttgaatctaaatgctatattttagctataaataatttttgttgtggctaaagtcacatttaattacagaaaaattatattttaactaaaaagtcactaaaaataattgttttttacagtgtcatcacataagtctacaacccaaatattttgagattgtgttcgacttatttattttgtgtgagaaatgctaagagacaccttaaagtgtcaaacattatgagatgtgtcatactactattgttatattataatatcgaatcctatctattttattttaataaaacccctaatttattataaagcgtcactggtgttaagcacttaaaatatcaaataagaatactcattttacgtttatgatctttgtattgaggtggctaatttatctgaactttgttctggtgaacaattaatattaaagttatttttgtttcctgagaagataactttgaataaaaaaggtatgcatgggatcattaactaggagtataaaaaccaaaaataactttacctagagatattgttggccctggcaacgagggagcctagctaatagcaattatactctccataaaattagaatatataatgtttcttttaaattaattataattacatcacctaagtcatgcatcattcggatgtgtttagcccaatctaattgggttgctttataattagtgtttctttccagtattccacccaaaaagaaaccttaattagtcttttggattatagactaatatactttttaaatattacatggtgcattacacatatataatatatttgtatgatagtattattgggctgatgtttatatacatagataaattaattaattaagatacatgtatgtagccctatataatatattcaacagaatattagcactaataacggtggatataaatctatttgtacaatatgctgactaaatatatataatatcaattagaaaacaatctgcccttagttatttataaatattagaggagaagtgtcaatctaagttatttatgaaactgttataatgctaatcatattgttaatttgtcctaatcctcattagtatcaattctagtgtggtcctaccgtagttgttagaattatgttaaacccacaaagtatcttaaaaataaacctttatctctcttttcttcttaaaattgtccaaacttagtgaaaattctcaaataaaacatagtctcattttagaattctaattgatttattaaatcagttaattgagtctacaa

SEQ ID NO: 389150 - DNA, 755 bp, Cannabis indica
attactttatattactagctgtatttgcacagaaaattaattattaaatgccctttgaatacatcacttatttaaactgaaacaaacacaaaacccatgttgtttgtatttgtacaaaaataaaaataaaattaatatggttaatttaatgcttttaataaaagttacatgcccccacccacctaacctcattaagctgtaatttaatgcttttaataatttttcattatgttaatatgaagggtgtttaatgttttaatgtaattttttgtctcacttttcactaccattttttgaataaacccctcataaattttaaaaatgacttatacagatcttatataaaatatacatttaaaatacaacccctgttggtgaattaaaagaaataaaaaaaaaaaaaaatacaatttttaactttttttaaccaaaaataataacaaatataaatttaaataggttagaattgaaaaattgatcctatcaaaatcatttataaaattaataaatttttaagcttataacacttccaatagatctaaaatagcttaatctttaaattatagagaaaaaaaatataaaattgagcttcgaacaagtgaggtaaaccttagctattttacatattttttagctcaattaatagtgcttagctaaatgtagagataactattcattgagctaaacatattttaatattattttcttcaatttttttttatacatgtgtgcaatattatataaattattaatat

SEQ ID NO: 389151 - DNA, 1225 bp, Cannabis indica
atatatcgacgagacacatacctacctcgaaatacacaagctcaagaagataactcatttattcacaagaataaatgcagttatgcaacacaacctcgaattatggataagtgtggcatttacttcgctattcaaaaagaacttggcaaggcgaatgacttgctgccacttagcgtttctttcacattataaaagacaaggataacaacttgaaaatatgggagatgctatcatccaaatcagtattgaccattgacaagtcaaacgagatactattatccaaatcagcattatccatcgataagtcaagcgagatgctattatccaaatcagcattaacaatcgaaaggataagaataacaagcagttttgcaattattaattgttatccacacgtgatttaaataaaacgtggaaattaaccacgtttcatcaaacatttataatttgaatttaaatgtaaattactgccaacttatattcctataaataggagcagatcccacggaaaaagggatggagaattttagagagaaaaacagtaatacgatcaattatatcttgtattaaatactcaaaaaatatcttgaataagatagactcatagagtatgcaaatttaactgcaaaattacgtaaaaatatctggtgttatttatatattatttatactttatttattctttattatttttgtgttttaatttactacgaaagggcttaaaactggttaacaaaaattggtgttaacagtttgctgctttcattgagaacctacgtgataaaactcagaaaaatccctccttagaaataaaaatatgtgcttggctaataacaatcaaaatgatgaaagtcatcctgaggaaactgcacatcgccctgagaaagaaccaatgggtttctcaaagaccccatatgtaacaccctaactagcataggcgtattacgtgatttttatactactgtgcagctcgttgctaatcaacgaggtttatggaaatcgtgattaattaaaaattttgcttttaattaaacttatataatattttatacaaaaatactcgggatctcgattacaaaatactttacaaaagtttactgtctaatacaaaatacttgtcgcttagcgactaattacaaaagcactgttgtccggaggatcatacgctctaggcctaaccgccccgcatgtacaatcttcatcggcttgctctcacggttcctca

SEQ ID NO: 389152 - DNA, 3404 bp, Cannabis indica
atttatcagtacactggatttatcaagcagggtcggttgctatggtgaatcaaatggaaccaatatatgaaaggttccaaaagtaggcacctcaagtttttctgcgaggaccagatgttatgaaagccaaacagtgggtaactgtaatcactcgaattttgaattttatgggagtcacctacaatgatagagttgcttgtgcaatgttccagttcctggaggatgccctagtttggtgggatatggtagctctcacccgagatatcaccaccattaactgggaagagttctagtagttatttaaggcaaaatactgtaatgaggtagttcgtagcacaaaaagaaagaaatttactcaactgactcataaggagaatatgtccattacagaatatacaactcagttcaataggttggccaggttggcctcaagaattgtgctaaacgactttagcaagaaataaaagtatctagatgggttgaaaaatcctaagatcaaacatgatctgatgattacaacagatgataccaccacttatgctgatatggtgggtaaggcactgcgagctgagggcgcagttgagtgcatccaggagtctcgagggattccagttgttggtggagccactgctcctcctacttttggtatggtaggggtggttatgcatcaaccattgatcagaagagaaaggcactgtctgcatctaatgacttgagtcagaacaagagggtctaagggaaccaagctcgtggcaaccgtcagggtagctttgaaacccgatacacttatccagggcggggatgtttctagtgtggtataactggacattatataaaagatttcctgcaactaaaaaaggaagagcaaaagacggaagcaaagtccgctccatcaagggtgtttgctcttacttaggctggcgtaaaagctagccccttggttgtttcaggtcagctttcggtgaaaaactcttatttctctattttgtttgactctgggaccactcattcatatgtggcagctagaataattgataagataagtagaacatttgatagttatgacaaagggtttggcatcctactacctggcgaagaattagttatctccaaaaggtgggttaggtctatgccgatcagacttaaggatagagagttgactgctgatatagtggaattgggtttagctgatttatacattatacttggaatggatttcttatctatgtactctacttgcattgactgtaagcggaagatggtgatcttccaacccgacggcgaggaacttacagaatggctcctgtggaacttaaagacttaaagattcaacttcaagagatgcttgacttagggtcttctcgatctagtgtatcaccctggggagctccggtgttgtttgttaaaaagaaagacgtgtcgctacgcatgtgtattgattatcaggaactaaacaagttgactatcaataataagtatcctttgcctaggattgaggatttgttcgattggcttcaagggaagatagtcttctctaagattgatctccaatcgggctatcatcagttgataattcgagaggaggagattccaaagactgccttttgcactaggtatggacattatgaatttttggttgtatctttttgactaaccaatgctctggcagctttcatagatctaatgaataagtttttcaaggatttcctcgatatatgtgttatagtatttatcgacgacatccttgtctactctcagtcataagtagagcatgagcagcatttatggatggttttacaatggttgcgagagcacaagctttatgccaaatttaaaaagtgtaaattttgactgtctcaagtgtcatttcttggacacattgtcagtaaggatgggatcatggttgatctgagtaagatcgaatccgttagggattggccgagaccaaaaacagtcgcagaagtcagaagttttttgggtttagctggctatttccatcagtttgttgaagggttttctaaaatcacaacgcctttaatagaactaactaaaaagaatcaacaatttatatggacagataagtgtgaaataagctttcaagaactgaagcaacaattgatcacagctccggtattagcactactgttggatcaggagaagttagtggtttattgtgatgcatacagacaaggtttggggtgtgttttgatgcagtttgattgggtaatcgcttatacctcccatcaattaaaggaatatgaacaacgataccccactcatggcttaaagcttgttgcagtggtatttgccttaaaaatccagcaacactatctctgcgagaaaaagtgtgagatttacaccgatcacaaaagccttaaatatttccttactcagaaagatttaaacatgagacaaaggcagtggttggagttagttaaggattatgattgtaaaatcctttatcatcccaggaaggccaacatagtgtcagatgccctaagtaggaagggtcccgggcaagtatctaacttagttacgatttcacctcaattggcaaatgacatggtcagatcaggtattgagtttgtcgcgggcaaacttaataatctgacgttgtaattagattttctagacagaattagagttgcccagttaacagattttgagttagtgaaagttcgagaagaggttatagctagtcaagctaagcactttacaatatcagatagtgaattgttactttataaaacttgagtctgaattctgagtagtttggaattaagaaaagaaattctcgaagaagcacataccactccctattcattacatccttgcactaccaaaatgtaacatgacttaaaacctttctattggtggtacgtgatgaagaaggacgtggtggaatatgtatctcggtgcttgatttaccaacagattaaggctgaacaccaaaggcctgtagggttgttacagcctttgactattcttgagtgaaaatgggaggatgtcaccatagatttcatggttggattacctagaaccacgggaatgtttgattccatatgggttattgtggatcgatttaccaagtccactcattttctaccagtgaaaaaaacctttacagtggatcaatatgcagatttatatgtgaaggaaatagtatggttacctaaggctccaaagttcattatatcggatagagattcgaagttcacttctaagttttgggaaagtcttcagtgagccatgggtaccaaaatgaagtttagtacagcttttcatccctagacagatggtcaatttgaaaggataattcagatactagaagatatgctgcgagcctgtgtgttagattttgaagactcctagagtaagtatttaccactgatagagttttcata

SEQ ID NO: 389153 - DNA, 2991 bp, Cannabis indica
cttttatattttcttactattcacaacactattgcttagaatttctcctgaaatacgtggcaattaggagcaagtcatgtggcaatgggactcacgttacaaggcatgacacattaattacttttagagtctattatttcaaacgagtaataatagattagtcatctctgtgaggggctagctagacaacgagtatctcttgtcatttcctctctgtgagtgaagtctactcgggaagggtaccggaggactgatgaaatataacatgttgctcgatgattaaaacattgtatacgtatttaatgcgatataagaaagagcatctgacatcttacgctaacatacatgcttaagtgtttaaaccatcatttcctaattttacgagaccctatacatcaatcgacgactgcataaatgagttatcaagtcataaataagggataagtcaaatcccaccaaacacatatcacaaagcctaaaattcatcataaaagtaagcaatcatgtcctcaaatcatattcggaaaattgtgcaaagtgtggtgcaaacaaacactataatggtggcttattatcaccattatgagcctataaatacctccaatgatgtaaagaaaaactctctctaataaataccatcataaatacagtcactcgtggactaaagatcattaatgccctaaccacgtaaaaaatttctcttctaacattcattaattactttagatagctttaattattggttgtcgaaagcctaggtcaaaatttttgtgctttcataaagagctgtaagaagcttaccaaaagagaaagtcgtaaataacctcgtgatataatggtaacgacaataaaaacttcatgtccacaatagccagatgacccagagggtccagaagaggaagaagaattttctagggtggggggatgaaggagaaggagatagcaatgaattagaatctttaaaccaagaagaatatgaagactacgatgaagataactatacagaattagttgaactaaggcaaaaggatggtgaccatgaggttgagttggcagaatagaaggaataaaacaagagatgaatgcaagagatattgattgccatgaaaaggttaattaaaaatacgagcatcaagtggattcaactacggtcccatcagtgcaggagaggactgaggaagagctttctcagcttgaggaaggccaaaaatagaagaatagggaacctagtcccatgaggtatcctctagaaaggcctggcccagaggtaagggtgcacaggggtagattttccaaaatctatcaacctgggcgttgggtcctagtttaggccctccaaaaattcagtctggaccccaaaaatagttgaatctcaatattttctaaaaacaaagaagatgcttagaagtattctctaaaaactccaactaaaatggcccaggttgagaaaatgtcaacctcagcactatttttctcatctagaaattgtttgtttttcttcgaaaggacctatttccctatttttgatgaagatgaaaaattcaaatctccaatcagattcttggaaggtgtccagattgtcagattatcaacctgggtgttgggtgctcggggccccgagtgctcaaaaatgaacttactctgattctgattctgatccctcaaatatgttagtggtatgtgtagttgatgtaaaaatgcaagttttgaacattttgcactaaggcagtcccaaaaaccaaaaccctattgaggatgtcaacctaggggccaagtgaaaacctaggtgcccaagttgtttttcgagtcgcaggttcgtataatttaatctctcgaggcttggactaatttgctccatgtcttcatggtagaatactgaaagaaagtgagttggattcaagttattgaagatcgaacttccatcccgaagatcctgaagtcaacatgggtcccctccaaagttgagtgctatgactcaagtctacttaactccatgacatcatccttcatgccacgtgtcaaatattgatgcccacgtcaccataaaaagtttttgagttaacaccaagcattgtaaagtatgaaatccgaagaaaagggtttagaaatagaacaatcgaggaatcccaacttgtttttgattgagatagcaagctacattgctctacaccgggacacgtaattatcttgcctaatgagctgttgggaaagcagagtgtttcttgggttgtcaccatgatggaggcaataagggtttgctagatcttcaagtggattctttgattgagcaacctggagggtccgattactatttggaatttgaggatcattgatgatggcttgtgtagtcgtttgttgccctgtttgagtcgcgggttgtgtagcttgataatctgtggacattattgaatctcaagaaagaatcaagaatcaagaaaggacatgaaaaacggggtaagagaagaagaagggagtggaagcagaggatcaggatgagggatcgagatccacacaaccttgtcggagaagacgtgcagtggtcagagagagaagaatcggacaaaaaagcttagctttcttgctctaataccatattgcgaaaaaacagagcaaagtgaaataaatttcattgagtgtagaatttaatacaatatattacactatatatataaactaacaactaacttaaacaaagaaaataaataactaactgacagaaagaggctaactaactgaccaacagtcagtaactaaccaaataactaacaatcaaaatacttaaatcataataagtacagcttaatacagaaaattaaaagtgacttaactgtttttctaacaactaattagtatctcggttatgagactacaactatggtaacactttttcaaatatataaactcttaaattatataaatgacatcatgacctactaaattgtagacggtgtggagcttcgtcttcttaattttatattatttagtgagaaa

SEQ ID NO: 389154 - DNA, 700 bp, Cannabis indica
taaaaataaaaaaaaaaaacaaaaaaaaaacttgttttaaaatttaaaaataaaaaaacccctctcattttttatgtttgtagttttgtattatttaacgagtattaggttgggcggatccatattgcatatttttggggcataaaaccaatctaatctgcattaggtatatgaataatatattattaattttcatgtctaatcactaaataaactcgtgatatgaatcagcaaaaaagattacaaatacatactcaaataataaatttaatgcaacctcattttttttttggtctattggtagagtggtctatctttttaagttattttgtatgttggtttaattttgattattttttacataatgccctccactccactgaggaagccagaaatttagttgagtgaaggtttgaataaatattaagtcaaaactaataaaaataatgataaatgtatctttcaaattttcatcttcaacaaaataaaataatactattgacaaaaataaaataaaatattgtcaatggtattattttattttttaataaagtattatttttttttattatttgtattggactacttttaaaatgggcttgattaaaataagagtaggctcatgaatcatgattaagatattaagtgagggcttttgtgaattggattttaataaattgaacaaagtgaattaatatat

SEQ ID NO: 389155 - DNA, 665 bp, Cannabis indica
ttattaaaaaataataattttatggatatttttatttgtgcattttgtatggaaatacagaaaaaataaaataaaataaaaagttaaaaaagtggtacatgtggtgattctactaaattgttcccatagccctcaaaaattctactaaattattaaaattatattagatttaaagatttttttttaaatccgtttaattttaataaaatatgtctaacgtataaaaataatagttgcaaaactataaattaaaaagttaatctcacattataaaaagttcgaaaaaaaagtttattatctttagcttttgatattgatctgagttgtactgaaatcttaattatgcttacataataataatttgattagcaatagactcatcaataaatattgattattcttttcgtaataattttatagttgtctttttatatatattttcttatattttatttggcaataagtataaactttgacttattaaaaaaaattatgagtaaattaaaaattaattatgtatattattttcatttttaaaagggtaaatactattttggaccctctgttttataaaagttaccaattggaccctgtgttttgttaaatgacaaaatggaccctgtattttctaaaatagtacaaatagaaccctaaattgatttttt

SEQ ID NO: 389156 - DNA, 1665 bp, Cannabis indica
aaaaaaaaccctaaagtttctaaacacccaacactcacctgcatgaggcctctcatctcagcctctctctattttcatactggagctacgacctcgacctctccccctctctttgtttttgcaatggggccacaaccctagccttctctctcgcttgacctctcactctctctctatttttgcgctagagccacagatccatttgcctccagtctaagaacccaaaatacccaacacacaatgcgtcgaccttctctctcgctcatttttttctctctctctctctctctcattttcgctcagtttgacatgctacctccactgtcatgaacacaaacagatactaccacaagtctcctcgttgattgtcctctgttgtatgtttatgtgtgtttgtgtgtatgtaggtggacgaaaaaagtttgtcatgatgtagactttcaacaaggctttgcaattcatggggatctagagctaggctcgtggtcgatctagaattctcatgttcagaaaatgagcaatttttttaaaaaaatgtattttgtaactaggtttgagctgtaacttattttatttcttatgttctaagtttgaagtgttgatatcaagtgttattttggttgagttcgtaatgtacatttaaattttctgtatgaaaaaagattagtatttgtaaaaaaattgttgatttgtaaactctggtgattttgagaaaatgattaataaaaaatactttttagttaattaatcaattttattatattgattgttttttttaaaaaaataatgtaacaaatttttttaagatagtaacattacaatatttaatattatctcgaattggaaaaaataattaaacaaagatatattgtcggtattatgcagacactccatatacaaaataaaaaaatgatagtgatccacattttgaatctctaaaaaatatttttactgactcttacattagcgacccacattgaagggtcactaaaaatctttaaagtctcttatagagggtcattgaaacctagttttgtagtagtgtaacctggcaacaaaagttggcgtcatatcattttgtattagagcattgattctggtgaatattaactacaaaaatgaagacgagaacaaaaatgttggaggcaaaagtcacaggtgtaaaggaacacctgaaatcacatgacacaaacttgacagcaatcacttaacaattaaaaaatttaatgaatggtcaagataaaattttcaatgaacttgctaacatctatgaagcctctgcaacatctcaaacccttggtctgaaattttttgaagagaattcatcaaccctaggaccgactgggttaggtatacatgaaaatgaagttagatgaagatgacaagagttacaaccccaaaaaattgaacttctcgtgtattcaggggatgattcagagaattggacatatagggattatccttgttttatcaggtgggaaaacctccaataggtaatcaatacctggttgtaattaaagtgcatgatcattaggcaattttgtccaacacatgagtgaacgatttataatatatttctcaacctctaacaagtttcttcaatctaggaatacctatacaatttgacaattaagtggctaccattggaactgttggaaattattt

SEQ ID NO: 389157 - DNA, 1360 bp, Cannabis indica
tctctctctctctctcttttcgttctttgaatttccaccattgttgagtttttgagctattctgaacttcttgaatctcacgtcttagaatagttttatacattataatttgttcaatagctttaggatgcataatgtatgactccttgatgaaaaagatagaatcttgtgcttttttttttaagattttaatcttcgggaagaatgaactttgaattttaaaaaatatgatttttgattcgtttagggacctgatcggcgctttaggtctattagaggccctgcccagttcttggtctcatctaaaacccctaaccgatacttagttcctttctaagaactctgtctagccttctaaggctgaatctatcctggctggttcatggtgaactaaccataagctggccagttcttggtgaaccttctagaggctggccggttgatggatttatatttaggggttgtccggttagttcatttaagtcttggccgattagcccacatttttatccttgtcttatttgtgatctctagttgtttacctccctttgtcttttctcacaaatgaactcgcgcaactattagggaggtgaaaattagatcgatgaggacttactctgtcttttatacgaatattatcactcaactagttcttcctccaagagctcttcgggcaactctttgagtgactttgaggtgagtagtggttctctagaacctgtggtttaacatcaccactattatgagaaaataggtggtgagatctacggaagatttgactgtgaactgaactaggggtggagacagttccttcctaagtcttggaattacagtgtccgctaaggtctgctagacacactgcttattggagaggcatcttctgtgtctagagatcttcctgtagcagcgatttctatggctatttcccagtactctgggcaataccaaaacttggcgagaactaagcaaacatattacaaggcacatcccactaaacctcgtatctccatgcttatggcaagaggaagggttcgccaagttgagcaggctgaatagcctgaggctggccacgcagaggagcctatggccaaccaagtgaaggagtcaaaatgtaacaccctaactatcttaggcgtattacgtgattttcaaacgtactgtgcagctcgttgctaatcaacgaggtttatggaaaaacgtgattaattaaaattttgctttttaattaaacttataaaaccatattacaaaagactcgggatcccgattataaaaatatttacaaaaagtttaactgtttaactgttacatcaaaataaagtcgtctaacgaccaattacaaaaactcagccttgctgtc

SEQ ID NO: 389158 - DNA, 1030 bp, Cannabis indica
aaaagaaacaaagaataggaaatgagtgagtaatttccaatcttgcataacagttgttcttttgtatatgttttttcactaaacatgccaactatttgaataaaaaagactagagtactttaatagtgttaaaatattgtagtactatatttaagcatgtttccaaaatgtgttatattttaagtagtttaataatgcaatctgtgttattgaggattgtcaaaaattacttcattcgatgagcagtgtctctttggcttttgtttatcgtcttgctaacaagacagttcatagttttattagagcttcttgtttttctctagatcgttttttcaggagtaatgattctgctgagtgttgttatgttgttcttaataaagtcataagtttttccaaaaatttcaaaacaacttcttaggctgatgtgaatgtgcaatgtatgtactgcacacacatgaaaatgggtacctttaatttgtctcatctgtctcgcccttgtgttcttgtgcccttctcgcctcacgctcgctctttctcatcctttgctgtcgccgatttgccttctcatcttctctttgacgccttcactcttatctctccatcgcttcttctcgtactcctgctcttgctcgttcatttagtctcacccactcgtcctcgctttaattataactaaaattgaatattaaaaaaaagaaaaagaaaaatacattgtactctttaccatccattttgtctcttataatggtagttaatatatacgcatctttatgcaacagctgaataagaagtatagccctcttcaccctccatatctcaattttgctcaaaaaccacatacctactttaacgatttcaaaattcattcatgaaggaaattataacaatgtggatgttcgttaagtttgctggagttttttttttttttggctaattaagtcttttgttctctgaattttgacatgtactaaatcatgttttctgaacttttaaggtcgttaaaaatgccctctgaactattgagattgtt

SEQ ID NO: 389159 - DNA, 1068 bp, Cannabis indica
gacttcccctctggctgggttcataccaggcgtacaggagacttgaaacaccagtacgactgctgattagaccactcccaacactgaggtcccgtccactactaatactcaaagggcagctggagatgacactgaactctaatttttgtgagaggcacttgggctcatgcaaggccataacaacactctacatcatgataggaggatctccaaacctccattaaccttgaatttgatgaggagagacgtcaattcttaaagtggagggaccgggatatgaaggcacaacaggcagccattgatgatcgttctaggcagggcaccgtgttgataagaagggcctactagttacaagtcaacaaccagctactgaatctagtaatccacggagcgaattagaatggtatgcaactcggcatactacacaaacttgtagtggtcaactgtccaatctgaggccacaggtccaaattgtgggccaaacagtagatggccagatcctaccagatcgtcccttgggaggaataacacattccaataactacaccactatcgaagtctcaggccaacctatcaaccaaacaagttaaatgccaaggccacttggtacttcggagttcgataggttgggcactacacatgaccttgaaaccgatttgaatcacagaaagggactagatgggtaaaacattccaccaaacatccaaccagataaccgtgccaaagatctagtttaaagagatcccaatgtgacataggtccgtcaacaggctcagtaatttcatcttcttatgcaagcataaatagatgacctaaaaaacatggtacaaggcttgaccgacccaaaaatcatagatatcaaactcaaatgggcacgtggataacccttcttgcttaaaaacgaagtccttgacctaccaccaaagatcaaaatgccaatatggaaaatgtacataggaaaagaagatccctcatcacacctaaagtactttgaaatgtagatggatctacaagggataaggtgtaaagcccgcttagttaatttggaaattagcagttatttatgtt

SEQ ID NO: 389160 - DNA, 1189 bp, Cannabis indica
taaagttagtttgtcctgagaaaatatgttttgggggtgtttttggtttggtttggtttgaatttttatttttttaaaattaaacaagaaatattaattttttaaaatttaaaagcaaactagaccaattaaatactcaaatcaaaccaaagcaaaccaaatggtttagtttagtttgaaacaatagtttgtaattcggaaatattttaatatttttttattaaattatttttactttaaagcttataatacataaataagtattataagctaccaacatgcttgataagttagttacttgtctgttagttcggttagcacttcttctttctattttttctattatcttgtaccaacaattgtgtgcctataaataaagactttgttcattgagagggtgtggttcttactgcattattactctattgttttctttcactatgttttttgagttcttggtgctctgcaccatctaagtgtttctacacttctacatggtattaatcgctgctgtgacatttctcaatgtcgtcttctacctttgatccttgttgatgatgcttctaaagctctttcatatagagaggatattattgaattaagaaagcacaacatacaaaaacagagaagtattccaaagtatatgagtttgagagcaacatatcttttgtaatggcgattcctgatgctttgatcatactctgtgaaaattgatatgataattaatttttaattttcaacctccaattctggatttaatttgcaaaaacagagaagaaatcacaaagtaggaaaaaaaccatagggaggttagagaaagaaaagcgagagaaccttaacttaattctaatagtccttgagtcaaatttataaggcagaactgttaaactttagtttcatatccttataaatcaaactatgacacaaataaattatcctctaaaatttcacaacctccatagtctccaatagaaggaagagaagaaaataaagtcatggagactatacccatgatggttacccaaaaatagtgagccaaaaatagccgcttgatcagcgatagtgagccaaaaatagccgcttatgattgagttgtccaagatggtcagcatataaaatagccaccatcttgagggaggatgttagagagtcccacattgctaatatgtggaaagataatagaatatat

SEQ ID NO: 389161 - DNA, 802 bp, Cannabis indica
gaactgtttcccacaggttaaagatgttcttttcgaacctgttcgtaaaacacaagatgcaatgttctttgttaagaattctgatggtatgtgggtaccatgtggaccgaagcaaccgggtgcgatccaagtatctatgcaggatctggcagcacgaggcgaagcttcaaaggtaaagaaaatcccggccctcattccaaattcagttttttttcttgttgtatcttacattctgatttcggttgttttgcagatccttccacctcccatttcgagaacagatttcgataaggtgcttgctagacagagacctaccgtgagcaaatctgacctcgaggtacacgagagattcacaaaggagttcggggaagaagggtgatcaaatttttctgtaattatgataaaaaaaaaaatcaatccacgctaatcgttgtcgtcgtcatcattggtggtggatctgatgtattattgtttttcacttattagtttctttgaatctggaaaaaggaaggcaaatataatataaccttttcttcaattctgtattgagaccaaaaacatcatactttgtttgatttgccttgatttaaaaatttctgtaaattacagttgaagaaaaatatgcttccagattacttttttttaaccattgaaaggtattatgaacatggttgaatttgtgtatatcatttgctttgatgatcatttcaatttggtttgtttttagtgtgaatatatttattaattattattgtgtaaagttataatatatttttaatacactcgattccaacaccaacta

SEQ ID NO: 389162 - DNA, 728 bp, Cannabis indica
cctttttttttttctctttttctttttctttctctttctctttcttctcgacaaaaccccctaacccttttcttcttcttctcgacagaatctaacccttcttctttttttctaccattactacatcagaatcccaaaacccctaaaaccaccatcagcactgaaaccacttgcaattgccatcaccacccgaactccttctctctcccatcaccactgcaaccattaaaccattacgagaagggcctcgcgagttggggagttcgacggaggcgatgctctggtgacgaggtttcacataggcggtgcgctggtgtgtgggttcttagccagaagccctttgagggggtttgaacgatagtgcttcgagggggtttaaccgacggtggagcttcgaggggggttttgttgtctctttgcttgggttttatctggtttagcaaatcgcagagaagacttccattaccaccatcagaagaagaagaaaaatggcagaagaagaatatttaactactgaatggactttgattaattcaatctttatcattacaaaatattaccattacaaaataaactgtatgtacatacctgatccaccttttgtgtttaggggaagattccatggaataaacaaattgatacggtttatctgataaagaagaatgacagaagaagaagaagggttagggggttcgtgtcgaaaagaaagagagagagaaagagaaaaa

SEQ ID NO: 389163 - DNA, 762 bp, Cannabis indica
gcataaaacccaacaccttcctgtcccctgtgtgggttagctgggagtccatggagcacttgttcctctactgtgactttgcgtaccatttgtggagagcctccccgtggggaatctttccgatccctgactctgggggcggggtctgggactgggtcacattcatctggaacctgaagacgagaggggtggacacggacaagctatttctttatgcctcgatcgttgtggatattatatggagaacccgaaatgaaaaagttcataactatgtttcgtgtaatattaatactgctattgactctatttcgaattgtttcacagattatgctgcctgcttgctctccccgacagtagatgtgtttcctccgagctggtcgacccttcctgaagactggatcaaaattaactgtgatgttaaggttggtggtgagcacatgtgcatcgttgccttggctagagatcattcagggtcgattttgtgtggtatggccaataacctcaacttcacagatccttcgattggcgaggcggcggcgtgccagcttgctttggaaactgctgctaccaggggacatgattttatcattattgagagtgattcagaagtggttattaatgcaattaaaggtgtccaacccaattggaacattattaattacgtgaatgattgtaatcacctctctaagaagtttttatcctgtaatttttcttttatctctagaaattgtaactttgcggctcacaatgtcgctagatggg

SEQ ID NO: 389164 - DNA, 713 bp, Cannabis indica
cgcttaataatctcaactctaacctataaaattcatgtttgatcttattttatttgactttaagttttaagttattttattttttatttttgtcatttaattaaatatatatacaagactgtaactaattacatcagcttactaaattaaagaatctgtccatatacgaaatatcacctaattttttttttttcattttcccttttggcctatagttaataatagttttggatagaaaaagatgatgtaattaactataataaaaacaaaatagaattctaggtacctaaaataaattaatttatatatatattatggtcacgtgggctttaaatcctttgtaaatacacgtaataagtcctatagtaatgtacgtataacttctaattatggggcacgtgttatatataattggaaaattttgtaaattttaaaataggtcaaacactttaatattgaaaactagcactagacaactaatttttttagtttgatttgtctttttaagcatattaaaatttggtaagatataattacagtaaatgagattttatttcaaaattaattaattacgtgaagtatatagttaattttattgatttatttattaagtattatggtattaatgaagttgagattgataaagatattatgttattttaaattgatcacatgttgaaaataatttcttacgacactactgaatttattga

SEQ ID NO: 389165 - DNA, 668 bp, Cannabis indica
aatttttcctatctatatagctggtaatatatatttttgttgatttttttctctgtatttttcctttacctatcctttgtcattttccttttttttttgttttttttttcttcccgtttgaagttcttagattttattttgggtgtaaagtttagtaattcgattagatcgaagttggtttaggattttttgttttgaggtttggtttaatttctcgaaatttgtttagaatttagcttctactgatttgaagattagatttttatggttctgatgatttgttgattttgattttggtcttttttactggaagattgaaaataagttatttaatttatttagatgtagtttttgtggtctgatttgtgcaagaagagaaaaaaaaactttattttttattattagttggaatttgtggttgtatataggtgaaaaagatcagatcggattggtctagttatgaattgagggtgtaagtaaatatagagttggcttttaagctgtgaaaattctatcaaagctcagctctgtgtttataaacatcatgatgacccatatgtatataacctagtggtgacatcaacggcaactgcaaaacctaggtatatctcttccactttatatatctcggtttttatgtatgtatatatatttatgtatatttttat

SEQ ID NO: 389166 - DNA, 1369 bp, Cannabis indica
aagcacacatagtagttgcaataatatagtaattgaaagagatgataagtctgatccaaataacattgatgtgaagaaggtagaagtatccccaaccaatcactagaggtgatggttctatcatagccacatttattttttcttattaagtctttgtcttaattcctacacatttaaaagttcaaataattaatacttttcctttcccaggcctctctcgtgattcttttccttttttttttttttcatataaataactatcacattatttgtttgtctaatctgatgatgaattttttttttctttttgtaaatgattttatatctatattttattatactatatgatatattatagatttcatttgggcttttgaaattaccatttagatctctgtaatttaaactaattgctaagttttatcatgtgttaaacaaaatcattgtactcaaaagataaaaaaaaaaaaaaacaaaacaaaatcatcttaaacagttaaaagtgacaatatatttattatttccagcaaaaagaagaaaaaaaaaaagattatatttattgaatttacatttatgaagccactaaggcaggatgttagaaactcaataacacaatatacaaatttgtatataattttaaacacaataatagtttatctaaaaaaaacacaataataattagataataattaggtatactatatacatatccaaaattatcttaaatattttgaaaggggaagttaaaaaatactcactttttttataaattaacaaaatttactttcatataaaatttaattcaaatatacctctctttatgagtattatacctaaattatcctcagacactcatataattaagacataatttcaaacataaaatttgtgttctttgtagattaatgtccagttttatgagaaagttgaggtaatattttgattagaaaataatgaaaactatcgtgaaatgacatacgtaaacttgatagaatgattaaaaaaaaggtatatataataaattttgaaaaagatgataaaagatgtatgtagttatttgcgttgtgaaacggacccattacaggcccataattaagacctctctctaagcttcattgggctcttgtgacgaagcccatttgaaattacagagttacataaggttctcaagtcaaattctcaaaaccccttcaacattagggtttactgcaactctaacttcgcaccgaaatcaagtttctgcagctatggttctctttctcacttcttaatttatcattatcttttgttatacgaactgattgcgaatatgaaacagatactgatttttctacttgttcttcttcttcttctttgtttgtgaaaattt

SEQ ID NO: 389167 - DNA, 1721 bp, Cannabis indica
gaggagaatgaagaagtagaagcctatggggtatggttgaagacagataatggatgcagagatggctttcacggcaaaaaaactggtatggggcaagccaacgttcaaggaaaatcgctgaataagaatgcaacagggtgggaggctgtacctgtaatttctaatacgtttgtaccactggaaacgagcatgatgggggggggggtcgaacaaatgttaacaaaggcaagaacccaacaagaaccaatgaaacaactcgagaaggggggtcaaagagcaagaatcaacaaccaagaatataactcagtgtatacaaagcagggaggtacggaagatgtgcatgatgatggaggaaaaggcaaaaggagattggtggaggatatggaggaagtaggatatggaaaactgaaaaaaaaccaaccactctgtgtacaaagaactgctagaccaaagtctttacgacatccagttagtcatgcaacagaagctcaattcttgagtgaagcaaaggtctttgtagctggtagtgtttcgaaagaggtagccaaagaacatagaaggaaagtttcggtgaagaaggattcaaaagctaaaaaggggaagatagagagcaaggtggctggtgtttctcaacaaggagattcggtagctacacagatcacggaagaggcgcaccctgaaattccgggtcgcctacaaccatgaatcttttactttggaacgtccaaggattggggaacccttggacggtccgttctttacagtcccttgtgtgtagttacaatcctaaggtggtctttattttggaatcaagattgaacaaagctcatgctgaaatgttgcgtgtgaaacttgggtttagtggttgttttgtaattgaagctcgggggaagagtggcggtcttattttattatggttaatggatattgagactcaagttctttccttctctccattccatattgattctttcattagaatggaggagggccagtggtggagatttacggggttttatggcgatctggatcctactcaaagaattcattcttggaagcttttgagaagactaagtcggatgtatgctgggccgtgggttgtaggaggtgactttaatgaaattttgagccaaaaagagaaaatgggtggctcatctaaaccaagctatctcattaataacttcaggaaggcccttgattactgtcacttaagggaggtggagtttgagggcagtgactatacgtggtgtaatgggagaaagaaaaatctgatttttgaaaggttggatcgggtgtgtggaaactcggactggtttgagatgttctctcaagcaattgtgaaacatcttgatcgtattaactcggaccattgcccgcttctcattacgaggaaggatccattgtccaaaatgcaaagcacggttagatggcgaatgtacggagattgtgcaatcggcttggctaaggaaagacccgattgagcagcctaaggatctaaagaactggcttagtgagtgtggggttgctcttcaaaaatggaatcaagttaaaaagagagagatgacaaagcaattgaatgaatacaaggaaaaaattgcccaactaacatgcagaaccgagagggaagattggcaacaactccgggatttggaatataaacagaatattttgctcgataaggaagagaaattttggaagcaaaggagtagggcggtttggct

SEQ ID NO: 389168 - DNA, 690 bp, Cannabis indica
tttctatcaaacatagcgtaataaatttacccgaatttattacctgatctctaaggtgtgcttcggtatcaatctttgacttccaccaaagaagacctaacaaaacagcaactccaatggcttgaactaatctcaacttatcaaagtaatccctacacctttctctgaaagttctcttagacaaaatttgaaattgatcccaccatgacaatgtccaatctttcttcacttgaatggctgcatggagttgttctgagacctttgtggtttgatgattctcttgcttctccattggctccacttgagtcttgtatttgtgttgtaaatactaacacaatagtaaaagcaataacataattttgaaagcgagtttctttcaggttgaaccatgtaaaaattcacttcttcgagaaaataaaaactcgaaaatagaaaaaagaatttacataatagacaaaaaatttaaaaagaaattataaaaatacatcaacaatgaaattttttcactctttgaacttttttatttacaaaaatacattttcactgaaaataatgaactatttttttagttgtttgatagtttatttatagttatattatagttatcgtggggttgatttcatattgttttttaattgtttttttttttactttttgctgaacaaagtatattcttgtaattttaaaact

SEQ ID NO: 389169 - DNA, 1013 bp, Cannabis indica
aagagtctctaaggttaaaagatatcaatgtgccatggactattacatcataaaataactcgttataaaacagaatatcatctggattaaaatagtttgtaagttgtattatttccaagtctaatgaaagccaactccttcatatcactaaatattatacaagaaggatgcattccttatttgaatttgctagaggatcctctgtgagtaaagccttgtaaatacttaagcagtagatattatttggatcatcagtatcctcgtaaaacatatattagcctcctcctcctccttctcctcctcatcatcatcatcatcatcatcattttcttcttcttcttcattggcagcaacatcatcatcatcgacaacatcatcattatcatacccagaaggaaataaggtagggagttgaataatgcaggtatgatctccagtattattattattcccttgaagcatagaataaggtttatatagtgttaccgtccaatctttatttacagtaatcacctaaccttttgaaaagctacaaaatcttttatcataaggcataacaatttttgactctaaaattttattattggtaatattataaatattccatgtagaattagtagtagaatcgctttcagaaggagttagaaatattggaacttgatgatatcgatattagttatgtaatgtttcggttcattaaacttgattaattatctctcatcaaagaagaccattctgaacaaacagttccaaatagcaaataattccattctctctaaaattaacagtaagatatatcttcgtgtttgtccaatctagcttaattcattggtttttaccaactaaatccattgtataatagatattttgtcggcctttctttagcacttattaatttcttgattaataatgcaataataaatgaatgagaaagaataagtgaaaataatgcttatttataattaaaaatgagaaatctaatcctactccaattcattttattattattatta

SEQ ID NO: 389170 - DNA, 635 bp, Cannabis indica
acaaatctctaattctatcaaaatgaatagagataagccaattaagaactttctttgatttgaataacttttcaatgcttttcgaaagcaacacggttatttagcttcagtgatggagcttaaattattacagatggattgttacatccttctagaataattcctccacccttagagtaaccaccatctctaatattctgtattggtgtagataacaggattctaatatacacccctatcatctaacatatatgtcactttcagagattctttcttgattgtctcctaatgttccttgtttgattacatcttaaatggctcccattcaacaattggagtctagttaagtttgtacacaagggtacacttagcctcttattattggttttcagggacatcttgttgtgacatattgtcttagtctagaactataagttccttctagactaagtcatcaacgtagcattctagtattaactttaatgtaaaatacttgcttaagattaactagtcgttagagataccataaagaatttcataatgattaggtattttgcccaagtcattcaaatagacattgcaaaattctcctatcttatcctcataattctgataagttacttctatccatatga

SEQ ID NO: 389171 - DNA, 2468 bp, Cannabis indica
ccatgaaacttaatcccttaaagggttccttaggggttagctcaggtaagtttcttgaatttcttattaatgcttgaggattagaagctaatccagagaaaattcaagccctcctagatatgaaatcaccaacaaaggtgcaagaagtgcaaagcctaactggttggatagtctcacaaagtatatttgtgtcaaaattaacagacaagtgtgttcctttcttcaacgtcctctgaggtaataagaagtttgagtgaacaaaacaataacttgcacaaccctccatactctcaaaacctctggacggagaagagttaggaatctacattgtagtcaccgagcatgctgtgagtgtcgtgatgataagagaagacaacaatgttcaacatccaatctactatatcagcaaaagactagctgaggttgagattcaataccccctaattgaaaaatggacttactgtttgatcctatccacaagaaatttaaggccctacttgcaagctcttccaatttgggtgtacaccaaccaacctttacgccaagttttgctaaagctagatgcatctggttggctgctcaagtggaaattgagttggggcatagcagtaaaaagacaagctttaacagattttgtggttgaatgcacaagcaaggaggcaagcagtttaaaagataatctcgagcgagaaagggagcaagaaaaagcaacccctcagaaggaaactgtgaagataagctaatctggaagttacacatggacggatcagtcactgaccaattgtctagggctgggattgctctcatcatatttgggagggcaacccttgcatagagcaatcaagtttagattcaaggcatccaataatgaggcaaaatatgaagcactcattgccagtttaaaactttcttgggaagtacgtgctgagtatttagaaatttatagtgattcataattggtggtaaatcatgtcctagcataatacacagcttgaggagaaacaatggtggcatatcttagtaagatccacgacctacttgcacaatttaagggatacgccctcaagaagattctaagggaagaaagtgtaacagttgatgcactagcacgactggtgagcaacacagtaacaaacaaagtaaccttagtcccaacctaatttctaaaagagcctaccatcacatgcataaaggagattgagatgataaacaacacaccaaattggatgactcttatagcaacctatcttatcactggtgaacttctgaacaataagaatgaagcttgaaaaaataatgagaaaagcttcttggtacataataatggatggtgtgatatacaaaagaggtttcgccatgccattattgagatgtgtaacaaatgaggaagctacacgattcttgtttgaagttcatgaaggcttttgtggcaatcatgctaggtggcaaagtttatctaagaaaatactaaggcaaggttacttctgaccaacaatgattgatgactcaaatgcctatgtggaaaaatatgaaaaatgccagagattttcaaaaatccccttgttgttggaggaattttgacaacaccaaataaaaataacaatataattatttaataaaaaagcgcgagtactcaacctagaatggcgagtattcaaatgagactacacagacaaacttgaaaaactgataaacgcaatgaacacgaaaaagtatagtggttcagtcagatcacggtctgcttagtccactgttgcaacgatttctgtcttcttcttatttatactagatcactcctttatctatatagcaagtgttccttcgattgcacaaaacttaattattgaattgttttacattgaatatggaataaatgaaaaaatagtttcaatctgtttaactaaatacagcaacgtacgcgatcttcatatagtgtgagttgcctgttcatatactcgcacaacctcgcaggcttagggtgtgttcctattaacactagactaatgagtctcgtgttaaggtatctgtgtcctaatcgagtcccgtatacggataccttgttagcgtcgacaactcaggatgtgcgagaattgaaaatttccttcttggtcctacgtcatgcaaggcataataatgtgattagatactatcaaggtcacatcatcttgctgagcttggttcaggcgaggtttattctcgagaggccctcttttgataactcagcaaccctcaagggatgtgagtccacgtgtcattcttatgggagcctgatcttgagtttctaggtaaaattcacactataacacatgccccttgtttcgcgattgacagccatgtcatgagggaaactataagagagaggcagcaactggttgtcacgagatggtgactcttggttgtcttgtcgagggtttcaaaaagacagctataattattatttttttcctttgaggtgccacatcattaga

SEQ ID NO: 389172 - DNA, 1752 bp, Cannabis indica
ttccttttcttcattcaatgtaacctggtccttttcttcaagttttatctttccgcaatatattgcttttatttttttaaagaaataaaaaataatatgaagagtaaaaaataaatttaccgtgaaattatttagatttaaaaataacagagaaaaatactatgcaccatttaaacttataaaatgaatactatcaattaaaaacaaatcaattaaataatgtgacttaagtattttaatatactaaaatgatagtttttactatcttttataatacattaatttaactaattaaactaataatttttttcttttaatatattttatataatttttttttataaaaacaataaaaaatcaaaacaaccgcgttacaataaaaaatctaaacaaccgcgtcgggtgtagtatcgtagcctagtattattgtaaactaacaacttgagataactagaaaaaagagcgtaataagtagagaaaaataggtttgattttttaccctcattctctctctccttgcacacatttctctctcctcagtctcacacgccacacacagtgtagtgtggtgtgaatttatgatcaagtctatctcatcacaatctcttatgagttgagaatacactgtgatacataaatatactcatcctatagagtctaatagcccactttactcttgagtattgaggttggcttagaaaattatggtgtgaactcttcagcaaacttcttggattgaatgttcgtaataatactaaaagatagctaggatcccttgataggttataagaggtattgtctctctattcattagtctagttttaatctatatacattatgttgagatccttagtcttatggttcatattggataaaattatttttatcgaatctgctttcttttttaactctgatatggactataaaaactaacacggacccctgagtccatacccgtacccagaccggatttggacccggacccaaattgggacctggaccctagactcaaaccaaaaccccagacccagacactgacctcgtactagtccctcttcgggtctagaatccaagtatggtcccaatacggggtctgaatctggatctgggtctaggtctggattcggatccaggatctaagtttgggtcccaattcagagtctgaatctaggtccgggtctaggtccgtgattcgggtctgggtctaggatttggatctgggtccgtatttggatttgggtctgggtctacatttgggccgatctgggtcaaggtttgagcttgggtcagaggtccaagtctgggttcgggtctagggtccaggactagggtcggggctagtttactccagaacctttgtaaatattataatacaagctaatacgggtcatttgttatgtattaaataatatgactcatgttgtgttaaaatttatggtcgtaataattaatacaatacaatatttcatccaaacatagtgttatttattatttataatacagtacgatccttatacaacctaccaaatgagcccctactatgtaattatgtggtaagacaaacacacagaactgtgtaattaccttcaattatacccaattcaactccctcttggcattctaaacacggccgtaatattagcatgcatgcaatgtacttagaagatgaggattgatgggattataatgccctaacactacaaaaagttattatttttagtgacaattttttagttacaatataattttttt

SEQ ID NO: 389173 - DNA, 1943 bp, Cannabis indica
ctgctatgtaattcagttagtggagtggttggttagggtagaggtgggtgcatgttaacgaccgtgggtattagatataaataaggattgtttattggaagagggcacttttgtctaaactgtaattgaatgtgaggagggaccaggctctcgaattacctgggattttatcaatacaatctctactctcttttcttactaattgttgttcctaaatattgcattctatacctgtttctctatcacaaatctccctacaaaaagaaacaaatagtaagaacataatactagtaaaaaaaaatattagataagattaaatttatctccaactcgaacacttcaaaagagaatttattcaaacttgttaaatttttggcaactacatcaaataaaattttaacataacatactaataaacattaacataacccaacactactatacataacaaaacaaagcaccattaaatcaattacaatacgaataaaatagattacaaatttatgttaataaaatagtatactaaatattattattaatattataaaaataaatattatttaaacaaactcagcaagttatttttgattgttttttaaaaagttatttttattgttgttattattatataatataaaagtaaatactatcacactaacatattattgggtatttctataatagacaccctaaaattagtcatatccatgcacccctaaaatcttgaatagtgattggttattatattgaggtacatggtattttggtggaatattatacattgtatagttatttatttgaaaagaatttatttatttatttattttttttgagggaatgatagatggatttattaagatattgaaaactgaagagttatttggctatcgttatcaggtttaaagatttaagggagagactctgaacaattttttttttttatcttataatcgattttagtgcataaaagtgagaggtttattttgagttgaagaaattatttctctggaattgatgatagattgaaggcagaatttgtggtatcgtggagttacatgccattttaagtgaaattaataatataaggatgtttatcttttcttcattaatctgtattgtgccttgggttagtatttctgtcttcgaaaattaaatgtgtccatagacttcgagaggtttaaatctccatttcaaaatcctagtaagtttcaattataaaaaaaaattggaaaagccttaaaaatcatgttctgtctttctccaagaaagagacaaagagccataattctgcaccataaacgcattattaaaaaactatttgaatcatcaaagtttagaattaaataactgaatttaaatacaaagaaaactattcacctagagaataaaaaaacttcaataatcctaaaagaaccatgagtagtttaccagctattgcaataatgaagacaaaagagatgacagaccaagcatgagtcggatcaaatggccgcgctggaaaaaatgaccaaatggcagaggactgagaaggaaagcttagataggggtggtgaggggattatttttcattttgttaaaaagaaattaaagtaattgaaccaatcaaataataatttaggatgggtatcagtgcaccccctataatctaaatttgattcaatacaccaaagcctataatattctctcttcatttctgacatgtaaccaattaaattgcaatctaggagaagtaaggatgtgtctctttaaagggtgtctacgaaagaattttcccatattatttatctgttggatagtaacaaaaattgattttataataactgtttagggaaattctacaatgcacccccttaaaatagatatattgatgcacccttgtctgttttagcacccgaaataatttttagtcaaatttttcttatggtcatgtacgttatagttat

SEQ ID NO: 389174 - DNA, 1344 bp, Cannabis indica
tatgacagttggtaaacgagcctcacacaccagctttaccattactatttaaggctcaattggattaaacattggcggttaatcttaaaaaaacagattgagaaagagagttatttatgagctgattttgtttagagagagagatgagttgccgttaaatgttgtaatggagtgatacattgtttgtcatcactaccactagtgtgttcagttgcagaagttaagcttctcatgttgtgtaattgaactattgtaatctttcattgaagatcagttaataaagattctctaaggccattattatggatgttttctggtcgaggatgtaggcaaggtgattcattattaccttgttcaaacctcgttgagttcttgtgttctttataattgtttaatgttcttgttgctgatttaatattgttgtcgtattagtgttacatgttgaattggtttcattgatcatggtcttgtttattttgttgttgtcgaggtgttatttcacaacaatataaatataacttataaaaatattaatcattaacaaaacctttatataatatagataggttgagttttttaatcttcacatattttatattttttctattaacttataatatgcagtttaaaatataataataaattcataatttttaattatgtataataactttaaaaaataaaaattataattaatttatttattaacatataatgcatttatacacatttttttggctctaactattcatgtatatacgtaaaaataattgagttgttatttatatgattatttaaataatttttaaaagttaataaatttagagagtacaattattattattttttttttgtaaacaattagaggagggcaaaatacttatttattttatacatattgtatcaatataactaaaacacactaggatctaatgtgccaaatcaattttatattaaccatataggacggaaagtaagaaaaagatcacaactcaaaatcgagaatatttaacttcagtaatagtttagaattttttttttcaaattaggggaaaaacatattaactaatttatttttataataatttaaattagaccacaactataaaattaacaatgaatttaaatcgtaaaatatatatatgttattataaaatataaaaccgcgcaaagcacggtaccattccctagtaaataaataaaaaaatcaaagattattatcaatatacataagtgatgatgaactaatacgtaatgggaataaatggtaagataatcattttcttatatttatttatttactttattaaaattaagaaatggaaaacttgattaaataaaaga

SEQ ID NO: 389175 - DNA, 2078 bp, Cannabis indica
tataagagtgttctagtgtgtgttgcgtgaagtggaaagagtcttacattaacatgaacctttatttataaaggtatatagagtgaaattttagcatttaagtttaggactattcaattttgtgcaaatgggtgaggactctcacacttaattcaccacacatatacgtccgagctaagtcggttggtgtggtgtagcactcaattattttttacaaaaaaaattatttaaactctacagtgcaatgggttccgatataatgcgattggactgttttattttgaaaacgatcggtaaattccgactgcttgcatacttctagacagtttgtgaagaaaacaatttagtccgcaactcaatttaaaaaaattttatttgataatatggttcctcttatattttactaacagtttattgaacaggtagtaatgacgtcacaccaggtggccttgcctcagtggctcaatcaacggccaccttcaattgtggtattgatgtggacgagtgctacaagtttaagctccgagatattctcaccgtacgtacatgatcgatctaattacttacaagttacacattatgcctaatttctttatatattattgttaattaagaagttttattatttataggatgcgagtgcgaaacttccggctgacaaaagagcgacacagaaggacgcagaaggggtggtgaaagcagagctgctgaacaaccccgttccgatgacaaagccgggcggagtggccgcctgtgtcaagacagctgctaccctcaacgaaactattattatgtgatgacttgttttcttaactggtgcatggccatggggtttagtttagtattatgttttttcctcctattattatgtgttaacttgttttcttaacttgcgaggctttagttttttttttttcgtgtaaaaatattaagcttcttgctaaacatacataatcatattatgtaatcatgtattcaagaatttagccgtagtaggatctagtaaaaattcgtaggattttctttttaccagttattttagaaagattgtgtgattattataaaataaggtgtatactcttacgataagactcatttataagattgtatgtatataattaaaattttatatattataataatatttaattatatatttattttaaaaaataaaataatattaataatctctttctaaggcaacaattactttataccatattttaagaaattaagtaagactacttctgggctaatttcaaatatgaaagagtgcactactttttgttttatttgtggtgtactcggacacggtgtaacgtttttgtccccggctatttgatgaaccagttgagaaggtagtgaagccctatggtctattcatgaaagctccagatcgacgttcccagaagcagattggtgcgagatggctccgagacaatatggcccgaccgttgcaatcggctggtggcagcagttctccgacgacagtgagcagttccagggcaggaaaatcttcgaaaaatcagggtgaggatatggaggatatggaagtttatgtgagtaataatgaggagagtgtaggcgtggatcatgggatcatgggaggggatcacggtggaaaggaaatctccacaaattcagggatattgatgaatgagggagcgggaaaggaaagtggctttgaaaatggagggttcatttttacggatccaaaacgaaggagagttgatgagttttctgaagtgggccatgatcacactcaagctattgggccggcccaaagtttggttgataaaaggagtggtgatgtgggtagggccaacttgaatgcaacagaaattaatatgggcctacatattgacgaaggagagattgggatgggggataaattcggtccagcagcaataagagaggaagatgatatttttcaaaaaaacgagttaaaggcgggtatcaaaaatgggacccgccaaggattatgagtttttaagttgaattgtcgggggcttgggaaccctcgagtggttcaattcttgaaggaaattgtattccaaagaagcccaatgtgatctttt

SEQ ID NO: 389176 - DNA, 1204 bp, Cannabis indica
ttcctaacaatgaaggtcaagcgacgtgttccgtttagtgatagtggcggtgcaagatagaagatcatttgaggggaggcgctatgtggttctgtgtttcaaggaaggattgttggatgtgcaactaaagtccgacattgactaagaatgtgaaaaatcatgggtatataaggatggacactatctccattaatataaggcattttagaaatgtgtccaaaaataaaattgtgagggcactaagttttgggtttttgatatgattaataaatagatcaaatttaaatatgagatttgtttataatacctaaactttaacacgacacaaatacgaccataaacaataaactttcactcctatcaaaaatatgcatccatattaatattatatacaaatatattttagagatggaatatgtattaaaatatattcttatgcatatataataagtaactactaactttgtggtgctgtacataaattagttaggtaatctttaatttgcacacaaaatggggccatgcaaatgaaaaacaccaagaaattattataatccacccaattaattaccatttatgttatgaagcttattatttaattacttacttggactcatcatagctagtccaatgggcttttttttttttttcttttcttccttattatttttcttttgctaaactcttcactatttcacaacccttgaaaatgttttttgtagtataaataaatgagttaacatatttgtgttttttccaatgataaggaaagtagagaagtactaactacattagtgattaattagtgacaattaaaaacataaggctcttattaaaaaaaaaaaccatgatatagtgaagtacaattagtaattggtcaatattatatatttataaatatatatcataaaaaaattacttgttaaatgagtaatttttacttttacttattccctattatcccgataataattattatatgtatttgcaagtataaaatgaaatttttacgtcaaaattaattcgcaatatatatatatggaagaagttttaatggttacatttttattgtaactattatagttacattactattaaatagttgtgattaatttgaaaattaaataaaaataaataataaataacttgtaacctaaaagtaacctaagaatttattttcttataaaactttaattaagattaa

SEQ ID NO: 389177 - DNA, 1113 bp, Cannabis indica
ttttgatccaaagttgacttctctccgtgagttgactataactttgactttcgggttgacttttgactttgagcttttgaagatctcttttgaatagggtcttgaattcttgatcccttgatggatcttttgctctaacgaagtatgaagtattagatatacttgttgaatctacttctttgattatgtttgagtttaccaagcaaattgacactttatgaatttgcttgcaaaatgatcaagaaagtattagtaacaaataataatcaaatatttgtttatcatcaaaataagtaagtgattgacttttggttaacagactggatgttggacattgttttcctctcttattagtacgacgctgacagcatattcagtgacagctaggtatattcctaattcttctccgtctaggggttttgagactacagaacgttttgcaagttttcttttaattctttgaaagatttgtcacattcctccgtccattcaaactttttattacctcgaaggatgttgaagaaaggaagacatttatttgttgattttaaaacgaatttgttgactgcagctatccgaccagtcacgctttagacttcttttatttttgttggaaatttcatgtccaggaggggttgtatttaattgggattagcttcaattccccgagcattaacaataaacctaagaaatttacccaagctgaccccgaaggaacactttaagggattgagtttcatgttttattttctaaagattttgaagcattcatacagatcctctatatgctccccctggattcaacgaaaatcatccacatatacctctatattttgtctgatctactctttaaacatttttttactagtctttggtaatgttgtttactagtctctggcaattagcttcagtattcttcaaaccgaatgtcattactttgtaacagtacagacccatattttgttcaaaaattgtgtgttcttggtctggtggatgcgttgtgatttgattatacactgaataggcaactatcaagctcaagatttcatggctggttgtttcatccacgagctgatcaattcttggaagtggaaaacagtccttgggacacgc

SEQ ID NO: 389178 - DNA, 1655 bp, Cannabis indica
tttgtacataccaaagttacatcattaggtgtacattattattattattattactattattttaatttgggcttgaagaagataagcatgaacttaggtataagcaagtgcaataaataaataacaaaaatgtaagtcatagtttttgatcaacaccagactagaaaaattccaagccaaatatattttcttcagagttttcttcttcctaggtaactatttgaccccacaccacaccatctaaaagttcaagcaaccaaaccgtaatttgcttcctatttccttttccattttttgaaatgtatttcttttttttttaaataaagcgtaaatacttaaatccattttgtaatattactcaagaaaaaaaaatcatattatgttgtattactcaacacaccacccaaaaaaaaatccactatgttatatttttctttttgtgtactttcgctttaaattgcataaaatagtatagactctagaatgttataaattgcaattatgggtacatttactaaactaccatctagaaaaatagtatagactctagaatgtttatatttgtgtaagaataaacaaatagaaagataatcccttagtccaaaaagaaaaaaatccaaaaacgacaactaaatggaagaaaaaaaaaatataaaagattaggatgataatttaaaactatataattaatttcaaatttaaaaaatacattaaacaatataattatgtttttttttattaataattagtgtacaaatattaaatttaaaaaaccattaaaatattatatattaaaaaaatcattaaaatattatatattttcctttgatgttgtatttattatctccacttttgtcaaaaagaaaaaagataaaagaaatttctcttgtgcttttggctctataaatgtccccagaaaccaagcctttgcaaaccacttctacgtattacttccttttactctcgtctgttctttgcgtttttattaaggtattgtactgttaatgtacccttcttctactctcttcctcttaactttatcttctctttgtttatgttcttctgctttagttttaaaatcccaagttttcttttctctggttttaatgaccgaccctgtttaagttatacgatcattatgctctaaacaatgtttttcaatcccatgtttaactgggaaggtactgtgttttattcatactagatgctctgtttcaatatttcgttaagtaacttaaaattttactttgaccgaaattctgtggattgacgaagaaaaagaacaggtgttttcttttgatttgtgttgctctaacacatttttttcggaggaagaatcattacacgtaacattctgtccggtcaaatctgttgttttctgtcaactttgccttaaatgtagtttttaatcaacgtgtatggcgttacttggtttagaaaagccaaaattgttaatgattgctttcaaatttaattctgtcatccactctgaaagtgttgggttttgaaatttttgtgtttatgattggatctaattgtttaaacatctaaaacagaggttgtgctgcaaagggtcattgagaataataataataacaataattataataataataatcaccattgttgcattgggatagtgctctaattttaat

SEQ ID NO: 389179 - DNA, 1752 bp, Cannabis indica
caaataattgcagctgagggaatttattaggaggatactgaaagtagttctcctcaaccaaagcaaagaacaaaggacttgtgttattatcacctccaaacatatccctacaaaagaacaaagccaaaaataatattgagacataaattgaatagaaccatttaaaaactaatatacaaattcaaactttagagcataacacaatagaatagaattatacaaacttacacatatatataactcacaagtcactacacaaaatttaatacttaatctatatatattgtacatgtcaatcaaatattaattattctacattacttaaaaactattataaattactctgcataataaatagaccactaaaaaagatggacttcatctaaaaaccacatacatcaatatatatatatacatacatacagagagaatatttcgttcaacatacaaaacacaattaaacaattttacataatatggtcgaagaatgtacctttggtcgagtttgcagggaaaagtttggcgatgcatagccactaccaatttttgagtaaacaattgaggaagattaaagcagaggcagagaggaattgagtcggagaggttcaggtgagttgaaaaggataagaagaaaggaaggaagagatgtaattggaatagattgaacaacctctccgattggaactctacttccatctgtagcctctctggcgtctcctacatcaaccgcacagtttccaaccacatcttagagaaccccaatctctgcatctcattcgagtcactcaccgcactaactcagctccgagccttgagctgaaaaagtaactgtctctcctacaacgatttctccggcgagtttccggcgtctataactcatctcgcccaactataccatctggatatctcatctacttactatttctaaatacaaatctagggcggacgatgtggttgcaggctttagattgaccaggaagaagacaggagaatgataagaaaaaactataaaatatggtactttagtttatttttacaaaaatatggcataaaaataatccataaaaatataaaaattgctaaaaatctataatacaaatgcattaaaaaaatgtgccataaaaaagtaaagtcttcagtttttcccatatattgtgtaatttttactttataaattatgaaatcataccaccatctacccaatggccaatacaacgaaaaatatcattaaaaaataatcacaaaaaattatcctgaatattaagttttgtcattgctcagcagagcttcgagagattgtaggttgtttcttggttctccaagaagattaaacagtctctaaggaaaatgcattgtctggtgacaaggcagaaggcccaatctaaatcagaaaattctcgaagttgtagagatgaagatgcatagtagagaagaccttagccagggcttcctttaagtaacagagcaagtgatgcacagattgcatgtgaggtgtgcgtggtgaagacataaactgacttagaatgttgacaacaaaggttacatcaggcctaaaaagagttaggtaaagtaatttgcccacaagttgtcgatatggagaagggttttcaagaagttctccctggtgatcattaagcttgattcttgggtccattggtgtttccgtgggcttgctctctatgtatccattatcttctaggagttgtagtgtatacttcctttgagataggactaattgttggaaattatttt

SEQ ID NO: 389180 - DNA, 1718 bp, Cannabis indica
aaaaaaaaaaaaaaagaatttggggcttaaaaaagtggaggccttgtgcaatggcccaaactatccaatacttgggccgaccttgtctagtgtgtcatgttttctatgtggaagactgttaggagagttgaatctccttgacattgaaagctcgagtatgaacaaacaacaaagaacagtaaagaaaatctaaaaacagagaaaatagagaaaagagaggaaaggaagaagatgaaagatatcatgaaagagcttgattattattgagaatacagttgtacaatatatgtacagggattacagaactaaagcaagattacttgtaaccgaaagctaactaactaactaacaaaaaagtagttagttaggtaactaacaaaacaaaaattgtacaactatcagctcttaacactaccccacaaactcagcattagaggcatcaacaatggtgagtttggttcggaaaaggcaaaagctttgacttgatatggctttggtgaatccatttgcaagttgattagttgctagaacatgtttgatagtaatttggcgattttgaaccttctcttttacaaaatacaagtcaagctcgatatgtttggtgcgagcatggagaactggatttgtaggtggagctgggaatcttccttctctaccagtagcaggaactcctcgattgttggaactaggttgttgaattgagctccgttttctcgagagctattacctccatagcctcctctacaggtgttaaagttattgcgatttggcataggatacctcatattacgattgaactaggccacattagcttcaagattcagatcttgatcctgatcaaaaatataatcagagtcagttttggcaagattagcagtgatctcatgtttttgatcagttttctcgattcttgattcagatgcaagtaacagggcttcaatctcagcaacagtatagccttcaatccttgtgtttgaggagattatgaatgtgtcatattcactagggaggcctttgaagatagcagagatatgatcacgatcgttcagtgtttctccaacactagctagaagatccacacaatctgtttaaccttcaacaaatagtcattcaacgacatggaaccttttcgaatattgtggagtttagtacgaaactccagaatcttagatgacgctcgaagagtgaagtatttttccaaggaattctagatctgtctggctgtgttgcaccctaccattcttgttagcagactttctatcatggatgagaggagccatgaaacgagaagttggtcttggacatcccattccataaaagtagggttgaacacgccattagtttgatctgcatcattgagaaatcgaggaggaggagtaacattttaaatgaatttcatcaatcgatttcctcaaatggcagctaggacctgttgtttccaaagaataaagttgtaattattaagctttattgaaatcgagtgattaaagtacacaggtgaattctcatctggttctctgtttcgatttcgattgttgagttgatttccaccattgacattgttagcagttgatccacctgttggaattaattttaccaggatcttagatctacttacaagtatgttgatttaacaacctaaatatgaacttctaaaacgataaacaaaaacacataaaagttaagaataacttacagtgatggcagcggaattaagt

SEQ ID NO: 389181 - DNA, 1833 bp, Cannabis indica
tttttagttttttttttgttattcacggtgaaagactgactgggtggagatgacgaaaaaaattaagtggtggctatttttttttaaatttttgttgatattcacggtgaaagaaaatcacagagagaaaaaatagaagagacaatggggttagggaagacgttaggattttttatataaaagaaaaacttaagttaggggcaacttaaaatataaagtgtgtaacacttaataccgaaaagataaggtctggtcgtatgacctggtgtgattgtctagattcagttgttgttttcttgattttctgttaagatttttctgcttttgacggtgattgtgaggtctgtgtttgaggtgtgagttctgatggcatccgattatggtactgaggatcttgaaggaagtttgtcgatcatcccgctcgaggaggaggaggagccagcggttcaatacgatcggcctttggttgatgatacagaggtcgatactcggtggagcatagtaggtcgtttccttacggacaacccgatcgacttcatggcgatgcaaaacttgatggcggtgctttggaagccaggtatgggtatgtatgtgaaagatttgggtggaaatagatttatttttcaattctatcatgagatagatattcaaagggtcattgatcggagtccatggacgttcaaaaacgctccattaatctttgagaggctgcaaaccggggatgttccaagggctttgcggttgcatcatctcgaaatatgggttcaattgcatgatattcgggcaggttttaagacagaacgggtggttttagatgctgcgaactatatcggaagctttgttaaaaccgatgagaacaatttcaatggggtttggagggaatatctcagggttcgggttcgtttcgatatcgagaagccattaaaacggcggatgaagttgcaactaaccggtggtgagtggttttggattaattttcgctatgaatttgtgccgactttttgtttcatttgtggtgttataggccacaccgatcaatattgttctaggctctttattcaacccatcgcttctatcgtcaaaccgtatggttccttcatgaaggcgaacccgcgaagaactcaatacgccatgggagctaagtggctccgatcggcgtcaggtggggctgggcagtttggtgcgacggctgctggtgggagttctggtgcgtcgtcgtttggtggtgggggttctggagggtcggaggtgggtcggccaggtggtggtggagacgtgatgggggcggctaatcaggacctgggcagtgatttccagccgagaagagaaacaaattttaattcccatgattttagggataggcagcaaagtgggattcctagaatggtgggtcaaagattgatgcatgggaatagggatttgattaatggccatgcaagttttgtgggaaattgtgccgtgcacaataatgaagttgttggaaaagttattttaggaaataaaagtgttaatgaggtggcatctgatttggacattgatgaggagggtatggtttttcttgaaactaaaaggaaaagattgggccaagatattattagtgggccaaatgggctagtggagaatagtgatgtaattttgggccaagctaagggaactcactcaaaaaacgatttaatggcggactcgttcgatcgggttcgccaatcatcatgagatattgagctggaattgccatgggcttgggaacccagggacggttcaattcctaaaagatatgatttatcaaaagaaacccagttttatttttctttgtgaaactttaagcttgaaacc

SEQ ID NO: 389182 - DNA, 1013 bp, Cannabis indica
tggtctttctcctatcaacacgattgtatttcgcattatacgtaagtaatttctgtctcatattacaggattattgagtagtatggtaccaacttggatagggcgagccatcaaaatttaaattgggatttatctccaataaacccttacgatatgtacatgatcacagggtctagagactttagtaattattatagttgttcctcgcaatcttctgataattatggtaacttcctttaagtgagagtttattccccatttttctattatttgtttcacagtaagtatttgatgtacctcttttgcctcgcagatatggatctcaacttacaagatatgcttaatagccccctctcttcaaaaacagatccaaaaaacatgctgcccaggaaaatgatgcctgcggttcttccaaagaacccaaaagaacaaaaacaactaaaaataagaagaaatcttcaaaccaactcactaccgagcctggaaaatttcctaaaaaggttgctcctactgtggcaagcaccagtgaatagccccttgggtctgttcaccaggtcaaattctctgctcgctgaatgctaccaataattggcagcactatcagaccttcgagtccagcgactaggatttaattaataaagggagcttcgagagtttggtaaagaagatctatgatcttatgcaattagttagtgctttctttactttttcttttatttttcattatttcctttatactttctcttactcttttggttttattccttgtaggcatctattttgtcctttgctgctcaacacagaggtgttcaacgtgtcgagatgcttgaaatagagctttaccagactacggatgtaataccctagagttcagagaatggattagcaaaaccataactagttaattgagtaatattgtggcattatgtaaagaccgcttagctttaatttgggaattagcagataattatggtttaattattaaatttgattattatttttaaattattaat

SEQ ID NO: 389183 - DNA, 2262 bp, Cannabis indica
ttgactattatttacgttagatgatgacctaacggtgaaatttaacttatgaggttgatcgtcaatttttggagttcggatcgcaacggcaggaaccactctgggtaagttgtagcttaaatttatatctcccttgtgattgaagtgtgagacatgactttatagagcattgaaacagcttcaaaatgcaagttgaatcgcgtcaatcgaatcaatattgagtgagttatggcccctactgcatattgaactctacctttccccgtaggaagtgaacctatgagattgattccccgagacggaaaatggccagagagattgaatattcttgagtaaatttggggtagtttgtaacgtcctaacacctaggcacgctacagtaaattttcaattatagttcacacatttgctaatcaaagggttttctcaaaaatcatgacaaaattaatattttggcttaactttaaacttttatagatatatacatattttcgtacaaaaaagtcgggttcccgctttgaaaatttttattcaccttcaaaataaactttacaaatatgtcacatagcgattacaaaatgaagcccaagtcgttccaagaccgagctctccaggtcacaccatcatgccatgtacaatcattcccgagctctagactcattgttgttcagccttagcctttcctttacctacacatggtaaacaacactagtgagtcgatatactcagtaagaaaatcatagaacatatactgtaataccgccttgtatataggcactcatacacctatttataaggcttatcaaatggtcaataacattcttaatagaagtacgacctctatactatatacacttaagtactcgtcccatactagtgttggtagggctgaaccgtactctcgggtaccattaagtgttgtaccacatgcactatgtactcatcccgtactatagttggtaacactattatatacccttagtcattatacattgtaccaatacactccgtaccactactttactagtgttggtagtgtataactaacataaccaacatgtaatttatatacatacacacatacatatacatatcttatgttaatcttaccttgtttctaaatttaattgtgccaatcgacctgaatggtaaatcacatgttgaacggaggccctatgtcacaatcacataaatggataaacaacttgcgcaaccttctcggggacctaacttaaaactaaaattttcactatcgataaataatacaataatactctaaatattgaggaaacacaaaaattaaggctctagaaattgcccaaactagtaaactagattttcaaaccggcaaatcggttctcagggccctgcctagagaaatggttaaccgattccctacaggaaaccctaaaaaccatgaaactcaatcaaatctttcccaaacccaaccaaactttgcaaaatacatgtaatgacattaaataatagtttccaaacaacataacctcaaaatatagagaaattaaaccaaagccctaaaggttcagtgagaacctaaaatcccaaattacctacttaaagtcttaaaaaaactcaagaagaaaaggagtttagggtggtacctcaattattattcacttggcactcaaaacctaggtgagattttgcaaaattactaggaaaatgaagatgttttgatctagtttgtatggtttcttatggagtagagagagagagagaaatagcaagaaatggtttgctcttcacacaaagctttggcctttacttattttccataatcaagagataaattaagtttatccttagccaataatgactagctagagattagtggaataatccacttgccactaaaataaaatatacaaaaattaaccttattttagtgcttaaataatactccaacaccataaccccgcctaaccccgatatctcgaacttaaacatatgattgtctcccaaaataaaaggttctcagttcacacatgtgactctatcgaccattcttcattatttccatcgtcgtcgagctaaaattataagaattacaaatttcacatttagcataaatcacacacttatagtttaataaaatctctagaattaaaaaattataactctgctctccatttcctaaaaatggggcccactacataaatattcatgtataatcataaaataaagataattaatgctaattgtcttactaatccatatcttaatcatgttgggttttatgcc

SEQ ID NO: 389184 - DNA, 915 bp, Cannabis indica
gttatgtactgacgaataaagcaataaattcgttaagaaaaaagaacgtttaaatgaagaacttttgcctatattatatatatataataagctcctggcaaggtctaggggtggagatcatttttattgttctcaaaatataataatctgtatatataacaaattgctacaccgcactatgcactgtgtgctccatttgataattatgttataaaggctaaatgcttttgctgaaagacgtaggaattttttgttgatgataaatatgtgaaatcaaatccaaacgaaagtattgaatataaaatatatacaataagaaccaatagtcttatcaagaattaattcgaattaaattatgtcatatatatgcgtaaaaataaattaaagaaagaggtagagaagtgtgtggaggaaaataattaaaagatcgatcgatgatgtattattcttactaatatatagttcattcaaatcatatatagtggtttcggaataaataaaatacaggaagttgatttagtttatccgatcgatctgtaagaataaagttataagtaaagtcacaaaaaaatgtcattaaataagaataataatcttaatatatacataataaacagataattggaaagcttgcacacaaaaagaatctaatgaaatactattattttgagcatctaatattatttgtatatcaacttcatatagttgatacgtaatcaggttaaagcttctgaaacaaaccaaagacttatccgtatatagagtttataataaacttcacagcaatttataaaaattaattaaataatggatcattatactttctcaaaacagtgccaacttataattaacaacccaaagacaaagaactatgtgtaattactgataatttggactctgatcaaatgcagccat

SEQ ID NO: 389185 - DNA, 1223 bp, Cannabis indica
accaatacagttgaaagttccaagtagattaagcaaaagtaaaagagaaaaaacaattaaaggttcgagtaataaataaactataatattcgtagaaggcatgtaggtatactcaaatttcaaatcatccgagtaaaaaccaggaaagaaaataatgtactcaatagagggttatccaaaaatcaaggcaaaacatatatttaagtcaccaaatccatcgtccagcacattgacacatttacaaaaaaaaattctggaaggtaagtaggaattaaaacactttctccatgtaggcctaatacaaatgcaatgctaactgatagcgaacagtggaagatttccaaccatactcaaatataacatgccagaacgcatctggcgaaagaattattaccacaaaccattgaaaggaagcattgctccttcttaacacaaaatataaagtagtacactattataatgagaacatgcatacataactttttctcaggtctaatcagggtccatgtacacatctcaagtagaaaaggactaaggattcaagaaagaaatagtaaaaaaagaagttaaacaagcaccgtactagaaaacatagtaataaaagcattcctcaactatttgaacaagaactatataactattcggtgaaacaatttaccagaaaagctctagtatgcttttaaaataagttcaacaagcaaataacatcaagatccataaataaactagaaggcaacacagagacagatgaagtgaaccagcaacaaattttcagtgatccatataatatatccaagaatttcattctctgcatttcacgaaatcaccacaagcatttaaagcattggctcccaagaagcttctcatacacctgaagcaaatacccatttaaactcaaaccaataataatcaagaatcaagcatccaaaacagagcttgtgctgctaacaaaaaataaaatacaaccacaatcaagacgaggttcaacaaataaatcagtgtaaccaaattataaaatgatcatttcatgtcctccataagaaatccaaaaacattctacaatgaggcacacatactagcacgaacatataccaaaataataatcaaaaagaaaaaatacataaaaaaaatcaaaaaagatcactcttcttaagtaacaacaacaaaaaaaaaaaagaagaaaaactaacctcaataataatgcggtaagctctgatacattc

SEQ ID NO: 389186 - DNA, 578 bp, Cannabis indica
tattacttatcttttattataaataagttttatatatctatttttaattatcaaaatttaattacctacacttttggtataattatatagtatataaaataagaattttatagaaacacacacgtggtgtccctgttggatatagcgttacattacatatatgaattttaacgcccgtacttctaataaaaatactaatttatttatgcattaaatgcgaaaaaaataatatcacattttttttatttaatacttaaaaatgtaaaagatataatatataaataaaatcattgcaacatctatttttcaacataaattaaataaaagagagtgtcctagattgtccgcgcacttatatagccctcaactagtacagacaagtatgcaaagttctggtgccgtttggtaacatttttattttctaattttttaatcacaaaatgaaagtaaaatttttgtttttaaaatttttgtttttggaaaaataaaaatgtgttctataactacttttgtttttcacaattttaaaaagagaaaataaaagtgtagttctgtaaagttcatttttatttttattt

SEQ ID NO: 389187 - DNA, 1181 bp, Cannabis indica
atttttattctatttttattttttctaactaaacactaccagaacatttattatttgaaaaaattaatattagaatcgttttaatttaaaaagtaagacttatttaattaattcttcattcaaatttaatttaattttacattctcactcccaaacaccctatcaaggagatttaatgaggtggacttgacttttttttttttttcttttgtaacagtggtacgacccgtaggaagtggatcatctgcgaccaagggcaatatatttggtttaaaaaacaagtgaatattaaatttgttataaattttataattagagtccatatggataaaataaattttatatttatttaaaatttataataatataataaaaatattaaattttgattaaaggttataagaattatattaaatatataaataaaaatataagaaattaattatattaatgaatagtaaaaaaattaaataaaaacaataatatttattatagtataaaatttaatcattgttatatatattttgaacaaaatttgtcacaacttttaacatgtttcgaatctaaatcacattatatatcatgttaacactacaagaaatatcaaacactattaatacatcttaatatgggctctcacatatattaatttaataaataatataaaaaaaatcactaattaattataatattctacatcaatgtagtatttgacaccttaaattattaaatagcaatgctggtatagttataattaagacaaattttcaattaacttcacacaacaataagatcttttgcgttataattaagtgtttaattatttggttaagcaaaaaaaaatgtttaattatttaaaaaaatatatggagaccaactattcacaaaaaaaggagacatatttagtattatatattttaataagaattctaggtactaatgggtactccaccgttgaacggcctagctagcacttgttagtattgatttatatatttatactggtgttgagattgttttaagcacgtaactctcgtctagattaattatacattttactttcattaattacgtttaaataacactacaagaaaaatgagcattactgaggacaaatttcgttggtaaaaacccctgttttcgtcagtattgcgcattaatgaggacatttcgttggtaaa

SEQ ID NO: 389188 - DNA, 1550 bp, Cannabis indica
agttagaagaagatgacttggaagcggttccagtaggaaatgaaggagaggaagagggcattgatgatcgatggtgtctcgtaggaaggtttttatcaaaccgtatgattgattttgataagatgcagaacattttggcttcgttatggcaaccggggatgggaatgtttgttaaaaaacttgatgacaatcggttcttattccaattctatcatgaagttgatatattaagagtcattaatgggagtccttggacgtttgacagaatgaagttgatcatccaacgattgcctgtagggggggactcgaatttgatacaacttaatcatcttgagatgtggatccaaatccatgatgttaaatcgggttgtatgacagaagggacagtgagagggctggccaacacgctaggaaaattcatagaatcggatccaaagaattttataggtgtgtggagggattatctcagagtgcgggttactttggatattaggaaagctctacgaaggcgtataaagttaactcgggatgatggtagctggttttgggtacatttcaaatacgaaagagttcccactttttgtttcatttgcgggttaattgggcactcggatcgattttgaagtaggttgtttcagcagcctatagatcaaattgttaagccttatggagatttcatgaaagctttgccacaaaaaactcacaagaacatcggggcgagaaggttgcgtaacaatgggtggaagtcggaggtgcacaccagatttagaaagaaatcatacaactcactcagccgaaaatcatgcctatgcaaatctgttacatcaaggagaaaatcatggagttgatagtgccatgatggagaatgatcaagaggagagtaatgatggtattgaagaaggagaagtcaagggagcaaataaaggaaagaataaggaacaggagaatattaataagggaagtgctgagttggttgtttatgacagtaaaaaaaggaaagttggagaaggtctaattggtggccatctgggacaggcccaagaaagtattggactcccaaaaaatggttatggggcgggccttggtgttggggctcgcctaccattatgaaactactctgctggaactgtcgtgggctggggcccccacgtaatattcaactccttaaatccttggttgatcagagaaggctcaaagttttgtttttatgtgaaactttaagtaataaggaaaagatggttgcattgagcaggaagttagagtttgacgggtgttttgtagtcgactcacagggtaggagtggtggtttagcacttttatggaaaaatgaggaagaagtggttattgactctttttctttgaaccacattgattgttttgttcttattgaggggcaaagaaagtttcggttcactggtttttatggagaaccaaaccagagacttagggagaatacctgggagttgttacgagttcttcatgaacggtttcaagagccgtggtgcattatgttggaagttattttaccaggatcttagatttactcacaa

SEQ ID NO: 389189 - DNA, 853 bp, Cannabis indica
aacctttgaaacaccctcgaaggtcgaataagcttccaatagttcattatacactgctagagaaaagtgtcacattgaattttctagagatgttgatcgagcagtggccaaaggaaaataacatccttgaagttgacattggtgaggatgtgttcggagtagtgttaggatatttttagcctattatttatattatttttagagttaactttcttctttattgtcactttctagaatagaattatgcttgttttctttaattttaggttccaacacttgaatgtataaattggtcaaatttaaaaaaaaaatgatctataaaatagaaaaaattgtgtaaaaaaaataaagctaaatttcaagcatgaattcaactatgttctgttagatttttgaaaaactcaaaacacaaacgttttagatctctcttttatctttccggaacatcttgaattgtccaattacgagcaatatcgaaagagttatagctaatatactatgagtcgacatagcaaaaagttcactgcccaaataaaggggggctatgcctaggcataggatttccatgccgcagcccgcccctcataatccagaaagaaataggtttttcagcgtcttttatcttcttttatccttttttaactataaaagaagttgacttcaatagttttcatgatgcaattaaggatttcgaattttggagagcaaaattgatatcgaagactttctcgccagagtttttagcattctttccttctcgattttcttcttctattctaaattaatgtgtgtgaaatttctacgatgaacatgagtagctaaacagttcattagggtttagatggatattgtt

SEQ ID NO: 389190 - DNA, 1024 bp, Cannabis indica
aataccttggaaagtgtacaccaaattatttttcttcccaatccaatgaaacacaaagataaaatttattttagtgttattcatacaatttgtaatatatgattccaaactttaatcaatttacatcaaataaatttgatgtcaatgagttgattaattcgaactgcttataattttttagtgtgatcacaattaggggtattcatccaattcaattcaatccgcactattttactcatagtgcatccgattcgcactaagtggcaataattgttattctcatgcatttgcaggtcctttgaccacgtggcttcttattcataagccatgtattttggtaaaaaaatatgtataacatttactcttaagttccaggtcataatttttgagttgggacttgcatttattctcgactctttaagtctctctctgatggtttaagatatgacatcacaagcatgtgaaacaccactcgtacggacgcgccacatgttttattgcaaatagcctttgcattagaatgtctttcttctatcgattttgatgatgctagtttgcttccttgacattaatccctaagaaggtcatacttacagcgtgtccgtcggatactcaagtatccaaacatcccctcataaatgtgtttgtttaggcgtctcgccaaccgttggattggaacgtatttctttaaaggctaggatcgagacttttgggctataaataaccatcgcctcctcactcttcttactttacattctgcttcatttcttcagagctttcaaactagaagaattcttaaacaaaccaaattttcttatactctttctcagatgttgccaatcattatatacaaaattaatttaccaaggagtacatccaaagcctccactaatataccaacagatttacttaaaggtgctttgggaaattcatggtgtagttagagttaattacacaatttgagtttgtttagaacattgtattaggtcgtattgtatatattgaattggattatatatcatat

SEQ ID NO: 389191 - DNA, 858 bp, Cannabis indica
aaccttcaaaaatcagctaccaaataaggtagcacaacagttaggacattctccaaactgaacatacgatcaggtaacaaatggaagctctaacaagactatgagctaccatatttgctgaccgtgttacaaaacataacgagacatttttcaactccttacgcaaatctctacagccacgaattacaatactaaaacaagataacatatgtcatcatctctacagtatgtacaatttctatatctaaatcacatttgaaaatgcttttttcaaattttttataatgatattcgttatagttataatattatttttataaatttttttaaaaaaaatcaaaataatttacaatgttgaacacagagtttatgacattccagtttatcccgcatatttcaaaaaattcaaatttatttttagcactataaactattaaaaaattttaaaaatttacagagataatattgttactataacgaacacatccataaaaaaaaaatattccgacatatattttcagacacaataattaaccgaaaaattataatagaatgttagtaccgtataacattcatcgttgaaatttttttaataatatactaaaaatatattaaattaacaaaaattaccttaaataataaaatttattccaaataccatgacacgtagtcatcttctaccgcaaatgaaaaaacacataactgaaaaaaaaaataacagaatcaattttgaaatactaacacgccaaatcaacccccgagttacagagagagattacttaaaaaatgcatgaaacacagatgcatgtacgaaacttataaatttacgatttgttgagattgcaaatcaatttgaat

SEQ ID NO: 389192 - DNA, 572 bp, Cannabis indica
cacacacacacacacacactcctgcgattcaaagctcaatcctaaaaccctcccttcgaagcccaaactatgaagcttcaccatcgacgaaggccatccaccacctagaaacccccattcaaagctctctcactctctcattctctctcgatccaatagagctccaccactgacgacgatcttccttcctctcgatctcgccattcccaacatccaccatcttctcggctacactaccgccaccaccaccaccccacctcggccgccaaccactttgtggccaccattggcgaccaccgacattactttttttaggtatatatatttatttctttgttaatttatatatatattatagtatatgtagaaattttactgttttaacctacaccaacaaaatattagttatcagtatttaaggttaaaaaagacctttccttagtctaaatgaatttagacaaaacgacaaagctttaatcaacacgacaacagtcttagtgtcatttaatatcttcggctagaagacttttcaagaaaagtctagaaatcttagaaatcaaacacaacacaca

SEQ ID NO: 389193 - DNA, 969 bp, Cannabis indica
ttgttcttcaaatctctttgctggaaaatggttgatgtgactaagttagagaatctcaagttagagattgtggaagttttgtgttatttagaataatttttcccgccttccttttttgacatagtggttcacttaacagtgcatttggtgagggaggtgaatttttgtagacctgtgtactttagatggatgtacccatttgagcaatacatgaaaatcttgaagggttatgtcaaaaataaaagtaggcatgagggttgtattgttgaatcatacattgttgaagagacgattaaatttttctcagactacttgtcagaggttacaactgttggctcttgcccaactcgggtcgataaggtagagggagtaggggtgtttctctttgcagtgtaagccacgctgatcgtgaaaaagtgtaccgacttgtgttgtaaaatattgacaaggtccaactgtacattgagtgagtttaagttaaattttcatagttaaaataaaataataatattcaattgaaactaaaaaaaatccatcgaatacttgaagggaacattttaattggatcaagaccactaatccgactaaggcacgaaatcaaaaatatgtacaagatgaacattatcgaaattttagtacatgattaaaaaaagatactattaacattattgtttgttacacatcatatatttatttatctttgttcactaatctacttatatgttgataggtatatgtagaaatgtgtgaatcctcgagcaatgtatccaacacacttctttccatatcaaaaggccattcaggtgatgtacacaagtaccaatcatattatataaatagtactcaattttatacccaagccagtgataaatctagaaaaacacaaaatagtgatgttatgatagttgttaagactttctaaatatctagttcaaaagacaaaaatcctattgaatgtgacatgtcttt

SEQ ID NO: 389194 - DNA, 2287 bp, Cannabis indica
acagttgagaaagaagctaatgaaagaggcatttgggattaatttaatgagatggaaaatgaaagaaactaatgaaagaggcatttgggctgactcaatttttttttaaagaataaaggaaaagagtcatagccctatctacatttcattctttacaatattcacgaatcaaatgtttgtaagactcacatgaaagttcttctccggttctaggacgaagacagctgtgaggaagaaagaggagaaaagaacagctagtaggaagacgtgtctcttagttttaaaattaagataaataaaagtgtagaaaaagacaaaataaaaggactaaacaacaagacgtgtctcttagttttaaaattaagataaataaaagtgaaaagtgtagaaaaagataaaataaaaggaaaaagtgtagaaaaagataaaataaaaggactaaacaacacgacaaaatagatggacgaaaattgaaaatgcttcttcatctttatataaatggtatagatatattgtaaagatcattgctattaggcaccagtggtgcctaacaccttctcgacatgtcgcgttgcgattagttagcgatactccctaaaagttattatattgaattatatgggacccgatacttaattggaccaataacgatattgacacataggagagttctaggcaccactggcgccctttagaatttctctttttaaaatgtaactgactattgaccagccaaccatagtgaggtaataataagtgattgaataatataattaaaaaagaaacaaaagaacaataaagtaaaatgaacactagattttaaagaggttcgacctggtgggtgtggtaacagtctactctcattgaattttctattgacttaagagaaggaacaaagtgttctcccccttgaaagctcttataactgatctttgagtaattctcttatatcactattttctctttaggatttctctctttgaagaaattctttcgatctctttcatagtgaagttaagacactatgcatgaggggtggtttctcttttgcttacaatacataaaataggaaattacaatgattacataggaaactagaacaggttgccatatttctcttgactcaatcccatgattgtagggactctattcatgtctggacataataagattattctgacattgttatcccttgtaagtttctcggcataacaggcttctacctggtcagatgtcttctctacaactctgctcgggtaatcgacaattatagatacagacgaattatgtgcaggctgggatacttccctctgccaaggtattagagatatagcacatgtgtcactcagtcctatcaccatgtcaatgtgcaaaaaaattagatagcatttgcctcccaagtctacgcgggacgttcctgattgcacgtagacttcactcgatctggagtcttgtccggatgggtgacacatgtcttaggcatcgaatgacgaaccgacgtgaccctgaccaagggtctcttcaattttaggtcattaatgttgattgacagttttgcctcgaatcacaacttgatgtccgcgcgtgaagacggttactctgccagcaatgagtacataacgtacacttttgggggaattcgagaaatttaaattttgaaatgattacttcctttttcgaactgcttataaataggattgaaaaccctaaataatccatttagtcattttttattctcgaaaagccagagcaaagaaattttcaagcaatttctctctcaaattcttcaaagaactcccagtaaactcttgccaacacaatccaagtagaacaaaaagcttcaaaccagtgagtaagttctttatttctttcttttatacatttgcatgcttaattttttgggtttctatttgcgaatcttgactgttcttgaacttgttctaggataatcataaaaatcctaggtttaagatttagaaatttcgattatgcttaaccatgacatctaattctaactacgctttgattttaatcccacgacatccattttcacttatccattaggggtttggtgagaatcagactccaaatcaaagttttaaacttttgggttgaaaattccgtttctaagtgaaatttttgtttttgattcctcaatcggacctggtcggtacattcaacttatttttattcgttgcttcgaccaattctcatcttcttgtctcctacaaaataataatttttttttttataaactacaaaaataaattatattttaaaatttatt

SEQ ID NO: 389195 - DNA, 993 bp, Cannabis indica
taagcctaaaacgcgaaggaaccaccctagtgatttagtcaatcaggatggaaggacaatcgtggtgaattataaggacagctggtccactgcagacctctaatagcaattagacgccaagtacgaaaagtattaaggtgaaaaagcaaggtcgcatggggatgaccttagaaaccacttgagtgataagatgagggacgtgatatcctcgagagtgacacaaagagatttgaggagcagatagctgctctaaccaagttggtcaagaaacaaagtaaagcactatccaattccaaagatggaaatctagaaccttgttaaaggatgatcgcggaaactccacttctagaaaacttcaaaatgccccacattgagttgtacgtgggaagaactgattcgcaagcgcatttgaaaaagtacaacaagatgatgcaaattgctcgggtcagtgacgacgccaaatgcttatgtttttccttgacgttgactaactctgcacaggattagtggaaacgattagatctaggatcgattgatagtttgaaagatctacagtcagctttccacaaacagttcattgttacgcgtaataaggacatggaagttggttctcttaccaacattaaacaacaacatgaaagcttgaacgcttttattcaaaggatgaaggagctgtccgccaagaccaaggttagtgatcacatgaaattgatggccctccaatctggattagttgtttgctctcttcaatggggagaaatgtggaaaaagagagatgagacttggagtgagcttatggggaaggcccaaggcatcatcaacattgaggatgcctatataaaagctttttgagtccctctaactcctactccttttgtgattgctcctaacttcgcactccaagtttcggctccaaccttgactcttcccaaagcttagttctccccaaccttttatggacatattgttccaatttattttactaggatctta

SEQ ID NO: 389196 - DNA, 1277 bp, Cannabis indica
tatgacaaacattctaaaaagatgaattgtaagaagaagctttataagtaattaccatactatacgaagctccaacaaacgatggttgcattagaacaatgaaaaatgggtcatcagacttaaaacctttagctctcataagagcttcagcctttttttgtcctgtcaagtacatttgctttcttataatattttgaggttccatccgccttagtacagaagattctccacgtatttacaaattcaacaaattagtgaaaacatataaggaaaagagagttaataatcacatgaaaattatacaaggatgatcatgaataccttcagatttaccataaggataaggagtagttttccttttcttgtggggcacagagctaggtaatggagggttgtctctggttttagaaaaccatgacaagtctgaattttcattagaagaatcaatatcaacatacttgtcctcagaatggttaggaggagtaaaaggataatctttctccacagtactcttgtcaaacaccataacattgaactgagaattcccttcatatccaaacactaggagatctccacagcttaaagaacagtgttgtgcaaatttatcccaacccttttctatccataccttttcatcactacttattgtcaaccctacctcccatgttgatccacatggaagcttaagaaatacttgagttgatgaagacccacaatatttcacccaaaatgtctttggaatttgctgcatatggaagagaaaataaaaataaagctattataaaatcaaacaagtcaacacttactttaacatccaaaatcctattgtcaatatacaaaagtaaagccctaatatttgggtgtgcatgcataaatttacttactaacttgttgttcaaaagagtttgttgaagaataatgttgtaaaaatgagggtgaacagtaacacaagccattcttgaacaaaatcaactctggtaaaagcttgctttgctttaatttcataccttttcaactcaaactttgactaatctgatatatccaagccacgtgtcctcgttttgacaagtcacacgtggattctaaacagaaaacgttcttccttggaagtattccgaaaacaacattgaaactcaagtaacaagacacgttttttttatctattaaaaaaaaagaaaaacaagccacgttttttatgtccataaaaagtgtctcttattatttgccacgttcgttttttttttttttttttttttttttttcttatttaattataa

SEQ ID NO: 389197 - DNA, 1651 bp, Cannabis indica
gccaagtatttaaaagggaatgagctttttcattgcaagtataaagactcggactcttggttttggaagaatgttgtgaaagcgactaacatcctccggcaaggagcatgcaaagtggtatctgatggcaaggatacgagaatttgggaagatccttgggtgacgcatggaaaatctttcattccaaaatcaaatgggagttcttcagatgggttcaataaggtggcagacattttaactagtgatgggaaatgggacatccaaaagttgacaagcttgtttgatcaggatacaatagctgccattctgaaagggggccatccttctggtaatggttctgataagtggatttggaccaaagaccgtaatggaaggttctcgtgcaagtcggcctatcttattcaagctttacagagagctcctagttgtgatgttgccccttctctttggaatagactttggaacagtaaaatcctagagagacacaaagtcctttggtggtgtattttgtcaaataccctccctcttagagtcatcattaagaaaagattctatattgaggaagtgatctgccctttatgtggaagggaagaggaatctgctgagcatttgttcctttcttgtgactttgcgtttcacctttggagatcgtccccctgggggatttatcctgttactggttctggtattcgtgtttgggattgggtcaagttcctgggggctcggttccaaaggtttaaatgtggaggaagtctttatttatgcgtcagttgtggtggatactatatggcgtgccaggaatgacaagatccataataactgctctcctaacttggacaattgtattgactctaccctttatgttttcgcaaatctgaaaggtactttattacctgatgtggtcccaatccatagggaagactggcgccatcctccccaggattggctgaagctgaactgtgatgtaagagttggtctgggtagttctggtattgccgtggttcctagaaaccatttgggtgaggtggtctgggtgcattcagctagactggactatgcagatgctctttgtggagaagcggcagctgtttgcttagctctggaaaccgcaaagctcaacggtcacaaatttgtcatcgtagagagtgactctcgggtcgtgatcaactccctcaaccgcgcttcgtcttgttgggagattgagaattactctaattgttgcttagagctctctggatattttaatggttgcttgttttcgtgtattcccagaacttgtaattttgttgcccataatgtggcgaagtgggcattcacccacaatcgatttggtcgattacctatctctcaaataccgaaacatttattttgtaatgaccatgaggtctagtttcttttcttattaatagacgtccattcattcaaaaaatgacacacttaaattatacatatatatttatttggggaactcgggttccactgtcgaaattcattcccatataagttgacttgtccaatatatacaaagaaaacagttaagaccaaatcctaacaaatttaacatactcgtaaatcaagaccaacaaaacagtttgttaatttttttaactaactcacttcacaattatatatatagaagaggagaagagca

SEQ ID NO: 389198 - DNA, 1192 bp, Cannabis indica
ttgttgagatctggtttccacgtgaccgcaatcagacccccaacggttccacccaactcatgcaggtttgtgaaaatcgtagtatcttttctgatattaaaagctctgcatcttgtttcattgtttgcaatagtagtaagcagctcaaccgaaattacatagaagatggttgagttttatacttgtttatcgtttttgtttatatgcttaatttgataactattttgacaggcttagagtgactttgagtgcagctcacacaagaaatgatttggtgagcctcacagatgcactatcccgctgtatagatctcaaagaaataagtgttaatggctcatcatatgcatatgctaggatgtaatgtttcattattttgaaaaacaagaccccttttttatttactattaatattactaccgagttaaaatagacactcttttctagtcagaatgaagtgaaacactttgtttattattagattatggattgttttaattctgtttcgaaacatgcaaacacatgaaaaaatgtgttaaatttttattattcttgttatcttcaaaacaaataaaatgaattaataaaaaataaataatttctattttagttatctatatgtactagattattattatttattgctatattcttgatgaaaactgtaaccaggtagagcaaccagcttcctgctaaactttttgttttatacacataaataaatcatatttttatacaattttttagtttttaagtagtgcttaattagcagtttttcatattatttttttaatcaaaatatatgggacatgatagtgaattgtactaataacactatgttatttcttgtagtgcataagaccttaagtgtcccttctccatcttaaactatttgattcacaaaaaaaaaataataattaataataattgtgttaaggtgctcataacaccatgattatattttgagatgtgattaataaaaattcttgtactaaatcaaaaacaaaaattgtttctaatttaaaaaataataaaaaattaagtctaactcatagcactaagaaacatatccaatggagtattaaatttagctcacaataatttttattataggaaattatcccatatattctttttaacttttttttcgcttcggtaatttttatttaaattgttatgtggattttaattgtaa

SEQ ID NO: 389199 - DNA, 1120 bp, Cannabis indica
tataacatcatcaaatcaagccttattctattgaaacataaattatgcatacccatcaatgaaaaaggaaaaaagttatgatttattttcttgggaaatgggataaaaattaatgattctatataggcagtagccttaaggaccaattgtcagcctcaatttcaccataaagttcaataagtctcgtgcagattctaagcatcagttatcagatcactcaacacaaagcatcagtaatcagatcactcaacgcagagcatcagtgttatcagatcactcaacactaatgaatatacttcataaggtctcatgtttctaagttttctaggcacacgaacatgacaaaccattcaatctgcatttaaattccctaatattaaaacccacaaatattacaaccgaaagctaattaaaagtccaagcacaccccaccaacaagaaatattatatatttaataaagtaagagggaggtaaataaattacatacctccactcgccttcttcgtagggagagtaatcaatgtcttctttcctaacacaattgaacatcaaagcagccaaagatgcaaaaatgcctacaaaaaccacccatatcaataataatcacagacccaattaaaccctaagacctaacacgcgatacataaacatatatagcaaaaaggaaaaaaagaatagagggatggagaaaggaagcaatcgaaccaggaagatagtggaggaatgaaaccttgacggagctgcaaacaacggcgtcgatccaaaaccaccaaccggcgccgaagatggccccagacacacctggaccaaaaattgcccagagctctaccagatccatctatgggcacttggtttgggagaaaatcttcttcttaatttgagaataggtaaagtagtactgaattgatagatagagctggcgtgatttctcagacaaggttcttccttttcaaatattctaattacttgtggttgtggatcacttatatacgcaaataattcatgacaatttaatattaaataataataatatatcactcagttcattttgagggatgtggtaattgtgtaagtaaggtaattactaaggtagtaattacacagtttagtaattacact

SEQ ID NO: 389200 - DNA, 2721 bp, Cannabis indica
tacattacaatacaatacaatacagcgtaccaacgagaccgataaaaattatttataaaagattttagacttacacatttgaattcaaaaaattatcagtgtcataggaaagttccttgaaatagataaagtataatcactcaatgttgttttcataagattcgtacaaatgcaattaaaaaaaccaataaaaatcatactttgtgaaaaatatttaaaattctgtgtggtagtgaaaaagagtaacagaatatgctatttttggcagtttctataaaaaacatttataaagaaaaacgtgggtagttttgataaaaagcgggtatgttggtatttttcagttaacccaacatgttaagcccaagcccaagcccaagcccaagcccaaacccaagcccaatcataaatcaaagcgcacaaccttcttggccgtctctctctctctctatcggccattttggctttcttcggttctgtcactgaactcaatcagcgctaccctagaaattttatcaaacttagatcggagattggagaggacgaattccgtttcactcattcgccgctggataaaacaattgcttcgctcaaatcaggtactttacttagggttttgtctggttattttgagttttatcaagtgattctctctattttgtatagcgttctacattgacattctatagggatttgatttagctattatccgattctttaattacagttaggtttgtcgtaattagtttataatgtttagttccgagatttagaaattgcgtatattgttaccatttgaaacgttataatatgatatctgttagtattgaatcataccagattttgttggatggaaagatttgaaacgtaagaaactttcatgattctctgattttctgggtcaataaaaaaatttatgtttctttcatgtgaattaatcccatttgtatggtatttgttcctacatatatttttattttagtactgtgtttaagttttgagttttgagataattctgtatctttggtgttgatgaagtgtttggtgacattgagaaacttctcttcaaataaaatctaatttatggtgtttctaggcaatttgaattgtaattgttttaagtttttaactactcatagtgacaaataagttacctgggataatgttgtgttgttgattgtagacacaattttaataggagagcaaaataggcaatacttcattgaatagttaccaatgaataacctctttatgaataagtatcgtttattcatttgcatagtaattgacatgtttgttaaaactaacagaatttttgaaatattctgtttagtgacaagagattctgttagatagagaaatctaaaaggcaaacacactcccaaaacaacgacgctttgagccttcgtcttcgtcatcttcttcttctctcttctcaatcgatgcccttctctctcattccctctccttgatccgtacaacttcggtttccctcatcccttttcctattcatcggccatctctgtcattggtgggttctcttcttcgtctatggtaagttgttatatgttacttcattaatttcttttaatcattgatagtttatggatgattgctaatatggagaggaagtttgtaggtggttgatagtttatgggtcttgatttgaatgttgaaatctcttaattgtttattcccagatttggggtttcttattttttaatttattttgtgattttttttttggaaattcaaaccattttatgttgttctttaactgagtaatttcattttataagtttggtgattgatagtttaatcattgtttactttttcagtccatttgaaactctcacactgtttactagagtagagtgaggaattaagagaagccttcctctcacaaataagtttaagggtcttcttaattcctcacactactctagtaaacaaatgagtaatcattgtttattttatttagagtgtcatcggctcaagtcctttcgtaggccaactttaatgatgaaacttaaatttggtattaagcttacaccaaaagggtataattttagcactaaatttattttctattccaaccataacactaaaaattacactaaaaatacattctttattattatatacatgtataaatacaaataatacatatagatccaagaaacttaattattcaaccatttcttagtctaaaaactaaagaaaatggtgaaaaagatcttcatatattcaagtgaggaagtgaagaagataaataactttaagttgcgtgcatcgtcaatcgagtgcgaagggaaaactataagctcggatttggagcatagagctgaggcctaatgatagaagttagtttggtttttatagtcctttagttttgccttcttggagccttgacaaggcagaagaatgaagatgattgttgaaggtggggttctagtgtgaaggttagcttagctgtttaagtccttccgttgaaaagtagagcaacttcttgaaatccggggttctgtgaatactcttttgtgaagtgtgttttgcttacataattaagtttacatttttatattaatagacatcatatttgcatataaaactaaagaaaatagttttacctttataggtttaggtatgcagtccggttggattatatatagtgtgaaaccaaactatttgatggtgggttagcttgcctaactcagatttgtt

SEQ ID NO: 389201 - DNA, 925 bp, Cannabis indica
gtcaactaggtagaatttgacaccttggaagatttaataaaaggggtcacgattcttaaattgtttgaatttgaactcgacagagaacgatgctcactgctctctaaacaaaacaaagctcttcccattccgctaaagttcaagaactctttttggcatcaatataccaggaagaaagatccattatctcacatccactgcttcgaagtgcaaatcgatgtacaaggtgtgagagacgacatcaggtgcaaaatcttccctaccacattgataggcctggctcaacggtggtaccttaagatttcccatggattaattaactcatggaaatatctagtggatgatttttgtaaccaattttctccttcctaacaacgcaaatcgaacacaatgatttggtggacgtcaagtaacaggaagacaagctcctcaaggacatccaatagttcttagaggcagtcggtaagaccaaaagtcttagagaggatgaaagggtaagggcacttgcagctaaactaaaggagatgattcctctgtggttcaaccttcgtctcaaggaagtatatgttgggttttgtgccctaaatataacccttttcaatataatcagatttactaattaattaaagattagaaatcgcttttatgttgcatggttcacatgatttatttcatgattatatttaatgtataagttctattaagtctagaacatatataaatatgaatatatttgttcatgattatagtgtcgccagttcagtggaatagaatcatgattatatgttcaaaagtttaattcccatgatttgtcagttcattggatttagactggcatgataatcagcgataatgtatacttacaccttggataagtgttatgtctttccaggcattgccaaaagttaccagtatcggatgtatg

SEQ ID NO: 389202 - DNA, 1226 bp, Cannabis indica
gtatactcttcaaaattaactggggtgtactctgatccaactgatccattgctaaccctctcagccataccctgaataacagcaataagaccatccaaagccagaatgtgcattgatgacaagggacagttaacagggaaagcactttttgacaagagattagcaagatcttcaaagatattactgcaggttatatcacaatccaagttagcatacatttccaccataaatgttttctgtcgacagaagtcgacaagagcctccatcgcaacctcttgctgctggtaagatgctccatatctgctttgtgcaagcctcaaaataacacaagaaaaaaaggcctccagctgtaatttgaggtcagtacgcagatgatgatacagattaagaacaatgctgcataccatagaaagaataagtgggcttgttgacaggccaaactgcattagattacgaaacaattcatcctgaatcaaacccaacaatctagggtggtgacgaatagaggggccacccaactctatagcagaattaatcaaacctaaggcaaatagaggcacatcttcatcaaacgctaaagtatttgatcttggacccattccaacattctcaacaacattcagcaacgaacataagaaaatgaatatttctaccatgcagggtactccatatgtcggacttaagtcatagggtaaagagtcttttccattgccagccccaagtgtatcatcaatcattccaactgctgctgcaccaacagaagtattggaagcaagattcatagataatgcttgaccatcgtattcagatgccatgtttccattctccaattgtctgcttccaaaagcatattcattgttcagcccagagctctgcagataaaacaataacttcatgtgtttattattaacgtgtacaaaataaacaatcaactattactaaaacctggctactctaaatactgaagagatttatacttcttttcatattctttgtgttttttgctttactttttccaataaattgacaaacaaaagaaatattcaaaagaccccaccccaccccacccaaataaataaaacaaatcaccaaacatctgtacctcattcatattactgattccatttaccaaagcactttctgagttgccaacatcaggcaggtgagagaagatacacctaacaagttcatgcatggtgtgccgagctatacgttgtaataactca

SEQ ID NO: 389203 - DNA, 901 bp, Cannabis indica
actatttcaatagccttataagtcttagtccttggatgaaatccaaatcccaaaactacccttaaaacaaccaaatttggaagatataccaaatggggcaattctctatattctttggtaaaagggttgtatatgaaaagtggattattgttatttaaacggttgtataaacaaacaagtccattacaagaacccacaacatcaaaatcaaaatgagtggactcaaatggaagtatgggcttactagtaatagtcaataacatgttattgtcgttttcatggctagggtttaagtaaacaacatcaagtgatttgggatagtcacaaaagcataagaggtgattatttttgggttgagaaagatgcattgaaattgctaaaggatgttttattgaagtgtagtaatgtttagagactaacttacattgcataagagattgtaagggtaatcttgatagtatgttgaagaagatttcatgaggaagctcttctatatattttttgtcgtttgattccatgaattgagtgaagaaatagataaaaagtttgtgaaaagattttggttaaactcaacttaagcatgtaatgagttatgtaagaaggtaggtaatgtggtgatcaatacaagtcaatactccttttatatataaaattacatatggaaatgtcattttcgtccctactatgctaaaaagcacctatggtatttaatactctcgctattgctacaacttaatagtggatcctatttattttattttcataaattaaatattatagaaaattgttgaccgattataaagaaatattttatcgtggtgttagacattatatgtgccttatagcaatgttcttatttttatgtacgagctcagggtcggcccaagcattgggcagcttg

SEQ ID NO: 389204 - DNA, 592 bp, Cannabis indica
cggctaagcaaagaattaggggttttatagtatacgccaagcctgtttagcgagcatagcttggttgaaatgcacaagagacctaaatcctaaaccacccttaaatttagactgacaaagaaacttccaagatttccaatgaactttcctagcctccccagtagaaccccaccagaatctagccatcacagcctcaattcctttacaaattttaacaggaagcctaaaacaagccatagcataagcagagatggcttatgcacaccagcgaaatcaataatatatgtcacttgattttcaattggaaatcatttagatatatataataatatacattgaaagccacaaattgaagaagacaaaacgcatcccaacaaaaaaaggagaacaattgctcttatacatataattgggtatatatatatcaataacattaacccatatatctatatactagcaataagttacgtgcgagccacatatactaaattttatgctagtttttctctacgttattaaaaagtgatacaattaaaaattaaaaattaaaaaaatattattagttatttagttcaacatcattaccctgtgt

SEQ ID NO: 389205 - DNA, 950 bp, Cannabis indica
tctctctctctctctctctctctctctctctcaacaataattcatatacttgaatatattgaacatttttgagtgaaagggaggtccactccatatgcttctcttctttcataattgttctaaagaaataagaacaaaaaattttgaagaggagttctatcgttaatttcttgttacgatctcttagttaatctccacgtctgaaaatatatgttaaaataattttttttaaaatttttttacggcggtgttcgttatacttacaacatgatcatctctataaatttttgaaaaatttcgaatagtttataatactgaaaatacgtttgaagttttttgaacacgcgtagtaaattgaaatatcagaaactctgttttcagtactgtaaattattcggaattttttaaaaatttacaggcatgatactataactataacgaatatccgctatgaaaaaaaaattaaaaaaaatatttcgacatgtgatttcggacttggaagttgattaagaagttgtaatagacggttgtaattaacccttctcaaataagtataattaaaaataaaataaaataattatttatactaatataaaataatatgaaaacgaaaaaatttaatcaatttttttttgaattaatttggtttttataatattgacacgtgtttataattttataggatatataaataatattttctaaaaaaacttgaaaaaaaacaatataatttagttttttttttaactcattgaaataaatcactaaaaattataacataagtttcatttaaataatacaaagtggatagtataataattatatatatatagatatataatattacaagggatatttagcaaacttttgagatttattataagtttttaaaattaatatttaaataatttttttttttgcttgtataagaattttttttaaatatacat

SEQ ID NO: 389206 - DNA, 985 bp, Cannabis indica
gtgttagcaccatggggcgaccactggaagaagatgaggagggtacttgtgtctaatgtactcaaccactctacacttacttggcttctccccaagagaactgaagaagctgataatctggttcgctttgtttataaccactcgtccgctaaaggagaaggagaagtagtaaatgtgacaattgtcgcgcaacaatacttaggaggcgtaatgagaaaaataatgtttggtaaaagatattttggtgaaggaagggaggatggagggccaggtagagaagaagaagagcatgttgaggctgtgtttgttatgctttcacacatttatgccttttctgtgtcggactatcttccgttgttgcgatggttggacttagatggccatcaaaggattgttcgtaaagccataaaagtggtgaacaagctccatgacccaataatcaaggacagaatccgagaatggagaaagggcgagcctagtattagtaggaaaacctccaatgatttgcttgatgttctcatatcgcttaaagattctgatggaaccccacttttgtccgaggacgaaattcgagcacaaatcatggtaaattaagtcaatacgatatattaatatatatggctatcgagcaccacgagtgtactggtgagccaagtgtgttctcacccattggcacgggacgtccctttagaccctatatatcccaagtgccataacatactctcttatttatcaaaaattcattcactttgtgatgcttataacaagttgttctatatatatatatcgaatagtacataggaaatatttatatatatacatatatctataaaataatatttttatatatgacataataacatagtatattaataattattgctcctgtaattcagtatatataggtgccgtttggtaacacttttgttttctaattttttaatcacaaaatgaaagcttttgaaaaacaaaaatagcgttctgt

SEQ ID NO: 389207 - DNA, 1005 bp, Cannabis indica
ttcattaaaaaaattgaatgaaactaattattttttgttttttttggagaggattgaataatcaattgaaagagagttgcatcagcgaaaaagaaagaaaaaaagaccaaagaatggcatcctccaattgattggtaacttgcgaaatttttcaagcaattaattttggtgattccaatatgaacacctcaaaaagagtaatttgttagaaaaaaaatatataattaaaccatattatttgttgatatatgactgattttttttttttaacttatgacgaattcttaatattagtattcgtgtttctagataagtgacacgtgtactttcaagatctaagattaaccaagacgagcctattatcagtcccaattaagttagtgaatcaactcaccacgaagtcagatcacagctccagattcggagatgaatccaacctacagacatgataaaattagactttcagagtttcagaagagctatctactcaagaaggcgaagggcctagtagagcacattcagataccctcatggggtaatccagaattggcaactcaaatgacatctggaggcctctagaaatcatcctacgtggcatcctctaaacacagggtctcaccaagtcagaggtttatcccctacgtcatacctggggggtgcgtgcaccaccaaaaggagcatatctttttgtccaatgccatattctccgacagttattgtacataattggttgcacacgacaactgtcactatcaaatggtctccacgagtacagacgattgttatcctttaaacgggacctcacctaattggcccaaagtcaatataaattgtattttaccccatcaatgaatagaagcacatgttcttgtctctaaaacagacaaggactatccattaacttacgaagaagcaatggaagaccctgactcagacaagtagaataattccatggattaagatatgaatataagaatatttttatttaaggaaatatatttctat

SEQ ID NO: 389208 - DNA, 1100 bp, Cannabis indica
tatatgtttatatatatatattcttcaagctccttataaattgtaaatcgcgatcaatagagagtttctatcatcacataaataatggtaattaattaagagtgagagatctgtatgtagctagatttaaatggcatcatcattctcacgtatggcttttcaagtaagttgttcatcaatggacggtaggccctcaactccaaaaagctacgaccagattatcaagaacgcattctcttcagccctcaaggttttcttaatttagatcattaaatcaaagtgtgtaatacataatattttatatcaattaatggaaaataaatcagtacatcataaataacaatttatatattattatgagcagccatggttgagattgcaacaagtccttgatatgcgaagtgatgtcccaaaaaacacaataaagaatagcatttgtaccaacttgttggatgcttttgttgatttggcatttgagtttgttgatcaaccattgctcccttctcaggtacatactagtactacttatattatacaatcaaattgaagtatatatgaattagtaatatatatattaaatatttaaatgtatacatactataaatattgtaggagaactttgcacctgttaaggagttaggagaacctgttgtaatcactcacatcgaggggaaaattcccgaaagttttcatggtggtgtctacataagaaatggtcagtaagcctgccaccctttaaatttaatatatttatcaccaaaatttaattaaatatagtaactttgtcttcatctactggtgtagtctgtagagatatcttaaatatgctaattcttctttgacaagtagttttgttgcactgtcgtaagactctaatagagtagctcaaggtcaattagctcttaattaatatgaatcacaataatggttaataaaaaaaaatatatgaatcacaataatatgatgtatggtggcgttgtttttgagtaaatgttaaagggcaccaatagtgcctagtaccctcctatgtgtcatatcgatataatttaatataatagttttaaggtagtatcactaggcaccactagtgtctaatagca

SEQ ID NO: 389209 - DNA, 528 bp, Cannabis indica
aattccaaaaaatacattaaatgcaattataaggtgtatttttttactctagtgtatagcattttacgattaattaataatttaaaggttttgagttcgaatcgatgacctgttcatttttctattcactctctcactactaagctaactttagtgcctttataaggtgaattattggtttaacaattttttattttgttttagaatagcagcaaagaaatgaaaatgctccaaaataacaccaaaacaaattaatgaattttctaccgaaatatattattttctacttataagaagagatttccaattatttacattgataaatttgtccttggtattcgttagtgttactttttgatatttaacaccaattctaagtttagagaactccatatttttttcttaaaaatattttaatgatgtcaatatagactaaaaaattatcaaaataataaatgataattacaatttttgccccctaaattttaaaatccgtctaaaattctccataaattattaagattgttg

SEQ ID NO: 389210 - DNA, 1885 bp, Cannabis indica
ttttagttttgtgaccaaacaacaactattttagtcaacaaattttgttactgcattgtatgtgtaattatatttactttttttttttgcctataattattttgctggtttgctgtcttgagaaaaaaaaagacattttgagtattgtgtttatttttaagtcattttgatttattattagtatatattttgattgtttttgttgttgtattatttgttatattttgttcattgtcttaacttgattgaatatacaaaaccttttcaatttactccaaagactaaactgtatatgattattgactttgttaatctgattagctactttgcttatgtttacatcttcatatatataactatatgtttcatgcttgaattagattattaagaaaattgaataataatcagataatgatgatatgatcccattattaatctagattgaatttcagatacaagtaaagttaccaagtaaatattatattatcgaaagttgtttggaacagaacatgtaatctattattcattaactaatctaattctaagctactttggttatgccaattaaggaaattgaataatcatcaacaatgtaattttggaacagaaatctttctattattaattaagaaacattaataattacacaaattcaacacatgaaactactctgttttcttactaaagagacactaaatttactaaacaccatgaactcttgtcatgttcagtgaaaatttcataagcaccagcttccaaaacttgccttaaaaacttcatctctgaacaaaaataatcttcatgaatacatttttggacaaattcaatatcaaacatccactcatttatcttttcttcaactctttccaatttctcctcaaaaacattacttttaagatgaaccgacattgagaaaagcacatcattatcgaacatcataggtacgaattcaggactacaaaagctcacctctaaacgaagaatttcagcgacgatacaatgaactacatcgtcttccatttcctcatcaaaatgcgcggttttcttaacaaggctaatcttgttctcgtcgtcccaaaatggtccagccaactccattgcatcaataaagaaacgaattatctcaacaaacatgtttttaacaacagagtaatcagattcttctagagataagcattcgattatggtaagaagttcatcaagattacgcgatacaatttcattacttgcattggaagctaacataagtgagaacaagtattgaatgagaaggttagagatttgagtggcgatttcttcaagagaaaaccgaagagaattgaaagcaattaggccatcgccattgcttttcgtgacatgtatttctcccatcaattcttgcaatgtcaaataccctttttctctcttgttcttggtttcttttctccatgttatctccatgaactcttgtaatctctgtatgtaatccttcaaaggttgtttgtgaccgttttgatacctttttggtatgttgtactttcgaaacctctcttcacacttgtccaaattcttatttagtgtctttataacaatctttaaagattcgatcttttcggattcatttacactccttttcttcttcttcttcttcgaatcttgttctaatgtttttatgaatttttgaaaattttcaatctcatctttttgtactgaaccgctgtgtttgaactgatcaagctctttcaatcttcttatgagattcttccttgaagtgtcaagctccatagccattactattattaattatttccaatgaaatcgaacaagtaatttcttgaaaagaaaggttggttttttgtaaattaataatatgtactattatatatagttttttttttttgaataa

SEQ ID NO: 389211 - DNA, 592 bp, Cannabis indica
tttaaaatgatttttttttttacagtaaagtgatagatatagatagtactaaaaaggacaacaaaaaagtcatcaactttgttgattgataaatatagatttaaaatgtttttttaaaaaaatccttcaacaacctccatttgcacgggtacccatagtgaaaaacaaaaaattcaaattcaaaacgcgatagagagagaaagtgggggagaaagtttcttagagataacaagtgggaaagaagggttcttctccatcattttcctcttcttcgcattattacaaaacctttcttctctttttaaatctctctcaaaccttgatactcacacaaatttcattcatttccccacaaatttctagggttcgatcctatccatatttctaccaacccgattctatttctctttttagaactttgatctcgaattttttcaccatccatggaggcgatcgaggaatcgacgcagctctctgattcgatgcgccaagctgtggctctgctcgccgacgaagacgtggatgagaattccacctccagcagttccccgcgaagagattccactttcctcaatgttgtcgctcttggcaa

SEQ ID NO: 389212 - DNA, 665 bp, Cannabis indica
gctaatgttatataagatatatatatacatacaaattttttagtattacataatttttcatattattcaataaaaattaaaaatatagacttaaaatgttattcataattacaaaacttattattagaaaacattaatatatagtttaaaaatcttttgaaactaccgcggacgcattccttaatatagaataaaatgatttttgtcctttgaattatgacatttgtaaagttttacttcctaaacacttctgttgtaaaaattctccttaaattatgcaaatcgttgcaaatatctccctctagttacattctgctcattttctataacaattttcttatagcaataagttacaggtataattgtagtacaagaatttaattaataactttaagctactcaaaattcaatttattgacattaggcacacaaacagtaattctaagaatgcacatacatattctcatatttatcactagaccgctagttatatatttattttttgtctgaactcttgaattagactatgaaaaaatcgagtttttgcaaatgtcaataacatatacgaaaatataaaactgtatacgtctgcagaagcagaatgtaattctgttactgcagaaaccagttttgcaacgacaaaacagaacaggcagaatataaaa

SEQ ID NO: 389213 - DNA, 709 bp, Cannabis indica
tttttttgataaatcagcaagatattattactccacaaaaacttttacaatcaaagaccatctttttataaaagacctcaagtatattttctaagtattacaatgtttggtaccattctgtatcatgtagactcactttttttggccaaaatgaatctactctatgtttaatattgttttgaattctctgtacaattgtatcagtattttctacattgttgtttcatatcttgtcatttctcgaatgccaaatgaagtaaactagacttgcaatgactgcagccaagagtttctttttgaacctgcttattttggctctatttatccatcgaagtaacttttccatttctggcgactgtgcaccccatgtcagccaccttttaacctgtattagacattcctgtgaaagaaaaaaaacataattaaaaacaataatattctcatcggacctaccatcgtccccatcatcctccaagaaaaaacatatacgttatactatcggacatacctatcgtcccatatcggacatctattgtcctataataagaaagaacatgataagggacatcgaaccgaccatcgtcccactatcgtctttatatcgggccattatcgtcaacctcaaacttcatatattatagttgaactattgggcctatatcgtcctaccatcatactgttgggttttatgccctaaataaaactcttt

SEQ ID NO: 389214 - DNA, 1111 bp, Cannabis indica
atatacatgaaaataaatacaaaaaataatcaagtgttacacattcaacatacaaaaaaatctaataaatatatattatatttttcaattatttttattatataaataattttttaatatatatgaatgtaattggattgaaacggtttttaattagattttgagattgacattcaataactgatccaatctaattagaatccaacttttagcatccaatccgatctaattgtaattggatatccaattttttgtaattggattggattaaatcagttcggtttaattgaattagattggatgatgcccaccctagtcacatgtatccattttgtttgagcaatctttttaatgtaaatttatggggaatgagaatgtggtgatgtgatcaacatcatggtgaatggtgagagaggtcattatttagttattttttaattttttaattatttaagaattattttttattgaaaatatgagtaaacaactaatatattgacacgtgtcatcttagtatattttaataagattttagtgataaaggtaacataaatgtaactttagatatttaatttgtcaaaagaaaaaacatgggatatataagtgcatgaaatctaaaacatcagttatttatgccgaaaatatcctatgtttgatatgatttaacagaaaagtaatgacggaagtaacagaaatgtaacttatggtatttaagtgtataaaactgaaaacttatagtatttatgtcgtaaatattcctacatattatcctattgatcgcttatttttcgctcaattttaaaaagaaatactaaaaggcactcctggtgcttagcacctttttcggtgtcgtactactattggtttaattaagtattgagtcctatataacttaagtaaataacttttaggaattatcgctaactaatagtaaaatacctcctataaaaagtgttaggcgccgttagcacccaatagcaatgctcattataaaatgggctatttacaaaaatatgggaaaagaaattaaagttttgataaatatggcatgcaaacttaattgcattaaatatggcattttttaaaaaaaaaactttaaaatatgggaaaa

SEQ ID NO: 389215 - DNA, 937 bp, Cannabis indica
gaattgataatatatgtattaaaataagagttacatgatatatgtataacaatcaatatataaactgtacaattatatattttttaaacttctaaaaataatgtgtaattatatttgttaaatattctacctcttaatcatttttaaaactgaaatatttatacagattactgtttcattagtaataaatgaatgagaataacagttacatgatttatctatactatataacaattacttaattattatttttttttgagataacaatcacttaattattaattgcagataataattaaaaaagatatatatctatatatatttaacaaaaaaaaaaagttaggaaaatttagaaaaaaccacaataattactcacttgttaaaatatcacatcatcactctaaatacaccataaacattaaaattagatagatagatagatatttttggataataataataataataataataataataataataataataatcaatatatataaaggaatgtttaaaacatttcatgtggcaacttatatgaagttaatctccttatcttaattttcttaaatttttagatttgttagctttttattctattttttaaaatttactttagttttttaacttacataattaatgttatttagaagagaatgagacactcaaaattttttactatctctatttaacatattgtaaccattaataattgtaacagttttttaataaggattaatagttgtaactgtccccattttattacaatattacttcttattatctactcaaatattgtaatgtcctgactctcaagaacgccacgtgtgtgttttacaatcttattatcactaatctattaatttaggaaaaagtgtgtgtaaagtccttttttggcaagttagttaacaaaatattttttcttttatggtaa

SEQ ID NO: 389216 - DNA, 1459 bp, Cannabis indica
cacaaattaaccattattatatacattatggtttaccaaccaataaaaatacttttgaagtttaagaaattcaaaagtagtttttagaagccggaccaaccaggaccattaatatcttctaacaaaattattacataatgaaaaaatattaaagtaatatacataccataatggttccatcaagtgaggcagaggtgaaaatattagagtcatttggattgaaaaccacttgcatcacataatgagaatgtccctcaaagatttgagtgcatatccaacccttttcccaatcccaaagctttatagatttgtcatcagatgatgataccaagtatgggagatttggatggacaacaacacatctaatgaagtctttgtgtgcttcaacttctatgactttctccattgtttcataattgtaaacacgaataaatccgtcgtcagagccagtcacaatccaatttttgctagctatgaactttgctgatctcactaaagaaaaaagaaaagttttattaaaactcatcacttggtttggaatgtgtattaatgagtgttatgtacctggtgagtttgtgactttgaaagatttttctaatttctgaaacaatgtgagcaaaaaatgttattaattagaagaatgtttcaaatgaaggaaattattacataagtttgaaaattagagtagtgtccatttttgggttcttacttgggattggtggttccatatagtaacagttccactatataaacttgtgagaatcctagatgaattgaaaagcaatataattaattacccaataattagtacatatcatttagttttaatttcaaagataagtaaatttagatgattcaattgtagttaccatggatgagttggatgcacatctactgatttgactctctcagagttttgattaaattccatctaattaaaagtataagaagaatcaataaataaattttaaaaaatatttagtttatagaatgaaaatataaaacaactgtggcaccacctcaattttcaatgcttgttgattttcctgaaaaccaaatatgacaatcacaatttgttagttccaattaaacataattaaattctaattgtcattaaaatttgaataattagcttttttagtccctgtacttatgacactatactatgatgccccttaatttataagtgtagttaaaaataccccctaaaatatatcagttggaatagtataatccttctatctaattctgttaaaattgactaaaattgactgttaaattaataatgtgacattatacatagatagtagttgaaaaattatataccattaggaaaataaattacaagtcataaaaattacaatcacaggaaaaaaaaatgaaaaataacatcccaaaaaatagaatatcattaccttaattttccaaaaatcccatgttctttctagtgatatccatc

SEQ ID NO: 389217 - DNA, 4017 bp, Cannabis indica
agagagagagagagattaccatgactaagggggtggctgtgcggtggctcttgtctaggtggccggggatgggcatctcgacgaactccgatggggactttagttggggaagtatggtggtttcccttagcttagagagagagagaaaaagagagatagagaaaagagatgaagggggagactgctcttgttagggtttattaatgtaggatttatagtgttttttaattgggccgaagcccatacataataatatttttttaaaaaaaaattggaatgttttgcgtcgattgtgcactgacgctaaatttgataattttgtgtcgatgctcaaccgacgcaatttctttgaaaactgatgctaaaactgcgtctccacataactgacgttaaaattgaccagtaattatttgcattagtggtttaatatttttgttgccagaaccgacgcaaaatgcaatatttgtagtatagtgattgcacccatagggtgtaagtagattttcaagaagaatagaaatgttgaagggaaggtagagactattaaagctaggcttgtagcctaaggctacacacagcgagaaggtgtcgactatgatgaaacattctctcctatggtaatgattaaatctatttgcattcttctttccatagttgccacttatgactatgagatatgtcaaatggatgtaaagactgcttttctaaatggtgatcttgatgaagtcattaatatagaacaaccagaaggttatgtgctaccagaagaagatcgaaaggtgtgcaagttgcttaaatacatttatagattaaagaaagcctctagatctttgaatattacctttaataagactatcaaagtgtataaattcgaacaaaatgaagacaaagcatgtgtatacaaatacattaaaggtaatgtagtagtattcctagttttgttgatgacattctacttattgaaattaatgtagaaaggttatgacgtaaaaaagtggttagccaataaatttcaaatgaaggattttggagaagaagcaagctatgttcacagaacaaaaaatctataaagatagaaagtggagaacattaacactttctcaagcgacttatattaataaggtgctcaaaatattctcaatggagaattccaagaaaggaaagttacagtccagacatggaatcactctatgtaaagatcaatgtccaaagactcctcagaaatagaggacatgagaaagtacccttagttgggagcttgatgtatgaaatgttgtgtataaggcctgacatatgctacgctttagggattgttagtcttaccaatctaatctaggtttggaacactaggtagttgtaaagcacattctcaagtatcttcagagaacaagagatctcatgcttttatattctggtggagggttaaattctattagacatactaattctgattttcaatcaaataaagatattcaaaagtttcatttgggttagtattcactcttggtggaggagatgtagtctggaggagcattaagcaaaccagtattgtaaatacaaaaatggatgctgaatatatagcaatttttaaacagctaaggaagcggtttagttgaaaaaattctacaccgatttggaagtggttccaaaagtagaaaagccactggtgctctactgtgacaatagtggggcagtgtgcaactccaaggaaccaagaagccacaagagaggcaagcatattgagaggaagtaccatctactaagaaatataatagagagaggtgatgtgatggtcttgaagattgcatcagaacataacctggcagatcatccattcccaaagactctaccggtaaaatcttttatgggtcatataactaatattggactaagggagatacccaatttgctttgggagatttttagggtttatgccttaaaattcgtgtaaagacatttatgattattaataagagttgaacattttaatatatatacatgaatgttaaattattaatatttaatattgaataatctatataccaatatcaaaaatttctgattcatacatgaggttgtgacttgtagttgtacagagaattaagatcacttagccatgaataaaatagctagcaatgtattaatatttgtgaatctttgatcaatagtttctagtacagttcactgatgcccgttcttcggtgaaagaaatcttgattcggatagccaatatagctagtgagacatctaagtgaaggtgttgtatataatagagattatatatgacaaggagcgatatgaataaagctatctttatcaaactgacagtttactattaagacttaatttatatcataatgatgatcaatagtagatcaacctaaatcttgagtaatcatgaatctatattcatgttatttgtttttttgttcactcattaaagtttctcgacaaatcggatctgtataagctagaatgcccaattacaatccgtggttgctctcttcaccacggaagcagaatttatggtaactacggaagcattcaatgaagcattatggctttagcgaattctttgtgaattaaaacaaatcaaagggggagtgactgtgcattcagatagccagtcatgcatccatctctgtaagaacctaatttatcataaaaagagaaaatacatagatataaggctctactggataagagagaagatagaacaagggctggttgatttagagaaggttagaacaaaagataatcttagtgatgttgggacgaaggtcctgacggtaaactagttcaagcattgcttgaacttgatcaatctcagaagtttgtatactgagattcctggaacaccaactatgatggctacattctttcttcaccatcgtcacacttttaatttgaagtaacaaggtggaatttgtggtatagttcctccaaataaaaaggtctccagaagttattatcattcctgaaaaattgttgactcacaaatgcaggtcctggaaggctttcttgtccttccgaagaagggttttcaggaaagctagtcatcctctggaaaggaattctggatggctagatgttcctcctggaaggtagtccaagatagtcgactccaggtgactctttcctatcccggaagctccttcaacaaatgccttggaccgtgactctagaaaccttctttctctattccttatgcactcttacttagcctgatgtggagaccccgctcaaagaagagttagttaagttagttattgcctaactaacttaacaacctatctttttgtagccaccgactctaggatcttgatccaaagcctataaataccaccaacacttatctttgtaagtacatcgattagactgagattgaaagatagagagagaggtacagagaaaagagagagagagattgagtttgaattttgtaaggaaaatcttttgtggatgaagaagattcttgggtaagagtgtgagagacgttgaaatactttgagagaactcatcaaagaaccgacatcgactgtatcgtacatgttcttgctcaatcaataaagatgatttagtggtgttccaaaactagagtaaagacatacatcacatcgatcaatcggacgtgaaccaatatttatcttagtgttgtttttctattaatttactgttttaattagtttctagttattcgttcatccctattttttctctaattattattcgtgaattttgtcatcactaattttttgcttatttaaaatttagttgattttattttgcaccttgtaattttaccacataaattaaattgtaccggaacttcaattaaacaataggcatgcaatttttttcttcccattctcacagatgtgatcagtcaattaatttccagtgctgaaaaattacactcatctcctttttcatattttcctaattatttcagccagtggcggaaccagacaaaaatctgaggaggggccaaataggaaggtcaagcgaattgtattt

SEQ ID NO: 389218 - DNA, 554 bp, Cannabis indica
ataaatatatataatctttattgtgtaatatatatgggaaattataggaaatggggggtgttgaaaaagtcataattgtgattattgaaggagtatagaaagtaatgatgaatgaacatagtccatatttggactattttggctttgcttaattgtttggaattgtgtacacatatgtcaatcattgttggctttatatataataaacaaaaagaatttacccaacacaacacaaacatccattggttattcattgttatatatgactgaaaaatttaagcaaaatctccactcctccaccactaaagttcaattaggattattttttttaaagaaccaacctttattacttacctaataatacaatcactaaataacggtataaatattcaaagttttaaatttatgagtgatataaatttaatatttatttttagcagcatagaaccaatgtttataaaaatataattttttctaatttactatatacaaataaggcacatataagctccagattctatatcattggatctaaacagaaacatgtagtatct

SEQ ID NO: 389219 - DNA, 751 bp, Cannabis indica
agtcgcatgaaacagaacgatcactaacaaaaaacttcgatcgttgaaaccaaattaggagaaagaccaccattaatttaagaaaattcactaaaaagaagacaagaatcgatcgaacctgaaattgacaaaaataagagcacaaaaattgggtcgaaacttaaattcaacactatatttcagttttattcgaacaaaacaacttattcttatatcaatgttcagattcatataatgtagatctctaacaaatagatcttgagttcccatcaatcaaaaataggtatgatccgaatacaagaaaaaaagcatcaataatagatctaaggtatatccgggtgcattgtcgttgatttttcagattttcaatattgaaaataaaattacaaaaaaagaaaagaaaattcgaatgaatcttcagccacgtacgtagaagtatgcttcagtttttttaggtcctttatagttgcattataattttataatgttatttatcaaaattgtaggtatttcaattgacagcgaaaaagagaaatcacttcaaaaatacttctacaaaatagttagttatatgaaattattcaactggatgataattagttgcatgttagttttattgtagttgcacaacagttgtgattcaaacaaaaaataatataaaatacaaggttcagaattggcaatacacgacttgaacagaagaaagccgatagaagtaagtttatttttacttcatacagataattttaat

SEQ ID NO: 389220 - DNA, 1978 bp, Cannabis indica
aatatccaatggctacaaggcttttttccccacacaacccaaagtgtattggagtcatgaggtatggaatagacttaatatacctagacatagctttttcttatggatagctatacaagatatacttagaacaagagaaatattgcataagtataatatcattaatgaagatttctgtttgctttgcaagaaccaaactgaaacttcaaaacatcttttcttctttgccccttctctcttcttcgtctttcttatgtgaaatcatggctgggatggaatgttgaagctacaacacttgacaggttgttaagatggctagaaagagcaaaaaccagcaaattctgtaaagttgtctttactgttgcattagtgtatcatttgtggaaaaattacaatgaaatcttgtggaatttagggcaacaaacacaggagcaactaactcatgcgattaaggctgatgtgaagaatagagtgacctgcacttggccaaggaaagtgcacccgactgatgtagaatggttttcaaggctgtagctttgttatttgtaactacatagagtttatttgtattatttatatagaaatatttgtatagatagattattcaggtcttcaattgaagattctaaataggttgtaaattgatattttggagtaatgaagttcattgattgacaaaaaaattattatgaatataaatatatatatatgtatatatatatattaattagatcaataatataaatatgaatgtatatatacataaaaaaatcagatccgtaaacaaaattcgatcatatatataaatatatatgcatacaagaactcaaaatataatcaaaacagagatataaaattcaccttgataccaactgttagatatttatatgtatgaaaagaagcatagatgattattgtatgaagtgtggaattaatgaaacatatatgtactatataactataggatcgaaatacctcaagctatttaatctttgagcttcaatcccacacaagctttgatccgcaaaggaaactaattattgtaggtaatctggcttccaagctctatctactctctttagatagatttactgtgtttcacagaatgagtagtgagctcgggaaccgagactctatatttatataggtgagaccttccattaaagtctctgccacaattaattatcaaaatattttgacaattaattctagaaattaaatttggtaactgaaataattggtaattaaatttgatcgtaattagaatattttaattaattagtaaataattaattatattttataaatcaaataaaatatttaatttgttaccatataaaaattattctaatagtacacatacttaattattatatattattattgtggtctctaatatatacaaatagatcttgagtttattattaatttttctaacatagacattaattaaactttagttgcaagacagccactaagagcacgccataaaaattaatgaacttttaaagaaatttgcaaaccccaagcaattttctacaaaaacacctcattattacttaaaaaagaccatcatttttatgtaaaaacttataagcttccttaacagaaaaaggccaatgaatatcaaatgatcaataccaaccatatcttcagcaacaaaagagctaagataaatgtaaagatgagttcttaatctctctcattaaataaatatgtaatgattttggaatcccaagttcttgagtctaccaccttaagatcagaaattgaacaattatcaagaccaattaacgaaatggtaacaaaaggaaaagaggcatcagtaagccatggattcctaagaacatttatgtctgaaccagagccaaccgaccaatgggctatttttctgtcacgacccgagccctaggccgtggcagatatgtaatatccataacttgggtggtcaaaggtcacactttgacccttgttgaaa

SEQ ID NO: 389221 - DNA, 666 bp, Cannabis indica
caacaaaatgaataggaatgaataacacataatacctcgaaaccttattataattaaaaaaaaattatgggaatcaattccgcaaataccgagacataaatctaaatagaaccgattccataacaaattaactaaaattaaataacgtacaataactcaaaatataagataaagaggccgattatatttatcaactagtttaaaatatgagattttccataaaacaaccaagataaaaatttacacacgtaaaaactagttacataaactaaataaatcacaaattggttccttaaattaaataaatcaaatatcagttcccaaataactaaattaaaaactgattccttgaatttactaaatcaaaaactgatttttgaaataaataattcaagaaccatttttgaaatgactaaataaaaaacttgttgggacataaattaaaatagaatcggttttacaacaaattaactaaaaaattaacatacaataagttagaaatcgattataagtaaaaaaaaaaaaaaaaagaaccacttccaacaatactgagacataaattagataaaatcggttccacaataaaatgaataaaaatatacaaaacacaattactcagaaacaggttataattaaaaaaaaaacataatatatattatgttggtc

SEQ ID NO: 389222 - DNA, 1323 bp, Cannabis indica
gagttgcttattaacaagactttttcgcgtttttggaattattttaagtatatataacttagtttattctttatcttggagattttggagtccaagtttttatatttttttgggcttattttgttccaatgcttattacttttgtaacacgtggttttaaagataacattactttttgttgtcaatggtggttgcgttttgcttttttggcaagttgttggcaaggaccttaactcatggggtactcaattttagcacgcgactcacttgttaaattctcaaatgtgggctattttcatttatttttatctcatttctataccgactttgcccattaataatactatattttggatccccattagcatacagggaaatcttccttgtctaagaagctaccgtatagaacctaaatacttcatcaaaatgaatgaatctactctaacacattaggtaggtagaagaaaatgagttgggttttgactatttcatctactctatcataaaaatcaaccatgaggtatctatggtgatctagttcaagaagtatgggttaaaacctccctgatcaagctcatctaaatcttccaaacgtggagcacaaagtaagcggaagggagaattgcctcttctagatttgcttgctcccagagtgtcgttatcggggttgattgctttaaaatggatttcaagctctggttcttcgctcataggctctggatatagtcaggctcaatcaaccgaccatctttgatctttcttgatagccttcttcgctcattagaaactatctctgcaatgacttctttaagatttagagaatcgctactgtgagcgtctttgatatggaagccatttatgctctagtgaggagcaattagaccatctttcctaaggttggttgaggtgacaagcttctctacttttaaatccttaggaggaaaacctctctataaggcctccatagcgagtaagaaaggagtagctgttaggcgtgaaatttcatctaaagataaaagaaacagaagaatcctaaccagaaagcgaaatgaaggatggaaagaaagtccaattaaaaaagatggctccactttcttgcaacactgatgttgactcagaaatcttgacaaagacttttaagccatacctgcttactagattggcgagaaatgagatatatgttacgcattaatagagagaacaatttatagtagttcactacctgtatcgcaatagtaattgagctatgtctacttcgagtgtttattcttacgagatggagtacagaaaatggctaagtgtggatgctttaattctagagag

SEQ ID NO: 389223 - DNA, 510 bp, Cannabis indica
tatatataaaaaatataagatctttcttaacggtaacttcattcaaggttgatcaaagggcaagagccctacaattccaacaaaaaaaccgcaatctcacaaggagatgacaatggttggccaaccacactaattcgaaaggagcaataagctcaaagctcacgcaggagcataaagaggaacaaactccccataaaaggcttcacgccaatgccactaaggacataaagtgtacaataccgaaaaagctaaaagaattaaaataaacaaaccaaacaaaaacataagaaaaaaataaaggaacaacaactttaaagttaatccccctaacccaaaggaggcaacatgacgacccaaaacaagcaaacccaaaagtagaggagcaataccatcttccaatgagaaaaatccacactcagtatcctattgtggttttgaacgacaaaggttcagggaaaagggaagcacatccctttggataaaacccgagtcctgttgggttttatgccc

SEQ ID NO: 389224 - DNA, 1300 bp, Cannabis indica
ctctctctctctcttcctttctccactttttatttgcattttgttttcctttgtttcaggtgtattgtagtttttgggtttcgtcactctaagtggtggtattagaaatactcttacaaacataatatgatatataagatccatgggctactcatctcattacaaattaacttttagattgaacctaatgcaccttaaccacacacttccaaattctaacatggtatcaaagaaatcaaaaagattttgctctctctaactttgacctctatttgaaaccattcagccaatgtgtgccaattttgtattatggtctttgatatgtttcaaaaaattttcaattggtcaagtgagattctttcaaatgtcatgttttgccttgtgatctcttaaagctcgttcattaaacttacactttcaggcccaaacgtgagcagggtgtattagaactagtcctatattgttaatgtgtggaaagataatacaataaataatccatgagctactcttgttattgctaattagctttgagatggaacctcatgcagcttaactacacacttccaaattcttggagatggtgtttcagagattttattttgtctctctcggtgatggagtttcaaagatttgattttgtatttttggcatcttttgtggtgagatctgggctcgtgtagctcatatatgatatatatagatttaaactgtaggtgataaactaacgcaaaaaaaatgatattgttggttctaaactgacggctaaggcgcccatatagctgttggttttgtgaaccgacaaaaataaatctcacaaattattcacatattttgtctattaatagtgatcataactggttttaaaatcaaattggatgtgggtgatgcgaaggtgtatatatagacggagagatatataaaaatattatatatacttgtttacttggagactgatcctggtgacgtgaatatcaatgtttgatacgtgacaagaaggaaaatatttatggagttgagtgcctcgagtcatagcagttaactctgggaagggtcgttagccctgcaccaagttgactttgagagctccaaaatgggtgtttagatcccgccaggttattttcatctcaccatcatttagtattctgaaccaaaaattcaagaagagcccaagttcgaagcttgagaactaaaaatagtcaaatcagcctcttcgaagtcaacccgagtgcctaggttgacatcctgggctagggttttcagtttttgggtccgtcttagtgcaaatggctcaaaatttgta

SEQ ID NO: 389225 - DNA, 1739 bp, Cannabis indica
tcgatagatttttaattcatattcatatcatgcactgattccttttagcaaatcagatctctttatacttgatgtagagaaaatatatataggattcgtttggtaggacgtataagggttgtattgtattaaataataaataatactatgtttagataaaacaatgtattgtattaattactacgaaccaaaatttgaatacaatgtaagttctattatttaatacataacaaatagttcgtattaatttgtataataatatttacaaaagatctgcgatcaaccccaatctcgaacctagttcacgatacccgaaccagactgagagccgggactagatttggacatggacccgaaccaggatgcaggaccggacctggattcagactgggactcggacgtaggacctgacccgagatcggacttgggactcgggacccggacccggacccgggctgtgacctggacatgaagctcggacccaacccagaccccggacccgaacccagacttcaccccaaaccctatacctgtgacgcgagactcagacccaacctgaaatcgctgttgggatcgagtttattaaaaatatatcataactttacacaatctattaatacaagtcaataccaaacataacattgtattacataatattaatacaatacaataccacgtgccaaacgagcccttaatcattactaattgctaattatgcatattaaaaacaattactaattgctaatttagaatgaagtacatgctagaaaatgaaaaacataaaataacttattactgtgtaagaaaaatgacaaagcaaaattattctagtgtcacaaagcttaataaaacagctgcagtcatcacaaatctcaatgatgaagtcctttggaccatttatgtattgcacttctgattttatgctcaaagaagggaattctttctaccacagtctccacaaagccgaaataagattcactccaagattttttcattgccaacatgaaaaaaggaactaaaaggcctgttgcaaatcccaatccaacactaacataaaaccaattatcaagaaaactgtcatcatcatcattatgattcttaagtgttggttctttatcgaaatcagtatcattatcacttggacattttacatcgagaggtttgccacaaaggccttgatttccagcaaaagaggaagcttcaaaggttgtcatgtggccattgtaaggaatcttgccagagaagttattgtttgacaagttgagatgtcccaagaatgaaagtgatgacaagctatttggaacggtacctgaaagcctattgtttgagagatcaagagatgacaattgttgcaactttgaaataattggtggaatgaaaccgctgatatgatttttagacaaattcaaaatctctaaacccaacaaatttgttaaatctgaatgaagtattccactcaaattattggcagaaaggtctaagctcacaacaagagaaagagtcttggtgtacttctgttcttggcctttaacattcaacaccaaactatctttataatatgtgtcatacaaactattgccatagaatagataacggttttccctttggactcgaaacattgctttgaaagatccatagctagtaggaatgcttccattgaatccattatcagccaagtccaacacttgtaatgagcttaaatttgatagcaaggatggaagttcaccgaaaaatgcatt

SEQ ID NO: 389226 - DNA, 2022 bp, Cannabis indica
tttttttttttttgtaattagtaccattttgaaatctatattttgatgttgaagactcttccaaatcatcatcttaatattactccttataatataatattgttataatttataataacatagtttttcttctgaaaaaaactatgatatattgcatatattaaaagagaaatgctaaagggcactagtgatacctaataccttcttatgtgtcagtatcgttattggtccaactaagtatcgaattccatataatttaatataatagcttttatggagtatcggtagctaatcgcaatgcgatatgtcgagaaagttctaggcaccactagtgcctaatatcaatgctcataaagaaatgaagaaagaaaaggtggctttgaataaaagggcagagtaatgaaaataactaacataactgttttgattcccaaatcctaacaaattggcgccaaaatcagttaagaaaatccaattcaaacaaacatttctcataaatctcatacatatataaaccaaaacactcttcatttatctcactctctctctctgaaactttctctttcattttctcgaagactccattgttgattgaatttcaagaaaatggaagaagacaaaaatctcctgttcggaactctagtcaaggaaatcaacaacatccttctcccaaatccactcgcaacttcaatcgattctcttccgccagttcaaagatcaaccgtttacatcagcgacgtagcttcagaaatcggcgtccgcagcgttactccggtattctcaaccggcaataacggcgacatcacttccgtcaagatcgaaggaccagaatggaactctttcgtagcagatcgaggaatcagaatcggagacgttcttctcttgagaatcgttcataacgttcctaacatcattaacgttactgtaatcaggttaaatccccaatctaacaactactaccgtactctcactcctcccctgcctcaatatcaagatgaaaatcaagatcgagatcaaaatgagaatcggcaatttctgtgtgttaagaaattgagcgaagaagatctgagcggagatcgattggagcttcctgatgagattgaattgattgatacagatagttttgtggttcgagttagggatcagacttatgaacatatacagattctgacgaggctgaagaagagtttgagatccgagaacggtgatgatgatgatgatcaagcagtgtatttggatgataaatggtcgaaattcgtcgatgaacggagtatcgaagaaggtgatgtgatcgttttctgtgttgattttcctcgacatgttatcatcattactgtttatcgtgttgatgaagaagaagattttcaaattcctccctaaacatttttgtcgtttttcttcaatagtgtcgtttgatttcaatcttgtcgttttttcttttctctttttctttaattttttgagaagcaaattttatatgtatagttaaatcgttgttaataaataaaaggtttgctgttttttttttaagacaattaatttgctaattattaataattgtagaaaaaagaatagtaattattacaatttttttttgaataaaattattacaaattaattaagatggtaaaataaattaattaagatatttaaattcctcctcaaatatttttttcttagataattaatttgctaaatatgctttatgtaatgttccaagctactgattaggctaaccgtgatggcaagagttgtcatttgtcataacgaataataaagttttgaataatttaatattttagttttaacttttgattatagatgtaatatatagggatatgattttgtcccgttgattgtactttcacgaaatgcattccgtgatgtatggcagccgtcagatgagagacttatttgatctgacggttgagattgatctcggggtaattaaggttaaaaagtagaaacgtaccttaacactcatttaatgtacccgagacccatctaatgtaccacggaata

SEQ ID NO: 389227 - DNA, 683 bp, Cannabis indica
aaaatattattataatgataattcctaatccacatgtctgaaaatggtaggagcttcagagtaatttggattatgtattgtattttatacacacattacatacatagtaagaagaataatatataattaatgatttaaaaatggaaaatagctcattctttccttcattccttccttattccaaaatccaaatttgcaaattacaatcatatctatctggattcaatttcccaataataatttgcttctcttcttacgtttatgttagttttctctccttatatttttatctaataattataacgtctcatttcccaatcttttataaacacaactagctacattaattattctatttatatgctttatattttatgacaaaatttatgttatatcgttttcatgcacatagttttcaaataatccaactctgacaaaaaaaaaaaaaacaataatgataacatctgtacttatttctatataaagctttcggttgatgaaaagatacatagtagtttttaaaatacagataaaatataacaaggaaacaaatcttgttgtgtatatataatcagtggcggtcctagaatttaattggagggtgggcgcaaattttttcatacataaaaatattccaaaaaaaaataagtaaatataaaaaaaaacacaattcaatattttaa

SEQ ID NO: 389228 - DNA, 1400 bp, Cannabis indica
gactggagacgacagtcggaggaggtgatggctcactaacggaggtggcgacaatggaagagttcctttgttctttggagccatggaggatgatgaatagtgggctagggttttgttgtgagcttttgataccatgatagagatgaaaggtcttttatttttactgctatgttcacacagcagaaatgccaaaagtaaattaggttattacaaagagaagtatatatagggaaaaagagaagtaagcccatgaaataaatgggctgaaaataaagtgggccagctaattctaatacaatatgtatcaaaaagatcgaaacaaaaaacttactttcgatcagccatgaataaagaaatacagagaaaaatatatatgtatacaccgaaaagtcaaatgaatcaagacagaaatatataattctctctcatgctaaccataagaaattattatatgaaaagatgaagcatatatgatcgattcgcaatacagaaaaataaagtaaatcaaacatatacgcgtagatgaaaaagatcgaataccttcagccaatctttttgagcttcaatcctatacgagcttcggatctacaaaagaaaataaaactagttagtatgggtattcagggttccgaactctctctactctcttctataagaattttactgtttgcacaaaatgagtagtgagattggggaccgaaatcctatatttataggtgagatactccatcaatatttgcgccacattaattatcagaatatttttacaattaatttaaaaaaataaattatttagtgaaccaaaatataaccatatacagtatataatatttatctttatcacatttttaatttttgatcaaatataatcaatttgaaattgatattatcttcatacatataaaataaatttaattattttgtatacatagaaaatattctactaacctaaacaagtatgatagactaatccaagcctaaccaagatacatctctccctagcataattatgtccaagattttgagtgatcgagagttgtaaatagggcccttttgtgtttgatcaaggtgcttcagtgtgagtttgtgttgtaatttgtgttttccaccatagtcttcaaaagtgtgtgctgcaatccccgattgaagtggtgttgatcatactcaattctttcacgagttaagttttattctccctttgcttttaattctgttttgtctttattttttattggtattgatttgatttctgttcttgactactgccactggtgtgacagttattcaccacaacatatatgaggggcggagctaagattagatagtttggggggccaatatcaacaatgcataccaaaagtataaatttcaattgagaaaaatattatattgttttattt

SEQ ID NO: 389229 - DNA, 634 bp, Cannabis indica
tcttaattaatacagaaatttatgaaagcattggattaaaccaaaattttgagttagtgttacctctaaattctgtaataaattttcaaattctataatatgaatattatatgttcttaggaattaatttatattcggtaaatataaataataatttattttactcagctaaattagattatgtagtttacaaaattaattctataataataatatttactaaatattataatattattatttttttttgtactgtatagtatatatgtataactacacagcaatataaaattagctcaaataataataataataataaccattgaaaaaatattaccttcaaataaaatttattttttaatattatttgttatcgttaattactaaatatttttgtaatattatttatttgagtaattatagcaaatctttctaactaaaattgatttttatttttgtaaaaaaagttgcatatattttacctacccttaaataaaagaaaatcattaaaattatagtcgtattattatactcttttaattaatcttaaaacacgtaccaaaatatttttttttcatttttttcatggtaggtgttcattaatgttatttatagtgctgaaaatatatttgaa

SEQ ID NO: 389230 - DNA, 1047 bp, Cannabis indica
ttttttttataaatttgaggcatcggttaaatattaatattaaatgccaatttgataactactgtgtatatgtgacatgaatacctcgaaggcaatacaataatcatttagttggtatttaatggtagtatttaactagagtcttaaatttgtaaagaaaaataaacttaatgaggtcttgccacaagaagaaagaggctaagtgtataaaatcaaaatataaggggtttcgccgtcaataaccccttacatagcttcctaatgcaaattactcttatatttatatagtagtgggttatttgcagcataaataccatattttcgatttcatacacttaaacatcatatcttatttttcgacaaattaaataccaaaaagattttcattagttctattactactaagagcatcttcaatagtagcattctttaagagtatcaaaaacttctatatcaaaaaatatattattttattttatctctcttccacatcattttggcactttttgttgtaaaatgattcaatgataaatatttctaaaaattattaaaataatattatattatttttgaatatatattaaataaacaattttttttactttatgataaaataataaaaaataaaaataaaaaagagaaatgtaaaatatgttatggtatgacatctttttgtggcatttttttttcattctaatggtaagcatcaattaaaatatattaaaaatatatccatattatcaagtatacttcatagcatcttcattagagatgctctaatgtattaagtgctcactgaacttattagtattgacacatgtcaacatattattagtctacctcatatattatattaataaataaaaaatacaaatcatataatattatatttttttttttgaaaagatttacttttttatttatttattttttttgaagagaagagattataataaatagggtaaatactattttggaccatgtgttatgtaaaagttatcaattggaccatctgttttgttaaatgataaaatggatcctgtattt

SEQ ID NO: 389231 - DNA, 1724 bp, Cannabis indica
ccccttgttgttgtgtccaagataattacgaattggagagtctatctctcattatcttgtagagtgttcgtttgcttttccttgttggcggatggcaggtatttcggtgatagagattagtgacaattcttttggagatggtttcatgatagattttggtgtcgggattctaggatgaaacatagagctgttatgttttgttgggcgttgtggtctgtgcgcaatgacaagacctggaatggtaagaataagattgttaatgtgattatttcgttggctaagaatagttttgattaatggagttatgctcaagatgaaattattggttcgtctttgttttctttacaagatagcgaagggtacgagcactgaattgcaccagttgataatacaatcaaaattaatgtcgatgcagctatctttggaaattaaaataagtatgggtatggttgggtggtgcgaaaatcttttggtcagcttattatagcttcgaaagtaagccatatgggattagttgatcctattcttgctgaagctattggagttaaggaggtgttgagttggttgaaagaaacaaggcagcatgatgtggtgctggagtcgaaaagtttggtcacgatccaagctatccaaaattcgttagatatggcttctatttttgggttctgtatttttgagtgccgacagattttttctagtttgaataatatttttgtaatttttttcaagtgattcgctaattatgttgctcaccatttgactagagcttcgtagttaaatattggttgtacctattcaaattctacaattctgaatagtttacttgatgtacttttaaatgatttgaattaatgaaattgcatttttctattgaaaaaaaaatttaaattacaattaattaatttaacaaaattatttaatgtatatataattaaattattaaatttaaaattcatataattaaaaaatatatattttttattgattaaatttgaatttaagttactagtatgtattatgatttcaaaatacaaattattaaaaaaataatagtaccaaatctatatatatatatatatatatatatatatttttttttacataaaatttatattttgataaaggcaaaataagaagtaagtagacttccttatataatatattgtggtttcaccaataattaattagtttcatattaaccaggaattccaaagactactcctcataattcaatggcagtatggcttggtacaacatcaatcttatgcataatatgcctactatgtttcatatgttggaggaaggccatcactagaagaaatgggtccattccagagctcaattctatagtgcctcaacaacccataatcattatgggcttagatgggccaactctagagtcttacccaaaggtaatattaggtgagagtcggagattgcccaagcccaatgacaacatatgcccaatatgtttatctgagtataagcccaatgagaccctgaagaccatacctgaatgtcagcacttctttcattctgattgcattgatgaatggcttagattgaacgcttcttgccctatttgtcgaaaatctccaaatgtgtacaattacatctaaagatgtattattaggggtgttcacaaagtatccgatccaatccaatccgcacgatccaatccaatccaatccgcaaaatgcggatatccgcacttgtgcggattg

SEQ ID NO: 389232 - DNA, 2547 bp, Cannabis indica
ggagtttctaaacatttacttatatttttcagatctgaaatgttttttctttggaagtgttttgaacgctatgggtatttattgcttgatgacttgtaccaaaatcaaaataaataaagggctcactcctgatatcttctctctaatcctatagctagggttctatcttctggctagggttggtgttgcctgccaggctgtgcgattggcctggccaggccgagaggaagcctcttctatgctttgtgtggctggtgttttagggctattctcgctatgggttgcttgcgatgtgctttggagtgcagtaggaagtaggaacccatggcctttttgatgttgggaggtggtgttttagggctattctcgattcacttgatttggctttgtgatggtggggtatgggttgcttgcagagtggacccatgtccttttcggtggtggttgtttcgtttcgttcatagtttttcatctaggttgtttgttcgatctaatgatttagtaagttctagttttgtttgtgtagatttgaataatagtgtttgtacaccattggatgtcatagactttgggttttagtcaattttggttcgatatttgctctcattttggataggtattggttttagatctttagtgacatcgttacttatttagattcatagcacattaaccatagatatcatattttcactgtcatgtgattgtgagcactctcaccatgtgtgttataatatatttttagaggattttatagttgtcaccctcctcttaagaatatcatatttggtatttgacaaattttaactattacaaagaacaagtcatatggttattaagggtgtatcaaaacttaatttgaataatgtagttttttattcttttcaaactaataccattaccaaatcttacactcagaagattatttcgacatgttcaaaattcattcttactattcataatattgaaatataaaacttttagatgtaaaataatgctttctacatgtgtaaaagtactctagcattctctatattaatatttcaataaattaggacatcaggaatagtttcatttataaaaattattatgagtagtgttataaacataagttgaattttttgtacacgacaagaaattggtacgagtctagatggcacgagcacaaccagacataaaaaaaaatgggcttggacacgacacgatgctataaattgccacgatataacatggaaaatatgtgattaaacttgacacaatacgagaagcacgaaaaacacgacatataagtacgaaagacatgacacgtaagcacgaaaagcacgatacgtaagtatgaatacagtcgtccaaaagatacgacacacgacaagcctgaaaggcgagacataaaatattaaaaatctttataatttaataactataataatatatatgtatttgtcaattataaataaattaaaatttaaatataattctgaatattataattttataattaaaattattagaaaatgtaaaactaaaaccattaatttatttatagagtatgatgtaaaaattaagtatttataaataaattttaaattttaattatttttttaataactgtcagtaaaatgttattgaaaaattacataaatataattaaaatttaaaactataaaataatcacatataacattagtaattaactcattaattataaaagaaaatatggaaaagtaaatcataaattcaagctaaatataaaaacgagctaatctatttacgaaaaacaaacttttatgagtataacacgtcacgaatgtaaccacgacacgaaaaatatggggtctaccctttaaaaatattaacacaacacaatacaatttatatttttttaggtacaaacacgactcatagtttataaagcacgaaaaaatatgaatcacatcaacacaacccacacaaattttagagcactagttatgagtgctcttacaatgatctagcttttgaactttgtgacaaattgacaatagtcacattagagtaaccccattgggcattacctaagagttatttgagtttatgtggactttagttgatgtgaccattttttttaatgggtgtggtttttttttgttaaaattaatgttggttcgttgagcaacaaaatggataacctccactaaaggtgctccccctactactagctttttctttttctttatataattttgtgttatgtgatgtgatcatgaaattccacaaggtaaagcaaagtagcatcctatatgaaaaagatgatggattgtttcataaatacataaaaataataaaaaaaattacaaaaaaatactattatatgaaattttaaatttttttttttacaattttaagattttatttgtaaaaatatattcttttgatatttttatgttgtattcttgttattgaaaaattctacaatgctcattcttaaaaggaatacattgatgcgtctctatctatttctgtatctgaaataattttttagtcaaattttttttcatagtcatgtac

SEQ ID NO: 389233 - DNA, 877 bp, Cannabis indica
ttttatttcccaaaatgaacaccagtggctgagcaatactacagacaaggaggtgtctaagattggtggcttcctcgaggattattatattgtcaaatacatggatgttgaccacctttctttccaacagatcccctcatatggccgtcctccttttaccttggagttaaggtctagatgggcttggaacatttctctcctggctaccactgccgattttcttaagtacagactttatccgtctaaggaggctcaaggatccgagcaagcagatgaaaagattatcattgagtagaaggctaccaaaaaaaagaacattcccaaggggcatcaagttctgactaattggcctatcaagataagagaggaccctgaggtagttgttcgtcctactacccctataatagggaaggggaaggtcatagtagtagatgatgataaggatccttctgacgaggataccccatcttttcttgttcgagagggtgctccccctgaagtccaaggtagttattgctttatttatctttatttattcttacttgtttaaatatttaataagagttttctttagtgcagccttgtcaaagaagatgaaataagcactcagtttgaggattggtaatgcatctgaccaaaaatcacctgctaaacgatcaagggtggaagtttctctatccacaagcattgccccaagctccaagacaccccaagtagaagctgagaggagctcgatgaccgtcattgtagacgttcttgagtctcttcctctagccaagaagacttcgaaaactcaaccttcgaccgctccgaccaaaaactctaacggggccagtactgaatggccttgtaacgccctaatgctaaggcacgctac

SEQ ID NO: 389234 - DNA, 924 bp, Cannabis indica
agtaaaatttattaggaaaaaaattatacatgattttaaaataaaattaaaattaatacaaaatattttttaaaaaaaaacattaagagtgattttttaaaattaatttaagtttttttatttataaatattattatggttttataattgtgtgaattccaaatatttttttttttaaaaaacaataaaaaagggaatggcataatgtaaagcttgattaagaaagttgaaagtaaaaaaattggaaagagaaaataacttcaactacaaaatctaaagagttggaagtattatttgactgactggagacaaagacacttgaattacataaaaggtttaagatgctttttttttccctcttgacttggattgatctaattaatggtgggtcacataatattctcatctctatctgattttagtaaaattgatcttaatttaataaagaataattgttaaattagtaaaatcaacttaatattatctaataatctatgtagctctatttttgtcagtgaaaggtacgagtaaataaatgccataggtgaaaagaactgaattgttttaccaaatcttttaatcacatttatttatcttataggcattaaatcactacatttattgacacccatgtctaccaaatgcacatactttaatggttttttttttgtttgaaaaaaaaaagaagataaaatttgagtgaaactatagtaaatagtaacaataaaccaatgaaggcatgagctgtctctgaaaacatgaaagaattgttgtaattattggtgtaaaaagatgatttaagtttataaattgtatatcaaaagattggaggatgctttcttgtacgcctccataatcgtggatacaatctggagggtgcggaatgaaaaagttcacaataattgtcttgttgatgtgaaaaaa

SEQ ID NO: 389235 - DNA, 1490 bp, Cannabis indica
ttcaagtttaatgcaataacaaatatgatcacacatcaatggtacattgctgcatttaattccttgtttttgcaaaaatgttttatatgtttgtgatagaacacttgtaatcatggtattccttcctccgccacaagtgaggctttctatatatgtcgggggaggggtcaatcttagacattggcctctttctctttttcagaaaaaaaaaattccttgtttttgcaagactaatcgtacttactgatgagaatgttgagtagtttttcaaccaactctagaatggtttatcgtatttaatgatttaattccaatttagttttatatgtttgcagctttggtatgcactttcaaatctagctataaaattaagaagaaacagagtgtgtatggatgttggcataagaaaatgagagtggacttgataaaactccaaaggttggtgactgtggtctcttctcttgtttaaaatcaaaccattagtcaagaatagtttttgtagatttttatgttctctcttcattttcattttcgtgcaggagcttcatgaagtgtaggatgatagttggtggcatggcatcaaaagaagctttgcatgtattttcaatgaattgcacattttcatgctttctagtaaaactacacaaaatatgtaaggcttttctgtctgtccttgttgttcatatatgattttcataatatcttatcttagctacttttctttccttttaaatttctgtttctcactcattggcagtgtcgtgatcataataacaaaagttcttaactaaggcagggtgatgttcaagcttcaagaatttaagagaagatgagtggagtaggggaggcagtgccctcatcatgcttattttatctaaaggttaatctctactctatttgttatgttaaatgaagcctttcaaattaatagcttccattattcctagtaaatcgacatatatagtctgtcagacatttaaacactacctattactctgttgttgcaggctctcaaatcatcttctgtcttaaccttggaagtgttctcagatgtagattggttcggctacgtacgaacttggatgatagggaatgcaagaagtctgttaccaattcaacacacttgtaactaaaattcttttttttctttttctgttacttaacttaagctgtgtataaaagggtgtaatcaaggccaagaaagtttgagtttggtgtgtgattatgaataataatagctatagagagattagagtggtgccattaatattactttgtagaagaggttgtcaccacacataatacaaagttcatatcaatataatgtacaatctaggaatatttgaataatgatttatatatatattaattacaatcaatcaattattcttctgcttttttactattatacatatataacatcagtaaaatttattagaatatttctaattaaggaaataaaataatattattgattctgataaatgaat

SEQ ID NO: 389236 - DNA, 1263 bp, Cannabis indica
aaaaaaaaaaaaaaaactctggaactattaattataaaattgtatccataatattacttaggaaacataggtagtacaactcttaaaggagttccatagattattgactaaatactaattttgaccttgtgttttgtaaaaattataaattagattttctgttttgttaaataataaaatggaccatgtattttctaaaattgtataaatagaaccctggactaatttttttattaaaattaaacttaataataatctgatttagagatattataataaaactggttatattttctgtatctgttcgtgttaaaattagttatattaaaattgagctcaatgaactacttttaccattttgaaaaatatagggtttattttgttatttaacaaaacagaaagtacaattagtaacttttacaaaatacagtctccaaaatggtatttactttaaattatttatcttttagtagagtttttttttagtctaatttttttatatgaacatgtacgttataattatttaaaaaattttaattgtttaccgtgtttaaaataaaattcaaatagatttttaccacttgtataaataaaaataataacatatgcaataaaatatttaaatgttattttggtacttaatttatttgaaatttactaaaaaatttacaaataattataaataataataacatataatatgactaaataaataccgaaaaaaataaaatctcccgaagaactttttaattaagagtgtactattggcttgctgtatttttagcttttgtaattattattattatttttatttgaaaaattataaaagtaattgatgttaaattttccttacaaatttgcatgccgttttagagatagtgaaacaaaattggtagaaaacgtgtatggaatatattctgaggagatttggactatttcggaagtcagtcagtcaacaactaaaaaaatatcattccatacctattttctggtcaaacaaaaaaaaaacaaaaacccatttcatactcttcttcttcatattctctgcctccctactctaattagagtctagtattctattttaccttataaaaacacatcttagtaatctcactttttttttttccttagtaaaatttatgaaattatattcgtattattgtagggagtaatggttcttttgtttagttaataaaacaacaaaagtaaatcaactaaaagttatcaaaatatatatatgtatataattttttaatatttttt

SEQ ID NO: 389237 - DNA, 897 bp, Cannabis indica
atttaacagatgaagaaccagatcaatatcaaaaatttgatgaccagcaatagcaaaataaggacttaaatcttgtcaacatagtcagagatcgattgattacctttatgcaaataggataattgactcttgagctgcaaaaattaagccttcaattgacttgagaacttttgttccaacgctttccagacaacatttgagctggtatatcatgccacagtaccaagaataccttctattgaagatttgagctaagaaaagagctgatctttcttgcttgataagcaggatttggagcaccgttgactagaagtcatggtgaagacagatcagtaagaagaatttcattaagatcgtggctaatcaccgttggaagcacttgaaatttccaagctaggaagtttgtgcgatcaagcttgatcgtaagagaagaagtcagagagtgagagaatgtattccaagattacattgctgtagcatgcggaggagcaccaagatcagatataccagatgaggacgaattgttgccagaagaagccattggcagaggtctgtggctctgataccatgaagattgagaaataagagagaacatagcggaagaacacacaaggaatacttgaaactcttacctcaataatgaggtccaatcctttatttataccgcaaaagaatgaacaggatacaaggcaagaattatgttatggaaaacagaaatcgttagtgcagtagctaaactaagcaactaactaaaacaaactaactaatttggtccaaaatatgaatcaatgctatattttaggggtgtacatcaaaccgctcaaactgtccgcaccgtacgcaccgcaaaaaaaaatgcggtttgaaattcttcgcggtgcggttgcagtttgaatt

SEQ ID NO: 389238 - DNA, 1413 bp, Cannabis indica
cttaccctattaagagtttaaaaatactacaaatattttaaatgaagagctcaataatttttatttttaaggtttacctaataatttttagaccaattttaaagagaactcagaactctactaaaataatcacatgcattatttataactagtgagttataataattaaaattaagccactaagactagcttagtggtgagggagggatgggaaaaagggagaggtcatgggttcgaaccaagacctttaaactattaagctaatatatgattgtaaaataccattacgctacagtcaaaaaaaaaaaagagttgtaataattaaaaactaaaaatatatggctaatttatttttaaggaaatgattcatactattagttattgaaaaatgctaaaaggtatcaatattttttttttatgtcatactgttattggtgtaattaagtattgaatcttatataacttaagaaaatagtttttagagaatattactaactaatcgtagtctgctatttatagaaggtgaagggcacaattggtacccaataactatgctcttacttattataccttaaaggagtgttactgtcaatattataatctcttagataatttttatgctcgaaaatacatgtaaaaataaataattatttatggtagtgttcgttatagttacaacgttattttgtaaaattttaaaaattttgaataatttactgtactaaaaattaggtttgaaattttttaaacatgcttgataaacttaagtattaaaaattatattttcagtactgtaaattataaatgatacttaacactcttaaatattaaatgttatattttatataattaaatataataatttttataaaatattactcactaattataaaatctcacttttagatagtactaaataatacttataggaattgttatattatatattctcaataataattattgtttattttataattattattattatgggtaagaagggagtatctttatggataacgatgtaaatgggtttgtgggatggctatcccttaatttgcttggaatgttcttttggcacgtgcatcacattctcagagatatttatgtaacttatgacatatttatttatgcacttattattatattagcatttttattgggagtcaaattatttatcaataattatattttggagtgagtgttggacggacgaggaaatataaatattttaaagagtattattattgaatatattagtattatgtaatattttttttataagtagcgtctgagtaataatatttttattttttaaattatatgaaattcaatacttaattataaaaataataatataataccaaagagaaggctaaacactatattattattattattttttttttgaaa

SEQ ID NO: 389239 - DNA, 1335 bp, Cannabis indica
atctccacgaatgccaaaatgagggggagtaatttcatactgcactctttttcccttgaccgagttttgtcccactgggttttctcggcgaggtttttaatgaggcagttattatggacatccaagggagagtgttataaatagtattaattatgtggatgtccaaatcttttatttattaccattaatgtaatcaacattccctttttcttagtttccctttctcttagtttcttaatatttgactcttgtatgtgtataaataggagatcacctattggaataaaacactcagaaaattctcatctcttctctattttctttctctaaattataatattacataatactaatatttcataatactattattattattattattattattagtcatttttagggatttgattagagggaatgaaatagaaaagaataaaaaggaaatacttttattctatttttgtttgggtgcatattaaaaactattttaatgcatgagaaaaaaaatttaatacataaattttttaattaattttatttatgaattttaaattttattctttctctatttttaattctcatttcttatattttgatatatctaactaaaacttaattatatgaattatttattataatgatcatttctctcattaaaaagaattattttcttgtttcatatttgaatcttttaattgtgatcaatgagtaaatctagtagaaaaacaaaagggagttttctaaaatatatgtaaattataaaaagattacaaaaacaaatagttgtgagctatcttctgctttttatttttttaaaaaactatattttatatctatctctgtctctctcctctatgatttttggaaaagaatttcaacttcattattaactcttttgactagagtggcatcaacacaaccttaacctgatgatcatacgagaaaattacgctcacagatgtaattctcattttatttatactaaataactttaggtattttaatcataaaaatatcacagcggtaaaccgtaaacgaaggagaagtagattctctcgtacatctatgcatcgtaaagaaattatttctcaaaagagacccaataatatctttctttgtgaaactaagtgttttaaggtaagagtggaatctttggcaaggttgttgaagtttgaaggtgtttttgttgttgaggctgtgggtcaatcgggtgggctggctctactatgaaagaataaagaagaagggacactgctgggtttctctaataaccatatagatgtagtggtttttactccccatgttcgagattggaggctaactgggctttac

SEQ ID NO: 389240 - DNA, 645 bp, Cannabis indica
aaaaaaaatatactcttcaacttcggccaaataaaatagttaatgggtgcaccattgaatttctagatttgttactttctgtttggattttaaattatgttttctatgaaaatgttgtaattttgtaatgggataattgtgacataagtatttaaagatttgaatttataagaagtatgaactcaatagttattttaatggcataactactcaatattggtaaaactgtaattttcatcatgtttcgtatgtacagattctgttttgaatttattaaaagaagatttgaaagtaattgatatcgtcgagactccagccctaattatttagaatctgagttttatatgtgtgccctgtttaagatattaattagtgaaaattataattttataaacatgagatacttatatccctaaaacaatcattgactttatgctacatacaaatataagacttttagtacttatgttgccatgaatttcttttattttcattttaaaatgttagaatagagatatacaattgaataaaataaatatatatgtttatgggtgactattcaatggttacatttttattgtaaccgtatggttacatttttttttaacctgtaatagcaggttactaataggtagactttccttt

SEQ ID NO: 389241 - DNA, 978 bp, Cannabis indica
ttctttcaacaacctcgtccatatttcatcgagggcttcttcaggtatgggaactgtgacaaaatctgttttggctttgaagtaaattcttgggatagttttcacctcgagaaggctctccaccggtttgccatctgagaataagtaaaaagccgattcagcccagctcatttccatgcaatcttttctctccaaacccaattcagggaaactcttttcaacaacttgcaggactctattacagtccccaagaaatagtgcattgtaatcaatcctcagtgttctctgattaacactactgttgcagcttgaattaattacagtaaaacgaacgttcatgaagagatcttcatcaaacttatccataacttgttgccatcgagagacaagcttcaaggccccttgttctaacgtcttaccaatcttaaaatgtgtgactgtttcaggcacaggtacaagcctaatcttccaccaaagaatgattccaaagcttcctccaccgccaccgcgaattgcccaaaacaagtcttctcccatcttttctctatcaagaatttgtccgttcacatcgacgattcgagcgtcgagtacattatcagctgcgagtccatattttctcatcaaagacccataagctccaccagttatgtgccctccaattcccacgctcggacaaatcccggctgggaagccgtggactttactcttctgtgaaattctgtagtaaagttctccaattgtggcgccagcttgaacccaagctgagttttgttcaatgttaacatcgactagtcgaaggttgatcagatctatgagaatgaaaggagtttggaagtgggaggcaaaggagactccttcgtagtcgtggcctccactacgaattctgatatggaagcctagctttcttgagcaaagcacgactgcttgtacatgggaatcatggagaggagtaaagatgaattggggttttgagaatga

SEQ ID NO: 389242 - DNA, 832 bp, Cannabis indica
aactcttgtcaattggttagaatgtgaaattaatttcagaataagaaaaggtataaaatactccttacatagttagtttaattatctaaaatatgagcacagcataaaagaatcaaatcagtataatagcatagtccaaaacaactaactgatgctcttcttctgaactatttttcacaggagtaccaataatctattctcatctcaactctgagcgtttaaagaacaaaaacatgttgatttaattgctttatcactgattagagagtataaataatataacagtacataaccatagggggaaaaaaactgtaacggagagaaatcaaaaaattgtgcaaagggaaaaaagaagagatgaaagctacaaggaaagggaaagaaagaccggttgttctctaaccacactcaaaaccgtacctgtccagccgataagtgaagcgcgggtggtaatgaaggcgatcagttaaagaaggaggttgatagtctagggtagcgctggtgagttagaaagtagaaacagcattaagccaaaaaggccgatagagagagactgggtaacggagagagagatgaaagcaggttgaaagatagaaggatgaaacaacctacggttttggatattatcataagtgggcttatgatatcgggctcagtccaacaatactacacttttatttaaggaaattagactgtatactttttttatattgttctcttttatttttatctctttttttaaatattgtaccaattttacctctatcactttaagatacttttcatgtgactctcttatgtcctggtattttggatacaatacatataaaaa

SEQ ID NO: 389243 - DNA, 1003 bp, Cannabis indica
gctctcccttctcatcctttctcgatctattcctattatttttttctatagcataaagcaatttaaattgttagttaaagcattaaacattgaagcttaaactaccaattcaatataatctctatttttctaacacatacacaatatacataattatttattgttgtatttgattaattaattattatcaatttatattatatgtagttctaaaaatttcaacacataaaaactaataattgtttgactagatacatgcatggtttagtatcttgatcgcaacaataattagaagaactcaatcgaaaaaaaaaattggtaaattcgttccaagtttgacattttatggtatttttttatagaactctcctttagtgaatttattacaaagttctcaatttttaataatcattatattaaatttctttttcttttgtagatctaacattgtatagtgattaattatttttttcacttttatgaatttcaaatacaatattctatggtgagttttctatagatttctctttctgcgagtttctttacaaagttttctatttttagtgttttcatccttatattccccgtgataatctcttaatcttatgacagtattttgatatttagataaatactatgtttattgtgatttagttaaaaaaaataacattgtatatgtgataatgtagtgtggtagcaacaataaatgaaagttttattaaattttttttattctatagattttgataacgtttggtcaaattttgatacggtgataataatgatatcgaatatagtaacgactacaagtaagatatagtgatgacaatagttttaaatgttcagatgactacaattgaaatacggtaataattaacaggactttgaatgtagcgcgtatgatgactacaagtcaaatacaacgatgaaagagaggaactacattaacacatttttttgttgaaaaaaaaaactactttaacacatttttaataaactacat

SEQ ID NO: 389244 - DNA, 1711 bp, Cannabis indica
ggtacaatccaacttttgaaaaaaactattttgattaaaagactataataatttttttttactaaaaatttatttaattatttattatatattacaaaaaaaaaaaattagatggaaaaaatatttaaaatatataatattttaatttttaatttttattttgtttaaaaaatattttatatttatatctatatttaaattattaacaaacaatatcaacttaagtttcttataaattacatttttttacaattcataaaaatataatttaataatattaaaaattatttttattaaatgcatatgaatttatactatatatagaaaaaaaaaattaagaatatataaaaaataaaaattttaatataacatatttttttattatatatttgtgattttagtgaaatagattaaaatattattattataatagaattttaacaactcgcagcactttaaaatttataatttattaaacacttaattcaatttttttcttacaatcttggtacagttattttttctttacagcacagctacaattgtttttccttcacgctacaactgtgagaacaagcccttagaatcaaaccaaatgtacaaattaagctcattaattaaatgaatcatttctattataagtatatgcatattaatattaatattaatattaaagagagaagagaagttttatataattatttggtccaatccaaagtaggtatgtggtttctttctgtatgtttaatattttatgttaaaattaagaaaaatagtcatttcttagggaattgaaaacaaccttttgtcccctattttgagtgcctatagttttccaataacgacaattgtgtatatattttacaaagaatatataagacattataatatgttatatgcttagtttaataatcaattattcttatatgtacattattaattatacattaaaaaagacaatagggttttgttttatataatcaaggacgtttggttcgttaagttgtacggcgtgagagtttcaataatattggacgacaattatacaagagaaatgctaaagggcaccagtggtgcctaacaccttcctatgtatcaatatcgttattggtacaactaagtatcgggtcccatataatttaatataataatttgtagggagtatcaatttaccaaattgacgtgaaattattaactacactcttttttatgaattcaaattattaaaccatatctctattcattcatttacttgttgctaattgagaagaaattgtagtcataatcaaagctaattgtcttataatatctactaaaaaaagagaatggttaaaaagtatcaaatgcttagtattttcttaggtattatattatattttactgtaaaacttttgtaattattacataaataattataataaaaaaagtggcaacaaaaatacattattttataattttgttacacctattttcggctattaaatatcaattaagaatcatgtgataagatattattagattatgtataaaataagctaaaaaaatatgtcgtcacgtatttttgagttgacacttaacaattaaaaaaggatatgactccaacaaaatcgtaagatatataaggtacttttgccgtcacaattgcaaatattaaagagatttcgccgcaaatatccctgatatattattattggtacaattaatacaaaaa

SEQ ID NO: 389245 - DNA, 995 bp, Cannabis indica
aggaattttcaaagaaagattcaacatagttaatgcaacttgtgtatttatgtttcaagaaattttctttatatattggttcaaataagattgtaataccatgatgagtactaagagaattcaacaacttttgtttatgtttcttagacaactttatgtggtggtatgttatatctatggtcatggattcttgtagattatattcatgtataaactcggtctaatttagtagtgttggacgatttctgagagataattcggatgaaaaaaagaagatttgaaaatggaacaaaacaaaactatgtcttttcgatacaggtcgttcctaagtcgtccttaggggtctaggcccaacgccccatatgggggcccaaaaaataaaaaaagtgtgtatgtatgtaaaaacaaacaaaagaaaaggggaaaaaaaaaacaatagcaccatggaataatcaataatgaaacccttaaaaaagggttttaaaaatggtccatgatatgtatttctatctatttcatacaaaatttaatttgtacgtgatagttatttaaaacattctttaaaattttaaaaaatttaatgcactaagaggtaaacataggttcaaacttcaaacaatctactgcatgcgtgactcttttatttatacttgtgttaaatagactatttggacaatactttttacatagtaaattatgagaaacttataaaaatactgacttttggttgaatctttacaaaaatacggctacacggcagaaataacttttatactgtctttgccaaattttttttcttttatattgtaaacacaaaaaaaatgaggcctacatcttccacatccacagacagaacagaaccactacaggaatatcagaacaatcgaaaaataaccattaattccagtgagattaagaaaaaaaaccataaaatcgacgttaaataaataatcatggcaaaagaactgtaaaacaaatcaaacaaaagaaaggaa

SEQ ID NO: 389246 - DNA, 1292 bp, Cannabis indica
gcttattgggatattacatggagcatggtcgaagttcttaggaagttgagctcacatgcatgtggaatttaaggtgcatattcgggtttcaagtttagaaactgagctcacatgcatatagaatttacaatgtaaaaatttttatgcaaaataattttagaaaattaaaattacataaaaattcccatgccccattaatggcttacaattttctagaaaaataaataacaaaatctaacccaatttttaccaaaaaattaattattcacatctcacacccattcataatacataacaatccattcacaatatatatcacacacatatataaatatatataaatttataagacccacacaacatttaatatatgtacataatggaactgctttgatatcaaatgttagttttatggtactaaattaggtacacaattgaataaaagtttatgattattatcgtatcatatccccataattaccataagtatacattaaatttgaaagtaaaatagatgaaaagatagtttacctcttgaagcctatcaaggtatcctcgagtctttttgtttgtagtatccttagaacggtgtcgtcaaactcacaccttgatcttctagatcttccaccagacaataggactagtgtgggctagtaggataaaatgtatacaaagttcttgttgaattctcaacacataagaaagaacaattctatagtatttttggagaaaagattaaatcagaacaattctttttaggctttccaaaaagttacgctaaaaattcttgttttgaattttgtttatacggtatattaaataaacccaataaagattttatttaattaattatttaaattaaaatcttttcaaaaattatatttaattatttgaataaataatataactaaattctattataaatatttatttcctataactgattgagggaaatctctcaactatctttagagaatatctcaaccactaaaaatatctataactattttttatattcaaatttaaataaatatttatcttttgaattaattaattaataaattaattaacctaaaaacaaatccaatgggaaaaactctatatgataggcgcctataattgtgttaggacatagtgataatggcgtcacctagacattggtggtgtcttttgtagagaaaatctttatctattccccaattaatttaattaataaatttgaaagaaatatttgtttattacaaaataaataattactattttgacaaattaaaatagattttttttcaaac

SEQ ID NO: 389247 - DNA, 1236 bp, Cannabis indica
atgcttgtagttataatgatttttcactccctctctcacatatggcaatgaagtatttataggctctattgactttgggtacaaaagtggtaataggagacaccctactactaggtactcttacaagtgcaggtagtagggtactaacgatcgaggtgtcaggtgttccagggtggtggcgataccactactttttagatgcagaggtcaggagggtacatattgtgggatggtgttattaagctaaatttagtttacgttttaagtgtcctgatcattgtctttttaatcgattgtgtctttttggagatgatttatttttgttttgcttgatttcaggtttaagcatatgcttgggcatttttggagaggattgtgaagaaaatatgataaaataaaagtttattcaaatttgtgctgaaattatattagggtcgcgacgagaaacaaagcacagattgggagtcaaattcccaaactgaattatggccgcgacgtgcgcctttacagaaactttgaaatttccctaatcaaagtggcaccacagtgcaagtgtctgtacgacatacgtttttcttaaattttgaagggaatttttggaatttcaacaagaaaatgaattaggtatttgtttttatcagagaattgggctttttggcaggggaccacctcttagaacatagaaaacaaagtggaaagctttggagatcaagattaggctctaaaattgttgatttcttcatatttagagagtgttgtttcttgacatttttagtgtttttcatcattttatgaatgttttaagttttgaaagtaaattaaattttatgagtaaaaattaatggatttgttgtttttatgactaggtgatgttggaggatgaaaatactcaccaatataatgttttcctagagttttgaaaatccatgaagatccaaaattcgagatttggcactacagtgaaggttagaggttcgttgcaccgagcttagaagaaattcactggcaaggggttatggctacgacgaggagattgtggctgcggcaaagggtgaagctcgccatgacgaagacatgattcttgcttttcaaaattttatctttttctttaaattgtagatctttgaggggatatatataggacctttagggttcgatttttagcacctttaaactgcgtttttgagagagaaactcaaatagagagaaaaagaaaaagaaagagattgcggaacc

SEQ ID NO: 389248 - DNA, 864 bp, Cannabis indica
ttgtcttttctcagagaaaaaatagttaaataatttggacatcatgtttgataaaagttggttacgcttcaacaggtaataagaattaagggtttagttaatatcaagttattaaatgtatagattcaactagattgtgcatttctctaatatttttgaatatatatatatatttcattcaattgtagagcctcaaatgagtataaggaaggtgctaggagttttgtagagacaatagagaaagaggctaattatccagaaaagttattatgtccatgtaaattttgtcgaaacttaagtcaccaaaaggtcaatttgctttatgagcacttggtcataaatggaattgatcctacatacacaatttggtttcatcacggggaagaagcacctagaagtgatgatattgaggaaatgaattcttttgatgcttttaatttgtttagtgctacaaatattgatgattgtgattctgaagaacctgtagaaggccctgatgacaacttcatcaaaaaattagaagatgcacaaatcgcattatatccacagtgcacaaaatacactaagttgtcagctattattgctttatataaggttaagacaactaatggatggtctgacaagagttttgatgagattctcaatctttttcatgatatgcttccatgtgataacgtgcttctcaagtccacgtactcagttaggaaatatcttcaaacatttgacttaggatatgaaaagattcatgcttgtgtaaataattgttgtttgtttagaaaagataaggagaagttagaagaatgtccaacatgtggaacttctcgttgggcgacagataaacttactaacaaggttcgaaaaggt

SEQ ID NO: 389249 - DNA, 1517 bp, Cannabis indica
tttttatggtttttgagtgtggtatgctatattttgacactcttcgaatttgatatgatataagaagcattactatatatgtcatatgatatggaattatgaagaaatatacattatattatttacttatatcatctgtgattgggggttgggttggttaatttgtctttccttggtcattatcttctttttataagatttgtggtgctcaatgtgtgtgttgtattgtctgcctttaggttgttttttttttttttttttttttttttttttatatcgcattgaattttgtattcggagtgttaaaaatgtagtgtactgttatattttagcagacttaaaaataatattgcttcaattgtattttaaaaagtatctcaaatttgtaacttgttaaatgttgtgctaaatttaactgtaaatataacattgtgtgaaatttagcagacaataaatgtcacgtttttatttattattatgtcactaattattataatttattgacttttacgaaatttggcttactttatttaccatattattattatttaaacaattaaaaaataaataataataatttttatatatatttttttaaagaaatttttatatattttcaatacatattaaataatatttaatattttttttacttattatatattttatattttgtgaattgaagcataattataacacaaatttattttttatgtcaaatttaatacaaattttaaatcttccactggagatagtgtaatataacattaaaaaactgtaacatttaggaaaatgtgtgttgtattcaacttaatttttgcgtttgaaatcacatgtcagaatattttgttaatagccgtattcgttataattacaataccatccttgtaaattgttaaaaaaaattttaaatatagtttacagtaccaaaaataaaatttatgatattctaatttactacacatattcaaaaaaatttcaattctattttcgaaactataaattattcaaaaatttataaaaaaattgataatccattttccttttttatttttatgttttcgaaataaatgaattgtaaaccattaagtggtggtggggctaactatgtgaatgtgtgaatatgttggaagttatattatttggagtacatattccaaggtgtagtgagccgcgtagtgtaaaccaccatatcgcatttagtacactacagctaattaaatatatattggcaaaattgattttggtccacgaacacaatacgaattttatgagagcattgttattaacactagtgatattcaacttttttttataagttgtactctatgattagttaacgatatttttaaaaattattttcttaagagtatcttcacgacaaaaatatttatagttatcaaaatacatatatcatcctaaaatattagttgaaaactgtgaaagttgtctaccatgatctaacatcacattaaattaataattctttaagtaaaaataatttttttcttaataaa

SEQ ID NO: 389250 - DNA, 1133 bp, Cannabis indica
attatatcaacatattgttacaatgttagtgtcacgtacttttttatcatccaatattattttctatatttacttattatttcctaatgttatctcaaaaaaaaaaaaaaaccttaattatttcctaggttagtagtgaattatataattcaatttcaatctcacttttatatatatagtttgtgtttatagtgcatccatttaaaaaattatttagtagattctttatgtgctttaatatttaggagatttttattctattttttcttcatcattgtgtataatttatagttatttaggatcacttaattaaaaaaaattaatatttatatgtcgaaaaataaaatttaactattgtattgcatgcataacagttttttttatagcggtggtaaattgtttaaactttattttaatattataaaatatttagaattttctaaataaatatatgcaattataagaaaaataggttaaaatattttttggaggtacatgtatgatcatcatatatatgcatgtacaatgtatataataatagttgcagacatataacattttgttattacagtgcttatattatatatatagtctttatataattatatatacattgggtacgtacgttaattagcatggttcctatgtgaatagaatggattaaataataagctagcgaagagtgtttaccaaaattccaagagtactaattaattctatatagattgttaagttgtctgctatttgattacaaaatgactcgtatatatgatacatgttcgagttagtgatcaatatattatatattatttttatctatatgtgggtgtgtgtgctatacaaaaatatcccaattcatggtaaagacaattatttcctttgccatattgccctaaatggatgtgatatcatttacctatatattatattaagtgtatgagtacaatcagctttattaattattaaaaagaaatctttgttagaagatacgagttaagtgatatagtagtagtagtagtagtgggccaaaaagacatatatcatcaataatatagaccttttatatatctcatcacttcagtactgttatatatatagaggataatatattttttatttattttataattatt

SEQ ID NO: 389251 - DNA, 801 bp, Cannabis indica
gagagagtaagagcgatatacatagaggaagagattacctgaacggaagcattgaagatcattgaaattgcagactaatggagagcgagagagaaagcgagaaaagaggtaaaaaaagtgtttttaacttttttttttttaaaatcattcaaaaatctgtttttaaaaatttacataaatttgattttaaattttaaaaacaaaaacaaaatattttaccgaacgtacttttaatttaaattactaaattttttattaaaaaaacaaaaaatcatttttaaaatgattaccgaacaaccccttattttttgaagatgttgtttctcatttaaatgggcaacactacattccaaagaaacgtcttttctattctatgtcctactctaatttttaaggatcctcttaagctgttgaggttgctcaattcctcaagcttgccaacatcctttgacttcgaactgcattatttaaacatgtctaacctacaaagagaagtcaatctatcaaatccacttggcatatgagttaacctgtaacaaccttccagcaaaagatgcctcaagttcaacaatttctctatctcttgaggtaatatcctaagactactacaatgtttaagattcaaagtatgcaaattatgcaacctagttatagaattagaaagaaatgcgaacctttttgatgaaatatcaagttatcttaaatgttttagtttaccaatagtgctcgatagttttttttaaggctaattagtaatttcccctccgaactttgacatataccaaatcatgccccctcgaa

SEQ ID NO: 389252 - DNA, 482 bp, Cannabis indica
tattgcttcattattatcacaaaaaagtgtggctggaagagtataaaaaatgctaaagtcttttgagatggcaagaatccatgtaatttcacaagtggtatgtgacatggcttggcattcaagttcagctgatgagaaggacacaacgacatgtttcttaaatttctaggaaactaaggagttgccaatgaagacacaatatccaaatatggagcgtcttgtgtcaaagcaacttttccaattagcatcagagaagactttgatgttgatgctagtttcagaatagggagaaacatgagagttgcattgtgtagagaagaataatccttgtcgtggagtggtttttaggtactaaagaattctgcgagaagcctgaaaatagggtagttgaagagaggctaaatattggcttagtctattgacaacataggacagatcaagcctagttattgtaaggtataacaactgttgggttttatgcc

SEQ ID NO: 389253 - DNA, 1415 bp, Cannabis indica
tcgacaattttggacttattttgctgcttagtcaaaggagtcttcttcaaagcttcacctattatccatttccttttatccttgcgaggatttaaggttctacaatcttttgggagcatcagttgttggaggtgtttgcgcattcaattaactagaacttttggccatggcgaccacgagatctgacttttcgggagtgccctttcctccagcactgccttcagtaggtttgtcttgatgattgtccttcagcgtgtcttgaggatcatcttttaaggtctcttgaatatcgacatcagcatcatcagaactattctctgttgaatcatcatctcccaatacaggagcatctaggtctgtatctttgccaacctaatccttatgacggctagtcgcctcgttctgatcttttccatctcctatcttggcattaggatcagtgaagtgaagaccaaacttgttacgagtgagtaccataattacaaaacgtaatttttagatggtatcactgcttccttcaactctcaatgaaagcaccaaaatatttaccgagatttttgaaatactaattataaataattagaattgaagaaataaataattaaaagagaaagagtaagaacacacaaatagtttacgtggttggggcgttaacgagacttagttcacgagttaatgttattatgtaacttaaactagaaaaacctttgcgaatacaatgagcataggctctcaagtttgcctgagtgaatattgcaagagaattcaatcctttattcgaaggattcattgggtatttatagtgttaagaaaattacatttaatttctcttttccctctattgggaagtttacattgaattacataacttgggatgtctcgtaaagtccagcccatgaaggagatgatctgctgactaggaagattagatgcggttgaataagtcaaaactgtgtcctacaatcgtaggcaattaatcatgaattaattgcttgatctttgtttaggaagtttcccttttagcatgatacgatcttctatagagatttgaggagcatttatttctttatttgtgtgcatggataaaaatggaaattggactggtcttccaggaacatgttgtctgactcttcatgcattacgatactggagctgcttccgacggactgccactagcggaggaccatctagtcacggagcttaggtacgttcctagatggttctatgtaacttaagcttggcccaaattgtcttctttggggcttactggtggacctttgatgctgacatagattccacatgtcccttgccggaaacacggataactattataattattaaatggataaaattgtcatttataaagtaaaatgaaaaatggtatttttaaaaagaaagataagtttcaataaaat

SEQ ID NO: 389254 - DNA, 635 bp, Cannabis indica
aatttaataattattataaaggctgattaaaatttttatcacttaaattttaacatgtattacatcatgtccattgaactttttagactgttaaatttttttcaaactattaagattgttaagttcatgaacttttgtctaattttactaatagaaacctaatattgataaaaatttagggggacacaattcgatacatgtcaaaatttagtggaagcgatttgatagatatcaaagtttagagatactatttaatacatgaacaattgtcacgtcacgctaataaaattgaacgaaattggacaaaaattctttgttccaacaatctaaatagtttggtggtaatttttaacagcttaaaaagctccaagagtatgatttaatacatatcaaaatttgttgataaaaattctaattagcctattataaaatatcattaattatttataagacaccacctttgtctatcactatttcccaataacaatacctttgcggttcgtttagtaaatagtattatattttgaattgacttatgtatgcatacacgtaatattttaatataaataaaaatttcataaagtatttacaaaaatatgatatatttatatcatacaacttcatataagtatacc

SEQ ID NO: 389255 - DNA, 1013 bp, Cannabis indica
ttaccaaacggcacctatattaaaaatacatcggtacggtaacactaatatacgaattatgctcatataaaataagtatattttattattagatgcatataaatgtaacatattactaaatcaaatatttaaatatagtaaaaataaacataaaaataaattaaacattatttattttgttaaacaatttcataatgaataaacataactagtacaactaacaaatttataacgaaaatatttatattttaaaaaattactaaaaataagcataaaagtttacatttacatcatcaaataatgaaaatctgtcttttttttaatggaaaataatgaaaatctgtctttgttatgtattggaaccaattaaaatacaacatatatacatgtaaatatacatataaaattattaattttttttgttacaatttaaaacatgtagtcatccaatattgtttattgggattccaaaatgtaatttttgaatttgattgtttgaatatggtttttaagtttaataacaaggtttttttaaatttttttctttgggattagttttagcagattttagacataagttttttgtatttttattatgttagtctttttttatttctataattattcgtactgttgctcatttcttagctaaatatgtcttgtcggaaatttttagctagatttgatgacctggttatctttcttgtatccataaactcattttacatgagaagaattaatacaatcagcctcccctcaaccttttctttaagctctttgcttgaaaggtaatctttagaggttttttttttttttttaaaaaaaatcatgtgagtttacttttttaatatttactttcgttttccttttagacttttatatataatatacgtgaggtatttttaatttttctttaaaaataattattttaaaacgagacatattacttattaaaataataaaactgaaatatattgaaataaatctaagaatatcaaattaggcaaaatact

SEQ ID NO: 389256 - DNA, 2070 bp, Cannabis indica
caatttcggagattttattaaaccttaagtataatatatatgacatatgtgaaaattcatatttttatgatatttactcgataacgatgaaaataccacaatttggctatttaagtcactcgaatttggtttagaatcttttagttagcggggaaagtatatttgatatttagaatatcagaattaaaaggaattatagtattggaccaatttactcctaagtctttagattgcttaaatgtgaagtaaggggcaaaaaaatcatttgtcctaaaaggattaaatttgaataaaatgtaacaaataagcagccattattttattaaattaagataatcaaaaggagaacccacctcttcactaagcttctccttagttcagccctagaggaaccaagaagactaggctttttctccactgtatttcattaaattcagcttgaattcaaggaggtttgaaggtttaaaatttgaggtaagccctggagttctttcattgtgtttctgaaagttttttaattggtttgatttctgggataaattgaagttgtacgttttaagtttacttgagttaattttgttggttgtttgaggaattgagcaagtttgagtttaagaactcaaacttgactcaaaaattgtgatttgtgtatttttgagttagacttgattctattgcttgaattttgtttgttggagcacattttatcgatgagataactttatatatatacttgtgattgataggtattattttattttttagaaaaataataatcacacttatttttacttaaatataggctaaccctgagatagggtaactttcaaatgttgtgagcacttttcgaaagtttcgtgataaagataataattggcgcaacgaatgcacacgacaagattatataagtttacattgatatttattaatttttgaacatttctttcaatttgtttggtattcaaatatactatttaatttatttgatttttaggagaaaatagttgaattggctacaaatcaaccagataccagtaaggatcaagaagctgaggatgatatggatcccacccagtacccacgagacctgcatgttatgacgcaagtactgggtgaaggatctcgacatctgagaggctttggtcatctcttgagattcaaggcagttggagctaaagagcacctgccacgagttctgctgcctcactgactgctactatggaacagtatgagaccttacaaaaaaagtggaggaggcacagcaggaaactcagtattcgaagcaacaatatgaaacacaacaagtctacctcaagttattcaaagattagtttgagtatctctgtctcgggttgtgtatggtttcaacatgcctcgtatagattttttgccgttcctcactcctcctagtgttggatcatcatcacatcgtcccgagactcaaaacaacgacgttgatgacattacccgtctttagaacaatatatattttagaataatttgcgaccaaactccttaaactttaaagtttggcacgatcaaccccgaccctagactagaaaaattaggactaaactcctcaatctccacacaatcgttttactgtgtattcttttcgtcaaatttggtatgttaagtgccaaagtggactgtcatggtgtatataagttaaacgtggtaaatttttattggttcacataatattaataattaaaaaaataaaattaaaatatttaaaattaaaataattaaaaaacataataaattaaaaatagtaattttttttcttaatcaacattttggactccaaccccaacttggaccttaggacccgaactctggcccctgaccccattcccagactcggaccacggccttggccccagactgggcccgaacctgaaccgacttaaataaaattaaaaaattaaaattaaaataaaattatcagaaatacttttgttttctgtttttaaaattaaaaaaataattttacttaaaaaaaatattttattttcattttatgattaaaaaataaaaaaaaatgaaggggttttttcatttttacac

SEQ ID NO: 389257 - DNA, 2891 bp, Cannabis indica
taatatattaaatataatagcttttaaatgatgaacttgggaagataaatacacattttttatgtatgacaatatcttttttcgttgaacgaggaaccttgttttgtcctatttatttaaaaattaatatatgtataaaggtaaatctatttttaattgaaggtgctaatattgagtatagaatctaattaataaaaattacccaataaaataaagaccaacgtaattaatggaaaaaattttcaaaataattattagtcaatttccattttatttttttggctgaaatttgtggtttaaatggtggaattttaagtttgtaacttctcaagattacttataaataaaaataaacttcaaataattttttatttgatggacacaagattgagtaaagaatttagttaattcaaattaccaaatatagtacaatccatgaaataagtaggagaaatcaatttaaattaaattttcaaaataataatggaaaataaaagtaaaaaattatatatcatgttgaagatatgcaacctttggtattatttatggttacaatttaaataattaatatattagaaattccaaattaaagtgaatgggttctatatatataccacatccttaaacaattattttcacaaacttctattgtactctctcctcttctcttctaatatcatttatattgtctcctaaaatcacttctgtttatcagtcatagatatagatcaatttgtactttttcaactgcctattcactacataatcagtgcgctaaaagagcaattgggtattctcaagagttttgcaaatccgagactcaccacatcccacgatggattcgaagttgaagttatcaactgtagtatcgagcaacaaaagaaacgagaagatttgtctacaagtcttgttggacttttggagaaggagatcgatatgtggaaagaacaacttgaaattgcaaatttcgatatcaaaatggtacatgatttcgcgactggtggtgacaaagaaagatatgtacagtttatgcattccatcatatatagtgagtcaatgaatctgacaaactatgagttggattaaacttgtgcattaaacttatttagaaaaaaatgtataagtagattggtttatttttttttctcaattaatgaaattacttctttgttctttcttctattcttctttgttttttttatttcatctaatcaaaattatttacttaatccgagattctatatattttttaatatagttttttttaaaaatacaatatgttcatttagtattcctaacaaataaaatattttatttttctccaaaagaaaatattttattataactttctttaaaaaattaatataatattttattggtgacatctcctcggagaagattaatttaataatacttattctcaacacgtgcaactttttattatttcaaaaataggtggctgtaaattatgggaagtggaaaagattacaacatgtaataattgtgagttattgaaaacataaattatcttttgaataaactaatctgaaaattatgtatccggcctcattttaaataaccgagaataaggatttaaaacaattaaaaataaataaatataaccatcaatgttaaattaatatgaatggtcccaaacaaaattattaatatattatgaggaagccacgggtttaagtaaatgcattgaaaattaattaaccctattttattttagaaatattaagcaattaaaaaggtgcatgtgaggagtcatcttttatttctctcttacttttcacactttcaatgcacggtgcattatgcacccaaataaataatgtaaacccataccttgatattttaagtagttcatgttaattaagagtataatatttgggaatgttaattatatttttgttattttattttgtttaaaataagaacagtgctaatgctttatgtttattgtaacattgatttagaaaaatttaataattaaaaatgtttataaaaacacaaaacaaataattttatgaaatttaaaaagataaaccctcacaactagaaaaagagcctttaccttcggttattatataaaaccgaagacaagtgttacttttctctttgatttttatttaataacggaagagaaaaaggacctaactctgaatatatttcaattattatttaaatctgaatatatattaatttttatttagtatttaattatatattatttttttgaaacaattataaaataattataagaataaatagtttccatgaaataaaaatcattttaattatactgtataacaaaattaagtataaaaaatattctaattatattataacaaaattaaagtatacaatacaaaatatactaagtccctactaataaaaattgtacataaaataagtattgcttaaattaaaagtctaaagctaaacagtttgaatttttagaaacaaaataattttttattaagaaataaatgtttattattcattatattttgaataattaatatttaattaattttctattgaaatataatatcaaaattataaacatataaagttatacggtatatattttaaaattttttaaatgtcacgtgcccttcttttatttggggacttaatcttgcaattatactaaatgatcttaaattccacttactataagaaatctgaggtttagctgcaagtaatttacttaagaatatatatttgtagctgaagacagggtttacttacaaatatatatttgtagttgaagatagggtttaccaacaattatgttggcggcaaatttttccgcccattctaatcaagtagtgttctccacggtcttttatctacaaatataaattatttttttatttgta

SEQ ID NO: 389258 - DNA, 1726 bp, Cannabis indica
tataaaaaaatttataaaattataaaaaatttagaattagaactatatattatatgttgctaattgtgacatcagattatatattatcataatgtattcaacagtcaaacgatttcttacaaattaatattattaacatattacaattgttatatttatatttataatattattatataaatatttttataaaataatgaaatataatatttaagtttttctaacaaaaaatggacaatccaattcaatttatcaactaaggacagtccaattatatacggatccgactagaatgaaaaagtgcaatgtacaaaaattatattattgtctcagtcgaagcgaaggaagattaaactccacccatgagtatcattagttttcttacctacaatttttagacaaatattatcttcaattaagttatgtttccttaagtattggaatatcaattttagtttatttttggattaacttaagaacatatttaaattatgaagctttcttaaacacaaatatatggcatccagtatttatttttaattataaactatattatttaaatacacataataataatctcacctaataactaataatattttattttttaatttttaattgtatcacttttaaataacgtaaaaaaaatctagcataaaatttagtatacgtgcctcgcacgtaactttttgctagtataaacataaggtcttataataattacatacattagtgtcatttttaaattttctattattaataaaattaacacatattaatgataaattttttattagttatatgttttgtaatttttagttttatatagaatattaaattttaatttaaaaatctaattaaaaaattgctcattgtgtttgctttatagatatttatgaattgttgtgcttatttatattttgaattattttaaacacttaacaattttaaatattttgaaataaaaaactaaaataattgaaatttaataaaaatttatgtttgtttataaaaaataatttaataattttttaagctttgataaaaattaaaaaatgcaaaaatatatactgcatttttctaagaaattataagcaattgggcatcaattatacatacaaaaactatgtaatattaattttgcacaaaaaacaaatgaaagaaataattatctatgaataatctctaagtgtaacactacattatgtgagattttttttttttaaattaactcactaaagattgaaatcactaaaattttaaaaagtaaataaaaaatgtaaaaagaaaatgacaaaaaaatataaatttaaataaaattcatagaaagcgttatgttatcacctaagtttctcatttataacgagatatagatagatagatagatatatagatagatgttgattgggcaagaatcatcaattacacatacaaaattatgtcatattaattttgcacaaaccaaagtaaaaaaaataaaccctaaactttaaatttaactcaataaaaagtgaaatcactaaaattttagaaagtaaaaaaaaaatgtaagaaaaaaaatgaaaacaagataaattagaataaaatttataaaaggccttttattactcttttaaacattttctttctacagatatatagatatagatattgatagaatatattatattttagaagagatttcaatggttacatttttattataaccatcattgttacatttttt

SEQ ID NO: 389259 - DNA, 937 bp, Cannabis indica
gagtattattataagacactagtggtgcttaatactttttagatgtatcgtcttgtaattggttagtgatactctttaaaagctattacattaaactatatgaaattcgatgcttaaattaatagcgatattgacacataaaaaggtgttacactactgatattttttagcatttctcttattttaaacaaggtcgtccttaacgtaagacaacctgtagctgttgcccaaaggttctttagccaaagaaaatctcctaatttttatttttttttacataaattcataaacatggccgaccttgaaatgagacgaaaaagactattgttttaggcccctcaccactcaagttcccataactttttcacccataaactctctaaaaaatagatagaaaaactacttaaaatttgattttaaaggtgcattttttaaattttaccccaaatcccataaaagcttgagacaaccttgatttcaagtgaaaaataaatagaaattatgtatatatatttatataaataaaggactcaccatcgagatagggtgctttagtagctgaagaagcaaagccaacattattgtatagagaagaaatggagagaaagcaaagaaagaggagggaagccatgtttagaggagaaaaacaaagtagagatacttgagtactataagtgatatatagacaaatgaaagttgagtatattattattttattttaaattaattaaaggtgtagtgggagtttttatttttatttttagtaaagaaaagatggccaatccataggtatagtttagtgtgtcgtgattattattattataggtttagaaagccaaggagataacaattaaagaagaaacattactattaggcaccagtggggcctagtactttctcaacatgtcgtgttgcgattggctagcgatactcccta

SEQ ID NO: 389260 - DNA, 640 bp, Cannabis indica
gtcctcgaccctctctgtttgattggtgttgcgaccgaatcgactatcgaaggcctagcccgcccctctctattccatttaggcatatatatattaatttttatttttaggaaaaaatcacagttttgaggcctttagaattttaatctcagagtttctcacttctcaatctctaattcttctatggaattttcttgatgaaccatagatttatgaatgtgtgttttaatgtacatttattcatgcgattacatgcgatttgttctctgattcaattttcaaagtattttacaatctgtgatttgttcatgtgattacatgtttatatatgtacatatgtttttggagatccttttcttttgaacgatattgtgtagtgatggtggttcacggaggctacggtgatgtagtgttgcagttatcgtatggtaacattggccttttgcagttattttatttatttttaattattatttatttatttattttaaatttcatatttttgttgcatattttttgcagttatttttaactatcctctatagctttttaaggaaattataaatatcaattatttttattttatttattttttatttttttagcacttattttataatagtttatgattttatttttt

SEQ ID NO: 389261 - DNA, 590 bp, Cannabis indica
atatatataatcttatacatatatataatcccaaacaagatttcaatcgacaagcattatatgcactattctttatacaacacaaaatacatatctgctttatattttaacaaaatacaataacgaaagtgaaagttgacaactattatcacttttgacattttgacagaactaattaaaacaaacatcttttcattagcaattatgtcttttggttattttcctcaaaaataaccaatcgaaatatcaatcctaaagcattataaatgcttgctttcaatcgtaaattaaagtttgtatatatatacaaagcaaacttaatcgcacacagaattttggttattttcctcaaaaataaccaatcgaaatatcaatcctaaagcattataaatgcttgctttcaatcctaaattaaagttggtatatatatacaaagcaaacttaatcgcacacagaaatttcaatggcataaatatatatacgaacgatttgaccaaataaaacatgcatatatatatacaacacttcaccaaatgcaaaaaaaataatttaatggaagatcaacactaccatatattctcaagaactaa

SEQ ID NO: 389262 - DNA, 2390 bp, Cannabis indica
taagtgctaatgtacttctcttatctcgcagatatggatctggatttggagaacatgttcaagagtcctcccacagtcgacaagaagtctaagaagagagctgctgaagttggtgaggcctcgggttctacgaaataacaaaaaaggaccaaaaccacgaccaacaagaagaaatcatcaagccagcttaccatcgagcctactaagtctccagagaatgaggtctttattgtgaaaaattctaatgaacaacccactaggtcagtgcaccaggtgaagttctctggttctcgtccagagatggtccttcttgagtcctcttgtattacccctcaaggtcagaacttaaggctcgcaactcttctcaatgcattctactaatgagtggcataacttcttgactcttgggtctagcgactgcaagtttctcacgacagcactaaggatcttgcaaaaaggagttacgagctcttgcattaggttagtttccttttcttcttgttctcacttttcctcatcttatcgccttaagtaactttgatttgcctccttcttgcaggcctctctcctatccttttccactcatcattggtcgtctcagcaggctgaaattcttgagactgagcttcgccagaccaggaaccactgggacacttaagccaaaaagtggaatgactcttaggctgaggtctctcatgcaaaagaagaggctgaaaagcaacgtctggccgaccaaaagaaaatcaaagagcttgatgattctctcaagtctctccaagctaagcatgagaaaaagcttaaagagatggaggctgaaaccaaggaaagggttaacagcatcatcaggagaacaatttatcagacctggtcggccaatcttgagatggacttcagctttttgggtgaaggagtcgacgctatgctttccttatgcaagaaaggagagaagaactgggcaaggatgaagaggtcgaagtggaacaagaagatccgtccaatgctcctacaacgtaggcttgctttttaagttgcattttttttatatatttaggaaaatggcgatatggccaagacaatggtttgccccttgtggcacttttgtaaagataaatttgcatttttggatggccaactttgcttttattttatcttttatttattaccttgcatttttaaatttgaacttaatatatttgcttgtttgcatttttattcacaacttaaacaataatactttgatcaaatttaaaatactttaagtaagcatttccaagtctcttgttttccttttgatattacctaagtagttattaatctactatgtacacaagtagttatcatctgccatgctttctatttgcgagcagtttatcagttctactttgcgtaaagatttataattgatttaagcaaacttaaacatacttttaataattcatcttgtgaattagtttgtatatttttgattgcctgtatgaatagttaggccttctattcacaccttaggttaagtatttttccaaaggatcttggtacctcatttaatacattcctatcaaatgggagttgttagatactcagctttgcatgtagcttagtgtttttttatgagttaaatctcatttacaactgctacttttgaatttgcatcgtccatagatgacttccatcaattacttgaaaaattcttaaaatttttaaaatggagtgggtttgcaatatattatgtatttatagataaattccatttgatcatacacatatatatgctcctcatgtaattttaaagaataaaactttttaattacttggaaagtacttcaactttattaataattgaattttaaaaattacatcagaaaaagtgattacagcatgtctttgagtttactggtagtaggcttgcaaatgctcaacattccagtggttctttatttgcgagtcgttaagccgagctaatttttaaaccccggttctgactattgcctcgatcacataaggactttccctgtttgggttaaattctcttacatatgcatctctcgtgtttgcaaatacttatcttagcaccaagtaaccaatgttaaagagccttttcttcactttcttattgaaatatcttgtaactcagtgttggtatgctgcattagtaatttgcgactcagtacattttcttcaagtagatcgaaagataatttcaagagtccttggtttcttcttgattatagtctgtgggtcgcgatattgacctctacttgcagcattgcctccgagccaaatgtgaacgagaatggagtatgccgtgttgctgttttctcagtcgttctttgagcccaaagcacttttggtagttcatctacccatctcccttttgcagtgtccaactactt

SEQ ID NO: 389263 - DNA, 904 bp, Cannabis indica
tgagatcagatagttaagacaaaatgattttaaaggctaaaaaatgcatcaacttttattcaacaaaggctacaacagtcccgaccacaccaacacagctggtaaagtccctatccgtacaaacatccgcacaggactttgggggaaaaggttatcctaatttttatcctcttgatgttggatgcttaaatggataaaattagtaccacatggtaggacaactcacacctaagaaaacggagacccctggcactcaaacgggcatcaagtgacaaaccagctccctcaaaggagctggctgccccctctggccggccataggtgctctatagggttttttgtgcacttctacatgtggacagtaactcatggactgggaattggaccctaaaagcccaataaaatggctgaataatatttagatttaagggcattttagtcttttgtaattgtctagcaaactatgcaaatatatagggtttcaaactgaaatcttaggtttaggccttttatataaagaccttaaccctagcctagaaacttaagtggagtctaagcctgaaacctgcctccaagctctaagcctaagtgtgacagcttctgtcctcctcacttcgtctctcacacacctacactagcatcatttcaacatttgtgttttgccactattgattcatacgttgtattcctaacggtgctatagcagatcctatctatagtggtctagatagtattaaccctcgatattaatataactaaaaggggagtaggtcattacgcgctatcacaagggggttgaacctccataacaaatctgtgtgtctattgctttttattcttatttgtaaaaaaagtggcaagcatcatatccatacaaccccattgtcggttgatcactttttga

SEQ ID NO: 389264 - DNA, 1355 bp, Cannabis indica
catcatgatccaagatgaacaaatgacacttcaatattattgaagcttcaaaatgccactcgaaccctagcgtcatacacagaaaagtgtgtagaaaaaaagaggactgaaaatgtttaaataaaatattcttaaataaagattatcctttgtatatatattttgaaagaaaagattgtatagagacacataaaaaacaaacatctgctcaaataaatttcttacaaaattaataacagatgttgctagtacttgagtggtgagccacaccattcgctaacatcaaatatattttgagccaaacaatataaaaataaaagaaaattagtaatagttgtctttatttttgaaacataagaagacagatcctttattccttacaaaaagtttattgtaaattatttcaaaagaaattgagatttaagggtacatattgactacatgaacaaatagaaggcatgttcaagagaaaaaattatccaaaggaatatatagtatttttggcacgtctcctgcattataaaccaaaagttaaacaatcatataacttaatttcaaatatgtaacaaaatgaatattatataattattatgatctaagataatttaaggtgtacaagttaacagaaattggaactcaagtatacaagttaagataatttattcattttgtgggtacaaattaagataatcatttttttttgtgcttgtagaaattatagctcatataaggatacatattatagttataacaaatatctattagtactttaatttgaacgtctaccatcaatcatgagagattggttttgcttaaactgacccacaacatgttggtaagttggtttatacaaaatgggcctatcatgttggtcaaaagtgagcatgggaagctgattatgtgagaactaacctccctcttgtagatatggaagatcggttctatgtgaacgatcatcccatatttgtagaagacatgatagctctaggttatttctctcacaatcaacttaccatgctataatattaggtagagctcctattaattttcatgaaattttaaaaaaagtttacagtgctcaaaataaattttataggttagttgcacatactttttttttatacgcgtgaaacttgaattcggttttcaatattgtaaatcatcatttgatattttttgaaattggtgaaatgtctcctctaactaaaatttataatatacaatgttatataatagaaattggactacaatatatccatacgtactaaaaaaataagaggttttttcatttttacattttaaattagttttttttttagcatttttacgaaatctacatagaaacccctattgca

SEQ ID NO: 389265 - DNA, 526 bp, Cannabis indica
tgtgaagtaaggatggtggagggaagaggtttagtaaaggcgtcagcgagttgtagtgtgctgctaacaggaatgagtcggatggcagactttgtgatttttttgcgaatgaagtggcaatccaattcgatgtgcttggtgcgttcgtggaaggttggattattggcgatgtggattgctgattggttattgcagtagatgaatgccggtgtaggttggtctatatggagatcttgtagtagatattggatccaagtgatctcacttgtggtggaggccaaagcacgatattctgtttcagcagaacttttagaaacagtgggctgtttctttgtcttccatgagataaggcaatctccaatgaaaatgcaatatccagtagttgagcgacgagtgataggacaagttgcccaatctaaatcagaaaaaccgcggagatgaagagatgatgtggaagagtataagattccttgaccaggtgagcctttgaggtagcggagaagatggtgaagagcggtcaaatgtg

SEQ ID NO: 389266 - DNA, 1907 bp, Cannabis indica
ttttttttaaaaaaatattattggaggttgcatcatatactaatttaaccttgtttatatataactgttttgtactataatatattaaattttacaatagtatatgtgagttggatatgatatattagttcaattttattaactatggtatatcatagttgattaaaatatatatcaatatattaggttaatattaggtacaatccacatatatttagttacattctcaattttaattttagttatgtgtatcttttatgtaacatcttattagtttaaatgtgttatagtgatttttgtgtaatccaatactaatcaacgaatttgttaaaaattgtgattaattaaaatttcacttaatttttttaaattaaaagtaaataacttttatataaaccaggatctcgtatttaaaatatttataattgtgataaaatatgttgtctagcgactatacaaaatacaacctactatcccaaagatcgtacgctctacgtctaatcaccccgacatgtacaatcttcatccactcgcactcactgctgttcatccttagctttgcccttacctacacatgcaaacagtaactgtgagtcgacagactcagtaagaaaagcataatcataacatatatataaatcggattacaactaggcacccatacactcagtcataatcctatccccacgtcccacgcgatactgagtctagaatgtacgtacgacagtactattgaccataatattagcctatactcggtactctagtcgtaccgatgtgatagcgtcaatcagtacttatgccaaacatacattcatcggtatccagtataactctatgtatactgatactgctattctaatgtaatctaacagacaatcataaatatgtatactaaacatgtaatcacatatgcatatcattatactaatcttacctcaattccaaattcaggtgtgtcggtcaacttgagtagaattgctgctcaacaatttaaaatattcgtaaaactgatgagggatacgctaaatcactttctggagagttaaaatcaaaactaaaagtttttctatcgatggataacatggtaataccctaaatattgaaaaaacatgaaaacctagggtaccctaaactaccctaacaagtaaaccagttcccaacggaaaactggttccatggggtctacctagggaggaactggtagaccggttctacaggaccaaattaaatcggtcgaccggttcagtgtaggaaccacaaaaaacctcacaaatatctcagattaaccccaatttgttccaaaccttccagagtacctaataagaccataataaacttaactgaagcaataactccaagtaagaacctcggaaactgaaatcaccattaaaggtcaaagttaaagctcaaactttatccaaacttagccacaagccacaattcacacacaaaacaactcaactaactctaattcaacatcagaagataaattctaacatttctcaaacatacatccacagaaaactaaaattgtagaaaatccaacttaattcaaggaaaattctaaggtaaaaagaagcttaccacaatcaaagcctaccaccaccttgatttgagttaacagctccctaaatgctcaaaattgaaggtgcaaactctggttttttgtgagggttttcctagggccgactaagagagagagagagcggaaagagtataatatttctgcaattttctaatttaagtgaaagaaaataaacctaatgtttatctatcatcgaacactataaattcgattaataactccataataatccactaatggacaaaagccaacataagataaaagaccattttgcccttgcttaaacaaaagtaaccttgccacctaagggcattttggt

SEQ ID NO: 389267 - DNA, 1485 bp, Cannabis indica
ttaaatggaaattttctttttgtgattatgttttgctttttctatgaaaggccacttgtgttttgaatgtatggcataataagacaaattttcttgtttattattttctgtttccactctatactattgctacatttggtattttaggtattcacagagagacagggaaaatggaaagccacaacccagtcaagagaatttctgaagtctattaagcgatactacagtaatacttgtactgatggtgaaaagcaagatgctatgaatctgtatgctttcctcattataatttcatgaaagtttctttattactatttattctctcatacgaacaaaatgaatgtggttgctgatctatttgataattttgctataacttgcttcttgttttctaacattaccatttttcttgaaagtttacaaaatacattttttacttgaaagtttataaaatacataatactcatagtttctgtgtctctctttctatactatttcttacaactgaaggtactttataatttaccagatttctgggttacttcaaaccacaggaagggaaacctgccctttgggaacttgattctgattattatcttcatgtctctgggattggagacgacctttttccagatcggtggtaagcctatgtgttttctgttttatgaatttatctttaaggattttattcatgtttaattacacatagctagtcataaaaagctaaagtgctgcgcattatgtgtggacattgttcgtagatcttaattctgttttagaaatggttcagccatggacattatcattttaaagaaaaaaaaaaggttcttgtttaattttgtagtgttgcctttgtatgaaaatttagactttttttttttaatatttcagtctagaaaccaacaacaagcatgtgggagctggatttcctctatcccctattccagcttgcagagaggatttctcacaaatgaagttgacgtcatttgataaattgattgaaaaaacttgcagttcaataaagaatgtaaggctttgtcgtgagccaaatcagagaccaggtggtggtgcaggaagttatggtgtggctcctgatgcagcgtaataactttttctcaataaagtggtttttaatattgcagttaatgatttgacatttggttaccttaaatgtttaacttttattgttctatcctctaactgtgtgcttcaatgtggcacacacttttcgactcaccaagtcatgtttaatgtgcttgatacacactagaagattaaataactaggatgaatcttttattgataaacagagccaaaattcaaggggtttccaagctttcgagaccttggatatcttgctaggattgaaaacacagatgtcgcctttgctttccaatggtcatcttgcaaacgctggatacaacaagatgtgcctagaattctgacaaaggatgccactgtgtgtctcattgctgctgtcggagt

SEQ ID NO: 389268 - DNA, 1712 bp, Cannabis indica
gaaaacataacaaaccacttgtttatcagaatacaatctcttagcaacataactaatgaatgtgtggtttgataacacaaatgaaaccagagaagtagctacacctacacggttggattgaacctgttaactaagatataataatttcttttcaatttttgatgatgatgatgatatattagttaaattatttatatttttgaattgaaaaatgttaaagtgacattttaaaggtgccaaacactataaaatatgttaaattgttattgatgtaatacaatatatgatctttaataaataatataaaaaaaattgctaattattcaatattcataacgagacacatcaatgataacaatgctacttttaatttggagatatctttgaggtgggatgctaaatttgggcctaactctctataatgaagccaaaccttcacaactaacatgtaacatctaataagcccaaaatatgaagacaacaccctgttgaccaagctaatgtttgggaaaaggaaaaaggaaaaaggaaaaagatagatgaaagaaaagtttggatattaaacaaaatatatcacaagaaataatttgtatgtttggtagtagagaaaagagagtaaaatagaaaaagaagtggaaagaaatgagtctcaacagaaaagcaaaagggttatcttcaattttgaagagaaaaatgtgtaaatttttttcaaactctcaacctaataagaacatttaattattaatatacattttattcttttaactatgtttgacaaattggaaagagagtctctgaaggatgaagagattggaagagaggaagctggtgatagatggaataaattattattttgatattgtatagtattgagagggacatatttgagtaaattcaataataataataataataataataataataataataataatattaatgatattaataagggtaaatagcggtttaactacccaaagttttaagtttgtaagcggcataaacccacctattttaaatttattaaaaaaagatttggaagtaactgatacaacatatttttcgtccagaccaaataatctaaaatttgggtcttatatgtgtcctatttaagacaataacagagtctgtattgatgaaactggaagaaaattacaattttataaacattgggtacttatgccactacaaaaaattattgggtttatgccgcttacaaacctaaaactttgagtacttatggcactatttaccctcctaataataataataattacatgaaacactattttttataaaaaaaaaattatatttttatatttgaagattttttattttacattttttaagttttctatagaaataacacgaaaataacaaaaaaaattacgtaaaagtaataaaaaataacattcaaacaacattaaaacaacaacaaaaattacatacaagtaacaaaaaccaacaacaaattaacaagaatacaacataaaaagaccatagtttctataaataaaatcataaaaatcgtaaaaatattttatattttgtacaatcgcatttttgtaatttttattattgttttgtgtatttgcgaaataattccagaaaaagaaataatgtagaattattaaaactatttattagagaattctactattcactttttgtttttatttttttattaaaaaaatttgtcttaattatag

SEQ ID NO: 389269 - DNA, 825 bp, Cannabis indica
gatgcatgcactatttaaaatgctggttgaggttgtcatggacccagttagttaatatttcatacaacttgcactctagtaattatatgtacagacataaatgactacccaaacttaatacacatatagttatatgataagtaattttaatcaaccatctattcctttaagatgatcattttatttattaaaaatatcttaccatataagtatatttcaaatttatgaattttatgtataatttatgtatgcagatattatttttcaaaacataataatttgaatttctaataccttaggtaggtaattttttttttaacagtaggtatttttagtaggtgttaacggtaaggtatagtaattatacaaagtataataattaaattaattatatactttagtttaaaatctaataagtattatttagatattatatatgaatttttattataatttttagcaacatagttagccattaaaaaaatatttaataatatcaatatttaaaattaagagctaatttaattaacacttacttctcatggagttatggttgttgaaaagtaattgatatatgtcccaacaaattatattaattatattaattacttatggtcccttttctgtcatattccgtacacctaataaaaatgaacattgctattaggtactagtggtgcttagcacctttgcgacatgtcgcgttgcgattggctagcaatacttccctaaaagctattatattaaattatatgggactcgatacttagttagaccaatagcgatattgacacataggagggtgctagacaccattggtgccct

SEQ ID NO: 389270 - DNA, 1117 bp, Cannabis indica
aggggaccatgagcctataaaaccgagctctcaataagtagactgttgaatttaaggatttttgtccacttttagtaaaaaagtctaacatgagtgaaagttcaggagcatgatttagtacctaaacaatcactgaaatagtaaaattgaatgaaattagacaaaagtctttaaatctaacaatctcaatagttcagggggtatttttaacgaccttaaaagttcaaggggcatgatttagtacatgtaaaagtttaaggagcgaaaatcctaattaactttttgaaaaatatgtgaaacaagttgtttggacaatgaactgaaataaaaaaaaaaaaccaaaaacaaatagtttggcgacgttctttttcttaaatctgaaaggttgttcttatggccaaaatgtaagacaaaatagatggaattgtttcagattaaaatttgagggaggtatccttatttttgggtttacaaagatttttaatagaaaaaaagtttaagttgtttgaagaagaaaaaaatatttctcagacttaagagtttgttctttgacttgagctgaggtagcaaatttcaaatttaaaaagtttgtcgatgttagagctagaggtagcaaatatttatcagactttagtttttttttcaccaaattagacttttattattaatatttctttattttttttttactgatttttaatatattctgttttagaaaaactattatagaaaaaaaaacatttttttaatttttatttatattttaaatgatttttaaaattaaaaataaaaaaccaatcacaaagtgtcacgtgagtattgacttaacacttaacagtcagataactacaaatgtctcaaactcctaacaaaaagtatttttatcacaactcagagtataacttaagtgttcacactatataaattaatcttacaaaacaaagaaatagagtagaacatctattcaagattacacttggattaagtaaattatattctaattggaaagatataactaaatagaattacactagaaaaaaaattaaaaaaccaaaaaatatcaatgtaacaataataacaataaataaacattaatactaaaaaaattaaaaaacta

SEQ ID NO: 389271 - DNA, 1416 bp, Cannabis indica
tttgttttagaagatcaatcaatgttgcttttggaatgctattgtcaggttcttgaagttatctaatgaaatttaccatgtatttgctttctagtgtccagggaggggcatgaagagaactttttaggtgttgtgaagcatctaaatcttgtgaagctagttggatattgtgccaaacatgatgaaagagggattcagagacttttggttatttttattcttcaatgtttcacctttgtctcacttccatggagacaatctgttcaagaacacaaatacatatccaaatgagacaagttagagtcaaggtgtctcgatcttctgcccaaatattacttgtttctatttttcgtagccacggtctattactattacccccgccatttgttttcgtaactgtgcgcattcatgaatgagccaccatttgtggtatggaaccattgttgaagcaatgaagctctacaaattagagcaatttctggtagataaggttaaggggtgtattgtggattctggagttgcaaagccatttagtcccaaggtcgaatatttttcttaccgtgttcaagttcttattgttcctttagcttttaataaacttgcattcttgtagagattttagtaaatatttttctttttatgatttgctctagtgagagaattgattcttcacggagacttgcctactaataatatgttagtttctttgatttatatgaaacctacctaatatagtgagagttttctatttattgcaaatttgtattaattaaattttctttagtgaaaaagttaggttgcaaaagtctatgatttttattagtgaaaatggaattaaatatcataaaaaaatttatgaaagtaattaacattgaacatcatgttccctagattttgatatctaccaaattatgtcattcgaattttgacatatactaaattatgacctctgaactttcatccatgttagacttttttactaaaattagaaaaaagtctttaaatccaacaattaggggacaaaaatcttaattagccaatttataataatattaattagaggttgttcttgaactcactttctcttattttctttaatgaaaagaataatatagcttggttaggatcaatacatggtgacatcaaagtacacaaatggatattatattcaaattgtagacatgcccacaaaataaaaatttagaaaagaagccataaatagagtcaaggaactaacaataaaattctaatctatgttgaaacgatctagattaaattaataaatattccacaaatctaaaaacactaaacacaacactattagaattaacaaaaagagaatcaaacagcaaaaaacagtactttgagaattaaaccatttcggaagtagcattgccacccccaaaattctaagat

SEQ ID NO: 389272 - DNA, 2871 bp, Cannabis indica
caccgtaaaatttcccatattatatagtttgaaagtataccgtagctgcctatagtattacatagcttctttaaaaacataaaatagtaaattcgtaaattctaggtatattatttctattacttctattgacgcatctgaatcaatgtcatatatgtttcagtcctagaggtaatacgttgatatgtccaagctatccacatttggaagcctaaaaatcaatattaaccgattaagattaaaaaaaaataataataactttaacacgtaaagagtttaataatattatgaatctgaaagagccagtttaatgtatgtactctgtccaaattatgaaaattatgaaagactatgcatattacttgcaatgatcaaatgcccatataataaaaagtaatatccattttgtaaaagaacaatatacatgttgttcattttaattttttttgacatctctaactttcattagataaaaatcatcaagaacaagttacaagcattaaatcagtttggaatccattcatgacttgtctagattgttaatatctgatattgaaaatcacttaatggagacacatcatcaaagtatttgtttaaatgattaaccaaagaatgagtgtctcactataaaaaatcttatttttagtcacaataaaattgtgagtaaaagtaaaaaatttgtaactaattataaattattattcttatgttgtgactaaaaggttcgtggctaaatgtattagtcacaaaaattgcaatttgttgtaattaaatatatttttagttacaatacttgtggtgactaaaattaaattagtaataatttgcaactaaatactatgttttagtcacaagtaacattttgttgtgactataagtcatatttagtcacaaaaaaattatgatcttactaaaagtagtagattttagtagtgtatatttccatatttgttattagtaggtgcacgactgaataccaaagaagaatatcaagctgttagtttaggtatgcctactaatacttgtccacgtgtactatgaactcgaactgttttaactatatcttttatgtttggtagtttatttctaacaacctaagtgtatagataattcgaaggctcatttttaaatcattcatttgtaataaatacaaaataattagaactatttataagttttctctcaatttgtcttacgagttattgagttcttagcaagaaggttcaatcgagtgagcctattctgttctagattaaaataagattggttcctaccgaaagtgatctaagtttttgactcaacacctggtatcagagctaggagattgatttgagtcgagtcttgatttcactacaacaattaaaagtagtaccggtggagacctccgccggtactaattgaggaaaccgtcgttattgagtattatcgataaaattcgtcgataatcatccgtcggtaataattggtcgctaatattaatattagcgaccaaaataaatttctgccaataataatattaatatcggtagattaatagtggtggggtccgccagtattaatgtttgcccttttaaacgctgtcacattaataccggcagaccacatttagtattccgtcggtattaatattttttatataaaaaaatatttcagtttttaatatttatataataaataattataatgttatatataataattattttaaaaatatattattagttagaatttaaatttaagaaatcaaacattaatgttaatttatccataacaatatacactattatcttaaataaaattataaaattatcttaaaataaactttaaaacataaaaatttacttaattaaaaaatcaaattatcattgttcagatcagtaaattctataaaatcatctgcattcgagctaagtcttgaaccatcgccattatcacgagattgaggagccggcaggatagagtaataaggttgtccaaattgttgcgtaggtaagatctccacaaattatcgagtctgcggacgaaccaaagtaggttattgttgttgctgactctgcacactgaaaatcagaccatgcataggctgttgtggagatcctcccatttgaccgtacacaggttgttgctgcaacaatgactcaaattgaccgtacacaggttgttgtagggatgacctaaattgaccatacataaagtattgttgttgcgatgagcctccaaaatggccaaccataggttgttgtgtttgagatcttcctgtggcatctagaaaaaatataagaggagactgtgagggatgcccgaacatgtaatgtaactgaggcagtttttaggagctagcagacatgttgggagaattgttgttgttgttgaaagaaatgaggcatttgaggcgattgttgttgttgttgttgtggcattgacactagacgaggggttgaagtggacgcactaccttgctgttgtgatggtaaaaaaatttgtaaaaaattttcaaaccgtgggtcaagtagagaaaggtcactagaggtgccagactgatcaatcttatcacgcatttttaacataaattcagcaaagactcccatatcttccgcactaatggatggagaagggccttgtgatcgagcttgactttgagtacgagaacttgtcacccaacagttttttaatttataactcactcctctttaatagtccgaccgattttcaagaactttactcataacttaaaattatacaaactataaattttaaatttctttatcaatatattatgtatgtattatatatatataatacatatatatcatatatatacatacaaaattaaataatatattttttaatgaatacacatataaacaaata

SEQ ID NO: 389273 - DNA, 587 bp, Cannabis indica
attagagaccatttaataaaacccaatcaggaagaagttgctagtcgctataggcgtttcctacaagaaataactgaaggtaaatattgctacttgcgagatgtagcctggcttgaccctttgtcattatcttctattcctttggctaaacccttatttttacccaaagtcacaattgatttttcaccaggtgacctagattttgaaattatgtcttccaagcctcgtaaagactccctaggatcccactatcacctttgaggctgagcttatcgagtcaaggataagagctataggagactgcattggtggtgcttgaaggacttgtggtatcgaccaaaggtgaggatgtcatgttagatacgttgcccctggtgaatttagttgttatccactagagcgacttatctgcgaagaatgcaggggctagtggtgaaaccaatggcgaggccagtattagtagctcgattgggataggtgcttggagcctcgagcatatcaaggctggagcaactctccccctgagagagtactttaaagagttcatcaaccatcttggaattgctcctttccaattggttccaatt

SEQ ID NO: 389274 - DNA, 612 bp, Cannabis indica
taatcacactgctggaataggccgaaagagcaacatcaggaacatcagtggaggcagctgtaggatcagtagcaggttcaaccaaagaggaagcaacaaaagtagcagcaaaaagactcacaaaaggatcaacagaggatggagtaacagtgtcaggctccttcctggacaccggcaataatagactccccctggatatcaataacacctaactccccctgaacatcagcaatagcaaactctccctagacaccagttgcagcagaaagggactgagactccccctcaaccaaactagatgaaacaaaattaggctcagaaggactcgaaaccagtgcagatgaattaaccaaaggttgtgattactctgattgatgcttagatgagagaccatcatcatcagaagaactagagaaaccatcgctaaagggaatagaggagcaacctctgtcgacttcagtacctctgttatggcagtgagaacattaatcacaaccttcacaaaatgaagctatctctgctgatcacgagcattagactcatacaagctagaaattaaagaatacagtttcccttgccaagatgaagaactctgttgggaatattttacca

SEQ ID NO: 389275 - DNA, 1298 bp, Cannabis indica
ttatgtttggcttacaacttaacaaagtgatctcttcatgaaaaatgacactaaacaatgatcactaaaacggcacaaggcaagacccaccataattcaaattcctcaaacaagaatataacacattccaaaaacaaatgctttacagcaaattaacgcaacaacatggggatcacaagcctttgacttttgtaataatgcattttatcattcacattcacttttcctaaccacccaatagcctttgatttttgtaggaataatatagggtgacaagtcagggttctaaacttccaatatcattattacaagtgcaaacaaggagtagtccatctaccttatatattatagctcgatcaatcttagacagctcgatcacaagatattttgagctcacaacggatcacaatgaactcttttatggttcgtctttttagactagtagcattttgaatcggatactcgttagagtttagtttggctctgattctatgttggaatttgagaagtgtgcggttaaagtgcatgagattttatctcaaaactaattgacaatgagaggagtaactcatttaccttatgatatccagctaccattttaaaatggctactcaatcatattaccaataagtgagcattatttttggctagaagattttggatgatcgtatataaatttaattttccacatgatatatttagtattaactagggtaaatagcggcataagtactcaaagtttaaagtttgtaagtggcatactcccaatatttaattttagcggcataagtacccaatgtttgtaaaactgtaatttttctctaattttgtcagtacaaactctgttattttcttaaataggccacgtataaagtccagattctagatcattgggtctagacagaaatatatagtatcagttacttccaaatattcctttaataaattcaaaacggagtctgtactgataaaactggagaaaaattacagttttataaacattggatacttatgccgctatttaccctattaactaatacaaataagaactatttctctttctgacacaaacacacactcaatcccactcattatctataaaatattacctaatacagttgacaacatatgactcaatctctcttctccaaccattgtttgtgaagtttgttcatctattgacatggaaaaagttcaagaatttcaacttcagctcagcattagaggtaactcttccttgtttgctataaatatatatatatatatatatatatatgtgtgtgtaatacaacttaact

SEQ ID NO: 389276 - DNA, 1249 bp, Cannabis indica
accctcctcttggtaatgacctctgtcatatgaggattgctagaagagctatcccaactcttttttcagtgcgagccatagcgggtaacatgtcgggcagttttgcggtggttatagaagtctccgccaaggggagctccctatatgggtcaatgggcacccctactggaatgttggtctcaccggaaggaagagggtgtgtccactctcgaggaaaataagattgtatcccctttccaagctcccagatgtgcctgttttacgcttcaccacctatcgtctctcgatagaggtggttgggcgtttccaactcactactagaccccttgtccccagacgagttgtgcgagggtgaggctggacaatcttcgaacaaaagttgaaggagatcatcgtctactcgattctcacctccccaataatcgctataacgcatctataaaatgaaaaaagtgaggaggtgagtacaccgagtaatgctagtaggttatccatgatggactcacctacaagtacaaaataaaaggggaagggaaacatgcacaacaaaaatttacaacaagacaacaattcatgtagctaaatggagggagcaataatgataattacacacttaaaatttttactaagtgtaataagcaaaaacaacacatagaagcatatatttaagaccctgagaggtagacaaacgacaatcgtctccaattcacaaattctcgctatggttgtcacggagcttacaccccgatcacccatgaaggagtctcgggtagtacaccccgacccctcgtgaggagatctcggggtgacacaccccgaccccctcatggtggtcacaggggtggtactaccccaactctcgacccaactaaaacaaatgttacttaggggtgcataccccgacccccaatggggctctcgcagggtctggttgcaacatggggtactacaatcttctccctctgtagattgaaaacccttccaaaagaaatggttaaaccaaaaccaacaacaggaatagagagcaagaaaggctatatatttatgtaaaaaaggaatgcaacttgtctttgacaataaacaaaaaaaaaaagtcaaacgagagcagctagcttatgctttgatctatttcataaacaactttaaatgaacttgttgttgggttttgtaccctaaataaaacccatttcaatataatcagatttacttatttataaagatcaaaaataacattttatgttgcatggtt

SEQ ID NO: 389277 - DNA, 683 bp, Cannabis indica
tttttattcttgtctcgcataaaactaagtagtcggcgagtttgaacatttctattaaacttgtatttaattgaaatgagttatttgaactgcatttaatgatacaatgtcattagtatataccctgagttgattcatattccttttgtaggacatgtgtcaacttttggtacatagccgaatttcgagtataacaatcatatatgcttcatatcattcatataaatttccaacagttatgagttagaatttcaaaatggtaatatcaaaaatgctacaaaaaagggtctttggtactcatgttaatctagtttcaatcaacaagcaattgttagaaaacacaagatttgataattctcaaatttatttcttagaaagtttccttattacctatagagataagtgaaaataattttttgcacaaaaatgtaatacattatttaagttattgtactaattcacacctaaagtttcatattatatatatataaatatatatgttacatatatatagtattatgtaatctttatttttctattatatatataaataatatatatagtgtttatgttacatatatttatttaatttcttatcttgtttttatattactttaaaataaagttataattattttttttttttgaataaaggatggaatttattcaataactttcagtag

SEQ ID NO: 389278 - DNA, 2016 bp, Cannabis indica
aactttattaaccatcaacttctgttactaatattagtaactaatgagttggaacagactccaaacagaaactacaacttgggtagagtaaagaagctctagcaaaactatgaaccaccttattcgcttatcgtttaacaaaacagacaataatatctccaagttcaaaaattaaaactttacaatcattgattacattaccaaacaaagaaatcttataaatagagctctatatagcttggacaacacataaatagtctgtttccacacaaacattctgtcagccccaatgtttgatccaactaagaacttctcaaagtcgcattgctttgaaaacacagatagcaagtgaatttggacgagcaagaagtcgtcaccctgttttcctcgaaagggcccaatttaaatatctctctatatatatatctcacgcgcacacccacttaactgaatattaagtgcctaatttagtggttaaatttttagacattatatctacatgtcatttttttattggtatagttaaattaatttttttaaataataatttaatgactttgaccaatcagagattgtcacgtgacaattttcttaataccgagcagtcgagtaccacgtggcaatttttcaccaacaaaatttaaatttttgtttcaaagtagtgttgttcataccctcccctccataatttgtggtttcaaactccaaccaattcagatcaaactatttcagattgaaccacataaatttggtgtcaatgatttattaaattcggtccatttataaatctttagtttagtcacaattttaaaattctcgcccgtggttcaaaccaagctaaaccgcctaattgtttatatatacttaatacaattttttattattattgaatattgatatttagaaacaatctatagtttccataatattattttaaaaatatatatattctcattgttatttacatattataaactgtaaagtaaaagaatttagtattagtaagaaaaaataaaatatttatgaagtacaaattatggtttcgaactaaaccaatccgttcttaagtgaattgctttgatttggtttgagcatttaattggtttattttggttttgaattttaaaaaactagcattgttggtttggttcgaaataaaaataaaaattcagaccaaaacaatccataaacgccccctacttcaaagtaggtattttaaaatgcataaagaggatgttttccccctaactatgacattggtggtgagatctggttttgatggtgtagatttagttccagatctatagggatagtagctcactatagccattgtcgactgttataagtcgtcggctatagtcttcatccttggcgacagttctaaacagttgggatattggcatacaccattgtttttaaccgacacgtattccatttttgtgattttggaacaggcgtcggttacatggcccgaacaatacccttacctgactatttaaaccagttggaaaatcaatcttttttagtagtgtaaatgcttaaaacttggttcttctctcaattctttacactccatctattccctcacctcatgttttgtcctaaaattatgtatttcaatattacaatttttttttaattaaatgtggaataaagaagttggtacaacaaacaagtattcttagctacagagagagttcggtcactacaaaatatcaaacaagtgtgataaaatagaaataactaaaaaaataaaaacacactaagtattcataatattcttttagatattacttgtcttcagcctgcagagctagataaattcattaatgaagtatcataactacaaagtaactccctctaatgtttcactaattttcactaaatgataactactaatatatatcttgtcacatatgttaaaaatcattatcaaatctagaatatgttagaatgttttacaatgttctaagaaatttgtaagaaaaatcaagaacactctagaaagttttagag

SEQ ID NO: 389279 - DNA, 654 bp, Cannabis indica
aatggattaaatccattttgaggtacgacatcaagatagtgactactgcaattctcaaaaatggtcaattcaaaatattatcgttagtcaatactacgtgagagaataatgagagtaatgatatgtttagactgtacatgatatagtacattgcacatagtttatgatcttggtctattctggagacgattaaactttggtaatctctgtaagacgaaaaattcttgataaatcttatatggtctaaatatttagattcttcgtaatgagatcaacggtagactgaattgttccatagttttcattgactatctgttgttgttattaatttttagaattcattgagaatctttaattagtcttagtgcgatatattatgaacggcctaaagttcatgtatattagtaatgatgagagatcaagtttgagattgtcccacatatatgcgtactgaagacagcctaggatttactcaagtatacgcattcctatcatgatatttattacatgcataatgggttggtacttgagttgtcacccatatggtatcaaagatgtattagcaatcgacaaaccaacattatgacatataattattggctttactgatattcaaggtcggccctaggcataggcaggctaggcccgtgccta

SEQ ID NO: 389280 - DNA, 725 bp, Cannabis indica
aatttaaaaaatttaaaaaaaataaaaaaaaaaacccaaacatacactatttgtcttttttttaatattggattagagattcgaactcctttctcctacacactgctacttgagttaaactcaagtgagaataaaatcattaaagtaaaaaacaacaaaaaacagaaacttattgaactggtatgtttcttcttttttcctttttctctaaccattttttatttgttttgagggactaatttctataagcattttttttttttctgaatttctataagtatcattgatacatcaattatagtgtgtaaattatcaaataaaaagatttctatattaaactaaagattaagatattaaggggaaaacagtagtagtgcacttatatctttacattataatgttagtgctatcattcattagtataatgaatgtttaggttggtgaactactggtacattgtcatatttttacattaaagaacttttcatttaaatacattgtcatacttcccattaaactttttattcatccatgtggtttgctaagattggtatactacaataaagaattttttaattaaactttttattcatcccctatcctttgctcctacgtaacaaagcctcatttgcaatgattttacccactttcacaatctcaaatcactttttttagggtgcactatttttagtggatcaataaaaatttattttaataatcttttt

SEQ ID NO: 389281 - DNA, 827 bp, Cannabis indica
tctctctctctctcttttcttcagctcaagggcaacttagaagacaattggagtttttcttcaattctttggttagttctagcaaaagacaatcttaaaataaacctagaatcttgaggtaagtcttcttctattgttcttggtgattttttaggtttttaagctaggttttgttagttgttcatgtattttcttggctgtaggtttagataagtttttagcatgatttctatgtagaattgagtttgtttatgcatgatttaattgatctgatggctgtttggtttgaattgtgttagttgaagctaaaagaattaggttttctttcctagagcatatgattttgattcaatgacttcattactgtgttttaaagcttgggatttgttgtatttgtgatattggactgttttggaaagttatagcaggtttggtggaggtttgatcagtttttggggtgaaaaaccaagtttcctcatggctacccagaaaactggtcgaccggtttttcaggcaactggcaaaccggtcgaccagtttggccagcagggggaaatttcaagtttttcctctcaaatctgatttggttcggggtattttctggagtgtgattcagagtattttagagatattttgggttagtttggtccaggggaaaatagagtgtttggttatgtgaattaaggtttatttttgagaatctagtaaagatttttattaagttctggttgtcgtgacataggaccgagagtgcccagcttgtttttgttgggaattattttaccaggatcaagatttactaacaagtatgttggattaacaaccta

SEQ ID NO: 389282 - DNA, 718 bp, Cannabis indica
ataataatgatgagatgattagttgtgtggtttctgattattttatgagttggccagttgaagttgcagctaaattgggtgtgaaagccgctgttttctgtccttccgccgctgcaattttcgtctacacaatcaacataccaaactttatacgtgatgggatcatcacatctcatggtacgttaaataatattatttgcttttacatcatatttatcctatattatcatattaatgtttattctaagcatagtactatataaaaataggatttaatattaatttactgtgttggcaaaataaaaatttaatattttataattttcaataatattcatcttctactttcttatttaaaattatatatactaggaactcaaatttgactaataaaattttctaaatatcaaatttttttagaaaaatttacatggtatactaacttttgctatttttttacaaaaatactgccatacggtattttttatttttttattatgttttttttataagtttcatactgcagtatactgtgttaagttttcactggtgttctactagtgttttttagttgttctactgtcgttttgagttgttctgctttgtgttttactggtgttttacaaaaacacagtatttttgtaaaaattaattaaaattccagtattttttgttaatttcccattttttatagctatttgaattttatattcaaatt

SEQ ID NO: 389283 - DNA, 538 bp, Cannabis indica
attgactattcatatttcgagcaacacaaactcaggggttctccgatgctactcgcatatgaggttcatgtgaacctctcgagcttctttataatacagaaagcatgcgactatactagtcgcgtattgggcattcatgctgacaacatagaatttgcgagttctaagtgagttgtcacgcacactagtcattcgaaccaaacactcataaagatgcggtattctcattgtatgcaggggagacattttgttgttgcctataatcaatatatgcgcgacttacgttcacttttctgtcttgcttttactttgctatgccatgcatagtgcgcgactacaccttgtctcggtcgcacattcttccaaatttttatcatgcgaggatagccctattgggcttactaacacgtcttccttttctaactggaaactgggtccatgtctctattatatacgagactacactcgtatttctaggtgaaaattttatcctataacacatgtccctagtttcgcaatgacagttgtctatcatgtg

SEQ ID NO: 389284 - DNA, 1173 bp, Cannabis indica
tcattttagttaattttttatatcgttatgtattgttgttgaaaaattatataaaaataattaaaattatataaaaatacacacaatttagttattaacttaataattgtaaaagaaatagtgaaaaagtgatacatgaaatctacccgttataagaaaatggggtgacacattttataaaaaaatggtcggtctaagtaaagcatgacaggagtttgagtgcgacatgaaaatgtgggtttatagacagtgtcgagcttaccctttgaaatattggcatgacacaccacgattcatatttttatggtgcatggctcagtccatatcgttgcggatttttcaaaatatgaaccgggccgacataacatgcacgtatttacaattattgtggcatattaaaattgttattttattaagctatgtttcagttttttttttaattaaaaataagtattgtcaatttactaattaaatgataggtttttaaaaaaatttagtccattccaatggtataaattttgtgctaaatttagctcaaaaaatgagtgaatgttatatttgacattttacaattgtactccaatacactaagggtaaaataaacttattttaataaatgtgtaaaaaataaaaaataaaacattaaatttttattgattgtatattttaagttattgtgtgttattatttattttgccatagaaccgattttgtttatatttatgcctaagtatttttagaattgatccccactttttttaaaaaaaaattataaccggttttatgaggtattatgcgttattcgtttttatttattttgttgtggaagtagttttgtttttaatttatgtttccgtgtttttaagaatttttttttttggttattcagttataaccggtttgagttattgcgtgattttattcattatgttatagaaccgattctattttaatatatatctgagacatctaactttgatgacttttctaacgacgatacaactcgttgacttttttaataattttttcggtagcttttccggtgacgatgactttttcggtaaattttttgacgataataactttttggtgacttttcccgcgtcagtgttttctcttgcgatatttgttattagaagtttaatcaaaattatttatagtctttttttgttt

SEQ ID NO: 389285 - DNA, 784 bp, Cannabis indica
cttttccagttaagtatttatgtacgtatttgtactttttcaattccaatttatgtacgtgattgccatttcgagcttgcataattttcaaattaatttcgaatccttttaaaataaataatgatcccgaattaggcagtcgtatacaacaagggtactaaataattccaaacaagcaagtagctatatatctgaatatcttccaattaatttgtatttatattataaaaagctagaaagaaagaggttttgttatgtcttaacaatatatatagcacctaaacccttgcatgtatgtcaacttcctaaacaacaaagaagttaattcacccacgatagctagcatcgttgagttcaatatataaacgcttaattaattagctattttatacaaatatatatagaccacttggacatagttattagttaattaatacttgatatatatacgatcatatataaatgtatacaacaattcaagtttgtttgcagtattaattaatgtagttgtttatgatctctggatagcaatatgggggaatgtaagatgttgaagcttcatttcatcattctatcgcttgttgttacacatctcattcatgcacaagatgatcaaaaaggtaattaatataaagttcactattatatagaattaataagatttttttttttctttttgaactaagatatatgctcgtagagttttgtcactaaattttacacaaatcaaatatttcccttcaattatattatttttattttttttaaaataatttacttatgt

SEQ ID NO: 389286 - DNA, 1046 bp, Cannabis indica
attaacttttccaaatcttccatcttattttctaacacccctcaagatattagaaacctttttttcaccacttttcacctggaagataggcctttcattagcaaatatctaggtttgcctcattgtcttactcgatcaaaatatcattcttttgcttttcttagggacaaagtcctttctgttctcactaattggtctgctaaatgattttctaaggctagtaaagagacacttctcaaggcagtgattcaagctattcctgcatatgcgatgacttgttttagactgcctgttaaattatgtaaaggagttgaagttgcgatggctagattctggtggggttcttctagtagttctaagaaaattcactggaaatcctggaaaatagtatgttaatctaagtatctgggagggttgggttttcgctctttaattcattttaatcaagctatgttaacaaaacaagcttggaaattttttaaaaaccctaactctttattgtgccagattcttaaagctaggtacttccctaactcctctcttcttgaagctattcctggtcataacccctcttatgcctggaggagtattctgtgggggagagatctgatggcttctagtcttatttggaaggttggggatggggataacattctaaccattgaggatcattgacttcccaataataaatatatctcttataaagatggcagcttgcctacttcgtctaaactttcttattttatttctgactctgatcattaggatgtatttaaattaaagaatcactttgacgagtctattgttcatgatattctagaggttcatgttactggtttgccagataaagatgatgttatttggtcaagggagagttttggttttttcagtgtcaagtcagcctatcaattagctctctcttctcaagatatcccctcttcctcctcctttgtcagttctaagaagttttggagtaagatttgacactctaaagttcctcctaaaattaaacattttgtttggagggtggtgtctcatgctattcc

SEQ ID NO: 389287 - DNA, 544 bp, Cannabis indica
ttttttttttttttttttcaatagttgatcttattttgatacgatatattattctttattttccaaaagttaattctaaatagtattataattataattattcatatatcaaaacatcaatttaggaaaattcttgtagaacagcctataaatatacattgatatccttttattaatatttaaaatactattatattgaccctagctgacctaaaatcaacaatttacatgtgagttgtctcactttgccattctaggtaagaaattttttggaaaaaaaaaacttaaaaatgtgagaacgagatctacagattgcaataaatttatttgaccaaataagtaaaaaacttagaaaacattaaagaaaaattatttacaaggaaagatccttatggtaaaaatgtaagtataggaaagtattttttgttagagagagagtctcttatcaatatttcagtcaaacaaattaaagtaggattctctcttagaattttttttttttaaaaaaaaaacagaaaacagaaaagaaaaaaaaaaaaagaag

SEQ ID NO: 389288 - DNA, 1432 bp, Cannabis indica
tatcaacctcagaaagacatggggaaagctccaactcattatcagggttattgtttctatcccaacgagatgcccctacgagatacaccttgcagcgtgattaaatccacgtcagcattgatccgttaaaagtggataaatcacagatgtgtgattttcaaataataaccgcatttagtttacgtgagatgtaattaaatcccataatttcagggagatattgttgtgggatatgaatttaattgtaattaactgcctccctatgttaccttaaataggggcagagtgtactgaaaaatggacaaaaaatccttcagagaaaaaccctagttttgtatcagagaaatctaataagttaaactcgtggactatgtagaattttaactacaaaaccacgtaaaaacttggtgtgatctttgcattattctggttatttttattttctattatttctgtgcaaatcaatcactaaataggctttattatcgttaacgaaaatctgcgttaacacttagaaaatcaaccacgtaagccaccatcatcatcaagaaggagttgttgccatttttagaagaaattaaatgcagaagaaaaaagtaccaaaaaggaagtaactaaagaggaaaccacccgaaaaagaagatggaggacacaagcttcatttgtttgattttctctaatctttcttatatttttctcctttctttaaatacttgaagtttgttaaattgtaaagaattaggtagcaaccatggatgaactacttttattttggattttgtttactggtttacatgagctaagcctcttgagacttgaatgactatgaatccctatgcttggtatgattatttttaagcatgtttaaccaattttgcctttgttcattcaagtaagcttgttgtttaatgattgttattacttggccatgagtaataatttattaagctagatatggtttcgaaaaggctagatctagtagttacaacttggatgctgcaagtgaataccaggtttttcttagtaaatgaagtaagaatatttcatttgccttgcataacttgagaattgatgtttaaatattgttatgcaatctggtttgatatagtaatatattaatctaagtggtagaacttaaattgtgagttttggaaaaatctcataaatatagaaatttttttttaactctacacaactttgctggaacaatgctgaaataatggtgaaaaactggacagattcaacatagggggatttagttatcaagtctatttttccatagatactttttcttgtggataattttttagtagtaattgtgttattttgaatttattttcagtgttactaatttgttttatttttatcaatcatccattcattttgtttaattttcttttaaaacaccttaagttgttaactagttgatttt

SEQ ID NO: 389289 - DNA, 1001 bp, Cannabis indica
aagagcattgtaggggcgacaatattcactaatatcactataaaaatagaagttttggcaactctttaatattgttgcaacatcaaaggataattttattggcatattatgcatagtttttatgctacctctccagtgatgtagcacgctaggaaacagtgctttatcgtgttaaagtacacgagcatgtataaggttgctacaccaaagtcttaatagtcattcgcctgtaaaagttgagatagttttcctccttcgtacaatatttttggtggaaaaaatgagacttttataagcacccacaaaagctttgatgggaaaatttccctataacaaaaacgtggacaataggagaaaaaatgttggtgggaaaacttttgtcgccacacttaactctgctcacaaaagttaacaaatctatgagaaatgatgtgtttcacttatagttttaagttaaaacttctaccaacgatgtgttaatgaagaaaaacactaccaaagaccttatcttttcttccttcttttcgtactgtgaaaaactcaaaaaagatgtctcatttttatttttttccttcacatataatctctaaacctctttcactgaatctctctttgtttctctttattttctcataactactcatttaataattatttttttattttttctgaaaaatggtttgtgatctccatttttggggaatttttttcctccatttattaagaataccaagcttaaattcaccgctgccactgtcgatcttcttgtcgccgctggaaatcaccccttattagagttatgttagttttatagtactaaatagggtacacagcagaataaaagtttatgattattatcgtaccatattctcaggatcaccacatgcaaatatattatatttgaaataaaatagataaaaagataatttatctctcgaagcctatcagggttgttgggttttatgccctaaataaaactctttacaatctgattagttatc

SEQ ID NO: 389290 - DNA, 1102 bp, Cannabis indica
cgatttttgatttggcccttcatttctaggggtcgcgatgttttttggctctcttccaagaggtttctattcgaaactggccaggaaatgacctcatccatgaaacgaggtcttccactgtccccttttgggtatggtcttcacaaagtcaagcttcgagagccttgttgcgacttccttaagtattctccttactttggtccttgccaacttctcattttgagcttttatgcaacttgctgggctaaactcctcgtggagcccgtggagatgtgtaagaagggactcatgcgtgtttatttgattttgaaaaaatttaatcaaatgtacttcttatctctacgtttgcttttgagcttagcttttgagggaagaactcaagcatatttctctttgaggagactttagttgagtacgttccttgattttttttcttacatgttgggccgaatgattttggcaaatggaagtaggatgttgtagctatttacaatcagacatatcatacccccaaatgagttggaaattctggggctcagattctcagtcatttgctttgagtttgacttgtgtctctttccaatttccaaagaggagtaccaggtatatctttgcttcgcaccatccttctgggaaggtacaacataagttcagggtgagaacctgattgtatatcccaacaaccctttctatggcgcaatcttgtaagggagactctaggccagctgttgatttcccaggggaaagctgggcttgcacccataaataatcgtccttgcgtaggggtttatttcagcaaaaatcatgtcaagtctcgtggcagtaagcttttggctttcactaagaaaggcagaaagtgtgtgtgagctgggacatcgattttgctagtaaacaccaaagggtgaagtattgttaggttcacaggagtcatgctatacttttgtgaggcaggcttcagctctgggtaggaaggctaaagtcccctaaaagttcaagcctggactttgcataaaaggatcaagggagaaagtatcatgaggtgtgggatagacttcaagcagtccttccaagtctcagaaggagggttgaagatgtatcgtac

SEQ ID NO: 389291 - DNA, 890 bp, Cannabis indica
cgtgacctgggcgctgccaaggagaccttctaggatgagctcatggacaccaagttccagattaagggcctgctataggccaataaacagttgaaggaggagagtgcctgccaagcctgcttcatcaagaacatgaagtccgttcacgacctttatatggaagctgtggagcagatgtccaacgcgggtccttcctctccatcaggtggtgctcagccatgagcctccagccgatcttttattaagtttgtttatttttttttcttttttgtatatccttctccttaactaaacttttttagctgcagagacagttaactttaccctgcccgctgggggctttttaagagctgggtaggatattttttgttgttcctttcttagagacttgctatgatagactgtctaggggatggttatattttttgaaatatttggttccaacggccggtgtttcaacctttttcccttagccttggttgtcttcaggttgacctcagggacgatttttgatttggcccttcatttctaggggtcgcgatgttttttggctctcttccaagaaggtttcttattcgaaactggccaggaaatgacctctatccatgaaacgaggtcttccactgtccccttttgggtatggtcttcacaaagtcaagcttcgagagccttgtttgcgacttccttaagtattctccttactttggtccttgccaacttctcattttgagcttttatgcaacttgctgggctaaactcctcgtggagcccgtggagatgtgtaagaagggactcatgcgtgtttctttgattttgaaaaaatttaatcaaatgtacttcttatctctacgtttgcttttgagcttagcttttgagggaagaactcaagc

SEQ ID NO: 389292 - DNA, 2297 bp, Cannabis indica
tatatatgtttattttatttttttcacaattaatttttattacgtcttcatttttacatttactctccaactaaatttttttgcccccaataatgtagaagcctattttatttttgtaacaaagaccaacaaatactaacaataattattaatttagttggtatttgtcacaaaaataggcttctacatatttaggcattgaacattgttatattgttattaagtgttgtgaatagttagtatttgtctaacactaaatctatgtacttatgtagcacgttgtgagcagttagtagtttcttatattatttattaaattaaaaagtatataaccccatattaaattataccaataataatttactacatcttaaggtacttaacaccttaaatgtttcttagcatatctctaatatactattaacttcgaataatgctaaatatttataacgaaaactcctaactacctttactaaaaatgaatattaataatgataatatttaaaaatatatataatagtgatattttaaaattgtaatttatttattatacatatatttatatatacatttatagtaattatattttactttttcttaaaaaatatttgatttaattattaaaattgatattaaatatgttaaaagtaacaaatttatttcatgttatgttgattaaaaatatatattcttaagagtcaaaataattattatatgaaatatatatatatttttactaaattttgtttacccagaaacaaaatctagtttgtttgacatgtgataaaaaaaaaatatttacagagttgagtagcctcgagtcatagtagtcgaccagggagaggtccttaactctgcatccaggttgacttcatacaggaactccaaaataagtgtttggatcccgcaaagttatttttatcagcccaagatatgtttccaagacggagagtgaattaaaaatttaaactaatttcaaaaatataaaaaccccaaagacaattcatgcaaatattcaagcttaatgcaataacaaagataattacaagtataaaaaataacaaacttgaaacgtaaagagtttagggatagaaattgctaactcttgatttttacaaggtttggtaatactaatccacctacgtcctcggtcttcgctatggacctagctttattgagccaattggctgactacctacacacggaacttcaccagagttttctcaaatctctcataatagtttcttccaaggactatcaatctcaccagattgttaaagtgcgaatctcaccaaccgagttatttttctaccggtgccaactttacctcaactatgaaggactataaacctctttggattgttaaagtgtcaatctcactctcagattgttgtagtgacaatctcactcttctcgggttgtttacgaaatcggtgtcaacctcacctataaccgagttatttttctaccggttccagcttcacctctcaatataatggatatgtaattttgaaatataaagcaaactctctctaatacgatgaaaaacaatgtgaaatctagagagaattgcaagcacactagagaagataagaacaagtttggctcaagtgtgtgtggttggtgtgtttatataaagatgataattctttagcttagaacacttagaatgatattatatgatgatcaaatgctcaaccaaccttaatttttaagtgaaaaacgagctcatatagtgtaggaatgaaagctattcatttatagccgttagcacattttttgaggtcaattatatcgtgatccagaattttggatcggttacaactgaaatttcggatggaaaccagaattctggatggataacaggggcaaaaagttcattttttgaactaaaacgtgcataactttttactcatttatttgattttgaaaattctagttgtgttctattagttaaatgatatgtgatcttaaaaatcaatttagaaaatttagatatcatttttgtgaaataacttgtcgcacaagttagtgaaacttttgaccttataaacactagtgtacaatgcaaatcactttaacaagactaaagtaaatttataccatttgattgtgtgtagtcttgatgtagatgaacttcttagcttgatttacatgttttgatctaaagttgacttttcctcaagagttgactttgacttttgggttgacttttgactttgaacttttgaaattttttttttggatagggtcttgaattcttgatctcttaatgaatcttttgctcttatgaagta

SEQ ID NO: 389293 - DNA, 979 bp, Cannabis indica
atatatatatatattagataatactatatatgcatgataacataatataagagaattgttgttgagcattattggtacctagtaatttctacaggtggcgtccttcgattagttagcgatattccctaaaaccttaattttctttaagttatataaaaactcgatacttaattatgccaatagcgatgtaacactgagaaaagtgctaggcacaagtgatgcatgatagcaattctcataataatatatcatataaaagtgtatacataatattatagttaagagaagaagagacaaatagaagaacaaaacaccgagtgttaagggggatcaccaataagttgaacaagatttctacaccttgtccaaactaccaagcacttatagggtttagattatatgccttcggaaataaacaagtctacttttgaattttagaaaatgtaaagtatggatgaactaaggtctctatttatagagtttttgagaattaaacttggaaaacacatcccacaagcttagtagttgttatcagccgtttaggagtgagtaatggagcagatgttgaaaatattttaccaggatcttagatttactaacaagtatgttgtttaacatcctaatatgaacttttaaaacgatattaaataaacacatataaagtatgagaaaccttacagtggttgtagcggaatttaatgtctccttccactcagatctctaacccttatatcctttctgtcgtagagtatcaccaagatctgagcccgaatgtccttctcttgaatctggattcttcacaatcttccacactatgattgaggtaccaccttgatatgtgtggggtcactcacctctactcactcaagggttcggtttttacgtaagtaaacgaaagaaggagagagggtggcggctacggtttaggaagaaggcacgtcagtttttctctgaagaaactaaagatgcatctatcttt

SEQ ID NO: 389294 - DNA, 912 bp, Cannabis indica
aaaatacttttttatattaattcacaattttatggcctatactttttatatacaaaagtacatttacaaaaatttaaaataacaaaaatacactttgggtcaacaaaaaaataaaaaagaaaaaaaaaaaaaacaacgaaaaaataacctccaacaattataaatcaattataaataaattataaaacaaccaaaaacaactagaaaaataacttgatgaaaactataatacaaccataaataaaaactataaaacaactaaaaaatgatcatttattatttttactggaaaatattttattaataaaaattcaaaacaataaaaaaaaaaaaaattccggaaaagtatttttataatttttttaattacgttaattttttttaatatttatttgcatatgtatgaatgaatgcgctttttcttttttctgttgtttttttttttttacgcaatgatgtgcttttttcaaattgtcattataagtgatattcaaaaattttaactttattatatgggaaaaggaagaccaacacaaacttacctcaaataattgttgctttaatttggttttttttcttacatattaacattaatataaagtataatcacattatttagaggtatcacacacctaaaagctgtcttgaaattaaatatgcatgtagattcgtaataatacttaattaaagcataatacatatgtatatatatgtgtatatttactaatgaaaataataatggttttttttttttgtatatattgaattattattagctatacactaaaaaaaaaaagacattgctaattaataactattaggatgcatttggttgggaggaatgggaatagaaatggaatagaataaaatttaaaatacataaaaaaaattgataaaaaatcattaattttt

SEQ ID NO: 389295 - DNA, 1157 bp, Cannabis indica
catgtatgcacacatgtcttacgttgaaggagagtggttccacaagtgatggaattggaacctactggttttttccctgcagaattttggtatcagcttaaattaattactttgatttttaatgagcagtttctatgtagtataaatgtgtgttagactccttaccttttgatgttttgataatacaaaaaagtatagatgacttaggcagactcagcatgtacatctcaaactattattgtacttttacttggaattacttataaaaataaatagaaacccaagtactatgattctcttctttgtatgtagattgggatcccaaccattgcgaggagctcattgattcatggtggatgctgacatgaaataagtcaataaggccttatatgggacaaccttccaccggctcgctcaatatattatcaatggatatataatagagtaggaacaacaattgaaatggtaagactatcaaaaaaatcaatccatatatatattctaatgattactatttacctggatgagttactagagagagatattgggatggagttaggtcaagattttaaattcagtaaatttctcgttgtatacaaatttgtgccctgacagaaggctattattgactgtggtgattttacaataaagttcatggaataattttcaatagatgtccaggtgtaatgtcagctagtgttgtaaatatggtgttaggttttttgatacgtcacaaaattggtacgagctcaagagcacgagcacgacctaacacaaaaaaaatatatatttaggcacgacacaatatgaaaaaatatgagctaaatcaaggcacaacaaacccaaaagttagaatagattaacgcaaaagcacgacacattaaaaacactaatattttgataataataacaatgataaatatttattttatcaattaaaatgatattaatattcaaattctaataataataattattatttttatatgattgtgtataactattgttgataaaatatgtcaaagtaaccaaaactataaaatacacataaattttagtaattatacctcatcaatttgcaataaaaatgcaaaaatatagagcaaaaatttgagcccgtataagaaaataggttggtctatttcaaaaaaaaaaaa

SEQ ID NO: 389296 - DNA, 884 bp, Cannabis indica
atagggaccaatttaccaataaaacttattaaatttttgatataacaattaaatcgtttttatcttatttactttttttgttggatgtgattttttttctcttttcttctaaggtgtaggtgtcatataattaacttattattttcttccattttgttaaactacaattactcactaattggttttaatctctgtaaaaaaaattgcatttaatttattttttatttttgaaataaatggccatcctattacacattattaatttacaataattaatcatatagaaatattttgaataatgaaaattttgagttttggtgaggattttcaaagtctgattattgtttattcgtcatggatcatgatgaatggacgactctgtatgattctttggatggcgataacggagaatatgatgttattaatgccgttttggtggaaaaattctctactacaggaattgatagcatgctaagacccttgcaaggaagatgatttcatcaatgtttatgtcttcgaaggacataactaatgcaactataatattttagaaaattcttggcacggttaaggtaaatagtgtgggttataatagatttttaattcacttttttgataagggtgattgttgcagggtgtttagtggtggtctgtggcttctcgaacatcaactgctagctctagaaattcctacgggtattggagattatcataatctctcttttgagagactcaaattttgggttcaatttcatctcctacatatctcttgtatgactaaagagatggaaatttacttgggtaggtgacaaaatttgacgctgattctgcaggagattgtcttagaaaattcatttgttcaagtgtgggttttaaatattgcc

SEQ ID NO: 389297 - DNA, 1983 bp, Cannabis indica
tttttttttaatgaaacgtgtatagatagaaattagatctcacggtcattacaaaggatattgtttgggatagaaaaaacacacaatcgaccataccgattgtttgtgaaagcccacttggccatattatgggccataaaattacaagatcttttaacaaaataaaaattacaacaatcaaacaactgagagagtgttatacaaaatttagcatagttttcaatttcccaacgaaaatccagataaccaccctagagtcactctctatactaatatacttcaagctttcttctttagccactttcaacgccaaacagcaagtagccgcttcaccacagagagcatcaaagaattccaatctagctgtatgaaccccacaaaccactccaagataatttctaaccacaactgcaatgaatatgttttccatcctaactttaacatagtttagcttgacccacccaagaggggtggaagccaaccttcttctagacacggtgatggagtgggtgaaaaagaatctctgtaatctgcataagagtaataaatatagtcaacacactggttaatgttggacaaacttctattgtgtaccttgtcattccgcgtctgccaaattgtatcaacaactatcgaaccaaacagaaaaacttcatctgtgtaaatgccttgttttcctagtcctcaaatgaacttgacccaatcccacaaacgaatggccagaatcagaaatgagaaaaatcacccatggagacgatcgccacaaatgagacgcccaattaaaagtgagaaataagtgctccaagatttgcttaccatccccacataatgggcaggacatatcctcaatatggaatctcttagaaagaatagcgcgaacgggaaggactttagagagaatgcatcaccacatcatcttatggcgttccaaaatgttactatttcatattttgttccatagggaaggagctatatcataatgaggagccctttaaaggcttggataagataggcagatttacacgtgaatcggccattactctccttagtctaaatccacctatccgtaccctggccagagggtttacccctttttaggatggctgaaacaaattcattataaaaaaataatttaatttttgaatatcccaatccccataatcagtaaggagattagccactttgccatgatccatcgctctagcacctttcgcctatggatagaactccctgccatgggtgatccagggatcctcccaaattctcctatcttttccatccatgatcatttacatgcccctttcctcaaaatagcattttccttcaccacgttcttcgaaaaccacgaatcataatctttgtacttgcaggaaagaaaatctttatttttcaggtactttgctttcaaaattctgtaggaaagagtctggctcctagttaacagattccacccccattttgccaaaaaagctaagtttatttccttagtttttcgaaaactcagtccaccacgggattttttggtggataggtttacttatacgagcattgtattagcattgtaaccctgttatgaagtggtactctattaataattagtcgtttactataatcattattaaaataaaacaaatatgatttgatatattatattattagtgatatgacatctcataaaaattctaggcactatgagtattctttagagcactcacatcacataaaaaatattacacacaatgtattataaaaatttgaggtagaatagaaaaagtaaatttttttgtaatgtattgtaaagcatggagtataaaaaatgatgggagtgcctcttagcatttgtcaaactgaaacgtgtggggctaaaactgaaactgattggagtgtctcttaccatttctaaaagtttgtggtattaaccctcggaatcctttggcatttcttaggttttatatatataaagtatagataacttagtttaat

SEQ ID NO: 389298 - DNA, 2380 bp, Cannabis indica
tacctcatcttcaactagataccagttatcttgaaaaaaaagctggtgtagccatctggacttggagctttacttttaggaatactgaagatagctcgcattacttcttcttttgaaaactctgctagtaagagatctgaatgggatttcgtgactacaagaccataagccattatcatagtggagactttttttcctattctgcatttgagtccccaatagtgattgatgataggccaaaaaagttgcaattatttcactggggttttctacttgaattccctcagcattaactattgatagaattttgttctgattccttctctctctgatgctgaagtgcaaaacggtagagttctcatcaccatctttagtccatgccaattttgatttctggtacataaatgaataaaagttctgtgtatcgatgcatatagtcttttggcctctatttcttgctcttgtaactcagcatttaaaggatctatctgcaagtcattttgaaattcatttagcttttgtctagcttgaaaattagttgtatgatttttttgagaaatgttatttattcagctccttaagtataggtttaagtaccttcagcttggttactatttaatatatatttgtaccttgatattcctgcatccacacactaccaaccatctgatgaaatcggggatgagaagaccacatcctataatacttgaaaggctttctgccacttggaacagcaggatgaacagtaagcactactagtgtatggtcaaataggccttcaggtaaggaaggttgcttcaacagttggaaacaaatcaatccaggcttcatttgccataactctatcaatcttagaataaattctatctgaggcatattgtccattgctctaggtgaagaagctcccagagtacttaatatcttcaagataacagcagctaacacaatccataaaggcacttgatgaaccatgcttaaccctttctcctattcttttatttttgtttaaaatatcattaaaatctccaagtaccatccaagaatcaatacctgcaagatcttgtaagctttttcatagatttttccttccatcttcatcattaagcccataaataaaggtaacatagaacctatttttattgtcaacaattgcagcaaatagatgtataaattggcttgagcgactcagaatacttacattgaattgtaatggattccaggctactatgatcctcccacctttatgccatgccaaatttaaggtaaaataccacctcgagaacatgttcatatataaaactttgagttttcgagccttaacctcgtcttaatgagaccaacaagacaaactttctaactagcaataaattgcttgatcgtgttttgtttttactggctatcgatccctcgaacattccaacttttgagcttatctattggagagtggaggttctccccctcctgtattctccaattccttgtcctgtataagatcctcttaaattactacttcaatttgattctctcatgttggaatagtagctaaagcttgaaaagtggtggtaggacagttaatggatctttggctttgaccctccaccctttggtaacagattggaattctccaggagtaggctctggtttctcctctggttttttattttatcattttgtccacccattctgttttttgccgtctttcctacgagagtcattagtatcatgcccaattcctttgcaatttctacaggttgttggtttccactcataatgaacttccacaggtatattgcaaccaaattcatcctcaaaataaatggtacctgaaaattcttaatgaatggaaacttgaataagaatcctcgagaaactgagtttgtttctctctttggttacatcatcaaccattagaggctctcctactgggccaatgatcttgaataaagatttttgaccccaatatttcagttccaaatcattcaattgaactcaaattgggactgttcttatatccacttttttaaaactagtgtttggattctaagctttcatgatgacacaccttttgttaaagaaagtgtgccttccattgagtatttcatcttgatacttaatggtatcaaaacgaatcagaaaaattctataagaaagcatgcctaccttatctaccttttctttccatagtcgcctaacaaagccttcaagcacatctaagggtgaattagctccaagtacataacacacaatagaagaattccaacaggacacctcttcttcaatatcttagttatattgaccttattgtccttctcagaattgccgaatgtagtgttgggttttatgccctaaataaaactctgtttcaatgtaatccagatta

SEQ ID NO: 389299 - DNA, 1988 bp, Cannabis indica
aaaaatcgaccacaacacctaactttattcagattacaaaatttaaacatcaacctgtttattcaatttatttaaccctctcacattccaacttaatatattgcaacaatccattaacagttatgtaaagggctagtatctaattttttaccttccatccattcttcagtatctgcttccaacttttttgcttgaatatcaaggatgtcaaacgagttttgattatctttatccatctgaagctcggaactgccacttctctctgtttgtatgatgttttcttcgaggtaatctatttatccttcactttcttttttgttttgtaacagcaaccggggctactgatttatccactaacttgactgcctgctgcactatatcagtagagacatccttttcttcaagaatcactgtagctaccttactctattccagcttcttactctattgactcttctccactttccgacaatccaccattagatggccataacccgaacatgttttacatttgacggggagccactcatagtcaattgcttgctcgaccagttgcccatactcatttaaaaacccaataaactgaggaggattatcaactatgtccatctctataagaactcttgcaaactgaattcaagttttttccttggtaaatttatccatcatcaatggcttcccaattgtactgacaagagcactaaggcaattgtttccccaatactgaagaccaagaccatggagatgtatccataaggggaaagatcgaattaggcgaattaagtttagatccttggaccaaggacgcacaatcactggttttctatcaaattgaacaactccattttcaagaacctgatcatgagttgaagtttcaaagaaatttactatcataagcccacctgtcattctaataacttgctctatcccctgtttgccccaaattcgtttgataaaaccctcaaatacaaccataggaggattagctcctaataccatacatataacagctgagtcccagttagcggcttgagcattaatttcatccacatcaacttgagctattttcttgccctccttgattatcggctcctcaaatttcaatttagaaaacttatttgttgaaaatttcctccagtgactctgagcagattgttgcagatcctgctccactttctgtgcccacgattgagtaactcgagcatcttcgtagccttcatcaagaatttcaagacagatttcatcgtgcatcacgtcctgctccatcatcgattctccatctttgacaacttctgccatggcctctcctacctttttcatcgtagcatcagcatcttgctcctccctcacatctgagttcgaaacaggatctggtgaaatcaaacgaagtgctggcttcttggttactcttttcttttttgccatggaagagagaaaaaccggaccaagagactatgctttaatacttattcagaaagaactcttattaataaacataaagaccaacacatgttcaaaatttgagaaatactgaatgaatataaaatagtattaaaaatggtataaaatagactaaaaattaaatctaccattttaatattaatttagttcaataaataaaaactcattagaaaaaataataagaagaaacaagcgctaaaaaatatctaatcaaacgacgtaccaataaaaaaaagtagaaaaatataccaaaaagtacatattatgtttttgaataccaattaatagaaaataattatcataaagacttataggtaccaccatatttatgattttattaaatactagaaggaaagaaacaataatccttcaggtaaatactattttggaccctgtattttgcaaaagttaccaattgaaccatctgttttgttaaatgacaaaatggaccctgtatttctcaaaatggtacaaataggacactgaactacttttctgtcaaaagaaaatttaataataatctgatc

SEQ ID NO: 389300 - DNA, 3028 bp, Cannabis indica
cgccaattccctgcctcgtgtgcatccctaacaaagacccttctcacctttgaatttaccctggatcctaccattcataagaaggttataattggttccccttaaacaagtcataatccaactgatgaatcgagctggaaaacaaaggagcttcactaaatcttccagaaacagcaagtcaaccgtgtcataggccttgcttaagtcaatctttataatacatcttgccgatatgttttcccgcagataacctttatgaagatcttggaaaatcattaagttatgagcaagaagtctattcttcacaaatgccccttggttactttggacaagataggggagcacttccgaaagcctagtacaaatcattttcgaaatgtatttgtatatcatgttacaacaggcaatgggtctataatcacttgctgacatcgggttcaccaccttagggattaatgaaatcaccgtctaattcaagattttaggcagtcttccttcttgaaagaaaccagctcttgaaatatcttcaccaatttccttccaaagatttttgaaaaaacccgacccaaagccgtccaaaccaggacttttagaagagtggatgctaaagatagttttcttcacatcactcttactaaaaggtctaatgagactcacttgttgcatcaaattgaggcaagcttcctgatttatacaatctttctcgattctgctagtagttgaacttctactgcccataaaatgttcaaaatgagataaaaagtgatgcctcaccttgccaaaatcatcttcaatagtgttaccttgggagaaggtagttattctatttttgagctttctttttctcatggaagcatggaagaaacttgagttttcgttgcaaaatttgacccaagtaatcttactctattgagtgataaaactagaatagtttttctgcagttgttggagatgctgcagctggtttgaagcagcctgttggaggcatatatcatcagaattcttggcagcttcaccctgaattctgctataaatctcctttgtttctcggtatttcaacgcaatgtcatccacctcactcctgctgaactttattaatttctgtctaacccgaaaaagtttctgcattacaccatccaacccgtctcttaaagtaggacaactccaagcatttaacacagattgtttataaataggaatattagcccaatagttacaaaatctaaagggtttgtatcccacattattatgctcatggcttcgaattatacaaaagttgtggtctgaagcattatcccacttgaaaaaagcacatgttttagaaaaaacatccagccacattttattaacaaagactctatcaagtttggagtatataaggtcatcaacctcatgcttattcgaccaagtgaaaaaagctcccgaacacctaaattcctcgacttggcccaagacaagccaattttaagcatcctggcttgaatttgtcttcccctatttctgtcttggaacgagaacatgacattgaagttaattaaaatgacccaaggcaagttaggttaaccaatactacgaagcttcatccacaaattcttcctttcttattttgaattactgccatacactacaatgactaaaaacatctcttttggcccacacactttgatcttacaatgaacaagctcagcatcctcaagaattatatcaacttgaacaaatttcgactgccatagcatcaatattctacccgagatgatgctactccaattaggaaaattattctgaaccatctctttcactttgtcatgcttcaccttagtctcaaacaaggctccaatcccaactttattcatcctacaaacatcaagaatcgctctttgctttttacttttattcatacccctcacatttcaccctagcatattacaaacttccattatgagcaagcgatttagggggaaccaaaatctcttcattagtctctcgtaacaccgcatagccattgttactacaagttttctctgttacccctgtcctaaccactgtaacaactttcaatcttttttcctaggggcgatccactcatctgcagctgaaccttccatgtgcctaccagtcattatctagcttttttcctttgtcacctggtctagaccttgtttttcattctcagccttagcagcccctgctaccccattcgaactagaatggtcaagctcatttgaaggattaactgtactcttatccttagaacctgctgtgttcttcttcttcttcctaacaacctttctatctttattacaattcaccaccgtatgacccaattgctcttacgttgcacactttgttggaagccattcatactctatcgtttgttccaccaattgcttcctctcattaataaacgagatgatttttgagggattatcagaattagcaatgtccacaagaacacgagcaaacttcaccattgatctattcaacgtaaatttttcaaccattatcggcttaccaattgtactcacaagagcgctgagattattcttgccccattgtaaccccaatccattaagacgaatccaaacttgtacggattgaaccattcaagcaacatccaaatcgattgtccaaggtcggagaaccactggttttttgtcaaagtgaatcatgcctgtttctaggattaagccactagtggcttcatcactgaatttcaccaaagtgaacccaaaatgcatcctagccactttctcaattccaagcttaccccataccatgttaatgaagccttcgaacactttaaaaggggggtattaacacctaaaacttaaggggcatattaggcctaaatgtttcaccatgcaaaatatgtacaaaacaaattattttggtaatttgaaattttttccaaagaaacatagtgctttgaaataaaaatggattgaaaaagaaaaatgtctagctggtttttttttgataaaagtgttgcttctaaaatatagtattttgacagtggttgttctagaca

SEQ ID NO: 389301 - DNA, 769 bp, Cannabis indica
taaaaattggtatttttataatacgcagtgcagtgccgtttgaaccgcatattaacaattcaaaactataaaccgcactgcaccgcgtaatttaaaaaaattcaaaccgcactgcaccgtaaagaattttaaattgcattttttttttgtaatgcgaacaatttaaatgatttgatgaacagctaaaatttgtatcactttttcacacaggattagattatatttttagtaaggtaaactatattttagcttaatcatttatttgtatctttagatgctctaataaaacgattctggtataaattaccaccactaccagattacatgttgtaggttcagccatcaatttcccagtccaaagatcgatgccttttcgtccagggaaattcatttgtgacacctattaactacatttaataaacattcctatatattaataaaaattatagccaaacatatatcatatatgtatgtatcaatctttcgacaaagcattaaatcatagctagattctatggtcaccagatacaaatttcaggtccacatctatcctcaagcacgttttggtttcctgtgtgccttgggaaataatgacttctagtgaaaaattatatgtatttaattatgtacatgtgtatcataacatgacagaaaggaacatatatataataaggtaaatttaattaaatgggaagagattctcatcaagtattaaaaaaaatggaaccaaaacctcctttgtctttcaatacgtgattagaatttggag

SEQ ID NO: 389302 - DNA, 976 bp, Cannabis indica
aagattacatattcatcatcaacaatcattcctttggcatggacataaatcataaatctttaggaacttctggaccgatgcctatgaaaatgattaatacatatgtagaaactattttaaacgtagatttgatatcagttataatttttctttagcaagcagatttcataaatgactttacaaaaaaaaaaaaaaaatcctttctaaattacatttattcatcgtgtacagaatgttttgtaaaaatagccattatgaaaaattttattaacaaaataacgttacaaaaaatttgacaaaataatcttgtataatgagagaaacgaccgttaattacactgtgggactataaacgaccattatgaatgaaaaaaaccataaatttacaaagagtaaatagagtttattttgaaaattttagtatttcacatggttagtttgataaatttcactccacatataattaaatattagttgcgggagtaagagagaaacttcagaatgaatactatgtattcattaatttagaaaaggtacaaaagaggagcttatatagctcactgtacaatgagtcaagttacaaaactaattgtaatgctacactaacaactaactgtaactaactcctacctaacctagctaactctatcttgacactccccctcaagatggatgatatatatcaaccaatccattcttgtgtttgagagctttaaaatagttaggaaagagttcattggtcatattgtcaactagttgatctttggtgcaaacatggacagttttgatcaaacccttaaactttttctcttataagatgacaatcaatgtctatgtatttcgttctttcataaacactcagtttgctgcaatatgttgggcaactttgctgtcacattacatcaaggtaggtcctttgtgcctgttagatattagttatatattagctgtaaaagaattagatatttagtagata

SEQ ID NO: 389303 - DNA, 2106 bp, Cannabis indica
aaatacatattggctcatcacaattgtataccttttgataatcagataaataaactgcttctgatttagagatctagggaggaagacttagttgatagtattgcactatcaaattggagtaactgctgtggatcaaacagagataattgctatggatcaatcaggtacacatacctaattattatatattactattgtgttctatgttatatacatatagatcttgggttaattgttaatttatctaacaatatatacaaatatatatatatatataaatgtttcctttgatgatagatttaaagcattaactctttctacattcgataacattcacaaaattctttgatagaaattaagctacaaagtttaaggagagttaaccaaaataacaataatggggtatcgatcgtaccagtttataaaaaacaacaatatataaattatagtacgtacgtataattagatcaatagtgaatcaatggctcaaaaagaattatgggactcatctattctcagttaatggtacaataggaggttgtgaaaaatgagtgggactttaaagccatttaccaatttccattaattttctcatccctacactccaaaatgcacatagactcgtagtcataaatagtctaagaaataaggcactagtaaaaaaaaaaaaaaactaaaaaaaaaattctaattataataaggtgattttataagcccactaattgatgcattcttacttattcagcatttagaaaaaaaaaatattttaatttttttatatgtatttatgttatagttatttaagatatcttacaaaattttgagagattcaaaataatttacaatataataaaagcggatttaaataatttattttacacgcgtataaaataaaatagtcacgagtgcaataaaatttttgaatcttattttcggtgtgttaaatttttccaataagatgtcttaaataattataatgtatatgaccatcacaaaaaatttagctaaaaaattattttaaatactaaaacaaataaagatatattaatacatcttaaaagattttaaggggttggattgtaaaattttctatttaagttttgcttgaaattttgatggtggattttgggtatatgagatgtggaccggaaggtggtttgcaattggtggttacaatttgtggggtatgactcttcttaaaaagagaaagaaataaaatatatattgtgggggggttattctttcttgaactgagtcagactcataccacaaatttgataaaaaaatctcttttatatttattttcttaattagaagtgttgtagggttccactccactacttgcttgctcttcacctaataataatagtaataattgataataaaattagtaataaatggtttctgttaacactctttgtcctctattgactttacaaaaaagaaagtactgatatcctccaattacttcactcacttatatttgtagggaaaaaaaagtagaaaggtcagacctattatttaatatggcaaaactaaatagagaaaaatgatgtttaaaaagttatcctaaataatgatatgcgccagacataatgaatcaaagccccatactaattaattatttggcaagaaaatttgaagacttatataattaagttgccaattaatttttttttatgagatgccactttttctacacaaaactgaatttctgaaaagtaaataagtttatctgaattaatatatgtatataaaaacatttgcatgtaaagttagaaaagtatctgcatatgaacctgatcttactaggaatgaaaaaattattaaaagaaaacctaaaatagcattgcgttttagttggggtattgaatttagtgtaggctacagaggttttaataattacttggatgtttaaacttgtaagttattagctatctagtgtattgttctttcacctatttaaacgcacattcatataatgtagagaaacagtaaaaggcatgtttagcacacttgtgagatttaatattgctaattttggtttaaattaatattgtgtctcacttgttttattttaaataaatattagaaaaaaacttacta

SEQ ID NO: 389304 - DNA, 987 bp, Cannabis indica
tttttgttctctggctttggtacaactacccaattcttgatctttcggagtgactccatctccttatccatggcctggaccattttgacttgctttgaccttaaattgcctcttcgtagcttctgggcttttcaattttagttttgtgtgctacagccagtggaaacgcaatcaggtttgcctcaacaaacctttaggttgaatctctctcctagttctatcatgcgccaactgataatcttctagacccgcctgcctgaatccttttggaacctctgtttggtcttcgttatcttccagctcagcattagctttcatttgcttactttgatctagttccataatcgcttctcaatgcgaactctcttctggatgttttgttatgtattccatttccatgcatgtagtgttcttgttttctattttttctacatcacacgaagacacacaacttttcctggatgtaaagtgaggatattccaactcattgaaaaaaacatatctagattcataacctttggtccacctttcttggaaatgaaaattctataccccttggtacctaaggcaaacttaggaaagttcccttaactgatctaggttccaactgtcaatagattggtgtacataagctatacactcaaaggttcttaagtgtgttaggtttgggattatgttgtaccacatttcataaggggttttaaagcctataactctgtttggacttctatttttaagataggttctagttgctagagcctctccccaaaatggtttctctaatctgaaattgaacagcaaacatctaactttattcaagagggctcagttcatcctttgagtaacaccactttgctatggggtcttcactatggttctacgcttagtgatcccatactcttgacacaacatatcaaattcagagttaataaactctaacccattgtctgtcctaaggttcttaacttttagatcggtttggttttc

SEQ ID NO: 389305 - DNA, 1025 bp, Cannabis indica
tagcttaaaatagaaaaaaacccaataaacaacgcccactttggggaatgggagatgtttaaaaaagtttaatttatacaagttgaaataaattatatttttttatttaacgtctaacacgatctaatttataagataagtatatacctaatctaattttaatccatcgattcaatccaactgaatggatatccaattataattcgattagatgtcgaataaactgaatcgatctaattatatcatttatatttatatatttttaaaatacatttataattgttttgacaaaaaataattcattatttatcaaaaaaccagttaaaaatttttagttttgggaaaccctttactccatttcattcttgatcttctctcagccttctccccatccaaccccttttactcttgccctcacttccatttatactcatcttttatctttaggtatctacttctcaaagtatcatttgatatatgtctattattacttatgaggtgtcattgcatatcttgataattgtcttgtataaaaggtgagtcataagttttaggtgtgtgggtcatcttgtctgagatattgagacatcctgttcaagataagtgagttgtcctatctgagataagtgagttgtcctatccgagataagtgagttcaaactaacctaggttggccatatctcataacgatcgtgtaggtcatatctcggactccacatctcggaacgaacgtgacaggtcatatcttggactccatatcttggaacgaccgtgataggtcatatctcggaccagtccaagataaaacatatttcgaactaaccgaggtaggccatatctcagaacgaccgtgataggtcatagctcggactccatatctcagaacgaccgtgacaggtcatatctcggactccatatcttggaacgatcgtgataggtcatatctcagactgctccaagtataaaacatatttcgaactgattcaagatagaggagtccaagactaaatcgagataggcacctt

SEQ ID NO: 389306 - DNA, 1246 bp, Cannabis indica
agatcatgtggtgcagtagattccttcctcactcttttcgatccttttgacaattctgaaaactacgtatcagctataagaattttatactttcagctgctttaattggattatcgataattaccatctaataaaaccaatccttatcattacaccacacaacttaaattattttctttggtgtagttatcacttatcatcatccctactactcatgcatatagtctatatccacttcgtgcatgtactatagtgtatatatatatatatatcataatgtagatgttaaaagaggtcaatattgttggcctagctacgtacactattacaaaaaataaataacaaaaattgaagtaaatggcattccatgttttgtttgatattagtattttaattaataagcaaataagtaaaagccacctattcttccttgttacatgggtgggaatattattatcattattaattatacttaattaattaattaacgtggggtttgggttaatggggggtaatgtaatttttttctttttgcatggtgaaaagtgggaccctttctctttgcattgaactgtttttttttcttcaaaacacaaaatggttcttctctctgtcatggtgggtgggcccaatccttgtctttctctatgtctgtctcttctccaaactttattctaaacctttcatttcaaacataaaataaatgatattctcccctactattgtaattgcccacctatattagaatctttggagccaaatggacctaggctaggcttggctacaccactatctatatttattactatacatccccccttattagtatagtatcattctttgatctactagaatcctctcttatcatattttttagaaaaatgttaaaagctagtgtaatgtttttttatatattaatatcgctatatatttaattaagtattaagttttatatagtttaatataataatttttagaaaatatcgctagtcaattataaaacgacatgtctaaaaatgctagacattagtggtgctcaataacaatgctcatatttttattattgagtaattagtataataaatacctaagattaacttccggttatagataaatacctaagtttatatttttaaaatttctacaggtacttagtcgttaagtattaagtcaatgaccatatgacagttcttgattagtccaggttattaaattttattttatatttaaaaattaatttaaatat

SEQ ID NO: 389307 - DNA, 528 bp, Cannabis indica
tccgagaaaaaccattgtttcgaaaacatgaaatcctgtaattcatcgtagtgagagagtatcttactgattacagcatgcaccgcccactaactatatattattcatatattgctggtttttcagcagtatttttactagtttttcagcggtctttttactggtttttcagctctcaaaattaatatgctctttttagtgggtttttcagctatcataaatcctctctttttacttgttttggagcaattaaatgatgcagttaaaagaaatcacagtcactcaatcagaaattgcagcataaaattcccaaaatcaacattaatgacttagtgcaaatcacagcccccgaagtctgtctgtaataaccaaaatatttggttattattttctatattaggttagtcataatatcttgatgtggaaataatggttttatagaaaatagtattttcttgtaagatatatatatatttttgaattgggcttataaaattaatggatgatttaattaataatcagttgtat

SEQ ID NO: 389308 - DNA, 606 bp, Cannabis indica
gaaaaaatttacagtacaaaaaaaatataaatgcaaacaatttgtttcacaactcgtaaaaaaaaataaacacacgtataataattatttaaacattaattactttcggcactccaaattattttgaattatcaaatactgaaaatatcgatacactcatttttgatgtatatctaatccatccttccaatttaaaatagaggaaataataaattttatggatttttataaaatctgtgaaaatatgggaaaaatttaagaaaaaatttaaaattataggaaaaacaagtaagagtaaccagttactcttatggtaatcagagagataatcagttacctccatagggtaatcaggtaccttacactattttcaccatttttttaagatgttttttattttctaacttaaaactcataaaaatgaaaattcccctttaaaatatgtagtctaagccttaggtatgatctttgttataaaagggggactttactttccccaacaaaatgggtcttaaaattttggctaattagcaatttttctccccgaactttgacatataccaaatcatgccccctgaactttttttaccgttaaaaattcctcct

SEQ ID NO: 389309 - DNA, 781 bp, Cannabis indica
gattaaaaattcagagaaagaacagctcttcaacagatgccaattaattactgaatcccatttttttttccagacttgtttaatttaaaaacttatactaaataataatgaaattaaattcagttcaaaattaaaaataggacaatttaaatttagttaatttaaataggacaaaatttaatagaaggaccaaaatttagtaaggataatagttaaatgagaatttttaataacgaaaacaattcaaaagtacaatacaatagtggtaatagtggggaaaaatcatatttattctaaataatataggcaaccaatttggtgccatttttgggaactaggaattggtcttgaattattgtagcgcaataatcctagtatacttcattaatattctattggaaacggtaggtaatttataaaacattgttacgagacatccatagtatttagtagtatgatgaagtatcactttatacttgattagtgattttttataatatttattaaagtaaaataagttgaacctcatattgagttgcatcaatagtaatattacacctcacaaaaatactaagcaccataagtactccttactcttagcatttctctaatttatttttttatattgagtttatgagacttgggactaggcatggcaaaaagatccattcattcggatcggatcagtgatccgattcgacggatcattactgatccgaaacattcggatagttattggatcttggatcagatccgacccgagtatctgatccagcggggc

SEQ ID NO: 389310 - DNA, 2660 bp, Cannabis indica
gtgccaaaaccttcaatattgatagaattttggatgttgacattactcaagaacacatccttttgtgccatgaacttcttccagttggtttcgaattcggggttacaagtataatcagtcaacttctccatctccacaatctccttaacccacttcatggattttcctttcatcttctcaatcatataaagtccagctcttttggctgagatttgaagatgattatagtgttgaacatgactcatcaaaacagtcataacaacttcttctacataaccaaatagctttttcacaaaagccttgggaatactcgaaatcccattaaccttttcttgcaatatggagagaaatatattcctaggaagaaagttaggaagtgaaatctctttagcttcttccaaatgctttatctcatccattaagaaatttcgagttgggtcactagctggacacttcttaagctcatctgaaaaaccattgagcatctcaactaacctagctttacaatgcattttattatcatttggaaactcatcaaattcacctctcaacaaaactttccttaatgactctttgactccaccaatgatcttcataaaagcactcatggcttcacccacagaagtcaaagccctaggaagagccttaaactcaacaaagttctgactcagcttatcattatttttttcactatttcaggtaagtttcgagatatacttctagcttgaatttgcatgagtttttgagacaaaacaggaattcccacaatcgatttgtctatcttagaaagcaaggaatgtgtcccaaaaagcttagcttcctctaaacgagcttcttcataagattcttgaccaactctattcttcacacaaacaaaccctaatccaatattaacatcattagaagtaaccttttccaaaagcccttctggtgacttatctgacttggtcaccacggcaagagtcctctcacccattttatcgacgctttgagataacctaattgactcacacgtgggaaagtcaacggtggctgataacacattcagaatgatacttgcttcgggttgaatatactccattatgatatccctaatctgatcataaatattccctggttgaccatgaaccggaaccctagttattccgggaaggtcaaccatggtcaaatccggaacccctttctttttcacaacgagagtcaaaggggttttagatattcccttaccatctccggcaatgacctgagtcgccgtgtttatggcttcggagactttttcttcggtggtcggaacttttttctggttgtactcgagaaaaagctccggctgagaactcgagctgttttggagtctcataatgagtgggactcttgtacaaattccttgtccacgtggcaggttgattcttgctagggattctaggacggaggacttgccggaagactggtctccgacgacgacgatggtgggaagctgtattccttcctccatgactgccaggtttcgaagcttgtccactgcatcgagcacaggacgaatcttatcgttgtatgaagaaactattggtgagaggcttccaatgccttcacgatcatcatgatcagtaactagggtttgttttttcttatcagtactccccatttttttttcttatctgagattgaagagagaatatagttaaaaaatgagtgagtgagtgagaagctagggttttatataacaatataattattatatatatatcaattttgttttgaaagagaacatcaaaatcttcgaagttattcttttagtgagatagagtacgtttttcgtaatgaaaaattatatttttaataagaaattagttacttaactattaagaaaagttaagataatattagtacgtagctaggtttgggttgcttgacacgtacgtaaggcacgtgaaggaaagtaaacctgcatgcatggcacgtacgtacatatagcattataggtctatcagtctatttattgaatagttttgattgaaatgacaagggtttgttttatcttaattaattattactccccatttatctgaaaaattatatatttttgataagaaattagtttccttgactattaagaaaatatttttagcataaaaaaaagactgttaagtaaatataggttattttaaccaaaaaagaaaatataggttatgatttgattttagtagctagggtttggttagttgacacgtacgtatataggcacgtgaagaaagctgcatgcatagcacgtgcgtagctagaaaaggtgacatcatcatcaaactttccaagaatatatcacctaattaataataataataataataataataataataataataggttttttttttctctttcattatattcaagctaattaattgatttaactaatatgatattatcacatcatatataaattattagttttttttggtgatgtaaattcacattgtaaactacacattgttgtagtggaaattttttttttttttagaaaaaatatagaaaatatattgtatgctaaaagattcaatatattaattattacattatctcttataaaattagagtaaattacactctatattctttttatattgtcctcttttatttttatttttttttttaaaatctat

SEQ ID NO: 389311 - DNA, 741 bp, Cannabis indica
agcaaatggagttgtttttcttttgattcaaatctctgcactacacttgaaacttagtagtatattgtctaacatttctagtctcgaaaacttgaaataagagaccatttcaaatcgaaaatcaaagaactcgattgtcaccaaaaaaataaactatattttagtgacaacataatatttttcgatgtcacttttagtggtaatgaaaagttactaaccgctcaaaaaaagtatttagatatcagttgtcactaatttaattttttcttatgactaaatgtattcttaatcacaacaaactatgatttttataactaaaactttttagctatagattttttaataataacataggtttattgatattattttagtcacaatttttttttacttttagtaatatgataagcctaagaatagagtttgaaaccttttttcttatcttggtttcaaacatttcaagtctagaaaagttgaaataagaaaccatttaaaatcaaaaatctaaaaactcaatcgtcactaccaaaaaaaaaggatttttttatttttacatttcaaaagcagttttttaacatttgcataaatccaaatagcaaccaacgaagcaacttaaatcgcaatcaaaatccacatagcaacttacataaaaaccaccggagcaacaactagagcaacccaaaccgtaaatttgaagaaaaaaaaaggttaaaaaatggtacataggaaaaaaaaaaccta

SEQ ID NO: 389312 - DNA, 738 bp, Cannabis indica
atcattgtaacacttcatgcctagaaatacaagcatctctcttcctccatcattgctctaaatatttctttattttttttttgaatttttaccttttcttcttcattcttggtctagtttttgagttttaaaattttgaccttaagttcgttgacaagttttcaccgtcaacataagagttcaattctatttttgtattgaagtaatcatgatataataaataggattagttgattgatgagattcaatagtttgttggagcttagaattataattctatggtccccagattgccaccttagaacactctcaaggttagggattaaagttatatatggatgtttggaaaaatctatttcgatatgtcaaagtagtaattttttttgtagtaaataatttatttttcaaatttatgaattaaataaatttaggaaaagatatctggagaaaagacaccatcaatatcttgttaagacataggtggcaccactatcactgagtattgacacattgataggcaccccattaataaggttgtccccactagatttgttttttggttaataaattcaaaaaataaatatttatttaaattttgatttgaagagtaattatatatatttctatttgttgaaatattgtctgaaggtagttgagagattccttcaattaattgagagattccctcaatcggttataagaaataaatatctataacataatttatttatattattt

SEQ ID NO: 389313 - DNA, 537 bp, Cannabis indica
aaaaaaaaaaatcataaacttgttacttgataaatataaacttgaatatttgtatattcaattaatgactccattgaaacttcagatcttaacttactgagatatttttttttaattatttgatatatttattaacaaaaaattatacttgttttcttgtttaaaggataatatttcattccctcgaaattataagccataactaaacagctcccactccttataaattatgagttatccattacaacataatataatataatcatttttctccatattgaaaataatcgaatttagaaccataaagaaatgtaagtaatgtggatggaaatattttccaatatatatgcattgttaataggtctatattttatgagatgacactgtaaataataggggtgggcatcatccaatccaatccaattgaaccgaaccgatccaatccaatccaattacaaaaagttggatatccaattacaattggattggattggatgctaaaagttggattctaattggattggatcggttattgga

SEQ ID NO: 389314 - DNA, 1145 bp, Cannabis indica
tttttaacttatacaagaaaaaaaataactaacttagaaactaaatgtaaaagagaattatatctattgcataaaatataaatacatacgttatattttttaaaaataaaaaaatatatattgacttatttaagctttaagtttttgaaaggttttttaaaaaattactgcaatattaagagtaaatttaatgtaatacaatgtatgtaattcatataataactactcggttttgtaacacattaaatttcactagtatttttaatatgtaataaactatttaataataagattcaaatttcttgtccgaaaggatgtcttagtttggtgtctaccttattgcattaactttcaactttaactatataaaatttaatagtaaaaaaaatatattgtccgtcggtcttcattggacatggttggagtgttttaatcttatttctgtgacatggtttttggtatttcagttttgtatgtgatatgattttgtttgatttgtttccttattggtccttctttattcttcaatggctggccatcaaatcactattagtggttgggaataacaagttttttgcgattgaagaaattattagtcgtgtagttacgtatattgcacaataattgagtgctcaagctacaaagttgaatgaacttattgccatagttgtaaatacgctcgtgttgtgctagcccgatccatattttttgggctttctaaaatacgggtcgtgtcgtgccggaccaaaaaaaatataagtcatgtcgtgctatgccataaaaaactatgggtcgtgtcgtgtcgtgcaacaattttatagactaggcccatcatgactcgtaagtccggtaatagtttcgttgcgtgctcggattcgtactccatatttttatatttttattacaattaatgagctaaatactaaaatatgtgtatattatagttttaagagattaacggtaaaatcatatgaactttatttttttttgtctaaaaatctcagttaaatatcacaatgtactgcccacgtgtacacaaatgtactcataacaaatttttaatggtccacataatattaattatttaaatattataaaatataatttaaaaattataaaaataaatagaaataaattataaaaaa

SEQ ID NO: 389315 - DNA, 538 bp, Cannabis indica
agattatagccatctcaatagggaattaaaacgccaattcaagctcaaacacaagattaacatcaacgtactcttcaattcaaagacccatgaaactagcaactaacaaaattaaaaaaatgcacaaattcaatatattatcagcaacaaaatacaaagtaaagaggtgcaaaactacctcaagttcttcacaaatacaagctccacaatcctaattcaccaagcacaaatcaaccaaatctaatttgaagagaaataacaaagtggggagttgagaaagagagagagagggttcgactaggagcaaggaaaaccaaaaacgagttttctatttttgccaaaaatcccttttgttgataattaatcaaaaggtccaaagaccaaaatggccttagggccaatataccacatatgcatacaacaagggaaaaatttcatcacataccatacttaaataaatttcaaattattcaattaattataaaatgccaaaataaaataccgaaaaatgtattttggccccgaacccggttcagcc

SEQ ID NO: 389316 - DNA, 1888 bp, Cannabis indica
tatactctgtattcaaaagatatccctaataatacaaactcgttgagtatatagattttaactacaaaaccacgtaaaatatctggtgtttattatcctaattatcaaattctgtagtaaatttattacataaaagactatatatttagttaacaaaaattcgcgttaatagtttaatgctttcattgagagtcttggtgataaaaacttggaaaatccttccttataaaacaaatacaaacccatattaaatggctgataacaacccacatgacggtaatcatccagagaaaagaacccattgtcctggcaaagaatccatgggtctcagagaaccaacacatctgaaacaccacgtttaggaaggaatgatggtaatttcaatcctgttggtgatcaaatcccagaaagaaggagtgaggatgcctatgacactaccatatacgtaccactggtagaattagagaataggaaacttcgacgacgcttggctgaatcaaacagacaaaatgttgagttggagtgagaagttgtagcagccagggctgcacagaggaccattcctcaaaaccaacttgatccaactgtaaggagaccgcgaggaagacctcggggttccaggacccggagacatgaaaataaccaaggggattcctgaatactcaggaagaacaacatggggatacaagggatgtcccaatggataatcaacctaacccaaattattattttgcagcataccatatgctaaggtggtagggagcctaatgtatgctatgatttgctcaagatctaatattgggtatgcaatgagcatggtaagcaggtacttggcaaatcctggacaacaacattggtctacactcaaatggatactcatggtagataaaaggaactctagacttgagaataaagtttagaatgagcatttacaaaagaagtagtcactggttgtgtagactctgactactgggtgtcttgacacaaggaggtcattcactgtttttttttttcagagtacttggtggctgtggtagtggaaagcaacactgcaaaaggtagttgatctgtcttcaataaaagcaaaatatatggccgctattgaagccattaaagaagtcatatggttgaaaggtttcactactgaactagggctaaactctgaagacacagttgtatactgtgacaatcgaagtgaacttcatttcaagaagaaacctatgcatcatgagaggtcaaaccacatagatataaggtgcacttcatcagagatatcatctccagcaacaaagtccaagtaaagaagataaacactaaccacaacctaacagatctatgctcacaaaatgtgttacttcagagatgtttaaacattgtttaaacttacttaacattaaggtagaaattattgtaattaagacactaaagggcattgactctacaacatgatcaccaactgaacatataactaatagtgttagttaagtaacaacctcaactaacctctattaattttactctatcccttgccatttgaagatgggacttgttttgttacacagagagaagtgattgagccatttttgagtgaatggagggatgtgaaaggagattcccctattcttgaaatagcttcccccatgtgagattgatgtataatcttgttacattgtttagtggcttgaatctctatctttctatcaaagattatcaataaagcttctttacgattcatggcagtattgagtatgaatcacattgattttacattacaaaaaataattatttttagtgacaaccttttagtcacaacataaattttttgtgactaaaatatagcatagttacaagttgtcactaatttagttttagtcacaacaagtattgt

SEQ ID NO: 389317 - DNA, 874 bp, Cannabis indica
gaacattttgttaattttttttaaaaaatagacatttattaacttaattgttaaatttaagaccattttgcatctgggccctcattttattcagtttaatttcggtaatttacttagcttggcctgcacaccctgggcccattctattttagaggaccaagaaagattttgaaaatacacataactatttagtagttttaaaaataccaccgtttttttaaaataaaacccactaaagggttggtttgtaatttttttttaaagggaaatccattaaacagacccaacgaataaaaaggaataggcaagttcatattccaaggtgaagctttcgactccaaagccaagttagctatagtgtagctacactatgagctagaagattaacatctctacgcacaaaaaaaaactcaaccgacacaaaatttcatctcaaatctgagatttcaacaagcaaattgtccacatcacttactcccctatgcaatgtcagtaagcaaatctaccaaggataaagccaaattgattgagctgacgactatgtctctacattattatatggataataaacgagagagaaaaatacaatatgcgtactgacatttcgttttattaataataataataatacacaattgttaataagtattaccggttattgcttcagtaattaaatattaaattttatataatttaaaaatataatttttaaaatatatcgttaattaattggtgcggcttataaaaatggataattacataatatactattttttataaaaaaaaaattatatttttacgttttaacaatttttttttacaattttacaatttttcataaaaacaacacgaaaataaaaaaaaaactacataa

SEQ ID NO: 389318 - DNA, 979 bp, Cannabis indica
ttttttttttttgttttgtaaatttaaagtttgaattgttctagtggtttctatgtggattttaattacaatttaagttgttttgttagttgttatgataattgttatatgaatttctaccaggaatactgaacaaagatatgcaagcattgatttcattctcaacaagcttctacaaatatctccaattgaattctataaactcagatccaataaatctactcgaaataaagaaacttcaatagatcgtaattgcactcaataatataaggatatttattatttgtttactcattttatagagcaaaatgtagcaaccctctcctataaataatgaaggcattcacaaggggaagggggctagaccgagaaactaagagctatactcatatttacacatctaagaacaatttgctgaaaggtttcctctataaatactttgagaaccaaaactagaaatcactttatattccttagtgatatgtccagtattatctcacaagtaatacaattaaaggagaataggtcattagccatatataaaggagctgaatctttataaatctttgtgctttttttactcttattatttttactccttaccagtaattgactagtatttattatactccgagtcaattagcgattttcccgatcaacaatactcattaggggtgggcatcatccaatccaatccaattgaaccgaaccgatccaatccaatccaattacaaaaagttagatatccaattacaattggattggattggatgctaaaagttagattctaattggattggatcggctattggatgtcaatcttaaaatccaattaaaaatcgatccaatccaattacatttatatatattaaaaaattatttatataataaaaactattaaaaaatataatatatatttattagatttttttgtatgttgaatttgtaacacttgattattttgtatatttattttcat

SEQ ID NO: 389319 - DNA, 1401 bp, Cannabis indica
aattggaccatttattttgttaaataataaaataaaccatgtattttctaaaatagtacaaataagaccttaaactgatttttttgtcaaaataaaatttaataataatccgatctaaagatgttatcacaaaactatttacattttctgtatttgttcgtgttatgaattgttttcaaatttattatattaaaaaaaatatcaaaaatcaagctcatggtcctatttttactattttggaaaatacaatgtccattttgtcatttaacaaaacagatagtccaattagtaatttttacaaaaacacagaatctaaaatagtatttactctgtattttttcacatcaaaattagttaaatatgaaaagtaaaatgttcttttgaatttttcaaaaacaaaataaaacaaattacaaatcaaatcaaatcacaaaacaaaacaaaatgtacacttaggtttgatttgagtggtttctataccattaatttgactaatcatgtattagttttcatgtttgtctacgttgatatttatgtttcttgttgtatgctttacaattttatttatatagtattaaaaactcatttatttatttttcatacctaataatatttgctaaacttaaattaaatttaatttgagcttattttgaggtgaaaatgatgaagatataggtaatttagatttggagggtgaggaaagggataaaatggtcattaaataaataaaaagaggatagagaagttattaatagggcaagttggttggtagcaagcaaaggccaccgacgaaaaagtgattggttggacggcctgccatgtcagcttatggatattttattttgttttactttaaacaaaatcccaatcaatattagtcttctaataaatattgagctgagttaatatatatttagtcaccacatcaaaaatatgggtttaaacacgatatgataaaaaaaaaatatacatttaaacatgatatgaaaaaatataaatttaagcataatacgatacgatatggtacgataagtcagaaagtatagtatgaaaagacgaatgaattagcttaaaaatacaacacattaaaaagtctaataatttgataataataataataagagtaaatcctattttagactttatattttgtaagaattaataattagaccatttgattgttaaatgataaaataaaccctgtatttttaaaaatagtacaaataggaccctaagtttaattttcgacaattttttttaatataacaaacttgaagacaattcgtaacagaaatagatatggaaaatttaactactgttttgtcataacgtctctaggtcagattattattaagtttattttgacaaaaaattaattcaaagtcttatttatactatttt

SEQ ID NO: 389320 - DNA, 1490 bp, Cannabis indica
tttatcaaaaagatcacatttttctctcaactctctctctctctcctttcgaatccacctagaggcagctagggtttgtcaatttctcttcattccaagcttaattcagcaggagttggtggtttcaagctttaggtaagcttctagtaactccttcatagttttcttgggtttgaagttaggaattttgcatgatttttatgaattgagttaggtagctgctttttgtgtttgggtttgttttaagaagcttatttatgttttgatatgttgatttcagcatgttttagtagttgttgattagtttaaccaagttttgagtttagaactcaaacatagagctctaatggtggtttgtgtttctgagcatgttagttggttttgttacttggaatatgttctttgaggcctttatagcaagtgtggaagttattgtggtgtttggggttgatttggttgaaatatggaattttgggtcattcctacactaaatcggaattccaatttagaggggcttgtaggaaccgagattccggttggtccccaggaaaccccacagaaccagaattccagttgggaaaccagtctaccggttggggcagttttgggaactctagtttttcccatttttgagatatttaaggtattgtcatgttatttaacgatagggaaacttttagtttcaagtttaagtccctaaaaagtgatttagcgtgtcacttaccagtgttgtgattgatgtgatttaggagcttgtaattcgccgagcagttgttccactcaggttgcccgccacacctaaattcggaatcaaggtaagatcagtataatattttgcatatgtttatacatgtttagcgtgcatgttagttgctgtcagaatacgcaaatctatagccctcagattagcatatcatggcatcagtgaggtgtacatagagatgcaccgagatgcgaacagatatatgctaggctatcaaatactatgaattaattgctaccacatcagtatgattagagtactgagtataggctggatttgcggttagtcatactttgtcaagatcgatcttgattcaattagggttatgcttaagtgtatggggcctgattataactcgggatattaatatgtttattatgttatgcttttcttactgagtctgtcggctcacattgttgttgttatgtgtacgtaagggcaaagctaaagttcaggagccgtgagagcgagcaaatgaagattgtacatgtcggggcggttaggcccggaccgtacgatcctcgggacatcagggcttttattttttggtcgcaaggcgacaagtattttgtaaatgtgtagtaaacttttgtaactgtattttgtaaatgggatcccgaaagtttataaaagttatatgttatgttttaattaaataagcaaaattttaattattcacgctttccaaaaacctcattgattagcaacgagctgcacagtacgttaa

SEQ ID NO: 389321 - DNA, 972 bp, Cannabis indica
taaaaacaacataattacaaaaaaaataataaaaaaaaaataaaaatatatacatttaaagatatatttacataaaatcacacaaattgatcatcaaataatattatgtgttaatgactaaacttacttcaaatatatacataattatatcattaacaataatagtttttataattttaatacaatacaataaatgtcaacattgatattaaatatacgaacgtgatcttaatattaaagttagtaatattcaaaatgattcttaaataataaaaaacaaaatctctattaaacatgtaataacattaatatgatcatgattaaaacccaaataactacaaagtaaatttttgaaaatcaaacacgtgatcatgttttatatttactgtaacaatggcatagaaatttttaataatatatattaatgtttacaaaaacacaaaataaataattttgtgaaatagttaaataaatattaaacaattttactatttgaaaacaaaaaaaatttgttattgagaaataaatgcttattttttattttattataaattattataatttagatatttttttattgaaatataatatcaattttttttgagtgaaatatcaaaattataactatcaccattaattagtagaataaaacctaattgttgatagttataccatgtagttattaattaatttctaaaaatgtatatttttaaaattgatatatttattattattttttttgtaactaagtattccatataattagaagtcaaaggttatatagtcaaccattcaatccaaaaaatttatttgcattatttttttaaaaaaattaaaagttgtaacttttactaatcaaacatcctgcaagtaaggatttcacaccaataggaagatcatccctaccaaaagtacaatacaaccaacatgtgaataagagtccctaccaagaaaattggcaaagatgataac

SEQ ID NO: 389322 - DNA, 1003 bp, Cannabis indica
gatcctgaaatagagcgcacattctgagaaataagaagagcacaacaatgagcacaaggggaaataaaaagtatggataactaaggagatagacagcgagttcaaagaaggtcggcccctaacaatggtcaaaatacatcgatcatggcagatgatagagatcaaagcattcaacaatatgtagcccctcttttcaatgagctcaatccgggcatcgtgaggccaaaaattcaggcaccatagtttgaattgaagccagttatgttccaaatgcttcaaactgtgagacagtttagtggcgcacccaccgtagatcctcaccttcatcttcgtctatttatggaggtgagtgattctttcaaattgcccagagttatggaggatgccttgaggttgaagttgtttccctattctttaagagatcaagcccgagcttggttgaactccttgccctctacatcagttacaacctggcaagaattagcagagtaatttttgatgaagtattttctgcccactaagaatcctaagctccgaaaggagatagcttccttccaataatttgaagatgactctttgtacgaggcatgggagaggttcaaggagttgttgcagaaatttcctcaccatggcattcctcattgcatccaaatggaaacattttacaacagtctcaacgctcatactcgaatggtggttgatgcttcgacaaatggaactttacttgctaagtcctataaataggcctaaggcctacctatgacattattgagagaattgccaataacaattaccagtggcctactactagagcacatttagggaagaaagttgctagtattattgaggttgatgccatcacctctttggctgcccaagtagcttctatgtcaaatatgctgaaaactatgagcataggtcaacaaatgaatcaaataatgtttcatcattttgcttttattttttattactcaaggacgagcaatactctaagtttggagtg

SEQ ID NO: 389323 - DNA, 1706 bp, Cannabis indica
aaaaaaaaaaatctatgatgagaaatctacctacttgtagaaagaatattggagagaagtaaagcacagtcacaaatacctattttttaagaaaattaatcaacatgtatgagtcttacacaatttttttaaataccaaattgtgtagaatttttcttgcaaagtttaaagcataaatgtgcgaaagtgtatgcaaggaaacattgtccaattgacaaataagtctttctcaaaatgtaaaaattgtaacaaatgaagatgatgtcacactataccaatggtagtcattttctatgataatgtatcctcttcgtaactctgaattataaagttctaacttacttaaaagatgactttcacactgatgcatgtagctctattcttgtacatgagcttgaaacaatgctacacaaaaagaagctcaaacattaaacactgattgattaactagaatatacctagaaagaattgattatttttctctctagaatatacttctatgaactcaaaacagaagtctatttatctagctagacacaaaacagaatttttaaattaattgacaaatttcttaaattagacaacacacatatgatcaggtatcaaacctaagaacaaggaaatttaagatttttggaggaaatcaaagttaactgaattaggtgccttagtgaaaatgtcaacatttcatttatgtgttttaatatattccaagacaaggactttatcttttactaactttcttataaaatgaggaccaatgtgaatatgtttagtacacaagtgttgcacatatttctttaaaatattagtagcacttgtgttatcaaaaaagatagtcaaagtgtcaagatcaaacctatataatccatcatcatttgcttcatccacaaatattgaacacaaaaacttccaactgcaatgaatttagcgttagttgttgatagagaaatcgaattctattttttgctatgccatgaaacatgattgtttcccaagtagaaacaacctccactagtgtttttcatttcatcaatattttctgcccaatcacatcactaaaataaaaaatattagcattagtttcttttgagtacaaaataccatattcaacagttccatgaatataacgaatgactcttttaacagctgttacatgagactttatgggattttcttggtacctggaacacacaccaacactataactcaactcagttctactagtagtgagataaagaagactacgaatcatgctcatatatagtgtaggatcaaatttgacaccattttcatcattggacaacttcacagttgttcccattggtgtttttgcaatctttgaacttttaaaaccaaactttttcaccaaattgctagtatatttgttttgagaaacaaaaataccctcatctaacagcttgacttgcaaattgttaggttgtttttagtattacttttaggttaatttttagtgtgtttttaatttagttttaatcgtgtttggagaaattttatgttttttatgttttatttttttcaaatttaaaatagaagaagattagaaaatatcaaaggaataagatagaaaaaatataaaaaaaaaacctcacaaagaagatatataaaatagagaaaattgtgtaagaaaataaagctgaaacttcaagcctgaattcgactatgttttgattatattttggaaa

SEQ ID NO: 389324 - DNA, 665 bp, Cannabis indica
ctgtccacaccagtaatcggccattcaccgctggaacgttgcaacaatttgtatgcactacgaactgagtaaataccggatgtttcttcagaccaggaccagcgatcctccatacgagagtcacacaactgaatggacaaaattaaagctttatcctgaggattaaaaatatcattaattatctccgaatcccactcttttcgatccatctgcattaggctgtcaaccgttcttccttcaagactggggtgaaaagaagtaacaaatttattgtccaaaccaggtagccaagggtctgccatgataaaggtagatttcccatcacctatagaccttgaaacacccagctgaagcagagatttggcctccaaaacactacgccaaatgaaactcggattcggacccaattcagccgataagaaattgccccgtggaaaatatctagctctgtacacctttgccaccaaggaattttcattagttagcagcctccacccttgcttccctaaaaaagctagattatagtcccgcagatttcgaaaaccaagccctccagcatccttgtgtcgacaaagtttacgccaactcatccaacttactccttttgacacatttttagactgagatttccaccagaatttagccattaacccctcaagactaga

SEQ ID NO: 389325 - DNA, 546 bp, Cannabis indica
tatatttcaaacatcatcattactattgttatatttaatttgttaccaatgataccactatgaaattagtttttgtttttaatgatacgttggcaaccagttacaagttacaactatcatttttcttttcttcagtaatttggtgggtaacaagttactcataacaaaataattgttattcttataataatcaaatccgaataaaggaaatacaagtttatgatcgtgatggtaactggttgtttattagaatttgaaaaaaaaaaaaattcttactgttattgtttagttagatggattttcttggtgatatgagaagatggtacttttttgcttatggtttttgtgtatatattaatagataattcatattttaacttttggccaactacccatatttatggcattatttatttattttttttggaaattacatattttttatggatttattacaatgtaaatatgtttttttagcgaaataaaataaaaaagcttatccatatatctttatatattaaaagtgtctatctaacggcatttctt

SEQ ID NO: 389326 - DNA, 1156 bp, Cannabis indica
actaataataagcagaaagcgttgcttcatcaaaaccgacgtcgtttctttggttcgaaatgtccaacgtcgtcgtttgattacgtggcggcggattataaggacgatgctgcgtcgagatctcctaattcggctttgtgttttcctaatatgacgatgagaaagaaaaaccattggaactgtgtttctgttggctatgttaattaattgtttagaaccatgagattttaatttttaagtactatagatcaaggtttaattaataattactactatggttagtgtttttgttcatgggtacttattcatatatttaattttctatgattttgctattataaagtatcgcggatacttataattagtagcttaattattgatattggtatattattgtaagtattaatgtgttcacatattactcgtttttgtaatattattgtcatgcatatatatatcttattattatgatgataataatgtgaaccatttaatccttcgaatgatgatcttttgtacatttatttattttcaagtgaaataatttatataatgaatttggtcggaataataaattcatgatttcaaggatcgatttttccaatttactacatcatctttattcattatcatatatattaattactctacatcatatatttcatatacacacgtcacatgtgatttgtttagaccaaaagagttcatatatatttggtcagataatatgtgcagaagggcatgtatgcttatatggatagattgatttatataataataattgaaaatataaacttatataattattgtaagaatatggttacattgcaaacgaaaaaaaggccaaataataaataatgcccttgtaatagatcatcatctgccgtatagaaacagtgaactttaatgttagtactactacttactttcatactggcaaatgcaatggcatcatccttcttccacaaatgttcacgtggatatctcctacttattaatattttttcttttctctttctcttaatttgtgtgcctattaattacttgttatttaaattaacttttcctacaattgcttatttattgtaatttttaaaatggtaattgcctttattaatggttcaataagctgtaaatgcatgtgctagtactcaca

SEQ ID NO: 389327 - DNA, 1013 bp, Cannabis indica
aagacccaacaggcatggcatcatataattagttgcattttgcaagttatgaatgaaaatgaaaatgagttttgaacatatttcaggaggacgaaagaattcggaataacaggcttgcgctgctcaacaaattgctgaccttcctagaggcattgctgacctttcagtgttgcctggattttaggttattctaaagagatgagctcctttttgtttactttgtcgaagtttcatttttcatttttattttttggaaaataagaatgttggaagagaaattatatgttgaattatcatgtcttctattttgctggcttacttgtaaatgtaatgttttatatttaacaaatgaaaacgtattcaataaatatttatgatctctcattaatatttaacctttgatttgatttttaattgtaatttcttcttttattttttacaattctatatagtaggaatttgaaattatgttattagctacaaagtgacctttttcccaactgataataaaacattacaattgtaaaaatatggttcaattatttaggcttattaagtcttaaactctccaataattaatggacaggttttattgatgatgttattacttgattagatggtgtgtggttcatgtaatgttaatttgcaatctgctaatggtgttaagtttttttgttttgttttgttttttttttttattaaagaattaacattgatacagaacttaagggaaggccaaatcaagccatgaaggcatgataggcaactgaaggaaaacctccatcccacaaaatagaatccttaacatgtatggcattcttagcaacacaattagggatacggggtggggaatttgcaaggagtgctcctcctgtccctattcccgttaaggattttaattctcatccccacttattctccattgggaatagggccggaaatcccctaatagaaaaaaaaagtttataataaaaattttaatatacaaaaatattaaattatataaaaattaa

SEQ ID NO: 389328 - DNA, 1479 bp, Cannabis indica
tatatttggtattgacttaaattaataggttgtgttaaattatactagttggtggagaatagtattatattatgttatatatatatatgtatttaaaaaatatatattttaaattatatcaaaatggacctcggacctcgcacccacaacaacaatagtacccagatccgtattcggactctagccttgatttctaacccccgaccatatgaacgctagccccaacccactcttgaacctcgacccctggccttgtctcaaaccccaaaccctgatctcgacctagaccccaactctgactctgacgtcgacctgggccccatacccagcttcaaccccaactgcgaagcatagtactaaccccaacctcaactctcactttacaataaaacccatttataagacatgccaaacgaacccaaagattccaagaaaatgatttgacaaagcttttgtagataagatgctataccataattaattgttgggctttgtgccctaaataaaattctatttcaatgtaatattttttattcaattatcaataaagaaatatatttatattcattacttgtttaatgtgttatttggttcatgtgattatttacatgtttatttgatttataaattcatccaaatccttatcacattgatattcttattcattgtgtcgtcagcactgtgaaaaataatcaagattgtgtgattaaatgtatttctatgatttatcagtacacaaggtttaactgatagtataatctacaatgtagtttacttcattggataagtgtcatgtcctttccagggtattggttaaagtaagtgtaggaatatttattccttctttacccctacacacagcaaaataataataaaaaacaaggtcagatatgacctttaaccccagttaaagcccctgtttgacttcagtaaagaaaaccaacgacaaccccctttattcccaattactacaggtcgtttgggtatatatctagaaaatcctaatatcaatcatatatatatatatgatctctttatctttcacactcaaacggctacacccaaaaaacctagcagcctccttcgttcttctctaaagaacacagcagcaacaactgcaacttaataaccccactgcccagaaaacaacccaactgagctaccttcttcgttgttcttctttgaagaacacaaagaaaaacccttttataaactcagaaattaaatcccttaaactgagctttcctaacccagaaaataccaaaccgaaaatagcataaacacaacagaaaaatcagcaaagaaaaggagaagaaaacaccagattttatagaggttccctaaaaaattatgctgggtacgtcctcttcgagctcacctcgttccactatggatcttcaatgatcaagagattacaatggtgggattccaaaacacacagctattattttggtaatccctaataattttacagtgttt

SEQ ID NO: 389329 - DNA, 1833 bp, Cannabis indica
caattcaaactttagattatcatgcaaggtcattactgaatccacatgcggtactaaagcaaaactggaatcacttgaatacaaagaaggttttcgaataaaattacctggaaactcaatctagaagtgaagtaattccaaagtcgaactcgacagcaaaattcaagccagtgaactatgaaccaaaattgaggatggttatggagaagagagtgagctcaattccaaatcctctgaaaaacaaacacaattccgatattttttactacaaaatcaatcacttcggacaagaagacactcatccgaaatagtagccaaatttttctatgcttaaaaccgaagaaattttctcgagtaagagagttatacatatatatatatatatatggatatgaacaaccctaagagacagaatcttcggttggaccccaccgaacttcccctgctaccgtttccaagcactgaaaagcacacagcagagtatatctgagatctcccaccacactcttcttctccacaatggattagaatataataaataaataaataaaatgcatcaaatttcatttttttattttttttactgattcaccttaattttttatagtttacttttttttatatagtttttctttctaaacaatgtactttatcaaataaacctttttataatgaaaacgctcttacatggttactcttacactccaagtaaaattctgtcattgtcaaagttattttttataatgtttattattaaaataaaataaatgagatttaacattcaattaaaccattagcaatattatatttccatttaattaaatttttacttttacttataattacaagtataagttttaatttatttttactattttaataactattatatgaatttttttttcaataattttttttaaagtatttgattttttattttttattcaaacactctagaatgattttttttttttataattctaaaaattaaaaaagaatttataaaagagtctacatcttccaaaagtactaacactactagtattttttaatatttttttataaataaactcaaagaagactaaagttgaaatcaataagaaaaaagtagtatttattttggaaaatagaaataaattatctatgtttttttttttagaggaaaataaattatctatgttgtatgtaagttttgaagtcctacaattggcactcatatcaaatattcaataatatcttttacataattgactagaaaagaccataaacgaaaaaagaatggatcaacaacagtctaactaactaaatttaattaactgaatctaacaaactaaaatagctaataaatattagaaaatctttttttcaatcttatatttcgttgacctacaatacaccttacgtttactcaattaaataataaatactaatcttaccaaatttaataattttgagatttgaaacttccattaataaagaaaacaaaaattgcatgatcaaatacttaaaatcacgtgatcaaacaaaaaataaattgcacataatgcaaaacaaaaaaagagcaactatatatgtataatgtttgatataatgctttactgtgtgatatatttttttaatatatattttcatgatttatttaataattttatttgaatttttttaatcagtattgttattgggcccttgtggtacttagcattttctattagtgtcactttataattaattagtaatattttttaaaatttattttttgtaagttatataaaaccaattattttttttttgaatggaatataagaccaattatttaattacactaataaaaat

SEQ ID NO: 389330 - DNA, 1777 bp, Cannabis indica
ttttttttaattatttttttaactgataaaacaaacctcagtctaattatatataatgtaaaaacaatttttttaatttaataaaaaaattaaaaataaaaactcaaattttcataatattaattagtgatgagttatatatttttatatttatatatttatcacttcaactttttaaattttagttgtttttatatgtataataaggtttgacttggataaagaaatagtattattggtgggacggttgggttgtgttgcagggacaacacacagagaagttaatgtgtaataattaaggtagtgttctgttagacactttgtctctaattaagtgtgtgtggatctcaaactctcatctacctcatcatcatcatgtgctaacaaatttgtttacataaatttagcacaagtgatcgagaaaacaatattagacttttgggagtcttctttaaggttttctttatataattcgaatattaattgttcatgattatcatcattcgatgcatgttggaatgtgattcaatgataatttagaggtgttttgatgattaaatggaattagacaaccatactactaagcaagaatagactataattaaccatgttatatatccttgttaaatataattcgaaagaatagttgaaacttgatatcaaattattaattaattaaattaagttagctacaaagatcaatataattacacaagagaagaatggaataatacaaactcaaaatgaaatattgcaagaaacaatataataccatagaaagaataagtctaaaaaatcccttattttaaatagtttatttcattatctttttagtactctattctttaaaataactcactataaaaataaaataaatacttccgaatgacttataaaatggccaacaacaatgtatgttgttgtaacggcatttttcaaatagagagcaaagagtaaatagataactccaataacaattctagtaaattactatcttttagcggtaatgggctacatctacttagagttttattaacgtacgattgagtcttagaatcataagaacatcacttcaataagttttctaagtgcaatataataaagtttttataaagaatgacttcagagcattgaatcttaaagacagagtatttcaatctagaaatcaaaataatgagaagtcggcctcctatttataggttaacgttccctaatggatttagggcattacaatttcaaatgcaaagtaataaaataatcatttaaataaagatttaaatgaaattaatattacttgaagatacttataatgatttctaaaaatgcttccaatcaaatcggtagtacacactttggactattaatcttgtaattggatgaagatagtcgatctttaatgaagtataaaagctcttcaatgatgaagcatctagaaggtttagagagcttctggtgattgtaaatgtcattgaaaggtgggacttatcttattgaaatcgatgaagatagacctgggccaggggtaaaagctttgtgcgcaaagtacttgtacctaggggttggatacttgtacttgaagggggtggagattatttgaacatggaaaatatataaaagtggacctagatatcatataaaatggacttagacttgggtagctaattctacttgcaagatccttttttgctttgttgggttttgttgaagaccgagtttaaaatcgattgttgagtgcatggggagcgccaatgtgggcttttagcttagaaaataggat

SEQ ID NO: 389331 - DNA, 1182 bp, Cannabis indica
tataattgatgatcaaactgtttctaacaaacagttaattatttatagtttatagacgtagttaatacaatatattatcgaatttaattgtcaaacaatactaaaagtagcagtcattccccaaatagcataataaaaatgtacaaacacaattatatatactaaaatagttcttgagctctaaagacataggtagtcatcttttctcttttagtatgatactcccttgatatttggttcacaactaactgggagtcgttgtagatcacaatgttttcggtcccaacttctttagctagttgcaaactagcaatcattattcatgctccacttcattattagaggcaacaaattcgaactagagggcactttggagttgttgcctttgaggagaaattaaaataaaataattctagctttgaagcctttttcgttcgaggctccatcaacatagactttccaaatcaccagtcctagaattggctcttccggatcatcaatgatcctagtgcactccataatgaaatcggctagggcttgacccttaatagatattcttggttggtactaaatatcaaattagctgagctccatggcccacttgagtagtctacttgaagattctggcttctaaaggacttgaaagagagggtggttagtgagtaccttaatggcatggactcttctagagcattctcctcatagatttccttattggcctcgaatttggcatgtagccacactaatgtctcttgcatctaatcggaaatgtcttcttgcatcgcccatttttactgggttttagcaagttcttgagccatccgatgcacttcaggatcttgctcgtaatagtacctgttgatttcgcttttagccaacgacaatgagtctattttattagcgataaatgatatataataacagatatacgataaagcaatataaagacacatgaattttataaaaattcagccccgagcagttcggtaatagcctaatcctcgttttcttttcttatagctcttacaacagtatctctgaatatataattcttagataatagtatagtcttagctcaactgtttttcgaccgatcccctgcccagtgaacatacatcactatttatagggctaggaggcttggggaggaagagtttcccctctcgttacaatgcgtataaa

SEQ ID NO: 389332 - DNA, 1399 bp, Cannabis indica
gcctgaaaacccagccagttgaaaatctcatgcaccacctgccttgagaacaaacaatcaaaaaataagtgttgatgtgtttcaactacccgcccacaaacagcacactctgagttcgaaatgttgatgtggaagacagccaactgatctctagtgaggagatggacatgaaccgattgccataatatgaatctgtgttttggaatattaaacctactccaaactgctttgtgatatcctcctcacaagttaccaagctattatatagtctagtagccttgaacttgtcaaacttaccagcagctaaaatttgttgttgattgaaatcgatcctaagatggcaaagttttctccagtaccaactagaatattgagaaagcttgtagttccaaatgtcaacacccttcaagtaaacaacgttaacccatttgacccataacacatcatgcttcttcataatagcccacaagaactttgccaaaatagctttgttccaattcgccccttctctgaacccaagaccaccatattgtttaggcctacacacctcctcccaagagcctaagtgaactttacaccaattcccagcttgaccccaaagaaacaatctgcaatgcttatctatctccttgataacactttggcgaagaacaaaaatgttcatcgagtaatttctcaaaccaagcaacacagtatggataagttggatcctacctgcataggaaagatgcctcgtagcccaagaatgcaacctctttttaatcttgtccacaatagctccacaatcttccattctccatttagttggtctcataggcacacctagatatttaagagggaacctaccttcctcaaggtcaatcattctggttatctcattttttgttgcttcatctacccctccaaagtagatattagttttagtaagattaatggataaaccagtactcttactaaaatcattcaaggcaaccttcaagtgattaacaacctgacttgtacctttgcaaaacaaaattagatcatccgcaaagcatagactaatcagtttgaggctcttgcagagagggtgaaatctgaaagtaccttccttagactcttgcagcaaccttcgagtaagaaattccataaccaacacaaacaaaagaggtgagattggatccccttgcctgagcccctttttgcctttgaactttccttgaagcctaccattcatcattaaattataagatgtcccttttaagcatgtcataatccaattaacaaacttagcaggaaacagagacagttcaaccatctttctaagaagctccaatcaaccgtgtcataagctttgctcaaatcaatcttcagagcacaatgaggagacacattctgttggaaattttttaccaggatc

SEQ ID NO: 389333 - DNA, 1099 bp, Cannabis indica
agataattatcaaaacaagggatgatattcatagaaaaagataacaaaagcacggtaaatccaggattaaaagctacccggtcagccagttgtcttaaatatgaaaaatataatccaagtttaaaaaccgcttagtcagtcattttatctcaaaacaggcctatgggccgaatagacatacataaaaaagagaaaaatattcaaacaacaggagtccaggctcttggtacggattgccttggtctgagggggccggaggttcaacactctgagcagcagggatttcgttgctctggtcggctggagcagtggaggtagttgcctcgaggttttctacggccgtttgagccacgcagaaatcaagatacacgctcttggattcaccaaggtaatcaaagtttccttcaggataggccttccaaaattcatagaaaacctcaagagcagctgtcgtcaggctttccacctccttctcgagctcttcctccctagtctgcttattcttgacttcctctcccagtttggaaagaagagtacgaatactctctctctcatctttaagatcattgacctccttggacaaagaggcattatcgacctctaactgcttggtcgaaggcatctcttacagttctttggtcagctcctcaatcttggtgttagcagaaagaagccttttgttcacctccccaagctcattcctcacttccctgagctcgctcctcacatcctaagtttccttcctggccacatccacctccctctgcagtgtgttggtggtggcaaggttcttggcagtagctgatttggctcgggaataagcataagccatcttcagattgacctgtacggaaaaatgttagagtccaagctacataaaagggaatgagataaaaaggatatatctactcgagtagcttccttcaaaactcctcctaggaccagctccaaagatagcttgctgttcgccccggatagtcgatcactcacctgaggaagtgatcgattcaaataatactaaagaatattgttaggctttgtgccctaaataaaactctatttcaatgtaatctttttctattcaattatcaataaaaaa

SEQ ID NO: 389334 - DNA, 808 bp, Cannabis indica
aaatatagtaagatgagtttgaacaattaaagtccttggccgagcgttaacttcttaagtaagaagtggtgtggtattccacggacatattaatcaaggcattttcatttactttgctgtaataatagtttgcaaacagagtttactatttttgcctaacatttattttttactttaatatattaaaagaaatctaaatttaaacacttttaataatactagaattgatgagagtttgtttttttttctttttcttctttgacagttttaaggtttttagtgcttgggcaatgccggctagatctggctggtggcgcctagggtctagggtccacgttgtagcaggttgaaggcaaaggatcctccgtttgggtagttgttgtgagcggtggcgatgaacgtctgccctctttcttcttgagattagctctttgatgcccgagttttcaagtgagtggctgtcgaccaaggtggatggacgtctcttttgaggtgtctcaagttcgaggtcagtggttgtgggtagctctgatctcatggactggtgggaggtgacgaagatgggtttctctgggctatctccctttcatttttggagacggcgagttgcggtggcccttctcaggcgagagttcgggctttagagcgttgtttattattcttttttctcagatctcaatgtcccatggatttcttttcaggtgtcttggctctggtgcacaatggctcgtgattagctttctgtgacagtcagtagtcctgtgatccgtaaggggaagaccgggtaagctgtgcaatcccacaccgc

SEQ ID NO: 389335 - DNA, 911 bp, Cannabis indica
actcatgtcattgtacttgatgtgagataactttaccacttaattatattgttggttgtattaatttttataggattaaataacttttctagctacaattattgttcagtgaaaaataaaattaattaaaaattgatatatagattttaaattaaaaaataattaattaaaatttataaataatcatcaggtaagaaaaataattaattgaaaatcataaatagccatcaagtaaattaatatatgagttttgttaacaaaaatataattttttttttttgtggtttgcacactctctggatctacatagggaaccaacccttgacatggtgggtttccatatcaaaatttgaaattgagtataaattggaaaagaaaaataattgtaccacatactaattaaagttgtttaccaactagcattactaaaagctactacatatgagtttgatcgataataattttaaattgattggatcgttgtcatagtttaaacacaaatgatcttaactataatgcaattattgatcttttgagatacctaaagtaacaatttgattattgaatatatatatctgaaaaatatcttactattcaaaattttcataaattattatatttggatgatatattaatgccttatcgcacatcttatttattgttcacaacaattattgatcttatgaattgtcccataataacaagatcaatcaatatactatcatagaaatttaaaattgtttaattaattaaaattaatatcaaattaaaaataaattataaagaccgactcttgtgaaatcctgaacaaatttagtaggctggattgagcatgtcatcgttggggttgtagaaaccaaagatctaacattcccgttgaaccatttatcttgttaaaatatatattgtaa

SEQ ID NO: 389336 - DNA, 706 bp, Cannabis indica
tgcaattttcttgctcttctttctcaaccccaccaaaccaaaactgaaacaatcagtaatgtgatttctttatctgatcctacaaaattttatgatgcaatattataaaatcttatttgttatccagtaaattggcaatgacagccagattgataatgacaaggccattaatatatgtggccccatgcaataggagacatgtcttggactttttatgtgttcacaaatagatgaaagatctaagcattaaatacagaaacaaaaataatgaacaaaatgtaagcttcccatgttctgtgattctagtgaagctagtacaacttaaagtaacaatctgtactcttttcttatttaattttttttttaaaatagtaacaatctgttctcttttcaacaagctggatatgaaggcttttgaccacacaactatgagaacataaaacataagcattgattagtaggaaaggcaatagcatgtgatttgtaaaggactattcctttcaacagaccccatctacactacatatatccaatcctatcaagagtcttcattaaactgataaaggaaagagttgtaagacaataccatgtgatgtgatgatatcactaccccacttcattagcctaactgactctatcaaccactcattcaaaccaacacaagatatccttattctacttgtttcaaatataaataagcataaca

SEQ ID NO: 389337 - DNA, 928 bp, Cannabis indica
tcatggtcatcaaagaaacaagttgttgtcttatgctctagcatcgagttagagtacaggcccttgcacaagtctccatcgagctttcatggattcaagcactgcttcaagaactacaatttccccttcctagtatttctatcacttggtgtgatagcatgggagccagtgctttagcatctaaccttgtttatcactcaagaacaaaacacatagagcttgatgttcacttcatatatgacaaagtgcaaggggaagacactgcagatagttatataccatcacatgatcagattgcagattgcttgactaaaatcttaactcctacccgcttttatttcttaatcgacaaacttggtgtggttcaatccccataaaattttagaggaggtattaagaaataaaaaatatagaaagatgtaagggatttcttctagtgtaccttaacatagtcaccagtactagtactattacaattgtatcaccttatcattgggcacctttatatccattagaataatccttttgtattagtgccaatgataagaagatattttgtaaggattgttctaaaaacagtgtgtaaaatatttccctacaatgcaatctatcaacctcaatttgagataatttaacttatagttatgaaaattattgattatcatagttatcaagatttatttgttaaagaatatatgttcttttgggttggttacaagtacttgttttgaattgtctagtcttgaagaggatgttatggtttcatctaagctcttaattaattgataaatgctcgagcaaatagtatagatttgtggttgtgttttatgactctttaaggacttgtttggtacgttgtattaggtcgtattatattgtgttgtattgtattatattaaattagattatgtatcatatttttatataa

SEQ ID NO: 389338 - DNA, 1173 bp, Cannabis indica
cttcacatttgaataagactgaaataagttgtgactgcatttttttgatgaagaactctcctattttgaaatagtcacctagtagttcaaatttaggcttatattttgcttataaaagtaacatggtaccttcacatttgaataagattgagtatgttgagttctgactagatattttaatgaagaattctcatattttgtaaaagtcacctggtaattcaattttaggcttctattttgcttataaaagtaatttggtaccttcacatttgaataagattgagtatgttgacttgtgactgggtttttaatgaagaatcctcatattttgaaaagtgacctggtaattcaatattaggtgtttattttacttgtgaaagtaacctggtgcctgcacttttgaataagattgagtatgttgatttgtgattggatatttaatgaagaattctcacattttgaaaaagtcacatagtaattcaattttgtgtttattttacttctgaaagtaacctagtatcggtacttttgaataatattaactgtgttgtgactgcaatttttaatgaaaaatcctcatattttgaaaaagtcacctcgtaattcaattttagactctaatttttcttttgaaagtaactggtacatgctcttttgaataaagttaagtgtgttgagctgtgcttgtattcttttaatcaagaatcttcatatttttttttaaaaaaaaaggtcacctggtatttcaattcaagtttctatttttcttctaaaactaatctggtacctacacatttgaataaaattgggtgtgttgagttgtgactgtattttctaatgaagaattctcatatttttaaaagatcgccttaccattcaattttaggcttttattttgcttctaaaagtaacatggtaccactcttgaataaggttgagtgtgttgagttgtgactctatttttaaacaaagaaatttgttatttttttttttaaaagtagcttgttaatgaagtttattctttcttttttaataaggaagtaaaatggggcctataatattttgtgtaaacaattgtaagcagtatgttagagcttctacattcaaacatactgaatattttaaaattagaaaatatgtgaaagagcacacatgctcattggaagtcatcat

SEQ ID NO: 389339 - DNA, 1233 bp, Cannabis indica
attgtaaagtagtttgtgtgcttcactttattttggtggttgaacttgagggcacgtatatatacctacatataaatataaatgtttatttaacaataattaagtgacacattatattttctatatatttgagtacctaacaagaccaacttgctctttccaaaaataaatataaaatcaacttgacaacttggccttccacttcttgttttctcctcacaaatatatataatcacatacaattacttagtacaatcaccctatatatccttttttttttaattaaaagggtatataaataaataaataaagtaaaagttagacgtcttagtcattatataagatattatttggtatagaagaaagtgcaaccatactataccaattacttatgtattttaatctcaaactatttaatattacctatttgttttagtatttgaaaaaaaaataatctattttttttgatcgtttacattgtaattatttaagacattttataaaattttaataaattcagaaaaatttaacacgctaaaaacaagattcaaatagtctgttacacgcgaaactcttttattttatacacgtataaaatagactgtttgaattctatttttggcatgctaaatgtttttgaatttctcaaaattatataaaatgtcttaaataattacagcgtaaacaaccatgaacaaaatttaactaaaaattatttagaatgtcaaaacaaatagaaagatattggtagaccatttgtagaggttgcaccataaaatttttcatagatatttcacttttatgtgaattgttttggaaaaaatgattttcgacaatatgtttctcattaatcgacacatcaacattatttgacatctaaaaaatattacataattaattatttttcaaccactaatgatttattaattgagttatgtatctctacttctacataaaccctctcgaatattttttttatttctttttttacaaaaattatgtaaaagtcttattgaattttccacgattttcatgagatgatcctctaccaacaattaatatttaattaatacttttttaatattttattaaaaatattaaataataatattttattattataaagtctattatttaattttatagttataaatataaaataataaaaataaaacatttcttagtttttaacgacagaaactcttcaatctaacaagaagaatagttcatgaa

SEQ ID NO: 389340 - DNA, 1140 bp, Cannabis indica
atgtttaatactatacaaatatggcacttaatacttagcatttcctatattattccctaaattacaacttgtgagacccgatattgacatgttaagaaatgaaatacactccagtcacctctacctatcctctgctgctgctgacatctgtcatagcggtccaacatcagcatttcctgacaactcatcattagccaatgattacactctgatttgcatatctttctgttatttaccttttgtaagaatattccttttcttgttataattttggtgaggtgtaatctttctagaattatccattgtactgtatttaagcaatgaatgaaggcatagctcattgagctgattattacaaacatattctaaatctgcattttctcacttgacatacaccaataacggtatgtcccatatatggtgtttagcacatcctttagtatttttgttatcatcttcatgtatggtgtataatttgagctaaaaaagcatgtcaatattaaatttagctcagattttataatagtgcttcaatatatttagggtaaaattaatcctttcttgataaaaatctgtaaaaaagaaataacaaaaacattaaattattattgaatttatttaaaattctattaattatataaataaaatgtgaaaaaatgattaattatattaataagtggaaaaggagtaaataaaaaagtaatatgtattgtggtatatttggtataacttttagcatgtgctaaattttgaccacttcatacaccattattggagtttacttttatgaagatcgactaaaatatgcatatacacaacacttttagtgcttcattaaaattgctcttaatatgtacatattcctattcactttaataagaattattttaaatttttttttttaattatacataactttgcaagccctttttttttacttgtttcacactccttaggtgagattttcctatattccttttttttttttatattttctcaaaataaataaaattatcttagtaatttgtgattttttggtcatgtttgtgtgttttattttatttgtaccaattattaatatttttgtaattttttttttgtaaacctcatatttcttcccttttcttaaaaaatctctct

SEQ ID NO: 389341 - DNA, 808 bp, Cannabis indica
aaaaaaaaagtaaattaattttaaaaagaaaagttggtgaataaatgttgatgatgaatacattgtaatcacgaggaaaagtcttaattaagacaagtttcattaattaattaattaggatccgtacctcaactaaagaaaaaaattaaaggtgttaatttattatttaatgtatctttcacctaaaattaaagaaccaaatactataaacctttcaaaaaaaaaataataaaagagcataaacaaagctgtccatgaaaacttaaaactctcaattagaaaaggataattaatacatgtataatatgtgtataatgctacaaaataagtaataagagtatcttttttcatggctagcaaatataagagtagtttggatttcaaatgctacactttataacataattaagtaataattacttattttagatcaatattattcgatggcaaggtggctaatagtcatgtcatcacacatggcccgtcctaaaatttagtgggccataagaaaaaaaaatatttttgagcttttatttagagaaaaatatggtatttttaaaaatcaataaaaatatgtaattttttaaaaaaggataaactttttttgagctttagactagatgggtcttaggcacaggcctagcccgcctatgtctagagacggacctgcatcaccatatattataattcaattgcatgttgtattaatgtggcaatcagagcctcgtgatccgaaggaaaaggatggggagctgtgtaatcccacatcgtttagaaatggtcaagtgtgatgattctgagactgtgt

SEQ ID NO: 389342 - DNA, 651 bp, Cannabis indica
atataaatgaggtgaaagaagaaatatgagcgtgacttttcataaagaaataaaaaaatggaaagtattacatcttaaaaattttaagaaccaaacacacatctgaccgaatcagatgaattaagtgcaaaacagtggttcaaaaaaataaaaacaaatgatattaataggtttaaatctgaacgaatcagatcagttatatcattaagtgcaaacaaatgcatgcgcctcaaatttagcaaaaaaaaaagtaagaaatatgctttttaattactagaagaaaccccaccgttagaccatctctagtgtattaatgtcttatatttagtaaataaaataagtaaataatatatgggtaaattacatttggtactgtattttttattaaaaataattgttccattttgtaaaaacctggccgttcaacatttattctaaccaaatttattatattttaagtttgtaaaaattgttgatttaattgggcatatcacttttgttgtttatgatttgtctcatgtcaactaattcacatgtgcaattaggagttagttggtcgaggttgttggtctgttattacagttaattctgttaactgtttttagttgtaatctttgtattctttgcatttcagttcagattgtataaata

SEQ ID NO: 389343 - DNA, 595 bp, Cannabis indica
aacatatcttgggctaacaaccttatatattgtttgctcttttcctggaatgcatggtttcgatctgcaaactcatttgcaacctatcactttctacccttcaggttttatgattactatccaagttttgtttctcctcaaagataccatttcttcatacatttccttgttccattttctagcatctttcccagttatggcatcatgatagctctttggtacaagcaatgttgactcagtgacaacagctaaagcataggcagtgatatctgattcagcaaatctgatagggggtttgatttctcttctggttatatcccttgctagctagtaatcttccaaacattcatcttgggattcaatttctgtttctggctgcatctcctgctctatttgaggttgcacaggttccacctcaatttgcacacaagttttgacttgtgtttcatttcctgcaacatcaaaacaactacctttctcatttcctcaaaggggaaaatcaagctcattgaaaataacatctcgacttataatgactttattgtcttcagttgttaacaatctatatgttggaaatatttaccaggatctagat

SEQ ID NO: 389344 - DNA, 1188 bp, Cannabis indica
tttttaacttatttaatatataatctaataataagtcgcacgtaattgtgagtgaacatttaattgtcagaaaaaagtactgcaataaaattataaaataaaatacttttactatcacttttttttaaattagaattatatgtataataattataaatgttaaaagatttcgccacaaataaccttaatatatttatatatattaggctattgggacaaaagcaatgacatttaactccttgaacaaaaaaatttgttgaacttaaaaaaaaacaaaaacaaaacatttgcttacaaacttccttctcttaattatttatatgtctattcagccattaatatatttctgaagaaacatttattctttggtgttatagtgacacttatgtcctcaatcaaatttatagtacttataccccaacaatttttcttccattcttttttttttttgaaaaaaaaagctattaattttattaaaaaaatgcatgtttcaataataaaaataaaataataaacattcactatgagattatgtgagatttagattcataaataattccatatgtacactaattgtactggataagcaatttatatatatatatagtacttacgtcactaatcactatgttggtattgggtgtccatattatctgactattgtttgttaacatatttcatattaataaataataatacttagatttgggggatttatatatactacaatatgtctaactattttattattattgttattatgtcaaaacaaaaattataaaattccatattatatggtcagtccatttagtcagtggctgagtcagaattgaatttttatcatatatacaatctaatttaattatttttatagacatttttattataaatatagatggtaattaactaaaatatatatatacattttttttattttgttttttagcctctctcgcttttatattcaactattatttaatatatttctaatcgtggcacgtatatatataatatttttctttttttaatataaaaacaattaatttaaaaataaaaataaaataataaacattcactatgagaatattatgtgagatttagcttcatacataattccttatccaatacaagaaacttttactactaaatccacttccactagcatatccaaaataacaatacataatc

SEQ ID NO: 389345 - DNA, 2804 bp, Cannabis indica
taaaaataaaaataaaaaaactttttctacattcatgtgcatattcgataagtatttgatttgtttttttttttttttttgtaataaacctgtaaactgtcattgctaagggtacagagtgaaaaggttttacaaaagaaggtaaagaaccagtctaaattgacccagtatcttatcaaaggccaattttagcataatcatgagcaattttgttttgctctctcgaaatataagacacaaatatttgtatcagataatgagttcttaatacaattcaaaatatgaccaagaactgtaatattacaacattaaccattaagcttattcactatagttttaaaatcagtttcaataacacaaacaagaaacttaacaagttgtatcccattaattgcaagaaggatagccttagcttcagcaatatccggagaaatgtttcctatcaaaggcttgataactctagctgcctttgacagcatttagactgtcgaactacaattcccaaactatgcctcttcttattacagtctagagaagcatcagtattcactctcatgaatccatgaggaactcttggcgcacatgatttgctattctctactgcatcttatgattcaaagatacatgttgtgcattctcatagctatccacgaaacaatatttttattatgaaagatgttatttctttagttccacaaagcccaccaaaaaagaaaaggcaaagtattagtattaaaagcattatgaataaaatcagaaatatcagtgtttatacatattataataatcatagaagccaaaatacttttaagctttcctagcactagagcattccaacaacaaagcatgcttaacagactcctgagtgaaggtgacatatagagcaaagaggagaaggaataatatgtctatgagacagaacaacaacaacgaggatagaattagaaacaaccctccaaacaaaatgtttaacctttggaggagtatgagaatttcaaagttttcctaaaaaacacttagaactttgaaaagaagaggagggtggaatatctctcttggaaatagcaagatgataagcaatttttgtttagattttatgtcctaaataaaacttattttcaatgttatcttaattttatttatcaataaaagaacaaaaattatttcattactatttcatatattatttggttcacatgttactttcatgatcatatgtttgatatttaaattttattaaatctttatcatattgttatttatgattatagtgttgtctacacagtaaaaagtaagtatgactatatgatataaactagattagtcttgtgatttgttagtgcattgagtttacactgacgtgacaatcagcaatgtcgtttacttacacttgtataagtgaaatatcttttttaagacattagcaaagtaagctagtatcggatgtattggtaatacatgttgacagtgaaaaagatatcataatattgatgcaaaaatatggatatagatctataagccatactcgctcgctagattggcgagaatgaattataagttaagtatatatatgacgacacaaggaatggagttgtgtctacttcaagttttatttctcacaagatagattacagaaaaatggctaaggctggatactctaatttttagatatcaaaactagagagagatgccctgaccttatagctctttcttgagcttaaaaaatgagctagtggagctctccttttataggggaatgaggtcctattaaatgacaataaaataacccaaaaatatagaaaaaatacacttaggctatttttaccttagatgatgatctaatggtaaaaattgacttcggaggttgattgtcaattttcagagcttgagtcgcgcctgcaggacctgctttgggtaagatgtagcttaaattcgtaattcccttaggggtaaaatttggagtcgataacttcagaattgtgattaaagtgtgattcatgacttgatagatcattgaaatagcttgaaaatacaagttgaatcacgtcaatcggatcaatattgagtgagttatggctattttactaaaggttgttctgggcccagcgcccaagttgtcatcccagcagccaggttgacatccagcgccgaggttgacatgtgatgtcaacctggacgctgtgtgagtggaaagtgtctaaatgtatttttgaaggcctaagtgatatttcgatatcacttagtccatttctgtatttttgcaaagcttgtcaccagttcttgaagatgtaactgttctacgaaaatgggtgactcaaaactactcgattttcgagtaattcaccatgtcgagaaagtgaaaatatgaagttatgaatttcactcttttgactttatggctctcagatatgatgaaaaactagacggataatcgagatggaatcagaattggataagcagaacccaacgcaccaggccatttgtcaacatgggcacgagtgcctattccgagtttctaggatgtcgttttgatacttccaaaattttggaacttggggatgaggtctcctgccaagtttttgaccattttgaaaagaatactgttgggttttgtgccctaaataaaattcatttcaatataattagatttattaattaataaagatcaaaaattgcattttatgttgcatggttcacatgatttatttcatgattatgtttaatgtataaattctattaagtccagaacatgtatatttgttcatgattatagtgtcgtcagcacagtggaatataatcatgat

SEQ ID NO: 389346 - DNA, 637 bp, Cannabis indica
cacacacacacacacacaaatatcagatctacaactttgaaccatatctgagatctctactgtcattgcaaagcccaaccccgactatccacttacgagatctccacaaacccacgaacccacccatccctgtgaaccaagaataccgtcccaatcatcaaacaacgaatccacgaacccagaccatccccgtagaaccatgaacccacaaacctgtccccatttccttcgagccataaaccccatcgtcgtcctcgtcaaacctgcacaaaaaaataatatatatatatagagagagagagagggaaaacaaaaaggacgagttttgggggcgtagatctcgattttgtagtccaaacgcatcgccgggagtgcatctctaccaccaccgacgacttcttcgtgagtgcatctccaccaaaaaacgagagagaggggcgaatatataagttttgggggacgaagatttcgattttgtggtttatttcaacaatcggtcaccagagttttaggtttgctgtgggaagatcccatcgagagagtgagagagtgagaagaagactggatagagagggtaaaatggtttgggaattagggtaaaatggtatttaccctttttatttataatttttttaat

SEQ ID NO: 389347 - DNA, 1267 bp, Cannabis indica
tttttatatctcctttgttttcagcatacaatattatttttgtttactcatctttcttttttcattcttcttgtttagttatatcagactataatttggtaaacacttttaagaaaataaatttcttgtttgtagtactgtcactatacttgcctcatttattgctgcccaattgattcaacacatatatatatttaaaaagattctgttcttgaagtgatttgcaaccaaatatatcaagtccaaaaacatttactgttctctttgacttcatcttaagggtgacaatgtcaaaactattttatgaagtacttaaccatcttattagttttcactttctgctcatcctatgaagaattaatcagaggaagcactttttagtttatttaaagggtatttggttcttttcttgctcttcttttaaagattagtatgaaatagatttttcagtaatgttaaacactagttgagtaaaacttcattatgtgcttgaagactacaatttttatattatatgtataattaattaatttcaagataagccgactctccctaacagatagtattttaaatgtgatttaggtaatttattgaggcatttactcaaacacataaaaggcatgagtgcatccattaatgattggatgcttctattaatattaaaattcctacaagagctaaaacttgaatgaaaactaaacaaaaaggtgaatagaaaagataaaaaacttctcacatacctgaaatgatgaaattagagagtgaagagttgtagtctaaaaattggcatcaaaaaggaagagcaaggtgttgcacatcaaacttttatatctagaagaaaaacaacatttgcatatataagaatttgtatagctcacctaatcattaatgtggcaatgatacccaaaatcttgggaccaaaaaaattgaaaaatattgaaagttttcatattacaaacttacatggctggtgttgatgagtgagaaatgggagagcagctactaggagttgaaggataaatgaatatagaggaagtcatcaacttggcgtaaggaagagggaaagggaatatgataggatttaaggcatttcatcaaaaataactaaagtttttttttcaaatattttgcttaattattaaattgggtcctatttatcaaacaattgatttttaaactacatttgttgtcaaaaaaaaataatagaagactagaaaagaattatatatattattgggactctatctctttttaatttctttttttt

SEQ ID NO: 389348 - DNA, 2335 bp, Cannabis indica
gaattaaaagtaatgcatttatttgttcttcatcaataggttatttccatacaatacaataaaattatttacggccaggtccgccatatgtcataacatatccaaaacagggtttgtttccccattttcaacttgataaaagttaatattagtagaattttttttgaattttcagcatcttctaacttgtgggccttatttatataattctgcacaatatgcatcataacgagcatcatgttttaaaaataaatcagaatccattggaggaccaggtttgtcaattggactataagtttctcctccccattcaatataggtagccaaattattcaagtcagtaaatatgcttgatggccaatacccaatttgaatatctccaaactaaagccaccaatttccagtaacttgatcctacatataaagtgaaatgagtacaaaataaacacaatagtaagttaattaacttatatgaaagattattttattgaagaaaaaaaatacttgattgttaaattaaaaggaagaagtaagataattaacataaatatttcatttcctttacctgagaaatagtgagttggaattctattactggagaagtacccggatgagcttcctttaaagtataatcagcgatagcacggggactagttaaaacaaaaccaggacacattgtattaaaacaagataattagctagcctataaaaatatcaacacataagtttcacaaaacaacgcaatgaatataaagaacctttaaaaatgaatataaatatagaagacttacttgaaaaaatgtgaattcttgaggtttactgtccccatataatgtaggatttacctattatgatagtataaatattattaaatgaataaatattcgaagtaatttataattacctaaaaacttgacttgtattattttaatacaataataaatttaataaaaaaatcatttaaagatgaaactcactgtccaactatcaactccattttgtaatttcattcgaccagaagtatattacgagccagtaacattatataatgtgtagtagcttacacttgtccttcctccattgtactttttgttaggatcagattttgctcgaacaattgcatgttgttattcaatttcaaacacaaattttacttcaaaaattaaaattaaatttgtaagaaaagaaaaaagtcaaatgtaaaatatgcttacatgatgtaaaatatgcttacatgaaaactagcattttcaggagccagggaactagttctggcagaataagattttgtaaataatttgactctaataagatcttccttagtatttcttcttattggaactattccagatggacatgttttgccattcaacatgctatctattgatactttttctacattatttcaaggcttttcattcttcatcaccttattaggaagtgaagaaggtctcatctacaataaatatttgtactcttatataaatttatgtaaattataatatcatgtcaatctattcaaattaaataataaaaaaaaggaaacagtataacttattagagaaacatatgtcaaaaaaaaaaccttaaaatcataattgtggttctttagcaaatgatgatcaaatactggttgtttataaaattcattacaatcatatatatctctattgcgcgtctatgcaagaaaccaagtcatattataaatataaatgttaagaacgtacaccttaaataggagataaagatttaaaaaaatatacttttatactcttgacggatgacttgttcaatcgctcaagtcggttatctatttcaagctcttcatcttttgatattgctttagttgctcttcacctttgcaatgatacaaaagtgtacacaatattatagcaaccaccataaaatgtgcccttgtatccatatctatgtatatagatttgatctacgataaaatatcaatattaatattagcgccaaaaaatttataatcttaataataatatacatgaagtaatttgtatttatagagtaatcgaaaggaatggagatttaatttgatagggttatactacaaaagggaaaaaatgtaatattaatgtatttatgaagttttgctaaaaaatatatataatttgtgcaatttatttatttttaaaacttattgcagtgaatattttattttattaaaatagttataacatattacgtccaataaaaaacataaaaagttatcaatctgttaagttgtttagaattagttttggttagtttattagttagttgtaggattgagttgtggttataactagctgtaatcaacatcagctactat

SEQ ID NO: 389349 - DNA, 1153 bp, Cannabis indica
ggttattttttaatctatttaaaaataaaacaaatattaatgtatataataattgaaaaaataaatttaattcaattctatcaaattattttaattatataaaatttaattttactttaaatttaaacttatatcatatttaaatccaatcatgtttttttaaatttatatttaagtcctatgattttttttttagattttgttttttggtaatggtgttagttttaacaaaacaaatattattaaattaatcattttcaaatagttgacactttatatacaaagataaaaataaagataaaaacataaatattaaattacatataataacttgaatattttttttttaataataaacttatcattaaaataataattagagaatataaagatgaaaaacaccattacaactattacagataccacatatgatgtcgatgccacaaatgcaacaaccatcttagattccaagagtacaacctatactttcgcaacaaactcgaaaaaatgagaatagtggtgctaataatgagtctacatcttagatgtttagtttattacttttgttagtatgaacatttatgaactcttttagtttaaattcttttgaatatataaacaatgtttagtattaaatatgaaaacaatgtaggaactcttttagtattaagtataaaaatatttaatttttaaagaaattatttaataaaaaaaagtgtgatattaaaaaaattaatttgatttaaataaatttaattatttagaaaaatgacttcaggaacgataatttcatttatgataacaaaacagttgttcctcatagtgtgtaaaagttaagttatttgcataattttctggaacaactttcacttttcagaaacaacttatttttgttccagatattttagcattagacatgtcgctatattttgttcctagtatcaattttcaggcacaattgataataatttgatattttgaaacaaaacctattagagtttttgtaatgaccgctctagtaatttggattagtaagggcaattagcactaatttttattattttattattttattattatttgtgaattaatttaattatggaccccaatatttaaaaataaatattagagttataatttctcaattccggag

SEQ ID NO: 389350 - DNA, 983 bp, Cannabis indica
aaggtgcattgaccacctacccattgcaggcctagtcctcaaaacacttgggggaaatggttgcacaaggcaacaaaggtcaatttcaaggcttctaacaatgaggctgaacatgaagctttgattgctggcctcaggctagcacacgaagcgcgggctgaacacctaacatacaccacgtctcccaactagtcataagttatgtcctgggtgaatatgtagctcattgcaaaaagttgatggcctacttaagctaatgtcaagacttgatatgtcagctcaaaggctgtactaaaaggcaaatccccaaagacgatgtgatagttgatgcactcgcttgaccaaccagtagtccttcaaccaaggaaaacttggtacccactcagttcttcaaagacataagtatccatatttcaaaaggaagaaacatgttggacaaaaaacatggatacaccacagtagcatacctccaaataaaaaccttaccagaaagcagagattagggggatggatacacagtgtttaatcttgcacaacataactcatagacgtggtattacaataccacctctaagaagcgttaccaagaaagaagctggatagctatggacaagagtgcataaaggctcaacgacaatcatgccaggggaaaagccaaccgagtgcagaagggatcaaattacaacatcgaccagaagtatgagagcaaattgttcacggatcgggccagccaggctggccagccatagaaccaacaatctggccagccactacctccacaggttggccaaccatagcttcctttaaccaactaggcaatgctccctcaacatggctggccacctggtttataccctggctggcccgatccgtcaacaattttctctcatacttctggtctatagtgaccaagaagtaaactgcatcttcctagcagaatcccttgatgaaagggaaaaataagggaccaagccaactcaaag

SEQ ID NO: 389351 - DNA, 1259 bp, Cannabis indica
aattcgtaaaagctttaggttgctttcagagcttccaaaccctttagactccatccttgtcgaatctcctttgggaaacgacaaaaccaaagagcatggacaatagtttcattattatggaaaccaataggacaaattgtagtagtattcaaagcatgacgagaaagattagcataacaaggcaagaaattccccactttccaaataaaattcttgaccttctgaggaatcgaaagagtccacaaacacaactaaggggacaacagacgcctaaaagaaataatgaaaatacaaataatcaatcgcctaaccggtttggtcgccctccacgtccaccacaaggatctaggagggaagaaagagacaacatgtgtacatacttgaacagaggaagatttgctaacctatttgaaaggcgaagaccttcccgagagttaccacaagaatcaaaggctaatacggcccaaagtagattgaggagtcgggggcagactcaatcctcaaggtcacgcacataggaaaacccaccaagaggggagagaacacctcgatatgaacatcgaggtgagcaagaaagtatgagtaactttcaaagttaccaatcagaaagtatttccccaagtcgatcagtgaacaattacgatgatagacaagatcgacacccaaacatgcgtgatcagcctgatttgcgagaccatttaaatcgaaggcgtcctgatctatgtaggcagataaataaaaatgcacgagatctctctctgattggtttattcatttgctcgttgatcatttctatttaatctctctctgatgttgaggtatcatattccaactatggctcacatttttccacagtgcttaggaatagttggtcgcgttaactatgtgagatgtttctcctcgctactaccttttatgacaaattaatatattagtttttcaaggaactctgagtgtggtcgatactggctcatttttcttaatctttcaacatacttagagtatgtgggtcaatgagttacaatctcttaaaaaactaattatccaccatttctacttaacttattccttcatgctattcgtttgcctcattcatacagtaaagttttctaggatttaacttgtaattctgttaggggtaagtttaaaaatgcctcttttattcatcaattaatcaaatttacctctaattttatgtttatttgaaacatacctctttttatatgtattgtacccaaaatatccttacataagagaat

SEQ ID NO: 389352 - DNA, 1065 bp, Cannabis indica
aacaaaaaataaaataaagttcaagttcgcttacctctttgcatcattagaagaagaagaagaaaacacacaactactatattactattcatctaatttacctttcgagaagctgttccctgagtagttgattttcctttaggggttgtcatttgcgcttctttatcagggctaacaaaaactatatcttcgctatgtacatttgttgaattcttctgcagagcattatccgcagatcgttttcctttcgcctaccaaaaatgccataacaacataattagaagttaaaattctcaatctgaaatataagaaaagaaaattctagtaatcttttatttcaccttgccagatgcttttactgggggtgctgatttccttttaggcattctctttctcttgttctggctatcacaatactcctcgtcctcgacatcgaggatctcatcgcaatccgtctcgcacttgagatcaccgttaacttgacgatcttgtggcttaggtttgagcgggaacagcgtcgcttgaaccaatcgccggcgtactgacttctgctccggctgtgtggactcgcggagactgagctccggcagcgagggttcatgcggggctgtcattggaggttgctagctttggaaattagggttttggtaagcgaataggtatttgggagaggaatgtaagaaaagagaagagtaggaaggaaaggactgagactgagtgagtgacgacttggacactgaattttgtaatttggagggaaggaccacctaattcccgccagaactatccttaccttgtttgctttgcatttcttttgggtggatatttttctttattattattatttttttcctataattacaacattaaaggtttttttacacaaaaatgacaaaaattatttatttttacatttatatttttaatatttatactttttaattatactacttcaaagttttcttaatattgagatttacattggtatatttgttttattttaattaagttttagattaaaaattatcatagaaatattttattgagattatttcacaaaaacat

SEQ ID NO: 389353 - DNA, 959 bp, Cannabis indica
tcaaaacaatcaacaaacctaacacaaatcaactcaaacaacttcaatttaactttagaatacaaattcaaacactatataacaccacaaaaccctaaccttagaagaacatgcaagaacttagaaatcaaagagaaaggtgttaaggggttatactttgaattgaaacactaagatcccgctagaatcctctgaattgaagttgaaaaaatcaaaatcccctgcaagttcttaagggtttgagaaagagagagtgagttgaagagagagagaatgagtttactattttttttctaacttgtaaaaggataatcctaaatttctctattattaaacctaaattaaaatcagtttactaacttaaagtatatccacaaaaggacataaagaatataaggtaaaaagaccattttacccttgcacactccaaaaacatacatgccacttaggggtaatttggtcatttccaaaatcccgactatccccgacattctcaatgcctgtataggttgccttgctaccactaaaatactaaaccataataaaatgtaattctattggccaaacattgcattccaatgttgccgagcacaaaatatgaaaaccatgaaatttcatataaaacataaataacacacctagaattcaaataaatctccataaattcataaatcatggttaataatctaattcataattaaaccctacttatctgctaatctattatattaaaattaagcggtctttacatgttcattattcgatgcaagcaatcttgattcagatcgctcatgtagtatatgacatgaaccaatagttaagtgtctttatcaaatattttgtttactataaagacctaattcatatcacaatgatgataattagtagatcggtatgaatcctaagtaatcatgaactcttgttcatgttattagtttttttattcactcgttaaagtt

SEQ ID NO: 389354 - DNA, 1826 bp, Cannabis indica
ataacaaatatatattttaattatatttatagttgttttttttttttttgttgaatttgtaacatttgattattttgcatatttatttttatgatgttttgctcaattttattacttagcaatgttattgttttagggtgatatttagtttttatgtatttttctttatatttattaaaaattatgtgtgtaagaaacatttaagtaaaaaaatcactccaatctaattagtaattagactcaatcgaattaatcaaaaatattgaattagattggatctccaaccttaagtatagtgccccatatgcatggaagaaacatataaatattaaacgtacctatttttaagagataggttatttgttttctttttttttttttttttgtatagtttatttgtgcacttcggttttgaaatagacctcataatttttgtcatggtaagtcatgctcatactatttacgggtacttgtttgatacctattcaatgtgtaagaaaaaaacttatcgcgtgagatttgatatgcataatgcaaaagaaatttaagatccgaaaaaaaaataactctttgtgataaaatgattcaaaattaatgatatatatgcttgaagtgaatatttagggtatcatgctgcacatgaaacaagtataaaaatattaaacgatttataagaagatcatcgattgcttttacaaaaaaaaaaatatattaatttgcaaagaatgtcaaaggagagagagtagtagataataacatagaatctagtcaatttggttgcattaaacatggccgtgaaagacgattactaatctttggaaattaataatcaattaacgagctttaacactattattattaattatttttattagactgattaattacttaagcttatctctctattttttttttaataaaaataaataatgtagaatggagtgcatgttcggaacatgatattaattatatcttataagtttatttaatttgaatatataggtttgtgatgcttattattattactagatgtagtcggatatgattttcgtcaaaaaaaaaaaaaaaaaaaagggcaaaatcatgcttgttttgatgtagtttgtcaaatatatatagcaccactattaggtggtaaccaatgatggtatatattggttacctgttttaataattcttattaaaataaaataagtggattctaatattgagttgcattaataataatattatattattcaagaacactaagcaccatgagtgtcttttagaattttttctaagaagctcaatactatactgatataacactttataattggttaatagtttctcatatcatttattaaattaaaatgtgtaggacttaatataacaaaatatataccaatagtgatatgttatgtcttgtggtgcttgacaccttaaggtgcctcttagaccatctccaatggatagtgcaaatttttgtactgagtttgtgctaaatttagctcaaaaagtgagtcaatgttatatttaactcaacaaatatattaaattttaagttttttgcggttaaacactctcaaccatcactctacttgtacttaaccgtctaagcttaaattttgacagtaaaactctctaaactgcttaactgtttacaaatttaaggtgttatctatttttcacagttaactgccaacatagacggtttatatgtacacgcttctacatgtaacatgtttatattagtacacttaatattattatttaaaaaatataaaaatatactttttttattcattttttatttatatatttgatatgatttttatatactt

SEQ ID NO: 389355 - DNA, 2365 bp, Cannabis indica
ttgtctttgatcttctcagctccaagaagagcatctcgaattccctgttgtaccagtaatgctctcatctttaccctccataatctaaagtcgttcttccctgtgaatttctctaaatcgaacttggcacttcccataatttccctggatgttcttcacgccttgtcacgcttggccttccttgaatcaagcctaagaacccgtccagctctgataccaaactgtaaggaatgcagcttcgatttgttaccttatgcaacctaagttcttggacataactctaacccagtaaccaaccaactaagaaaatagagtaatcaaacaataacttgtaaaagtgtattaaatcttattgaatgaattaagattgtatttacatatatacacaagtgtcttcaaagaataggctagctgaaactaggattaactaataatgccttatatacacaacattagttagttacaacaattagaaaagctaactagctcttatgacacctagactgttaagaaataactgtcaaccgccaatagtaaatgacaactatctcacaaagaagatagtgtgaaagtgaagaagacgataatagtaagtttgtggtgtattcaaactaatccttcaaatcgattagccatgagtcgagttattgaaatgttggaagggagtgttgattctttggaaattccacccaaaccaattttgtattcacctccaaggtcaccacccctagaatcctctcagatatttgtataattgtagatactcttgtgttaattgtaaagtctgtgcttggttggtaagtaggattaggatgagtgagtgatttttcattctacaataacaacacttgaattaactatatcatccttatccttcctcatttcttttttcttgtttttttccttattagcaacacttcgtgactttcgtcttttttttcttttaaagtctcgctccttctattgttagttttaaaatagaacctcatgtattttagcacactgttagatattttatatgaataatataaaatatatgaaagtgtatataaaatgtggaataaacggatatatacacgatataacttaaggatcgaaatacctccaactattaattctttgagctttagtcccacacaagctttatctgcaaaagaaactaattgatgtgggtaatcgggcttccaagctctctctactctctttagatggatttactgtgttttcacaaaatgagtagtgagctccgggatcgagaccctatatttatataggtgagaccttccaaggtctctgccacaattaattgtcagaatattttgacaattaattctgaaaattaaattagataacttaaatattaagtaattaaatatgaccataattagaatattttaattaattaattatatttttataaatcaaatcaaatattttatttaatttgttaccatatacaaaatattctaacacactttaccctattttttaaccacacttttaaattctaacgaccagttcttactggtccaaaaagaattgagccaatccaaatcaataaccttggtccaagattaagtaaactagtattaattgcagattcaactgcggaagccgaatatatagcagcttgtgaatcggctaaggaagaggtttggttgaagaaattttacactattttagaagtagttccagaagtagaaaaaccactggtgctctactatgacaacagtgaaacagtgaccaagttcaaggaactaaggagccaccagagagacaaacacattgatagaaagtaccatctactaagagacatagtagacagaggtgatgtgacggtcttgaagattgtgtcaaacataacctgacagatcaattcacaaagacgctaccaacaaaatcttttataggtcatataactaatatgagactaagagaggtgcccaatttactacaaatatattttttattattaaataaatagttgtacattttgatatatgcttgaatgttaaattattaatattattattaaataatttatattaaatatcaaaaaattccttattcatatatgaggtcgtgacttgtaactgtacagtgtactaagaccacttagctatgaataaaacagtcactaatatattaaagttataatggaatctttaatcaatggttgctcgtatggttcactaatgctcgttcttcggtgcaagtaatctcgattcagattatgaatgtagtatgacatcaaagtgaaggtgttgtatataatagagattatatataacagtgaccgatataaatgaagttgtctttatctaacatgttgtttactataaagacctaattcatatcataacga

SEQ ID NO: 389356 - DNA, 492 bp, Cannabis indica
tgatagtgaattttgtgtatgttgtatgtgtactacttgtgtgtttaagcattaccaggacaaattatttacttatagcctatggagacgaatatattttcttgaagcactcataaaatcctaatttaagataataatgcatgagaattgcatattaaaccttgaccacctttgcatttcccttcttttttcccactaatttttctgactacttttatcaagcacttactatgcactaacaaatctctctaaaacaatggacaaaccaaaccagacacacagcagtgaaagcaatgatgatagcccctcagttattagtagcggaacgaaaaagagacaacattcgtatataaaccagatcttaaaacccttcagtcgaggaacgaatggaaggatagcttcgaatttaattatttcttttcgtttttatatataattaattatttaaaaatattagagggtaaatcagaataaaaacattagagtcggtca

SEQ ID NO: 389357 - DNA, 1706 bp, Cannabis indica
caagaagccattctaaaaaagaataactacttagccaaaatctactaatgcaagtgaaaaataaattgaattcatgattctctttgtatttccattgcctatcgcctcaatttatttaaggcctacatttttttaaccacttcaggctagctcaagtggtcataggaaggtgcgtgtgtgttgcaggttttgtgttcgagtcccaaattaagcattgtgtaatatataaacgcttaaagaaaaaaaaaattaataaactggtatttttacactaaaacttgacacctcaactaaaatttccacctagataattgcagacctaaacaattttgacatcattactcctatttctttctttctttttttaatttttttaaggaaactcttcctttcacgtatgcactctctcaaaaatgaaatatatatgtctatttcctttgcatacccataataaaacaaattacatgttaggattcctcaatttttttgcacaacacttcattgtgtaatcatttaactatagcttttagtgtgtgtgaaagaacacagttttgaaagacaagtactttttctttaagatgattatgaaacacttgctttttattttattctttcttttatctcaacagaatatgttgattgacaagagttggatgagtgtgaaggatagattatctgacgagtatgttgaaactgaaagagccaagatttacactaatatatgagagtggtcaaattagatttccatgagtggtttgcttgaaccgaaatttccacgatttgaacacaggtgaacatcatttgatagagaaaggtatacaacatactaatacaatttgggcgtatcatggggaatatttaactttaaagaggggtgcgccaagcccatgcactagtgcgcgacactcaatagccccaatagcttggactcttccccttaaaatatgtcctaaccacacctatttcacattttaaaaaaattacccaattgaaaatactaaatcggccaaaatcaagcaaaatgtttttttttttcataataataaataagtggaaagtttacttttgaaaaagactcggtcaatagataaataaacttagacctaacggtcattacaaataatgtcacccagtatagaataatgtcactctattattgtgagtcgcaaaataatagagccttgaaattaaagagaaattacaacccataaataaattaaagagtctattacattggtcaacttagttattaattctcccgtctgtagaaattccttttaaataattaataactatctgagaatcgctctccaccatcacaaaatgatgcttcaaaaggttctttatgtttcatttaatcacatgtgagataatatctaataactacccaactgctcgttgtttttatcatttagacggttattggtgacttggaaggttgtatctcgcttgatatgagttatcctcattgtctatcttaataagaaaaaaatgctaagtgttggtaagttgttcacctcgccgcatcttttcatttgaattagtattattataacaattactattatttatgtgtatatttatacacataaaatccatttatctatctatatctatatatactagcaaaaaaattacgtgcaaggcacgtatactaaatttatgctagttttttctatgttatttgaaagtgatacaattaaaaa

SEQ ID NO: 389358 - DNA, 1084 bp, Cannabis indica
aaacccaacacatccaattcccttatctcctctccgaaggcggtcggcgcattgtctgccctgacaggaagtcgagagttgtaagctttagcaagctcctttgtagggggaacgatctcccaaacttcaaacgaggaggaggatgacgaaggccttggcgtgtgggagctacaggccttggccttactctttctttttctctttcctcccaagcctcctgccttgacagagctctttgaaattgtttctctcaatgaactcatcattctcacttcatggagtacctgctattgggttttgtgcccttaataaaactcaatttcaatgtaatcttttatattcatttatcaataaagaaacagatttattttaatacttgtttaatgtgttattcagttcacatgtttattttatgatcacttctttgatttataaattcatccaaatcctcatcacattgatattcttgattattaagatgtcaacatagtggaaagtaatcaagattatgtgattaaatgaattcctatgatttattagtacacaagattccattgatatgataatctacaatgtagtttactttaaccttggataagtgctatgtctttttcaggacattggtaaagtaagattggattggatgtatggagtatatgttggaattattttgtcaggatctagatttactaacaagtatgttattaacatcctaaacatgaacttctaaaacgatatgaaataaacacatataaagttttagaaaccttacagtggttggagcagaatataatgtctccttccacttagatctctaacccttgtatcctttctatagcagcgtatcagtaagatctgagtccgaatctccttctcttgaaacttgattcttcacaaccatacacactatgattgattaccacttgatgtgtgtgggcactcacccttttcactatagggcctcggttttgaagagagaaagagagagagaaggtttcgaatagtgggagtgaaggtggctcaaaattttactttaggaataagttgcatcatatttcccttttaagccatcactacctattta

SEQ ID NO: 389359 - DNA, 897 bp, Cannabis indica
gtaacgtaatggtattttacaattaaatagtaacttaatagcttaaaaattttgaattcgaacccatgatctctccctttttcccatccctccctcaccacttagttaattttagtgacttaacacaagcaactttcagtagagtgtttttgcatttgattacattcttccaaaattaagagtcataatcttttgcataacggtggaagggtttatctctcataaaacaacaaagagaattcctaccattgaggaggtgccatccctacttagctagaaaaccagtggtcatctcttgggactttcagaaaccaaacctatccctagatttaggaatgcaaagcgatgagtctgtgtttaaggccatgggctggacaagatcaccctaagggggctggtgttaaggttgggatggctcgaaatgaaagcttgttgatcctcatgacattacacacttgatcaaggggtttgaaacctctggtggttaccttgctccaccactacttatggcagttagtcttggtggagatgatagttgtgatggtgataatgagtaggggtgttcataaaatagtcgatccaatccaattcgcacgatccaatccaatccgcaaagtacggatatccgcacttgtgcggattggattggattggaaaattcaaaatctacacttgtgcagattggatgttgattgacatgtaaaagtaatcaatccaatccaatccacacatatttattacaaattaaaaaattatatatacaaataacattttaatgtaaagaaaatagtaatttaaaaagtctaatacatataatacaattatattgtaaaattttatagataaaatgtatattctattcttattatatttttttttcttactatacaatttaaa

SEQ ID NO: 389360 - DNA, 1533 bp, Cannabis indica
atttctataattaatttatacacggttaaagttgtatttatctgtatagggaaatatcaaaatttcctatatgtttatatagtgatcaaaagctataaggaagtcacatacttatgagtcatcatctatcattgttaccattgctttcattagcacaaaacttattagattgcgtatccaattcaaacattaatggcaaattgccccacttatcatatttgttgtataaattgatatcctttttttagtataaaatatctcacttctataattattagacatgctttccttttcaaaataaataattaaacaagtcattgtactatgatttaatttatattctaaaaacaaataggctagattcctatactagaacaagttgtggcctatgattttgatttctatactagaactagttgtcctcctttgtttagggtaaaaagtaattcatctattcgttatttaattaggcttagctcacctaatcctacaatattttattataattactattattgtataactattcaaatttgaagagaaaatcttcatttattttaatttgttcttacaaaatttcaagttagagtaagaatctttaatggaaattttccaagtaaatattatatataatgtatattggtatgcaaatggtctgcatgtatttgtatattaatatagataagtctctaatctcgaaagatagcaacaatagttttcaagctcgagatttttgtaagtctgttggtcctcttttcaatagactcgttatttccttcttaaaatgtcacgtgttgatattaaattactgcataagtctccaaaaaatttactttgatgcagataagcctctaaaaattttactttgatgttgactagtcttaatctcgaaaaattgtggttatagtccctcagctcaatttcttgttagtccgtaggtactcaatttaggagctctatttgtaattttttaaattttcacatgtgaaaagtttatttgtgcataacataaaaattatttaaataatatcaaaattactgaaaactttaataattgtttttttttaatctcaaatccagacaaattcctaaataataaaaaatttgttcatttgcttgaagcaagaaacacaaacccaaagattacaaataaaccaataaattttagattcaaacttgttggattcaaatcagagctgatcctgaggtgagacgaaagaggcgaccgccttaggccctccaccgctcaggcccccatttcaatttttttttaaaataaagttagtaataaaataatttcaagtgtatattgcaactcaatggtaattcaattacaataatcactaaaaagtttaaagtaggattgtatataaattttggtaaactgtccaacccaaataatccgttcaaactaaactgagataactcgacgaaaaatacaaaccgaaaaactcaacaaaaatatagcccgcccaatctttatattgagcgggttgaaaataataccaacccgcccattcaacctaaactaac

SEQ ID NO: 389361 - DNA, 2719 bp, Cannabis indica
agccaactacagtaaccttgcaaatggttgatcgatcaatagctcatcccagaggagtcatcaaagatgtgttagtaacagttgataagttcatttttccatctgattttattgttctagatatggaagaagacagcaatgtcccaattatattggggagaccattattggcaattggccaagcattgattgatgttcagaagggtgaattgaagctgtgagtgcaaggggaagaagtggtcttcaatgtgttaaaggtgatgactttcccaaaggcaagtgataactgtttctttgttgatttgatcgatacccttgtggaaaagaaaaagttgatagaagatcctttagaactaagcttaattgaagatgatttgactgagcaagaaggagtggaggcaagggagtatgctaaatggctcgattcttatggaccactgaatagaaagtattatgaagagttgggggttgtgccaaaggagcttgtgccatctacagagaaacctccagagttagagttgaatgtgcttcctagtcatctatggtatgagttcttgggagaagataagaagcttccagtgataatgtcagcttcactttctgatgtggagactgataggttgcttacaatactttgagcgtacaataaggctattgcatggacattgggtgatgttaagggaatcagtacctcaacagtgatgcatcgaattttgatggaagaagacgctaaacaaacaattgatgcacaacgaagacttaatccacctatgaaagaggttgttagaaaggaggtggtcaagtggttagatgctggagtggcctacccaatttcagatagtaaatgggttagtccggtgcaagtagtaccaaagaaaggggggatgacagtaatcaagaatgagaagaacgaattgattcccacaagaacgcttactggttggaggatctgtatttactacaggaagctcaacaaggtaacaaggaaggaccattttcccttgccttttactaatcagatgttagaccggttggctgggcaagagtactactgtttcttatatggctattctgggtaccatcaaatagccatagcacctgaggatcaagagaagactacatttacatgtccatatggcactttttcttttaggagaatgccttttggattatgtaatgcaccgacaacattccagagatgtatgatggccatattctcagatctaacagagaagtgcatcgaggtgtttatggatgatttttcagcattcgactcatcatttgatcaatgtcttagcaatctggagttggtattaacaaggtgtgaagattctaatttggtgcttgactgggaaaaatgtcacatggttaaagaagggatagtgttggggcacaaaatttcaaaaagtggtattgatgtcgataaagctaaggtatccacaattgaaagcttaccccctccagtttcagttaagggagttcatagcttcttgggtcatgccgggttttacagaaggtttattaaggatttctccgaaattgcgaaaccattatctaatcttctcgctaatggagtgtcttttgagtttggaaaggattgtcttgaagcctttcaaattctcaagaagttaatctcagcaccaattgtgactacaccagattgggagttgccttttgaaatcatgtgtgatgccagtgattatgctattggagcaatgctgggacaaagggttgacaaggtattcagaactatctattacgcaagcagaaccttgaatgatgcccaactgaattatgcaactacagaaaaggagatgttggccatagtgtttgcatgtgataaattctgaccgtacttgattggaaataaagtcattgtgtatacggaccattcaacaatcaagtatttgatgactaagaaagatgccaagccaagactgatatgatggtttcttcttctacaagaatttgatttggaaataaaggataagaagggcacggagaatttagtggcaaatcatctatcgaggttggaacttgaagagagtcagaacacaaaggaggttgagatcaacgaagactttcctgatgagaactgtttctcgtggattctaatgtaccgtggtttgcagattacgtgaactattttgctgcaaacatcataccaccagaattgacaaggcaatagttgaagaaattctactctgaggtcaaacactactattgggagtatcctatcctctataagcattgtgcgggtcagattagcagaagatgtgtgccagaggaggagatgttctctattttaaatcattaccatagcttgcaatgcgggggacattttagtgggaaccgtactgctgctaaggtcttacaaagtggattcttttggcccactttatttaaagatgctcaccaatttctccaagcatgtgatcggtgtcaacaaactggaaatatttcaagaaggaatgagatgcctttgactggaatttaggaagtggaactattcgatgtgtgggccattgatttcatgggacctttcccgtcatcatacagtaacacgtacatattgctggctgtggattatgtctccaaatgggtagaagaagcaggaacatacctgaatgacggaaaaacagtgcttaactttcttcagaagaatattttaacccagtttggaacaccaagagcaattataagcgatgaaggaagtcat

SEQ ID NO: 389362 - DNA, 893 bp, Cannabis indica
tcttgtaaaccaatggtggtggaagatgatgtggaatcagccaattccctcaaagattaaacatttcctttggcatgtataccatgacactctttcaacaagacagaatctatatacaaagaaatctttatcatcactagtttatttttgttgccaccaccaagaagagaccctgacacattctctttttctaggttcttaactatccagcgggtatgaaaattaacactttttatacattcatatcatttgcatcagcattgagtttcatcaccttttaaaaaagttcaataggttaaggattacttacagcattaccaaagcaacaacaccctcttgacacaggtctccattcaacgtcacctctgctctctcgttgtgagacaccagcactattcaatcagttaaagcttaccgtggatgcagcccaagacataaagagaaacaaatgggttttaatatggtcattcataacgttcacaacaaagtggttgtggctttggctacaccgtggcagagaatccattcgcctcaaactatggaagcccatttcctccagcatgcgcttcattggtgtcacaatcactctacgaaacctagtcgtattgcatctaactgtaaaatacttgttgatcacatatgtatcaacttgtctcatacttttcatctaaataagtttgtcattgagattcatagcttgctattttctctccctcaagctactcttagttgtattctttaagggccaaatgaagttagtcatcttatagctaagcacgctttatgactagatcaggcagctatttggacgaggaacgagaaccacatgcaggccggccctgaaacaaagtgggccatagggaaaaaaaatttgggcccttatgttagaaaaa

SEQ ID NO: 389363 - DNA, 1352 bp, Cannabis indica
ctctgttctttgttcaacttggtatcagagccgaaggtattcttccatggcgtcctctgtcaatactacatcaaaccagaacattgtccctaccacaatgtttgttccaccattgaagctaacccgaagcaattattttttctggaggtctcaagttcttcctgcaatcagagcacatgaccttgagggaatccttcgtaatcagaatccaccacaggcaagaattcgtcaagctccagaatccacaaccatggtaagtaatcctgaattcaatagatggatgcgtcttgatcaatttctcctttcttggttaatgtcgactatctctgaatcaatgattgggcatgttgtgaactgtgctacatcctctgagatctggaataccttggagcaattgtttggaacagcttctcgagcgagacaaatccacttgatgaaccagcttcaatctaccaagaaagggtctctagccattgatgagtatctcttaaagatgaagaaccttgctgatggtcttcgtgctgcaggaaatccaatctcagatgaacaattaatcctatacgttcttgctggcctaggcacagagtatgaagccgtagttgtgaacttgacttcaaaagacaacttgactcttgctgaggtgcagttcatgctacaaagccatgaaattcgaattgaagccaatcaagctcatgccaccattgatctgaatggagccacggctaattatgcccaatacaagaaaaaccagtctgcccctccctctaccaatagccgtggcaatcacaacaactccagagcccgtggaagaggatcttatggtggtcgatcaaacaatggtggaggtcgtggatactcgaatggcaatcgacctatttgccaactctgtggtcgaaccggccatacagtccagaaatgttacaggaggttcgacatttcatataatggcccagatgataatgagaatatgactggaaataacccaccacaagccttagttacctccactggtcacagcacagatgaagcatggtatcttgacagtggggcttctcatcatgtcactcaagacaacaacaatctgcagcaacaacacccttacaaaggcaaagaaaaaattgttgtaggtaatggttctcccctttctatacataacattggtactagtacacttgctgcaagaaaatctctttttcttaaacatatccttcatgttccagccataacgaaaaatctaattagcatatctaaatttactcgtgacaataatgtcactgtggaatttacccctgatttgtgttttgtcaaggacaatcactcgaagacccctcttcttcagggtgctcttaaag

SEQ ID NO: 389364 - DNA, 533 bp, Cannabis indica
aaaaataaaaaggaaacaacttcggaggatctaagaaagcgataatctcgatcgtattacatatataagtgtagaaagttgtgagacagtagtatgaagtgagcatgggaattcaataggtgaaatgtgagatcgcaatggagaaaattatggattaaaagcgcatttggagcttaaagggtgaatccaggacttcaagttggatgctttttagaggtttggagcagacaacatggagagaagagagagaaaacattaacaggaataataataataataataataataatctattaattaaaactgaaaaataaatcatttaagctggattttaattcgaattgacacttttgccctaaaaaattattcatttttttgttacaccatatcaattttttttttttttccagcaataccatttcaaaatttgaataatgtaaattcatattaatgggttcatttgttacgttgtataagtgttgtattaaataataaataacactatgtttagataaaacaatatattgtattaa

SEQ ID NO: 389365 - DNA, 670 bp, Cannabis indica
ctttttgaaacataaatataaatttttataattagttaattaataaagtaattaagatgagttttgtcatatataattatgagttatggtcatgaaaagtgttaattaatcacatggatttgctttaagatgggtccaatttgtctattgtcgacccctaattgcggccatgcttaattttggctatgacacgtttcaattataataaggcactttcggtagtaaccatatatttaatttagtgttacattgaacaaggtcaatatcactattacatttcaaaaaagaaaaatatatgagaaggaaaataagtttgtttaaaaatattatgaagatgagcataatttttgatgtgacaatataattataaataatgaatgaatggaaataattgagttttctattcatatatttatttaattaaactaaagtcttatatattcataaaatattgttgacattttatacatgtatgacaagtgtgcttgacctagtatatgagtatggtttatggattgcattatgaccacgtgtatgtataaatatatatatatctattctatataaagtgtgcctatataaccgacttcttggtttatgagaaattcatgggtgacttcttatttatattaaaaataaaatgttttattattaaaaataaaatggttta

SEQ ID NO: 389366 - DNA, 2860 bp, Cannabis indica
tttttttttttgggaaattttatgttggtatttgatttttttagatgaaggaattgacatattttttggtgtacgtatttgatgtctatatctaatttattatttttttttttaattttggtgcagtggtgggtgtagtggactggtggtggaggtggtggtgatttgattcctcagatcaagatttttaatggatgtggtttaaggttattgtgtatttaatttttactggtctgacatatatatatttggtagagtggtgggtgtagtagtagtggtggtagtgtcagcggtgataatagaggaagaaggaacgaagaaaaaaagaaagaagaaaagaataagaaaaaaaaaaagaaatttttttacataattttatttaattttttaattacttatttttattttaaattatatttacaatatttgaataataaaaataatgttaacgaattgaaatatgccatgtataaaattgtgtgccgataaatattcacgttaaatattcacgttgatacttaagtgtgaaaatctataaaaacggtaaaaaaaatgaagtttgaaagtttcaccttaaaaaaaacgttactaaaaaaattaaatacataatggttgtggcatcattttcaggtgttgttgttaacatataattaagtaaacataataacagaaaaatacataaaaattgattaatgtaagtgctaacttctaatactgaattttcatagcagttagaaactaattaataaaagatgtctaaaagcctagaaatctgaatatctgatcccacaaagcacaaacaacacaatttccttactaactttactatgaacaaagctctctctcttctcccactccaatagtctgcgcggggaaaacaccattagcaataatattaactattcacactaattattttgcaaaacacttggatatgaatgatgaatctctctctatactttgattaaactttctctaaagaaatgtatctacacttttttttttttgccatatttgtatgtacaaacgaccgaaggtttaaattgtagttatatttaaaaatagttttggttttggtggagaattaatgaaataactaagatcgtttttttttttttttggttaaatggttaattgaagtattaataacaatctactcgtttgactagttagtgacttgagatgatgagtagatgcagctacgttagacagactagtcgttgggttactagaaaaacatctctccacatttattatatctataaatatctaatttaccaaattatatatatatttatttaaaaatatatacttttcactacttacatcataatatatattcattaatctataagttttcgacacaaaaatttcaatccggactagattttctattctttttactttttttttttcttatttctaatttaactttatttatagaattttcgacgattttacacagtcgtatatagacttcccgacggtctataaaactatcgcctatacgagtatcgcgaatactaggtaaaatatgcaacggtagagaaatatcggagaaaagaattctcgacggtttcactactacaaactgttttttcaacccattttataataagggaagctaaatgtatgataatacccgcctggttcaaaattgacatttagagccagtatttttagtaaaaaatataggtataaaaattaactatacctttagagtcagttgggggttgaaaactattcagcattatttattacacttatggcatcggttattaggaaacaaccgatgctacaagtgcacattttattgaaacttttacatctatgtcgtcggttatttcttaataaccgatgccatagggtatataaatacaaccctcagacttcatcttcctcacttcgtcttcttcttcaccgcgataatcagccacccccatagcagaagctaaaaacacacgaaaccctcgcaaaccaccttctaaaactctcatatctcactcatttttgtaccatttactcttttttttcttttaaaatcttttatttttaatacctaaatctatatacaaaaaaagttaagttttttttccctctatcactgtaaccgaacctattaaaaaaacgtggtggtataactccgaccaccgattatggtgcagaaaacgttgaatctcaacgtccattaaggtataaatataatttttacattttattaatttacattgctttgtttttgtttttgtaaattctttttgggatttttccatttttttaacattatgtcgttatgtgtgcataatggttggatttttgttgcaattggttgccggattacgcttataaggtaaatatttattaacttgatatataatatatatatatgtatatattttgtattttattgaatatatgtgtttatatatatatatatgtattgtgtgtatatatattatgtatatattatttatataaattttgtaattatattgtatatattctatgtaatatatatgtatgtatatatatttaatgtaaatgaaaatgagataggagagatttaattagttaagaaataaagttttcaaaattgtgttagtatgagatatattttattatatatgtacgtatatgtgatttttttaaaaattaatctatataatttattaaccagtaacttgttacttttttttaataactagtaagtaattaaataattaaaattctaattttgttgtatttcattatattgtaggttgtgagctaatttttaaggtttggaagaatttggtgttgatcggattttaagttgttatagatatattcattcactaactttttgttattatattaaatt

SEQ ID NO: 389367 - DNA, 544 bp, Cannabis indica
ttttgaagaaaagtcttcttcttttcttttttttttttttttttttttttttaacaatatagaaaagtattaattgaatattattataaaagtagagttgattccgacaaattttataaataattttttagaaaataaaacaatgtttcactataaatttaattataattttaatttaagtgggaatctgtaattccattcttacaaagtttttaatgtaacccagtaattttaggactaaatactgggccattggtgcttttaatgccagaaactgatcataccaaataatttgaaatgaaattagtgtccaaatctaatacacataccattttaaaaaataaaaaatcatctaatacacgtaaataatttgctacattcatttgaatattattatcaaatatatttttgttgtccaccccataattaatgcaactatagggacttcacattgaaattaataagctgcgtgccggacaccagacactctttctattttcaattgggaaatttgattttctatacttagaaaatcaaaaaattt

SEQ ID NO: 389368 - DNA, 656 bp, Cannabis indica
ttgctgtcaattttgtataaattattttgatgccttgattctctaaggactcaatgattttaaattaaagcattttattgtgttataaaatgtctaacatatttatttttgtatgttaattatgctatgccggtttatcgataaatggatgtatgtaattgatcaaaagtttgtttattctcttattcagtttgattcttaaacaatgatgtagatgttactaaacaaaacaagtatctgattttcatttacttactctgttttttcttctgaatataaagtaaattaataatgacctctatatatggtactctaggttaagcgagtaaaaattgcattgcaataatgacagaatatgaaattatttgatgagcttcttgaatattcttgataaggaaagtcacatatatttatataatacttgtgtatttattttttcaatgcttaatgatagttttgatagaacttttatcatgatcatttttgttttgagtattaaatttggtgtgatctttctattagagttgaagaattgtggtgcagcaagtggttcatgagttaaaaaaatattcagagagaaagactcaatagacatactaaattaattgaaattttaattttttttactgctaaaacattttctaagcatgttagaa

SEQ ID NO: 389369 - DNA, 731 bp, Cannabis indica
tttattactctaataacatataactaaaataatctaataacaaaaaataaaaaataataataaagaagaaacgttacccaaaataataaattcatcttaataactacataaaaatactactaacatatataaattattccaaaaaactgcaaaaatatgatcacaaattcaaaaaattaatcatactagtcatgaatatgtataatgtgaccctatataagattgcgataaattcttagataaataattaaatttgatcatctcaacaaccattaaattaaaactatattttaaaattttatatatgaaccatgaaaaaataaataatcataaaatatttaataaataaatttgcaaatcatactaattttcaatcattatttaatcaaagatgatataatagcaataatatagtaaaattacttttaaaaaactatattaaataataataattaatatttataactgtcttactaaaattatataacaaaaactgtaaaaattcaaaaaataattaaaataactgccacaaattgacagattggtatcaccgtaggataaaccgcaactgccaccataacctttgtcaaccaccgtgaccagcatcaccgcaccacagcaaaacgaccaactacacccaaatctaaaaggggtaagttgaaaaatatcatttgtattaatcaattaatcaaatttacttctaattttatatttaattgaaacatacctct

SEQ ID NO: 389370 - DNA, 761 bp, Cannabis indica
actatatattttccttcttaatttataagaaattaatattttttttcaaatacatatataatacttgatctacattaattcttcttaatccaacaaaagataaacagtaaaagacattaaatcacgtggtcacgtggggagttctcatttgagcataaacacacgagatcttggtagttggtacaccaagagaggcttaaccaaattacatgattaattaacaactagttgatattttgacccctatatttaagagcatttttattaaatattaatggtgtctagattcttttataagtaatattttatgattggttaactatatttttaaaaaattatttttttaaattatataaaatctaatacttaattacactaataataatatggtatcgaggaagataaatactttttttaacaattttctatatctaattatctaatctagtcttaacaaaaacaagtaatttatttttaatatttaatattattttatttttttattgtgtaacatatttttgctttgagtgcataattaaacacagcccacaaattatttcaataccaatataattatttactctttcgatctcatccatgttgatactaatattttatttaaattaattattacatatatatatctattctatataaagtgtgcttatgtaacagaattctaagtttatgagaaaagtatgcctatatcattcgtgacttttatttatattaaaataaaataatttattattaaaaataaa

SEQ ID NO: 389371 - DNA, 1614 bp, Cannabis indica
ataagtttcctttttcccttttttttttaaaaaaaaaaaataatggtcagccctaaaaagtcaaaagggcaaaattcaataattactaaaagactaatctacccctccaaaatttttaaaataacctagggatattttggtaatttttctaatccattaaactgtcattttaaaaattctaacctagtccggaatatcttcaaaataattctcccattaatatcgtgatatttctcactacattgctaaatttccacagtcgccggcccgataaaatattttcatttcaataatagaatcctcgatacccacatatctcaatatcatctccgtaattaataaattacgtttggtataatcattcaataaatccttactaattaccctaagtaagatcataatctaacttcgttacaaaaataattacatatttaataaaatatgtttatttaaatatcattttatttttccgtagatattacacaaggctttttatgggtgaaataggctccaagggcctagaatgagaagcttaaaaatgctctctttcaatgtgggttttcaagcttctaaatctgatacttctctctttattcgtgggataagtaactctctagtttatctcttgatttatgaagatgatattctcttgacaggaccaaatactgccctcatatctcaacttatctctgatgtgaatacaaagcttttacattgaaagacttgggactagttcactattttcttagtgtagaagtttatagagatgccacaggtatgaacttaagtcaaagcaagtatattcatacatggctacacatgaatggagcgaagagttatcctaatcccactagctccacaacaaaactcaagtctcacagatttggaaccgtttgaagatatcacactatatattgaagcattgtaggtgttttatattggtttatggttgtgtccaacaaattctctgtccttacaatattaagtgatgccaattgggtaagctgtatagattatcgaagatcaactgatgattgtgttatgtttctaggcagcaatctcatatccttggtctgccaaaatcaacaagtttttgctcgtgcaagcacaaaaagtaaattttgagccttggctcatgctgctgttgaagtcaaatagatcacctttctcttatctgaaatttaaattcctcttgctcagactcctattcattgggtcaataacaagagtgccacctctttaattgctaaccatgtgtttcatgcaccctgcaaacacatagagatagatctccattattttcgagatcaaatgctggcaagaccactctaagttcgctatacgtacaatctttggatcatgttgcatatgctctcaccaaacatttgactacagacaaatttaactatatgaaaatcaaacttcatatggctacctagtcattccgttttgagagaggatgtagactacttaactaatttttcagattaaatagttagcagttagtaattttttcctattaaccaatacgttcttaataattaacagattttaagtataatcgaaaaatatttagcacaagcaaaatataaagagattgccttagaagtatca

SEQ ID NO: 389372 - DNA, 2245 bp, Cannabis indica
ccttatgtgcttttgacaggtcaaaatcctagcctaaaacagttttgacatttagggatgtccacttcaagaaagagcatataagccacatgaaaagaaatttgactcaaaaatagtgagcaactattttattgcctattcttaatgatcttaggggtataagccacaatttaaaatatttttgagacgggaactgcaacattatttgaagatgtggagtttcgggataaataagattagacacatttattttgagtaattgaattaaaacgctattgcaactatcattttgaaaattttcaagcttccacacatatcatttatataaggaaataaatatgaaaccttaacaacacaatatatgttaaacaaaccccccatttgaacatgaggtaattgttctagaagaacaaactcaacatgtttaagaacaagagccattaagataatccacaagagaagtaagaagtaattttagatgattgtattatatttcttcaaaaaaaaaaaaagaatgtgacaatggaataatggaatattattcaatcgactttccttaggctacaaaaagttctaattctaaaaagtttatttgttctttaatgaagagtatatactatatgcaagacaataaagtttagaaatttgtccaattactcgaaattgtaaaattaattggttgtaaagggatatttaaatcaaagagggatgcaaatggtaatgtggagaggtgtaaggcagatcttgtagctaaaggatatactataaaagaaagcattgattatagaggttttttctccactttcatcgaaagactctttttagatgataatggaactttctgctcatcttaatcttgagttacattagatggatgtaatatatctatggtgatattgatgagaaaaaattatatggtgaaacaaaaaaaactactttttgttacgtgaaccaaagaatatggtttgcaaaatgaaaaaaatctaagcttcacatgaatggtatcacaagtttcatcaagtacttatctcttttggttttgagataaatattgtgtatatcactaatttagtgggagtgagtatatattccttgttgtatatgtcgatgacatattactattcactaatgatatatgtttatcacacgaaattaagagatttctatataagtattttgagatgaaagattttagggatgcctcttttgttttggaaattcagatacatcgagaccattctcgaggtattcttggattattacaaaagagcaatatcactaaagtactaaaaaagtttggcaagcaagattgtagaccaggtgctactcatgctgttaaaaggagagaaattcaatcttaattaacaccttaaaagttacttgaaattcaagatatgcaaaaatgtacctacgcttcaactatgagtctaatgtaatgtcaagtatgtaaatatcaagatgttgtaacattgttggcagattgtaagagaaaaattatatttgttgccaaatatgtataatgtataatgcttaataaagattgatacaaaattaagtgatcaattatggtataagtaataaaggttattaaattatcatggaaataatgtgtagaagattctataagttaatttaaaatttcattaagaattaaattacaaatatccaaaactaattctataatctttctatatacgtaagtagtggtccccaagaaacaataagactcttgtattctatctttcctcgtcaaagaaaagtacataaaaatattgtattatttgaagatcaaaaccttcggtgcaatctctattcatggtttgaggttagtgctttcactcttgtattcatcattttctattcatttaacaaggatttcatgatttacagtttttatattaaagcatttttagtaacatgattaggttttgagatattttatgttccttgagtttattataaatcctaacatggccattttttggcattataaatcattgacatttatcacaaatttacgagtggtcctaaatcattacaacgtatatgaatattaaaaagattaggctggaaaatcatttggatggcaattaataagtaaggagtctatagtccaatcattttagcatgaagggtccactactaagaatatttcatatagaagaggggataatatactcctaatttttttttttggaacatacctactttctctgctatattttagctgtgagcaaatttattt

SEQ ID NO: 389373 - DNA, 1520 bp, Cannabis indica
gtgtcactaaaagcctaatttcttgtagtggtttgaaatgcttgattcagaatctcttgagtaatacattataccaaacacttagaaatacgcaagtaatgactttataatagaatgattcacatttaaaaattgagtagctaactcattgttcaatttattttatgtacataacaaacttaatgggaaaaatagtgataacgacaagtgagagacggtgataacatcgactttcaatatagtgacgactattataagtgaaatacgatgataacatctactttgaatatagtggcgactactacaaatgagatacggtaatgaaaacagttttcatatgatgagttttctaatgatttatcaattatctttttagatctcgagaattctttaattatattttttaatttattgtagtgtttgaaggtatctctttgtttgtttttttagataaaaaattgtataatagttactcttattatgaaaggaaaaattacaccaaaaatatcaaaatttaaaatttgatatataattctaatcattatgttaaagggagttggttagttataacagtttgttaacactgttagctaacctacactgttagcggagtgttttcaattagagttagttgagtagttattgtttgttcattgtatatatactcttcttataactctactcaattcaataatagaatactatcttctttccatctttctctctgttcttaaacatcacatggtatcagagctctctctggtttgttaatggagattccttgtacctccaatggtggagcaagattgaataatgctcaaacagagaacaatcatcaaaccttactccctaaatcttacactgtttcttttactcattctctcccaatcaagcttgatgagcataactatcttccatggcgacatcaagttctggcttcgatcaaaggaagtcgactattgaattaccttgatcctgacagagctccaccaaagtttctcagtactacagatgaaagatcccacactgtcaatcctgaatttgaagattgggaacaacatgacaatcttctagtctcttggcttctttcgtccatgtctgaaaagaccactcattgtatgataggttgtgacaccactgctcagatctgataggctctcaatgagtactatacatctcttaatgcagaaaatatagggttgtataagactcaattttgaaacaccaaaatgagaggttcgcttaacgattatctgctcatgatcaaagggatcgttgatcttcttaccacaattggtcataaaaaaacacctcaagatcatattgaatctatcttcaatggattattaattgagtatgatgtgtttgtcacgactattactacgagaaaacatgtttacacagtagcagagattgaagctttgttaatggctcaatcggctcgtattgacaaacacaccaagaatcttgatattttaaaagctaaagctaatctttctcactcaagattcaatggtttc

SEQ ID NO: 389374 - DNA, 1351 bp, Cannabis indica
ataaaattaattatttttatattttcaaatcatttattattaataaattagatttttttttcctggatttttatagcaatatattgataactttttaaaacaagaaaacaaaaaacaaaagtgatctccaaataattatgttattaattgtatccaactctcctaattatctaaattatccactttattttggttgggagcgggtgagagtgtttaaagatatgaggctgtgctgatgagatcatgtcaaattggaaaacaacatgttaacccctttgaaactttccagctagccagaaaagcactcaaactataagtaaacacatggaaataaggacaagtataatttacaataataaggtatatggaactttgtcaattaaaaatttaaataaataaatgaggttatatatatatatatatatatatatatatgggcatgtccagattttaacttaaataaatgtactagctagatcgtaatataactcgaacacatatatatgtagggtggtgttggtagtttgtgaaatcttacaaaaataaatagtgaagtatgtgagtaattgcagttctacttgggatagaatcattttattagaagtgtataaatagtgtaagtttgagatatgggtatgggccccaagggctattcagttttgcgcgcatactactgcaaaaacttcctttagaggtggtttttaaaccctttcaacatcagttttggcgaagttcgctactgacgctgatcagagggacactaaacgattaaaaaccgacaccatatatacccctacggcgtcggttattatctagaaacaaacgccataggggtgtatatggcgtcagttcctagctaataaccgacgccataggtggcgtaggaaccgacgccaaaaacgagcactttttaattttttaattttatataatttattttaattaaatatttattaatttatatattattttatttaatttaaattacatatttatttttaaaaggtaaattaaatattatttatattaattttaaaattggctaaaatacataatttcatttcataaaagtaattaaatattacacaaacattaatgtaaaattagtccaaaatattaataagttaataaatctaactacaagttaatctaaaaaaattacataaggaagaaaaattcttggacctttcaacctcaatcgtcaccgtgaatcaccgccatcaatcgttctatccactttcgctgtaatggtaacaattcagtttttggatcgtattgccccttacccccaaactgttaaaaaaataaaaaatttatattagttgatatatatgtatattatatatttgtt

SEQ ID NO: 389375 - DNA, 535 bp, Cannabis indica
tttatgccatgaagtccaaggaaaaaggaggagaagtgtgtatgttttgctcttccattaaaactcctaaaacacaacatgcccagacataccagcagggcgagtcagcaacaggaagtccagaaggctggcttccatcacagaaggttggcctccatctccaaagtctggcctctgcttcggaatgctggcctccatctccaaagtctagcttctgcttccgaaggctggcctccatctctaaagtctagcctctacctccaaaggctggcctccatcacagaaggctgacctccatctcaaaattctagcctctgcctccgaaggctagacaccaccttcgaaggctagcctccatccacaaaggctggcctccctcagacgcacaaggaggtgccgctaactctttctaagcctccagcaaaaggacaattaggggttgtcattgacgaaccccatatgtaacactctgatacttaggtgcgctacaataatttttcaattacagtgccatctttgctaatcaaagagattt

SEQ ID NO: 389376 - DNA, 902 bp, Cannabis indica
attcaactgctgctacctgatttagtactataaaactaataattggtacgagagcagttccattaagtatatatgtatatattaaatattgtgtgagttttatgtaataatttatatatatatatgtaatatatattgtgaatgaatagtattttattgtgaatgtatgtgaggtgatagatcgttaattttatgttaaaattagtgtaggtttcattattatttttttaaaaaataatgtatcccaattatgaggcatgagaatattctatgtaaatttaattttaataaaatttaatttttatgtaaatttttcataaatgtaatgcgcaaagcatgtagctcaggtttgaatgaacccaggccatgcaccgccttcaccacacgtgagtctgggtctccatgaccctgactgtgctcctcgacgacggctgactggctgatgcaagtttccgtgcccatggacgtttgacgtccgtatgcatgggcatgcaagtcgggtgaatgggacgttaatgtcccaaagtcgtccctgccagtagagccgctcgactcttattatgtttagtttgactgaacaagtaagctcggagctcttcacggagctacaaggggacttaagttccttagtcgaggtaccccatgcatgagaaattgacccgtaagggacaagccctacgtctgcttagaaggaaaagacctagtcgggtctcggtcttcgtgaccctcctacgattttccttcatgcgacaatgtcctacaatggccatccaaggccaccgtggccatggtggctcttcagagctgtcggccacgatggtggccatggtggccgacccctccgtatacatgtatatatatttatttatatatatatatgtatatattatatatattatata

SEQ ID NO: 389377 - DNA, 994 bp, Cannabis indica
gtatatccatttttttcaatagctataactattagtttggggaacaaatttaagtatagaaaatgcatagaaaatcaaaatttcccaaactaaaattataaaagtcgtaaaaatattttaaaattctgtacaatttgctatttttgtaattttttttgttatttttatgtatttgtgaaataatcccatattaaatgtggttataaaataaaaattgtactaatacctaattctcataattggagagtaattgagagtcctaaacaacttttaattacatggttaatgtgtacttaacaaacatgctaaactttataagtactttgaattatactcaattataattatatagtagatttctaaaaaatgtcctaaaaactactcaaaatttaaattattataaggatagatagtatttttaaaaattattaaaaaaatatgtatgtacttttaaatagacttttttctatttaggcccttggttgggtgggcgggctctaaacacgagtttagtccgccttaacttaagatcgatccagcggacaatatcaaaattctttccactcagacgaatcaaaactccacttaaaaacattaaaattctctgtcacaaaagattttttgactgctaaatcttcctaattattatttcagttacacttaattctccaagtttaaattctagcggtataatcttctaaattactaaactgttaataaattttaagtgttatccggttaattgtcactgaagtgaattgaagcagcataaattaagaaaatttaagaaaggtgtttacttagcaaagtgcttttcgggttgttcaggcctgaccttgggtataggcgagctagacctgtgcctaagacccacctagcccaaaggcctaaaaaataaatttctcttttaaaattatacgttttttaaccgatttagaaaatgacacatttttttttaaaaaaagaggaaattacacttactatgggattttaa

SEQ ID NO: 389378 - DNA, 768 bp, Cannabis indica
tgtgtgtgtttgatgtctaattcttatttttcattaatggtgtttccaccatgcattaaatacttttttttagagttttaatgtagtctcttaaaactctaattatgaattaatgcaatttctttgattcttttcgcaattaatatttaatgcttaatcaccatttgcaagatatatgtttttgattcaaaaattgaaatgtgagaattgaatatgctacaattattgtttagatacaaaatttaatacaagaggaaagtacctattattgaaagttatttaagcaggatctaaatttactaacatgtacgttgattatattctataatataacaccgtaaatatgaatttcctaatctgatgaaataaacacatataatgtttagaaaactttatatttatggcagtagaataataataagtccttctgtgcagatctttagccattgatttctttctctagcagagcataatcaagatctgaacctggttcttctctctttcagtttggttaaccaaagtcttctctcttcttgttctctagaataatcaatgaagaacaagaagagaggattcgaaatcactaaggagtgaggctctaatttacattgtctgacaaaagaatgaaaagtaggtttttagctagttagatgagaatgagagcatcttattacttttagggctcgtttcgaacgtcgtattaggtcgtatagtattgtattgtattatattgaattggattatatatcatatttttatataatacta

SEQ ID NO: 389379 - DNA, 1942 bp, Cannabis indica
aacttgataagtgcttcactctcaaagatttaggtgagctgcatttctttcttggcattgaggcatttagagatgagactggcatatatctcactcaaacaaagtacattgaagacttgttaagaaagcacaacatgactcacctgaagcctagtccaactcccattacaactgggaagtctctgtcagttacagatgggaaagcaatggacaaccccactgtttacagaagtttaattggggccttgcaatatctgtgtcatacccgaccagatatcagctatgcagtaaattcactcagtcagtttcttaaaagtccaacaaacactcactggaatgcagcaaaaaggatcttaagatatttgaaaggaacttgcactcaaggtcttcatatctgttgcagcaacaatctgaacattactggtttctctgatgcagattgggccagtaatgttgatgatagaagatcagttggaggatattgtgtgtatctaggtgaatctttggtgtcatggtcatccaagaagcaagctgtggtttccaggtccagcacagaatccgaatacagggcccttgctcatttgagtgctgaaataacctggatagagtctctgctcaaggaaatcaaatttcctctgtctgctgttcccattacctggtgtgacaatctaagtgcaagtgcacttgcttcaaatcctgtgtatcatgctcggactaaacacatcgagttggacattcactatgtgcgtgacaaggtactaaacaagactcttgaggttcgatatgttccctctgctgaccaaatcgctgactgtatgacaaaagggctatcaatctcacgatttcagtacttagtttgcaaactcggagtgaaggtatcaccctctcgtttgaggggtggtgttaagaaaatagattagttaatcattgttaattaattagttaattgtgcttttactggtttattaagtttgttgcattgtattctgcaattgcctttttctgttttgagttggtctcctctttaccaacattagggccacttgtctttcatctattggtgcttgtatttctctctcaaagtatataaagaaaatgttgtctcagcctccattttagctgagaattccaattaccatttctgtgtgtaattcaactccattcagatcgatgtaagctcaatttctgtacatgaactttatattttgtatagatccagaaattttttgcattgagtttcataatagtgagtataaaattgggtattttgattatattatgcttttgattttttgcttactcggttcaaattctagaaaacatatataaacaactaatgttaataaacaaaaaaaaaaaaaaaaaaaaaatcatatttttcaatgataaaagtggagggtgcattttttttctcaattctagtctattattttctatttttgatttattcataatcaaaatatctaatttttttcattttcttgtttctttacataattcccttctttggtgagtttacttaccagaatattatggtctagcgcttttttattgaaggggaaatttaattttccattcttacatatacttaatatttgtttcctaaacacataatattatgggatatgacattttttacaatattttccatacttaatacttaataattgtgggatatgacattttttaaaatatccctaaaatacccccatttacattacccctcccctttctcttcttgtctttactaccgagcttcccagggctgaaataagatatccatcggacccaaaaaaaaaaaaaaattcaagcacatgcatcggacccgtcggacctacaaaactttttttcccaacacgcacatgcatcgaatcctcccatcggacccgtcggaccccaagctaaattttttcagcacaagcatcagacccccatcgggcca

SEQ ID NO: 389380 - DNA, 1892 bp, Cannabis indica
taatttatatttattattttaaaaatgcagttggaaaatgtgggatgattgctacagttcaaaaaaaaaaaaatagaactgtattactagacgtgggtggttttttttttcttaaaaaaaaattattaatcttgtaggagatacatcattataaccaaattaattactaccattaaattaaaaatcaaagaatacaaaaatactcttacttttgccaccaaaccaagccaaaattttagatattcttaaaagattggctaccttcaaattcaatatcttctcttttcaaaaaaaaacaaaaaaaaaaaatccaatatcttctaggcctatatgcataataaaatttttattaagcaacgcatttatttagtttttttggaaaaaaaaatctaatttctaacaaatttttattaataatgccaaacatgctttaggatcatctctctttttaattttaaaggtattatgtgtaactcctatcttcaaatactttgtccacctctttaaaatgtattgagaaagtatttcacaatattatgaaaggaaaagactttaagaatatgtgagcacaatatttttgcaaacctagacttcttgcaactatacgtattgttgtattagtcaatgaatcatatttaactttgtggtgaaaagacttaccctttgaaaagagcttatattctctcataagtgctaactcagtaataagttccatagcacagctataagcctttaaaaactcaacaatacacattcgcccacgatgaccattgtcatcatgttttctagaatttttactagcatttggtcgggttgtccttttttatctctactaaatagtgcttcttcgtcactctttaatgaggcacatttgcttagctaacgcttcttggtcagctagcaagttttctaattcaatcaaagaaggttggtttggccaaccttgtatttcaacaataaaaattatgaattctagccttaatccatgaataattattcttttaattctagcatctgatataccagtagcagaatctaaagtagaaatttcacgacaaagggattttaccttggtgaagtattgattgatcgtcataatgcgctacctgattgagagaagttcgttctctaaaagcgctggaatctcgtatcattcttcttggtgaacagtgatgtgaaagtatctcatgcttccttcggtgtcttcgtcgaccagatgtcctccaacaattcatcttcaactgtggtttgaatcgcaaacatagctttgcccactttaatcttctatttctttaaagcggttgcgtcctccggttgtgtgacttcattgtcatcaccaacgatctccccataagtcttggcctttgagattatgcttccatgtgcatcgaccccatgttgtaattttagttgttgagttttttaattctttcaaccatttgaaagtcacccattgtgcaagctctgtagtactaaaccacatatgatcactctaagaaactcaacaaaggactcttttggaacgaactcaatccggctctaatactacttgtagaacaccacacgtgaaagcgtaattactttattattataaaagtaattacactaagatttgaacactttaacttgaaaataatacactccaagcactcactctttttatttactaaatactcacagatttttgcacactatttgatgtgacactcttttagagttatattaggacttaattgaatatatatatatatctttatatattaaaagtgcctatgtaacggcaattcttggtttaacagaatattctttacaaataaaagaatattctgttaaatttaaccccaaaaaaatcaatattctgttaaattcgtccctaccgcacgtgcgagcca

SEQ ID NO: 389381 - DNA, 1027 bp, Cannabis indica
agaagttctaaaaatataacttaagtattattactgtcaaaaattaaacttaactatttattttaaactaaagtatttataccataaattattatatatatgtatatatatgaaaatgattatggaatatttatggagatatggaaaggcatgagcaataataagaggaggcagatccaacaggatgattggagttgtaattataattttaacaattatattaattgtgccgtaagccgtggcgttggattgggattaatagaattaattaagatccaggctgctaagcacatggcttttccttaattaatcatataatataatattattattacaaaaaagaaattccgacaaggtgaagaacgaactcattaattagcaggcttattgtcctttcctaattattattataatgaattataaaatgggttttgattaagctaattaattataggattacttggtaatatttattatgagtttttataaatgcctgcagggatgggatgttagtaaatcttaagacaacgacatgacatgcatgatctccttttattcatttctgtccacccgcccatatatatgtatactcactcatcataatatatatcttatttacacaaaataatatttatatcacctaatatatatatacacgtaactttgattccctaaatcatattcttataaaatttcatttaatgtttttatagttatatatatattaattgattcttactaatgtatgatatatttgttgggaaattggacactagaatatttaatatttatctccaaatatttatttaattcacatagatttatttttaagcacactcttcagaagattttatactaataaaaatattgtttattatgcattagaggataaatgtaaaattttctttaaaatttatttaaaaaatacactatattttttttatcaatagaaaaacttggaggaacaaggtcccttcccattgttatagatccgtatttacttatttacaaattatatttttttttt

SEQ ID NO: 389382 - DNA, 1024 bp, Cannabis indica
aaatcgtatttttgtcataagttcttactagggtgtccattttgaacgttccatataccatttcgatgcttgcaattagctctacaacatggtatatattttagagccaaaatataagttttattttagtatatttataccacgagattaggtaaaaaaccgtagattgtcttatgtgaatattaagaagtgttttaggataaacacttaatagtttatcgttgttgtgatatagggccgagatcattggggatagttctccacctgggttggccaacatgtatgaacctgaattaaaggtaagaaaaatatattgtactacatagtatgttgtactgtaatacaattagtattgttgtgaattgattaatattgaggtatggttattattgttatataataaaacgattgattgattaagcaatgataatgtgatgataccatgaatgggatatgcaggctcaccttattaggtgatgcgatatgccgggtgtcgtaccttgttaggtgcatgcagtagtgatatatgagtaccgagcataggtattggctcacctgattaggtgatgtaatatgccaggcgtcgtaccttattagttacgggaagcaatgatatatgagttctgaccataggtacaagctcacctgattaggtgataaaattatgtgatatatgggtgcaggtaaaggaaaagaaaagctagatcaactgtgaggtgatatatgattttgttttatggttttgaggcattattgtatatagttcttttgttaaacttcttgtaacggggatccccgaaacacgctttttatgccgttataatgtccgtttttagtgttttatttctgtcaagtttttaatattatcacgatttttaatatttaattaatctattagcattaaagtagtttataaaatcacacacgtggcgtccctttactttagggcgttacaaaagtgctccagcatcttactaatgtaagttgcttgcactagagtttgtaaattaccaggcataccaca

SEQ ID NO: 389383 - DNA, 900 bp, Cannabis indica
agagagagagagagcctcgcggacaggccaaaaaaaagtgtctcttctaatgtaaaagaaagccttagggactagctagataaaagtcttccaaaaatacaaaaaagcaagtatagataaatggcagatttgtcgattctatgaggaaggcgaggacccaaggtcttcgcgagctaggcttccacttcttgttcttctctaaaaaatgagccaaggtagctgcaagattgcgtagaaatttgaatttaggctcataattattggatctccaggtcatgaagacgtcgtcctcaaatcacctcatgcaattttcataagtgactagagccaagagagcttccctcgtagctttggcaacctcctaattcgtcttctcttagaagtcaggaagttctttaagctccacagacacgctagttgcggtctcaaggtccttttggtgaagttcctcaagtttcttttccttgtcctgaagctgtcgaatgtcctcttaagttatcttcaaggacccttcgaccacatgctggtctcgctcttgcaaagccttcactgacagaacctcatccttaatggcttccacacgcttttctgcatctttgagggctttctcacattttttcgcatccttcagcttactcaaggccctgtcagcactaccatattcgacaaatgcaagcacttaatcaatcaaggtttggataggtgactgacttcggtagtattctgaccagtagtggtgttcataaaaaccgataaaccgaaaccgaccatcaaactgaccagaatgtaaccaaatttttggttccacgtcatcaccaaaattggcagtcggtttcggtttcgatttttttgacatggcggtcggtttttgttttttaaataaaaaaatggttaaaccaa

SEQ ID NO: 389384 - DNA, 1444 bp, Cannabis indica
tacatatgtattattattactactgttattataagtaatttttaatgtggtgtcggtttgggctatcctatttatgcttacatattgttgtttttgagcttgtcatgtcgtgttgtacttgaattcttatttttttttttttatatcgtgttgtgccaatataccgtatcgtgcccaaactcttatttttttcatactaggtcgtgcccgtgtcaagagatctgaccggtatttacaatactattactaactataataaaatatttatgatgaaaataagtgtagttattttttttttgaacaaaaagtatagtaaaatgttaaatacctttaattactctttttttttttttttctctcagctcaatcaataatgtattttattaatgatttaaaatataaaataagtatttattatcagcgtctataacaaaaagtaaaagtttggcatttataacaaaacgtaaaagtatacatagtctaagttaaattaaagcatttaattgaattaaattataattaacacaaatatttttatttagttaagtattataaattttactaaaattaaaaaaaaaaatgtaacactattctcccacaaattatttgtcttactgaggctatctttgtgtctgatagaagtacccatactaataatgttatcgtacaaaaaatcattcactctttcaaataaaaagaaggataaagaaggcttgttagcaattaaaattaatttgatgaaagcctatgacaagatgagctgccattttgttaaccattatctgtattgctatggggtgccagaggtgttctgtaaatgggtttcccaatgtattacaactacgtctctgaatgtgtatcttaatgttggtcaagttgggaacatcactctgacttgtggtctccgtgagggagaccctctttcaccttacttttttatttgggcggttgagattctgtcgagacttcttgatagagccttgggtaatgggaaaatcaggggcattaaactttcccggggtggccccactctatcccacaattctttgctaatgacctaatcttggtgggtaaagcctctctagctgaagcaaaaggctactggattgcattgaaatgttttgttcttcgtcaggacaacaggttaataaacttaaatcttttatatttttcagtagaaatacccctatggatgtgaaacaagggattcgagatgccttgggaattagagggtttgtaataatcgttttagtaatttggattagtaaaggcaattatcactaatttctattattttataattatttatgaattaattatttatagaccccaatatttagaaataaatattagagttataatttctcaatttcggatattttattaaactctaggggtattatttagcttatatgtgaaatatgttatttttgtaatttttgct

SEQ ID NO: 389385 - DNA, 988 bp, Cannabis indica
aggattaattttgtgtcagttcagcatcattctacatataggctagctgtagttaaaattgattcatacttgaatttgaagattccttcgacaacgtcaaccgtctgtgtaactgatgcttcttgaaaaaatggcaaggcaggcctagcggttggttggcctgaaagagtttccaacaccagctcttagtttgcaaagtcttgtatggccgacactacaaaaaactgctacttttagtgtcaattttttagtcaaaaataattttttgttactaaatgtgacttttagtcacaacaaaaatttacttgtgactaaaacataatatttagctacaagttgtcactaatttagttttagtcacaatacttattgtgactaaaaacacaattagtcacaataaattgtaatttttgtaactaatacttttaaccacggatcttttagtcacaacatagaaatgataatttataattagttacaactttttatacttttaatcacaaattttattgtgactaaaagtaaatttttttgaagtgcgagttagcgatggaagcagaatttctggccattctccgggctctttagttgggcattgaagttggtactcactccataaaaattgcttcggacgctttgctagtgatgaaagctttggagaagaagcagttgtagccctgttggaaaaccaggactgtagtgtaaaaattttgaaagcttgttagtgcttttgaatgttgtaatttcgtttatattaagagggaagataggggtgttcattggatgacatccaatgtttttaggcctatccagatccgatccaatcatatattggatgctagattttaccatccgatccgatccaattaatttcgtcatccaatcgatccaacatccattggatgttggattggatcggttctatccattggatgtatttcatatatattttcttgtttaatttgggtttatctaatattttaaacct

SEQ ID NO: 389386 - DNA, 1763 bp, Cannabis indica
gaacagctacaaaacaacagtagaacactaataaaacactagagaacaccagtgaaaacttaacacagtatactgcagtatgaaacttataaaaaacataagtaaaaaagtaaaaataccgcctgacagtatttttgtaaaaaaatggcaaaagttagtataacatgtaaatttctctatagttatgaactacttccaaggtcagaactagttggagatttgtgtgaattctttttttaggaaattacattctatacttattttttattttaatttttatcttcatttattattctttaatttatattcaattttataagtcatatctccattatgtgcattaaaaaattctaattttgataagttaggtgaggatatatttactatattgattataaaagaaggtatttattaattaaaattattttggaattatatttagttaatgtgtaataaaaaaaagtagtttttaacttttctttgtattagaaatgaagaaaaggcaaaagaaaaggaggctccaatcaaattatcccaagaaaatcaaacatgtgattctttctttgttttacccaagataagtacttaattttttttaataaatttaaaatagaatctgtattaataaaattaaacgaaaattataattttattaacattatgtaattttgacgctaaaataaatcattgaatttatccactttacaaccacaatatttcaaatatttatgcctcaatatttatgccataattatttttaataataatacaaaagagatagataagagataaagcacaaaggaactctaattagtgtaatgattgagggattatgtgccctaaataagaggcaaattgaataagcatattcatgaaccattgccctccaacatctttggtgatcaagttataaggaatctatatttccttttggaatgtacttattcatatgatattgtagttataagcatctattctcttcaagaatccgaaggctttgctcgattctttctggttttgactaattaattatatgccttatcgtttcatctccatatacattaatttgataaagaaatattcttattatatatattattattttatatataaggtatatcacatcatcatgtatttttgataagagttgcattatctcttattctccatcatgatatgaatagttatagattttattgagtcaacttgtttctctggcccatgctcttaaaattaaaggtatatgctttttagtagtccaaattatttcggaaccaaacttgagaattaagatcaaagacaacgttcgttgacatttcactctactcttataattgattattattgcaagtgcttttagtgatagggtgtaattaacctcccctcacaatattagggccattatttatatgaatcattacttttgcattgcttttaaaacacaacaatatattgtaacatgaagtctgtggaaacaccacaacatttaatcaaaaaacaacaatatcacgcaatattaagagattgtattttcctaggaaaatgatttgatgtaaatattacgatgtgttgtgtaaaaattattaattaaattagataaaatagattatgtattttttaaaatgggataaataatatctaagctcaattttctatgatgtaaaaaatttaactacagttttgttataacacctctggatcgaattattattaaattttattttgacaaaaaactagtttaggatcatatttgtactatttta

SEQ ID NO: 389387 - DNA, 1359 bp, Cannabis indica
aatatcattattattgtactgttccaataaaaactaatattaaaccttcttgtctctaatgatctaaagaaatcagatgagtgaacatcaataaaaaaaaaatatgtatatcacatgaacagtgaactcaaataaaatcaaaatatattgatgtaaatactcatcaatgataaaaagcaataaaaataaatttacaaaaatcatgaagccacatcaaattagaaaaaagaaaagaaaaattgaagctaagagatgttattaagaaaaatagtgatatattttacacaacaggaaaaaaaaattaaagtggtgttcactggtggtaaccttcgctagaaaaatgagtgggatgattaacaaaagcataaactgtgagataggtatatccatacacaaaaacaacaatagtgtgagagtttgagatgagagactcctaaaatgagtttgagaccataagaatggttaattatttctaacgtccaatttaattatatgttaaacaacaattataataccattaatactctctctatatatttaagtatatatattattcgagtattaattttcaagtatgaatgttcctatatatggactgttaaaatttagtaaaaattaatgcagtcattatttttatttttattattataacgtatactttttcttttttaatggacttatccatatgaattgttaccttgttcttttattattaaataaaaaattaagaaaacagtgaaaggttagcgattaatgattaatgttttattttaaatgatatgataaaatattaatgcgtgaaacattaatgcgagatgagttgttatatggagaggtattaattaattaaaataaagtatatttctgttacactataaaatagtgtagggacttaatagtaatttctacagagtgtgaatcactataaatatgtaattgtgtagctattatgagatatgaattgagtaaatagaactttaattcaattgggagtttggcactgactcgaagagtgcatttcgaagatttgtcctgtctcgaagaggactattatctaacaattggtgctctcattgagagcaattacagtgaaagattcactgtaagaactctcagccatgaagaaaacagagcttgcgaagatgttgatggagttggatcgtcgtattgatcgattcttcgatgctcaattgaaggcatttaaagtgcatctcatggaggaattagatgctagagttgagcaatattgctcatcaacagagacatctatggctccctcggctcaggcaccatcggagaaggctctcgatcttgtcggcagtgacatttcagctggatccgatctaagtagatcacaat

SEQ ID NO: 389388 - DNA, 819 bp, Cannabis indica
aatcgcttacatgtaacagaaaactattattttagttatctatcctaacatcccccctaaaacgaaaaggggtaattcccattttgagtttggactttaggtatagaaaacaatttgtggtgagagcttttatcaaggcatcatcaacttgatccaaggcaggaacataacgaactgaaagtttcttggccacaatttgatctctgacaaagtgaagatcaatctctatatgttttgattgagcataaaaaactgggttggcagccaatgttgtagcactttgatcatcaatccaaatgattacacaatgaggcaaggaaacttgtagttctaagagaaatatttgagccattgaatctctgctgctacatttgctaaggccctaaattcactttctgtacttgatcgtgtaacatgttattttttggcagaccaactaacaagattgtcacataggaatactaagtagccacctgttgagtgtctattatctatacagcttgcccaatctgcattagagtaagttgttagagatagaaatgaacttggtgtaatgtggagaccattaggaagtgttcgtttgagatattgaagcacctttttgcaagcttcccagtgtgtagtgaagtgcaccaagtgggctcctgtataatgttatgtcctcgagggtatcaccatcatttaaggccaatttagcagttgaactcgttggattaggaattgctttggctccttccatatgtagtttgactagcaaatcaattacatactttgactgagagagaaatatgtaatgaccgctttagtaatttggattag

SEQ ID NO: 389389 - DNA, 1652 bp, Cannabis indica
tgaaactttgtcatttgactcctcattactgtcagtatcaagggggaactccttaagataagttttgatatgtatagtgagtactttcttggtgaatatctcctcatcagacctaagaagccggagagcagagggatctttcttccaaaaaccatgaacgagcattgcataggacatgtctaaggagcacaagcagaacttttctgccctaacctccctgtcagccgcatcctgggtgatctgagttgcattttcccacatcctctacatggctaccaaagcgataaaggccttcacaccattagctggcttatgagaaacctccttttttagtttcttgatggtttcttggcaagaagtattggtcacacggatggttgtatagagcaattccaagttatcatattgtaccgacagggaatctttcaaccttttgtccttgttatagtcattacaaagcccctgaatgactaagtctttcatacaaacctcctcttttatggagttggcttcttggatttggatcttcaaggtctcgctctagaagatcaacctagtctcacacttgtctttctcttcttgactttgacgaaggtcttccttggttttatgaagttcctcattgagggatgaaacggtagattggatatctctctcagccttggccttgtggtcctcgtataatttctagcacttggcactgatttctttatccttcagagtcaacttggtgtcacacgcgtcctgggcttttctgatatcaacagcagcttgagttttgacttgttccacctctacacatagagcttcattctcggcaatcaaagattggttcttataatggagctcgcccaatgcaatggtaatattgcccacttctttgacagtcctctccgcaaataaggccatttgacataaaacaaaaggaattagatgatcctccacaacaaaaaaaaaatcaacattgatgatacatgaaaaccaaaagttactcctactgcttgttgtttggtgaacatggatagggtgtaaagatctcggctgttgctcacgacccacttttttgatgtaagttcgctcatgctcgtacccacataatccagcatcttcgcaacataaggtgccacttctctctcaaccttggtatccaagttttgacttactgccacaatgtccagcattgggccatgtgacgagggctgacaaatcccctccacgatcttggttgtcttaacagaggatagccttgtagctcttatctaaaggattacatgctccctctagtaatgtctctttagggtgacagaaaatttgtctatcttattgagaaattcatggctaatgactgttggtctcatgggcaaggaaaattccaatggcagaatcctgcccagagtcgtgcttggtctaggaggttggttggcagatgtgggcttgagaggttgttgtcctgttggatttgcatggagtaacggttgtgtttgaagtagagtaaggtggtatggaactatttgctacaattgttgtggtggagtttgttgttgttgtgttagagattgttgttgttgttgatactgtttttttttttcaagaaggaaaatacttcattaatcaagaacaaacaaatacaaacaatcaagcaagggtcaaac

SEQ ID NO: 389390 - DNA, 992 bp, Cannabis indica
gttgaagcaccttgtgctgagcaacaaaggacaacagagatgtctgtgagaaatgaaaccaaaaagtaagaaagcataaaagaaatgaaaatgaaagaaaaggggcagagaaaagactagcctactgcataagatcataactcctctgcaccaaattcttgaagatccctttattgagtaagtcccaatcactagactctaaactctgatagtgtcgccaattgttggtagcatgaagcgagcagagctgcgagccttctgtaccagcttcgacgggcaaggggcaggagagttcgaggaagaccatctctgggcaagagccagagaattttacccggtgaacaggcccaagggccgtttcactgacgctcgccacagtaggcacaaccttttgtggagattatgcagactcgatagtgagttggtttaaggatcattgttgacaagagtgggggtgttgatcatctcctccaaatcaagatccatatatgcgagcagacaagaaaaggaatcaacacttgttgagaaacagataataaaaaagtggggaataaactcccacttgaagaaatttaccctaattatcagatgatgaggaagaagaattataataactattaaactccctagagcctgtgatcatgtatatatcataaggatttattggagacaaatcccaacttgaatctggatggctcgtcctatccaagttagtaccgtattgctccgcaattctgaagtatgaactagtgcaactatgtttgacgtggaattcgggataccaactatcaaacctatgtgttatgcgatctatatagaagttatcctagatgtaaaaattataccgactttccttaaaggttactagcgaggtacgctcagtcctaagtacagttggagacaatccacagttattacctcaggatgcttcttcttcagcttctcgaggggttacttttttaaaaaaaatggacgcgagccacataatcttt

SEQ ID NO: 389391 - DNA, 2150 bp, Cannabis indica
tcatttggtatcagagccggccggacctggtggatgccgtcgacgagaatggagaagaaggtagaagggatcgaagaagggctggacagtgtaaagcaagatattcataacatcaaattgatcctcggagagttcaaggaatcacaggatcgaacagtcacgggactagctgagcagatccgattgtgcttgaatggtcaagcgagtatggccgacgagatgtgtgcactccgggagagccaggcgccgacgtagagctcaggtcgacgttctgtaaacgaacgaccaccatcgccggcagtggtagggtcgaacgggcaagatggagacggaggaaggcgttcggagtttcgggcaagaaagattgagctacctgtgtactccagcgaagatcccgatgaatggacttacagggctgaccgatatttcaggttgcagagattgacgccggcggagcaattagaagctgcgattttgtgcttaggagggggcggctcttaactggttccgttgggagaattccaggcataccatcggctcgtgggaggaattgaaagcgatgctcctccgccggtttcgatccgcttatgagggaacaatttatgaccggttcttcgctctccgccaaacggaatcggtgcaagattatcgtcagaagtttgaatcgttggctgctgctatgggaacgatgggtgactagggattgcaagctgcatatgttaatgggctcaaaatggatatacaaggtccattacgactcttgcatccaaatggcttaattagggccatggaattatctgaatctattgaagccaatcaagctttggtgaggggtcataaagttgggtcaaatagaccatttaacagtcggcccaattctctaattcttccagaatcacgtgcacctcacatgatcacttcaccaacttactctactacttcggttcaaagtaaatccacttcagcttcatcaacatcttctccgacccacttcaaacgattcaccgaggctgaattgagagaaaagaaagcaaggggtgtttgtttcaagtgcgatggacgctggtttcgaggacatgaatgcaaagaagcggaactggtggtgattgtggtacaagatgaagcccaagatgagcctccggatgatttaattgctaaaatggttggactaccgccaatggaggcagcgacggaagcccaaactgtggaggtgtcgttgcattcggtggtgggattaacccctccgaagacgatgaagatgttggggtctatccttggtcatgatgtggtggtgttagttgatagtggggcaacccacaactttgttacggtggacttggccaccaagttggagctgcccattacaagcacggaagcttatggggttcagttgggtagtggacaagcgattaaaggcacgggggtttgccgaggcgttccgctgactttgcaaagcattaacattgtggatgatttccttccacttcccttgggtaatacagatgtgattttgggagtacaatggttgaatactttacagaaaaccacccatcattggcaagagcatactatggaattcaatctcggtaatcaacgggtggttctacaaggggatcccaccttacacaagacaccggtttctttgaagactttaatggcaaccttacaatcagaaaaactgggggtttgggtggagctaggctattcggcggtggtggctgcagaggaaaaaccttccgaagctatctccgctttgttgcagcgatatacagcagtgtttgaggagccccggactttaccaccacctcgacaacatgatcatgctattactttacgccagatgcagctccagttagtgttcggccgtatacgatacccccagatcacctcttagatgaattacatggtgctcaagtgttctccaaaattgatctgcgctcaggttaccatcaaatcagggtgcggcctgaagatgtccacaagacggcatttcgcactcatgagggccattatgagtttttggtcatgccatttggtcttactaatgctccggccaccttccaatctcagatgaacgcgctattcaagccttggctgcgagattgtgttttggtgttctttgatgacatcctggtttatagtcccgacga

SEQ ID NO: 389392 - DNA, 1730 bp, Cannabis indica
tatatatatataaatataataacatcaactttattggaaaacatacattatttttttttaggaaattagcagtgtatttattacttcaataaccttttataaactaatagcaccttttttaataaaggtctgaagaacttttgaattgaatacattttggctgagtttataattcagtatatcattctaaatttcctactgaaactttttttagccgcacactatgaattctattcttacatgcaatcttaacattatgtacaacattctttgaattatcatgggaatggagccaaatactttcattactagtctccatagctgatacacctacaaccaatactgctgaaaacactttcttcctatagtctattatttttttccttccaatctgccgaaccatatcagtaaggtgactagaggatgtttcccatagtagccactatttaacctgctatagacaatcattggagaaggagcactcaaaaaataaatgatcaattgcttcatatcccatattgcaaaactgacagcaagtgttagagataatattgaatcgaaacaatctttcttcggtcttcaatctatcttgaattgcatgccaaaatacaaagctatgcttcaagtatttaatttccaatacgcaagtatacgtatcattaacaagtaatagactcacaaagagtaaggtcgatcacagaaaaattgtagttaagtactttaaaattaaacctttaattctatttggctatgtcaaaattaagagaaaattaaatttctaaaacaataaagaaacaatgaaaatatgaagcaaataaatcaataaggaaatttacgatgattaaaagttagggctttcgattttaattgcatctattgattatagtttaacatgattctattcctattatcaaattctatgcaatagcaggtttactaatgtaatttatagtcttttcagatatataaacctcaaattcatgcaaaatttttactctcgttataattaaacatgtaaaagatattaaatacagaaatcctatttaagctatccaaaccatataggtactctcgtcctatatcaaatttggttctatttcactatagcataattaacactcacttctaagaacaattaattgatggccaggtaattaaaagaaattaagtacgaatgaaatagaatacgtagaaattgaggggaaattaaatcatattaaaaccaaaaatcaacgtcaaacaatctccatttaaaccctaatgaactatttagctactcatgttcatcgtagcaatttcacacatactaatttaagaataaataaaagaagaaaatagagaagaaaagaatgttgaaaatcctcttgaaaaagcctccagtattgaaattgatctccaaaatttgtactccttgattgcttctaaatttccttatgaattgcctgttgaaaataattgaagtccacttcttttatagccaataagggataaaaaatatagaaaaagataacccatgtagaaaacctattctgcttcgaattagagggggcagcccgtggcatgcacttcctatgtcacgacacgtgttgtaattccacgcggctccgtgcttgccttgacatgggcctgggcatgggatttccatgtctaggcactaccccttttttgtgcataattatcttttatttgatctttttatcttttttttttcatcttattcctttgatatt

SEQ ID NO: 389393 - DNA, 1620 bp, Cannabis indica
caagtaggtaaggatatccctttaaaataaggatatttacatcttttttctattattcaagttacaaaaaaaggataactaaatcccatacaataggactaatatctcgaagaaaaatccctattttgtggattgttggacctgtctcgcaacttttcttagctggtcagagttgtatgcagaagttggccggccagccctattttgtagggcctggccggcctatacactccgatggctgaccaggtattgttcttgcagccttaggatgtgcctgccagctttctatgtgcctgccaccctttctatgtgactgccatcttttccatgtgcctgccagcttttccatatgcgtgccagcttttccatgcaaaggtcaggccttcttggttgaacaggacttttcagcctgacagtcactctttggccagctagcttgtgctcaaaccttagccggccatacaagcttcttctggccgacctatacactctccttggccaactagacatggttggttaaggccttggtggtctgtttaactcctcttgcttattgctcgatagttttgcttgattgctttagaacccttgacaattgacatgttgtgtaaggtgactttgtcccattgttgaggatttgtattccacgtgtcctcagtcttgaccatgtggacatgccacgttaagtggacaaaatttgcgataatatttgccccttaagtccatgtttgaatgtctgttcagataggaacttttcaactcttgtcttaactatagtagcctctatcgagcagtcttgtctggccaagtatctggttgtgctttttaaacttttgatcttctctctccatatatgcatcatcttcacttcttcgacatctcttctttaaatttaccattgataagtttcaagctttttaaagcttttagaaacttttaaattctcacattttaaagtagtcttctcacataataatctgcttgatagctttaggatgtgtaatgtttgactttttgatgagcaagattgagtcttggactggtatcttattagagacgtgttcgactcttggatcttgttaagaaactctgtccatgacttggatccctcatagaaactttgtctacaacttggaaccttcataggaactctgtctatgacttaaaaccttcataggaactatgtttatgacttagaaccttcctaggaactctatctgcgacttagaaccttcataagaactttttctatgacttagaaccttcataggaactctgcatgtggcttggaacctacatcaaaactctacctatggcttggaacctacatcagaactctgcctatggcttggaacctgcatcaaaactctacatatggcttagatcctgccttagagattcttctcggtacttggttgttggcctttgtgctctaaataaaactctatttcaatataatctctatcatttaaatatcaataaagagacagaagtatttgaatcacttatttaatgtgtcatttggttcatgttattatttatatatttatttaatttataaattcatccaaacccttatcacattaatattcttgtttattgtgtcgtcagcacagtgga

SEQ ID NO: 389394 - DNA, 883 bp, Cannabis indica
atgccaaccatctcagcaacttcggttgaaccctccctacatgatcccgatggaaagcctccacatattaccatggcagtcgtgagccacacaaccccacccaaacctgccttcaaccatctcaaaccagacaaccataaaacatctcaaactagaaagtttactctctcaaaccagaaaacttagactctcaaactttaaaaaaaaggcaaaaaccagaacaatctcaaaccaataaacaagaaccaatctcaaactataaaacaatcacaccatgtcacaaaagacaagacttgcggtaactgaatcggaagacaaaagacaaaagacaaaagacaaaagacaaaaaaaatttctagaataaactaataacagtaatctataagaaaaggatatagctagggctggatagagtttcttgtccctctaaagtatgtaaggataaccaatagtttgcatccacatattataattattcactctgacgtctttcgatgcttttcaaagcacaccaatttaagaatagtaaatttcctttcctagtctgtggtgactaataccgtacaagatatgttgaaattcaaataactaggtctttctaataatggtttttagtcccaaaataagaaaaaccctaagtgaagacgaacagaggtccatccctcatcgaatcccaaggcggccagcccagtgcgcacgtggtctctgttcatcgtctttcgcctctcacgctggcacttctccgaggcctacctagtcgcaaaactcacgaactccgacacgcaaccctctttgttagtgatgtcattagttagttacaactgtatatagtttgttataatctgttagttcattttccctgtatatattctgttagttagtt

SEQ ID NO: 389395 - DNA, 1347 bp, Cannabis indica
gaaaataacatgtagataatgacttaacacttaacgatcaggtacctacgagagttgtagaaatataatttaggtattattactgtcaaaaattaaacttaaatatttatctgcaactaagaattaaatttaagtatttatgccgcaaattactacaaaaaaaaattactgaaaattttagtgtaaattcacttataaataactaacgtaatatgcaagagagacattttatatttttattttaatcatgaattttaataatatattttgaaatatttatcacttacatatgatacaatttggcccccctaattttttgtcctggctccgcccctgctcctcatcttatcgctcaagtggtttctaaggtcacccccacgtggccttgctttctcactcttgtacttctcgtacttggcgtctaatcaccgtcgaaggtctgtggtggaccaactatccttagaatgtcccacgactgtccttctgtcctgattgacagaatcacttgggtggttcctttgccctttaggctttgggacccttgtgttttgtccccttggcacagtttttcctctaggatcagaagggcatccaagctcgaaagcaccggtgaccttctgcatccttaaaggctcaccgactagatttgtatcttttttaggaggtttaggagtgaaattttgtggggactcacccaccttgcctttacctttatccttgcaacgattcaaggtttcggcttctatttatttatgagcacgtttttcagccatcacttccactgaaggttcatcaatagactctgccaagtggtcgaacttgtttcaaaggcattccatcattcttttcattttttggtgagcttcctttattctgctaactctttgagtagcttccaactctttgatcacttgtagcaagttcaggtcgtcgtcatagtaataaccatccttgtagtagccatccttcacgtattcatcaccatcgtcttcttcttcacattgaagattctggtcatcgttaaggccataaaacacgttctcagcatccttccctcgattctcgatgttggtcgttccttcctctctaacaccgtgatgcgtgtcgtaagccacaacaaatttaattttttttttatttccatacttccaattattttagtataatcgtaactaagggtcgatcccacgaggactatgtttattcaattattcacaaaatagtaacaagaattaggaaaagcggagttttgatgatcagaataccaatgataaaaattaaaaagaaaagaagtttaaataaagaatacgatatgagaaactaattaaaggttatttgccaccctca

SEQ ID NO: 389396 - DNA, 1361 bp, Cannabis indica
taacaaaaaaattcatagactaatagcagcttcatgaagatcaattccctaatctatatatcatatcatatgatcatgatcgatcgatcaatcataatttaacaattatataggtataaataataaataaagttggcagaaaaacttaatttggttcaatggattacgtagattaatactaatgaacataataataattaattttagaacatgaaagaatgtgatgtggaagttttgaccatggaggtatagagctaattaattaagttagacaagaagttggtgcggcaagcgctctaaattccaccccattttgaatctccaaagacatatatatttatatatatatatatatgatcttcgtttaattaccacatgatcatatatatttatatgtatatatatatgatgaagaattcgtcaatggcatttgttgattctccttcgtccccttctcttttgtcttctttaattatgccaatatatataatcataattaattaattataattattttatattctatgtatcccccaattggaggagatggaggacacatcgattaatatttgttagagattgtgaaataagtcaattatataaatatatatagttatatatacataagaaaaatgacgaaattacatgaaacttttatgacaagttagccaaagtaaataaaagaataaaagtactaaattaataattagctatatatataaatatacattacatgtttctaatttcctttctagttggcaagaaattcgttgacacttgatgtagcattactgctcacacacacacacacaaatggtatggaactgattaaataattaaataagatcatatatgagtgtattgggtttctaattaaaaatacaaaatacgtatatatatttgaaaatattattatgatatgttcatgtatgtcttgtgtgttctgtaagcacattttatatatataacctagacatgaacagtcttgttatcctacaattaatcttaatacgtaagttgaacatttttataatatattttaggatcaattgaaagaacagaatatatacatatatatatacacttgtgtaaatgatcaaactggacgacgacgacgaatattctaaataatatgcatgcatgcatgtacatctaaatttctacgtgatattgaaaaatacattattaattaaagtcatctagatatattgattaaggttttgataataatgtttattatggccaaattaaaaattaaggaccactttcttggtttatccgagtttgttgcatttgcatatatatatcaaacctaaactcgtagcaaagcatcacatcaatatatgtttatatatatatat

SEQ ID NO: 389397 - DNA, 868 bp, Cannabis indica
aatagtttgatgataacttttacaaacagaatatgaaagtgataaaattcaaaaagaaaatccaacttattctaaaacgtataattattaaataatatttttaaattataagagatttcaaaataataaaaaaataaaataaatcaaatcctaatttacttctaagtttttaaaaagtaatacatgtaaaaatagtataattttacattgtgagctataattgaccaaaaattctaagagcagcctaattggtaggtgtcatataatataatttaatatgggatgttgtataataatactcatatttggcacaagtaaaaatagtatgaaaatagtactattaataattaatgttgatgtattgttcaaaccaaccaaatctgtaataataaaataagggaatcaaatgtagaaaagaaattaaagaaagagaggcaataagtaatcagtatagggacgtggctaatataagatgattaatgaacatgcaatgaacctcgatggtagatgtttatcagcatccatagcattaatcattttagatgttcaactcttatccctttgaaaaaactcatgactattagtctattagcgtcatttagtggcaggcctatatattttaatttaatattttcttttgagtaatattaatgcaaaatattactaaggtggctgcttttgtgtaccatttgtggaagaacccaaatgatgtattgtagaattcatgacaacaaacactagaacaagtagtaaactcgatcaaggtagctgtgaagaaccgaatatcttgcacttggccaaagaaagtacagccggcggatggagattggtttttgggattatataaataattttgtaactaatatag

SEQ ID NO: 389398 - DNA, 2124 bp, Cannabis indica
tagattgataattgtacaaagcataatagtatttgtagaataaagcaatatattgagtataattttaagaaatagaaattaagctaaatatattagtaaaatatattaaaaactaactcttaataaaatacttgtgggaggtctatctatactattacttggagttttctataacatatgcagttgtgaaaataacagtcttcctaaataacaacattaacaaaaatagactacttaaaaaacaatcatacatgtttaactatctcttgcacttttgcccaaaaataaaattataacatattctttttttttaatgggtagtgattgcatgtaaaaatataaatttaagaactaaacccattaaggaacatgctgcttttttgatcttagcgcagaaagtttatggatgtgacagttgaaaaaaaatgtagttgtagagattaatctatcttgcgccactgaaactaaagcaatcaagagccagtttagaaccccaaattcatgttgcagctgcatttacttactgctaggcaatcccaacagattattcaattgttataattattattattattattacattcataataatggcataaaaactaataattttatacacctacatcttctagttatattatacacaagtaatcgagaaagcacataaccagtcaccaggtatgaataataccctagtgatatagttttgaaaattcaataaatgtgattataaaacaagtgaaattgtagagctctatctatcttgcaccactcaagttgcagtcaagagtttgcttttgtaccccattacatgtctgcagctgaataaatttactgcttcacaatacttaagccaaccggctcggccaccatatgctctgtgtagccaaccagctgaatagattctcagtaactgcacaattatctctgaattctttcagattctctgaagatgaattgaagttaacatttgaatcaatgattgcataatttagatcctcatcccgatgtccaaaatgatcaatctaagatttcttattaacagtcttctatatcttcatcaaatataaataaataaataaaatgtatagcaagattgtccccattgttttgagacttcagcaacctattttgatttttatttgtaattttcatttgttctcctttctcaaatgaattatcaaagaaaataagtctgtttttctcaattattaacttttaataattgtcaataatttattaaaagtcatcacaattcatgtaaattcacaatccatcactcacaagaatcacaattaaccaaaaaattcttaggcactcaagtctggcaaatggcttaattaaaatcgtggcaatcgaatatcaaatcctatcaatcttcttgaacagagattcaattcaccaaccacaccgatacccaccctaaaaccttcaatttcacaagaacttccaatacaccataaaataatttagacactattagccaataaaattaaacatataatgaatgaaataaacctagaaaaaatcaaccaaattcaccttaattttaaaaggcagagatgtgaagggtctagtgtaagcatgctgaattttctctaataggctttttttaaggaaaaaaaatcataaacttgaaaacaaagattatcttatgattgatttgagaaatcaattgtacaaaattaaacttcatttttcctacatacgtacaagaatcttaactcatttgtgtattaactgaaatttctagaaatgaaaaataacaaaatacctggaaccaatgaatcgacgaagtggggttgggcagaggatccaagttgagcagaagaagatttgatgatttagggcttttgtgtgaatttgacaaaggaacaatatcttaggtgaagaaccaaagagggacagcgatcttaggcgattggagtcgattgctaatctcgattgggagtgggatgctagccattttcttgtggaggcttcagaatcattggaatgagtcaattggaagtggcattaggatcgctggtattgatatacgaagaaccaaaaaatgaatggtttgttagagaaatatatggctaagatgatttttttttaatttaaaaagagattattaatatt

SEQ ID NO: 389399 - DNA, 1408 bp, Cannabis indica
aatattattaattaattgtagaacgttacttgtaaaaagtattaaataccactaataactaataacaatacttaaagaattcaatgcaatgcaagtgagtaataatagttaaaaattaaaaaattagtcataaaacactatccatcaaattagctaaaataactaaaaaaaaaattaaataaccactactcattttctaaatgtagctacacacaattcattcatcaaacttatttattatttttgcttcttcctttctttcttatatttttcatttaaataaataaataatatctaaatatatagtatttaaataatataaaggaaaaatataaaaaaactcataaagcataattaaaagtatacacatccaataatcaaaaaattattagcccacaaaataaaccaagtaatttataacatcaataaaaaaaggtaaataccattttggatcctttgttttgcaaaaattaccaattggaccttctgttttgttaaatgacaaaatagactatgtattttctaaaatgatataaataggaccctgaattagttttctgtcaaaataaaatttaataataatttgatctaaaggtgttacgacaaaactgattatattttctatatctgttcgtgttaggaattatctttaagttggttacattaaaaaaaaagttgtctaaaattaagcccagggtcctatttttaccattttgaaaaatataaagtccattttgtcacttaacaaaacagaaggtccaatcggtaacttttgcaaaacataggatccaaaatggtatttacccataaaaaactacacataaatgtaatctcaaataatagaacaaaaaaccctcattaacctaaaagaacaaaagactataaaatgcacatatcaataacataacacttaatcttttggttagatgatctactaatattgacttggtcttgcattattgtatcacaatgtctcatttcttgaccaagtttctaacagtgagatactttatgttatacctaatttttgcaaaaaaataaatggctactcttgcacaaggacccacgtgccaagaataccttaaagacactaaagtcaaccttgcgactttgaccaagactcataaatatcaaataaatcaagacattcttcttgagggcctcatgacacttctagagggctcgaaaacaccagccaactatttagcaccgggactcacacacccaagtgtgcccaaactagggttcatgggcctaaaagtttaatcttaaaattctcctaatttactcaacgattttagtcatataatatatcagcagaaagagaatttcttgatgaataaaaatcctaaacttttaagattgaaaaacagaaaaatttaacataaaataataacgaaattaatat

SEQ ID NO: 389400 - DNA, 1560 bp, Cannabis indica
tacagttacctccgaaagtgaaattttttgattggaaagtcatttaacatgctttgcctgtagcctcagctttgcataaaaggaaaatcattgactcagcatcatgttcgaggtgtaagaatgcttgggaatcgattggacatgcattgttctcatgtaattttgccaaatcagtttggaaaaagacccattttacaattgattatcaacgtgctcatggcatgttaaatggggactatctaatacacttggcaaaaacactgcaaaaaactgaagtagaactcttaatatgtgtgttatggtgcatctggagtgataggaataaagtcctacatggtggttcacaacgtgacccatcttccctcgtggcatatgctattagctacttggaaaaataccgttctgccaaggtcaacagctgcaataataatacacaccagcagcagagttcaatcgcacctgaattgtcccagaatcacagtgcaccccatccaggaatatcacaccagcagagacaacattttggtaatgttaattctcataacccctgtcggatggatggccaccgacatgcgcaaagtctggatactcaaacaagggctgcacatcatgtaaaccagaatgagaatcactcttcatggcaagctgcaaaccagcatccgcatccctccacatcaataaataaccaatatggcaattcttctacaactgttgctggtaacaattggagactaacggatgagatagtttggatgccacccgaaggtaatgtccttaaaatgaatatcgatgctgcaactaatgttcaggacaaaaaattaggaattggtgcagttgtgtgcaactacaaaggagaagtaattgttgcgttttctaaaccagctcaaggttgttttagaagcgatgaaatggaggctaaggcgctcttccacagtcttaattgggctacacaacatcaactgtcaattgctcatgtgaaaactgatgcccaaagagtctccaatgctttaaatccttctcataggaatttatcttgttttactgatcttattgatgatgtttgttgtattttatccttttttcttggagtaactgttactcatgctcgtaggcaagctaatcaggctgcccatggattagcaaagtacgctctagagttggatgaagatgtatcttgaatactttttttttttgcaccccctaattctaaggtcaggggctggctccgccactgtttatatgtaatccttattacttttcttaacaataaataaaaaatataaatgaacataattgcttagacaaaaatcacttaaatatgcatctaatttatgtatacacatcactactcacaaaattgatttttttgctaaatgtatcaaatttatgtagataaactttttttatctatacactactcattctcaataccattctaaaaataaaccaaacattataatttatacatctagcagaaaatttggttttgtctaatttagaccctaattaattaacaaaaaaaattgcccacagtattatcttctttttttaaaaaaataa

SEQ ID NO: 389401 - DNA, 924 bp, Cannabis indica
aaaattatttataaatatgaattgctaaaaagggtcttatttgatatttaaattaaaaattaattattttaagccaatagttaattataattcatttaattttgaaaaaagaaatttttatctattaataacctactattgcaagtaaaaaaaatataaccattatggttacaataaaaaaatataaccattgaatatatatggattacacattaatagttactaaaatttttactgtgattaattttaaaaatattaaaatattagattttgatccaattgcgaataataaaagagaaatttgaattttatacttaattaaataaatatataaaaaatatcttatttacactatatcaatatatatatatatatatattcattcaaaaaaatatatatttgtatgaaaaatatttaagtcaaacttaattttttttttttttgttgaatttttttttagctgatagtacagcctcaacccatataacgtaaaaataaaatattttcttaattagatagaaaacttaagcataaaaactgaaatttttctaatgatgtggcaattttttaattacttaatatagcaagttattaataagtaaatatccaatggttaatattataattataactaatatttctaaaattgttaaaaattattttatttaaaatttctttattattctcattttagtccttgaatttttttttttaaaaaaattaatgtttatgttaataaaataattttagttatctccaattagttacatggttttttaaggtctaaaaaagcaattatattactaaaatacagtggaccgaccctttatttggaatagtttaatatcaagaatacaagcaatgcacaagagtaaacgaatagattctaatcttgctacaggagcaaaagtttcatcaaaatca

SEQ ID NO: 389402 - DNA, 1388 bp, Cannabis indica
ttcaatcaaaattaattccaaaaacttcaactttactacaatggaataatcactttttctccatctcaactttttttttttaatctccctttttcctcattatacttggcttgctttgtcgaaatatatatatgatgataatttcaaataataattaaaaataatcaaaattagtaatacgcgtgtatcatgagaagtaactagtaaggcaaaatgaattattatctatcattattctttttatatataaatatgtaataatttttttatatatataggatccgaagcatggaaattggtggcttgaattcgggtcgggtgttcttgtcgggtactggccatcatttctattcagtcggctaagggatcatgcaagcatggtacaatttgggggtgaagtggtaaattcaagggcttctggttatcacacagggacccaaatgggaagtggtcattttgcaggagaaggctttggaaaagcctcttactttagaaatttacaagtggttgattgggataacagcttggtacctttatcaaatctcaaagtcttagctgatcatccaaactgttatgacatacaagggggtattaataatgtgtgggggaattatttttactatggtggacctggaagaaatgtgaggtgtccctaagggaaactaaatatttatttcctatagaatctgcaatttattatttttttttttttatatataattaattataaatataaatataaatatgtgttttttattagttgttatttattaggtcaatgggtgagttttggggttttccaatatttttcttcttccttttttcccctcaattaacaggtgatccattaattttcgccaccattggggatttgtgtatagttggaaaattaaaagaatagtgaatttattttatgattttattggttactgttttttttattcttccctacaaaaataaattaacaataatctcaatttatacgtgcaaataaacaaattggtgcttgattcaataaaattaggatgtaaaaaccgcaacccaagttacccccactggtcaaatttgttaccaaaatttattattatgtttttttttctcttttttgtagcacaaaaaaatatatatatgttattgaagatagtcaattaagttaaattaaacacggtaattaaataatgtatatctttatataattacatggcgtatctcagtgtcacatatattgtctggcacaaaaaatgctgttaatttccaaacaaatttatataaacctacttaccccttcaacccctagtctctttttctcttttttactttttattgaaaaacgcaaccatagctcttcaaattaacaaaaatgaaaaaacaaaaaaagttgaagtact

SEQ ID NO: 389403 - DNA, 1650 bp, Cannabis indica
tacatttttatatctgcatatgtcattttcagagtacatagttcttgggcagtgatagctatctaatttaagacgattataaactttaaaacgttttaaaaaagaaaagaatactatgtgttgaagataaattaaaaggtcataccattaccaactatcaatatcatcattagatgtcaccatagatttccaacctttttgagttttatttgagtttactatctcttggtgggattattgaaacttataaagctactgtaacccttaaagcattttgctttctaccaagctaatcagtgtgctgatggttaatttataggggttagttaaaactttgaccatttatattaatagataaaatcaaaatgtttgtcattcgatattgtattggtagtttttcattctgcaaaattgaaggaataatctatagactatagtatttactaaattaaacatgtggaactaaaataaaccactcacattttctttaagacttactttgtttcacaaatacaaatcactaagtagtatcaaaacaatatcacaaaatcacggaagttaatgggaattggccgctatgttacttcattaaatggttcatgatgactcataagcaataataattaatatgcaatggctgagttggcttatagaaaaagtgggaacaaggtgtgtcacaacggctatggtcagtatcaaaaataaaaaaagaaagatctgataggtggaactaattggacagcttgatcatccacagaattaagaaaggaatcccaactggttgataaaataaaccctgtcatacataaatattttttttaacaaaaaaaaacctatgtacttatacaactggagattaaaataaataaagaaagaataatgtggcctaacgattctgttcaacaagccttcccatgcataaacctacctttcatcacgcatagtatggattaaagtgacaagactggatctattggctaaatatcccaactacaacataagcttttagttatagatactagggaaactgtcatacataatagtttgtttaagaatcccaaaaaatggaatgaggaacaaaaccattgcattttagttattaactaaaagttgatgtggtcatcagtatcaccattattttgagtttaaaagttctattagaatatgtgagtaatacttcataataacataataattagaataaatgagtcattaataatattaaatggtaggagtgttatgattgccctgtgttgctcatgactacgaatatggatagtggatacatttatgacgaagaccccattcttaatcttacagaaacttccattttgtccaactactttcttgttaaacttttatgagttttaaaaagaataatgaaactcaattcctatatatgataaaatgtaatagatacaattgcgtccttaaccggtaactgcttggcaaatcgaaacactaaacagtaaaacatcaaatgtgaattacatcattgccattagtagaaaaaacaggaaattgttattattgtaatattactttaaatgttgataacatgtgatctcatgattgaaatcttccctgattgtgaatgatgtagtcaactgaataaaataggttacaattaactaattgatgcgatttaag

SEQ ID NO: 389404 - DNA, 2800 bp, Cannabis indica
taaaaaattctgaataatttgcaatactaaaaaacattaattaatttactaattgaatatataattaatactatttatttcaaattatattaaaaataattttatttattattgaaattagaaaagaaaaattagggacaatcatgtatatacataattactaattactttgtttgtacatatgtaaactatagttgagaaggcaagctggactggcgcagactgtttaataatttataatatataacattacttataaattatgatgcaaaggaagcaacaacgaagattttggttacgaagaacgccatcatcatatgccatactcttatactataatatacctatatatatagatattttgtcgtagttgccaagtgatgttgagattatcttaactgttttatgttatttcaaaataatgtgaatgttataaatctctttttctctttttgatctttatctttgttaaggattcataatattcatatcacgtcttatataataagattacagtggttttttcccactcttttgtccttttgcaatatctttttcttctttttccctttacagtcttttttctgaggattttgcagcttgttgtttactttcagtctttcccacccactcatcaactttttaggcccaaatcgaaacccaattagttccaaattatatagctaccgacttgagcacacttaacaaattataggaaatttatgtactacatcccttaaatcatgagtattctagtacacttctcaatttgttttggcattccgaaatagtatgttaattaaagttttttttttcataatcacatatattgtagctatttagaagcacctgtaaatttttaaaaaattctgaatagtttgcaatactaaaaatatagtttaaatagttatttatcacgcgtataagaaaaagatattgagtgtgcaataaaatatttaaactttattttcgatattgtaatctattccaatttcttttaaaatttacatgatcctaaacaattataacgtacataaccataaaaaaataaactatttttttaaatatcaaaacagataaaaattctaccaaaacatccttttaaaaatgtgcactatagaaaaccttatgaatgctaatactctcgatgttcgaatggatgaggtgaaagctctagaaattaaattgaatgaccttatgaatagggaggaactttattggaagcagagattgagagcgggatgatggcgggtgatagaaacacgaaatactttcataacaaagcatcgttgaggaagaagaaaaatgcaattactaagattatgacgaaatctagccaaaagttgtgtgttgaggaagagattgttggtgaagtggagcggtattttacagatatttttcaaataaccaatccaacaaatgagcaaattcagcgtggtacggaggtggttaattcgcgtatttcagtggctgatatgagcgtctaatggaaccatttactgaggaggatattcactaggttgttaaggccattggagccactaaagctttgggaccagacatatatcatgctttatttttttagagattttggaatattatgggggaaagggttagccaagtatgccttgcaatattaaatgacggtgtttcggtgcgacagtttaataagtcaaatgtagtattgataccaagagtacaaaggttaaagagtatcaccctatttctttgtgtaatataatgtataaaattattgccaaagctttatcaatgaggatgaaaagtatccttggacccctcatctcatctttccaaagtgcatttatcccagggcggtcgatacatgacaacattatgattagttttgagctacttcattcactgtttaagagaaataacggtacaaggggatttatggcactcaagcttgatatgagtaaagcatatgactcggtggaatggagattcttagccagtatgatgtgaaagtttggctctgttgagggctgggttagggttatcatggactctgtgatgacccgtgagtatacttttttaattaatgggcgccctaaaggtcgagtggttccaacaagaggattacgataggggtcctttatctccttatttatttctcttctgtgcaaaatcattatcttcgttgttctctcatgcagaagccaaatctgaactgatggggtttaggtgttcgagagcgggacctcgtgttactcacttgttctttgtagatgatagtcttatgtttgctagggctaatgggagtgatactgaaactataaagcatatccttctaacttatgaggctccctctagtcagaagattaactttgagaagtcagttatcacttttagtctgaatgtgcaacaggtggataaagatggagttctgagggtattggggttaacatcagtggctagtcatgataagtacctgggggattacctacagtgattagtcgaaacaaaaagagggcgtttgaggggatctgtgagaaggttaggaagcatgtgatttctttttcagctggtgggagagaagtacttatcaaatctattcttcaagctatttcaacttatatgatgagtgtctttaaactcccgacaaaaacttgtgaattctgtcaccacatatgcgcaacaagtctggccaccacagctggacaacttgacatgagcaccccagtggatccaagtggcaggcccatgcctccagcagcaaatctaccattggcgcctcacactgaaggaaggacctcttggatatattttaccaggatct

SEQ ID NO: 389405 - DNA, 1649 bp, Cannabis indica
tttttttgagtgaaaaagataaagtaagtttgcaataatattgtgagtattagaattcgtagagcgattacaataaacaatttggcacgatcacaaatagcataaaaatatcttgaaaaatcgaacaaaattcagctaattaagaacagttttttcttttgtaggatgttagcaacacttttactttcaactgaaaacaaaattctcactgatataaagttaaaaaaaattgattttttttttgttactgtatatatgtttttatatgttaaagagtcatgactatattgagctaaattataccagatcgacctaaaatattgagatttgtaattaataattaattacgttactttcataattagtattatattgagaatttcggacaataaatactagtcacctattccacttcaagaatttatttttttgacgtgccacttgaagaatttgaaattgtgagaaaattcaaataagattaattacatcttctatctcctggtaattttctgacagtcaaaataaataatataattatagttgttcaagccacggatactatagctagttccaagacaatagcttaaatattataattacacattataattaaattgattttttttttgaaaacataattaaattaaattgctatcttgaaaatatatgatgagggatgcaatatttaatattgagatataatgtttatattaatgataatgttttcatgcatgcatggccatctctatataatcaggctatttaatcttcacaagtactactccttttactcacaaatctctctctttagaatacttattagttattcatcccagacacactctatatggattctactactggtacattcccttaactatatatatatatatacatataattttatattttaatttcatgatattgtttgataattaattcgttttttgtctaataattaatctttatagaaacttcaagatgtataagaaatattccaccagttcactatttgattaaggttgagtcttatagcttgctctcaaactcaaatgaaaattaccatagttcttctttccaagttggagactacaaatggtaacttaaaataatctcccattattaattaatatacatatatatatttctttattatgtcttataaattgccttatatatacaggagattgttattttatcccaatggagataaaaggttcaatgctaccaacaattatatatctctatatttgacaatatgttatactgatagtcttccaagtggttgggaagttaatgttaacttcactttattagtctataatcatagacacgataattacttgactttccaatgtacgtacgtattttagttgtttttgtttcatttattatatacttttgctttgttttgtttggatatatatttatttgatatatgtaggtatgaggcgttttcatgaattgaaaaaagaatgggttttgaacaatagagtcacttgaaactttcaaagatgtatgtaatggatacctctttaaacgctgttgtgcatttggggctgatgtcttgtcatgaagcacactctcaactcagaaactcttcttgattttagacgtgaggatctaactatcctactttccgttggaag

SEQ ID NO: 389406 - DNA, 664 bp, Cannabis indica
gtttcctataaaataattccttttgtggtagtttaaaataaacaaataaataagaaaagaaaaaccaaaatccatgaaagtttcttccttaaatctaaattccaagcatagccttaatgttcgatgcttgttagcttccaaatatatgattttgtcaaggaaagtttctgtaagtcctcttattctaatgaattgttctttttggcattgacagttagagaagggagcaatttaagctgaatattacagagatttagctgtaaaaaatggcatacaataggcggtctgatcagcccacacagagacttcagcgggctcagacagccaggaatgtactggagccaatgctggacagtgaagtggtgccttcttcactggtggatattgcaccaattcttcgggttgctaatgaagttgaggctaaaaacccaagagttgcttatctctgtaagtttttgtagttgttgcattgtttcaatttgaaactacagtttttgattagcagtcatagttccgaaaaacactgatgtaacttgtgtagaacttgacatagtttcttaccatgcattatttagtaggacaatgcaatgaatattattctgatctctctttgattagctagcatcactatttgaatattgagcttgtttaattgttcagtgga

SEQ ID NO: 389407 - DNA, 1193 bp, Cannabis indica
ttttttttaaaaaaaatgtaaattaggatttttacctttcgaactttgacatgtacgaaattatgtccactgaacttttaaggtcgttaaaaatgtccctgaactattgagattgttagatttaaggacttttatccaattttaaaaaaaaaaaaaaaacatggatgaaagttcatgggacatgatttagtacatgttaaagttcgaggagcataatttggtaaatatgaaagtatgaggagtatgattagtacataaacaatcattgaaatagtaaattgaatgaaaatagacaaaagtcattgaatctaacaatctcaatagtttaaggagaatttttaacggccaaaaaagtttatgagacataatttagtatatgttaaaatttaaggaacaaaaattctaattaaaaaaaaataatgtcaggaataaattaccaatacttattttttgttttcttcttaacatatgtgcaaagatgtatcaaaattatttttttaaaaaatactaagctattgtaagtgtatattttgtatgcacgtacgtcgggggatggtgccttaatacccacccaaactcaaaaaagcacacctttttctttttacaaaaattagctggtgaaaatgacaaacaaatcaaagtgattaaagctttgaaaatgatgatggtatcggtaccaaacatggcttttatttatttatagagatatattaaaggatgagaaactcttggtggtgctagcttaacacgcatgcatctttccatgaatgaaagtgatatatgatgatgatatgggaaagccaaaaagtaattatttatgaattaagtaggtttgatttattcataatttgacatgccccggcgtcgtttttctccacatatataatttaaataaatttaaacttcctataatgatttgttgcaactctaacttaatttgagtcttcattattggtctaacttaatttgttattttaatgggacgaattcccaaaagattatcatccgttaaacaacataataatgttagatctcgatagataaatatttgtaaatgcaacatttagttgtccatccaaagatgacaacttagactagtatttactatatgaaacaatgaagaaatttataaaataagaataattttgactctcgcatactgggacatcgttggatttttattttaattgaaa

SEQ ID NO: 389408 - DNA, 1073 bp, Cannabis indica
gttcatacttgaatgcccaataccgacacgtatagtcgcaagctttttgtcgattaagaagaatcccgagaggttcatacatcaaagcaaaccctgagaagttcgtgaattaatcgaaccccgtgaggttcatacttcgatacgaacccaagaggttcatacatcgataagaaaccctatgaggttcacataatacaacgctattcggataaattttccctcctccgttagaaagacttcattatagagaactcacggtatcgaaaatgactcgtaatattataggactcgcactatcaaaaggacctcgtaatattaactgaaagagatctcactatatcaaggaaagtacacatatttaatgaaactgcaatatcaataggaaaatgcttgaacacatcgataaatagaaattaatggtcaagcatattcaagtgtcattaaagcaaacattacatttattttataactgttgtgatcaagacaattaatatgtaaattattattgtaagttataacttgtaacagtttcattatgaccaactattataagtactacctactacctataagtagggacttctccctccaattaaagggggatgggctaacgaataataaaatacagagcgagtgatctctttttaatagtggattaggcaagtcgagcttgaagttcctattgaaccactatatattctgtgtctttttatattatttataatactcgtatataatttatactatattatttgagtacttgctattctacgtgagtccttactattctcttttcagaataaatgtgaaattaggcttatttatcaaatcgtttaaaccgctcgtaccgcaaaaaaattgcggtttaaaattctttgcggtgcggtcgtagtttaaatttttcttaaattatgcagtgcagtgaggtttgcaggtttgaattgttaatatgcggttcaaaccgcaccgcacactataaaaataccaattttttatatttatttacatccaatatgtgaaggtccaacccaaagtccactaattattttgttgttgaaacttaattttttttt

SEQ ID NO: 389409 - DNA, 1956 bp, Cannabis indica
atataacactgaagctaatatattatagatatagcaatcaaattgtaaaattgagtgttcaacaaattaatatcagtcaattatcaataccactcaaggctatagaaacttagttttacaaaaaaaaaaaaaagattgtttatataacgtactatttataatggctgacacatttaattattttatttacttattcattttttttttttccaaaaaagtatgaaatgacatagtactattgaaaagatatgtaagacttttgtcctttttatgtatatatattatatgaaaaatcattcttacatcaatatatattgtattgtaatagatatgaataattttattctgtcaggtatagctttattcgtaaatattcaaagggtttagagaaacttacgtctaccatttttgatgattgggttcttcttcaactggtctgctggctgggtgcactaattcgaagctgtttcttttcttaggcagtttctccttgtaagttcatttttacccctttttcttttaatgaaaaaactctcttctactagaacttgctttgttctagaattttaattgtttaaaagtgataagaatgactcatttttttttcctatcgaaagattaaacttgctctcttgtttttttttttttgtttttggttcctgagaacaatcagtatatatatagagagaattttctagataagtgatttttaggaaggaatatcattttccttgcatctctgctcattaaatatatatatttatatatatatatatatataaataaacacaaacttaattagttatgtgtatatgcttacacatattttattaaaggtttgacatttgagaggttccacttgattgtttgaatcattgtgttgatgtctagaatgctcgagggtttaaggtttgtcccaagttggatttttgaattgttctttgacttggaaaaagttcaaattttttgatccaacttgattttgtaatgatctctgtgggcctatttgtaggccttgtatttgaacataaataattttggtaaattgatagcttgtattttagtgagttgagtgctagtagaaattaattgtaggtgatatttaaaaattgaatgctagctatatcttacttgtaaagttgactggagatgatttttgcttgtgggaatgagaattgaccgtagatattttttgcttgtgggagtgagaattgaccatggatgttttttgcttgtgggaatgagaattaaccatagatgtttttttgcttgtgggagtgagaactgactgtagatattttttgcttgtgggagtgaaaattggtcgtaaatattttttgcttgtggagtgagaattgatcgtaaatattttttgcttgtgggagtgagaattgactgtcgatattttttgcttgtgggagtgagaattgaccatagataatttttgcttgtgaattgattattggagtccacttatgttttttgaattgagttatatctatgcatgatagttagccatgggggttgattggtctttatcttttgttaacttgtttaggttggctggagcaaaatatgcccaagttcaagtattgagttttcgttagtagtccatgtagagctttgagtcgaaggttttagactcttctatgtagtggggttctcatgctatcgaaaacatggatgacccaatagagaatagtaaaaggtgtttgccagattgtttgattgaggatcttgagagtgatgagatccctgtgggagtcccatttgggcaagtaactcttgtgaaaaatcctgagtgtgccaaaatagatgtgggtgaaacagtcatagtgaacggagaggccccggagacaataggttacctgattggtccatcagatgagggtcaggacgtacgtcaagatgagtgctctggtgaacctattgttgggaattattttaccaggatct

SEQ ID NO: 389410 - DNA, 2663 bp, Cannabis indica
gaagtttgttgaagaagaattcaaggctcatgtagccttgtttgatattcctgccattgtttctttctaattggcatattgaccacccagctaggccctccttgagacttgtctttttcgatgaggttacttatgaaacaatcctggaaggtacattgatctacccttctttgggcaacataatgatggcctggccagctgctgcctaggaggtaatccacagtccataagtgttggaatttatgaccaaaaataaaacctatttcaatataatcagatttgctaattaataaaatatcaaaaatcattttatgttgcatggttcacatgatttcttttctaattatatgtttaatgtataaattatattaaatccaaaacattagttattcgtgattatagtgttatcaatacagtagaaaataatcatgattatatgtttcaaaatttagtctcatgtcagtacactggatttacactgacatgataatcatcgataaagtttacttataccttggataagtggcatgtacttttcaaggcattggcaaaatatgctagtatcggatgtatggagtgtacatcagactggatcaatattgatattggataagatatcataaacttaccgttatatatttctaagtcaatatcacttagttgatcttaggttaatagatcttaatcttgagatggttaggttttggcttaaatatattatttgtgttctttgacttgttcgttaaaattgaccaattagatcggcccaatacttatatcttgggaacatggtagtataattgagtgggagtgctaatcataaatatagaatctatagcttcaatagcatgaagattttctcattgcccaacttgggagcaatcctaaatttatttgacggagtcttttacagacccaagagttacttcgaaaaggagctaggaagggtattgatgatggtgcaagtacttatatttttaaagatccttggctttttgcggaaattaatccaagactttctagtggttattttggcttgtaaatgagaaggttaatattctttttattattagggaacgagtttgggattgtgatgttgttaaggacttttattttaaaagacatgaaatcgttgttcttggtattcttttttcaaaatcgattatggaagattatttattttgggagtttgataaaactggtgatagtactatgaagaggtcgttcaaaattttacaagaggagagggatggaagggtggatcagaatgtgatgaggttttgaaagaagttttggaagatgtgtttaccaccgaaggcgaagaattttttgtggcgatccataaatgggtgcattctaactagagtctagttgaagtcgaagcatgtggaagtgtcgttgttgtgtccagcgtatcatttggcaagtgattccatcttgcactgtttggttatttgtaagtttgttcagagttgttggcggttgctgggttggcctttgttccttttgttgacgactcttttaaggattgggtcttgactttgtttgctcggttagataagagagaatgtggtcgggtgatcatgttgtgttggacaatttggtataagtgtgaccagtctttgtggaaggggaagaagaatgtggtagagtatgttgttaatttagctcgggtcactcttgatctatagagaaagctcaagataaaaatctttttctttcagtggatacttggtgtcttttggatagggttgagctttggtctaaaccataggttaataaactcaaggtgaatatcgatgctgccattttttaggagaaggaaagtatgggtttggtggagtggttagagatcacaacggttatgtggtggcttatatattaggattaaatgcgggcattgtgctagctgaagttgccgaagctataacactggaggaaatgttgtcgtggctgaagatagacttcccaacagtcagtaatgttgagactaattgcttggtgttggtccaagcaatttgcagtgctaaggtgatgctttttacgtttggaggtattgtggaagattgcaaacatcttttgaattctttaaataatgttttagttacattttatcaaacaatttgctaatcgaattgctcatcaaattacaagagcttctcgtttaaatattgattttatttttttgggctctaatattttgagtgatgtttctgtcattgttgaggctgagttggtttaattgaataaattttttattgaaagaaaatgtattgatgaataatattatataatgaagttcttttacattaaaaatatataataaaggctaaatagtaatttttccccccgaactttgacatgtaccaaatcatgccttctgaacttttttggtcgttaaaaatttcccctaaactattgagattgttagctttaaggacttttgtctaattttagtaaaaacttctaacatggataaaagttcaagaggcatgattaatacatatcaaagtttgaggggcatgatttggtagatatcaaagtctagagagcatggtttagtacataaacaatactgaaacagtaaaattgaatgaaattagacaaaagtcctaaatttaacaatctcaatagttcgagttgaatttttaacggcaaaaaaa

SEQ ID NO: 389411 - DNA, 1151 bp, Cannabis indica
ttctgaaaggcaaaatatatgatgaaaaaaatttcttaccgttgcttatttctggattttatgatgaagcaagttattggtaaagagcataaatctggagacctttacattcttgataaactaatacctaaattagttatttgttttggtgtaaaatccccaatcgaggcacattgaaggttgggccacccatctcttcttctacttaaaaagttttctccacagtatcatcatcttagttcaagtcctagagtcaataactcagtgtttcttttgaattagtccattctgatgtttggagtcctcctatctagtctaaacctggttgttgttattttgttacttttgtagataattattctcgtgtcacttggttgaatttgatgaagaatcgttctgaattgttctctatttttcgtgcctttagtgttgaaattcaaaatcaatttaatgtatctattcgtactttgagaagtgatgattccaaaaagtacaaatttagtttatttcaatcttatatggtccaaaatgacatgcttcatgaaacttcttgtgttgatactccttaaaacagctaacgccctcttatttcaaatgcatgttcctaactgttttgggccgacgttgtttctactgcatcttctgttcttcaaggtgaaattccttatagaactctttttaccaataagccactatttcctattgagccaagaatttttggtaacatttgctttgttcgtaatgttcgtccacatgtaactaaattagatactaagtcattgaagtgtgcattatttggttataggtgttataccctttctcgtattcagaaagggtataggtgttattgtcccaatgttaacaaatatcgtgtttctatcgatgttacttttgtggaaaaaaacacctaatattttatcttcaacaactcctactcgtcaagggaggatgatgatttgttggtatattctgtcacatcttgtgcgcctgatacatgttttgatgaatctcttgtaccttcacatgcctcggtcatagctcccacaatgcctacacctccaccacctcctaagcctcctatagtgtacttcatgcgtccacctcctccacctcctgtttcaaatcctgcacctgcatcttcgtcatcagat

SEQ ID NO: 389412 - DNA, 1021 bp, Cannabis indica
aattggggagagagaaacaaagataaatgcttgcaagccaaaaatatatatattatttatataataattccaaggtactctggtgtttaatatttttttcgtatcatatatatataagttattttaaataaaaaaaataagttaattattagtttttttcctcgaattttgacatatatcaaatcatactccttaaattttttttgccgttaaaaattccccagaattattgagattgttaaatttaaggacttttatctaatttcattcaattttactatttcagtgattatttatgtactaaaacacgcttcctaaactttgatatctaccaaattatgcccctcaaactttgatatgtactaaatcatgcccttgaactttcattcatgttaaaatttttttactaaaattagacaaaagtccttaaatttaataatcttaatagttcaggaggaatttttaacggccaaaaaaattcagggacatgatttaatacatgtcaaagttcggggagaaaaattgctaattagccaaaaaaaaattaaagacactattagtgtttaatagtttcttcaatgttaaacggttattaatttaattaaacaagttttatataactgaagaaaataatttttttaaaaatattattaattaattattcagcactacttattataagtactaagtattaccaatgtttaatagcaattttcttttaataaaaaaccactaactaaatataatgaatcacctcctaataatactagatacttagtacccaatacttattcaaatgtgttaacaaattttttattcttttatttgtttctttttatttttattcttctttacttattttatttgttgtttattttctctttctctttctcttattatttttgtttcacctattcaaacttgtatggattggtcttttgtaatagataatatagtaatatgagatgatataaaaaggtttaccttttttttttttttagtgtagcgtaatggtttttac

SEQ ID NO: 389413 - DNA, 566 bp, Cannabis indica
ttatagttaaatttatttaatattagtaatacttatttagaagtatttcatatatatataaaaataattacattaatcatatatgtatatatagaaaatatatagtttactttaatcttatctactttattcttttcttacttagcaaataaagtttattctagttttctaatcacaaaataaaatcacattaacaataaagcttagtttacactaaagtagttagaagtataaagtgagtaattattattatgtaagaatcttctactttgtcctttttattcttaaaaaattagtattgctattaagtattattgttggtatttagtattatctaaaagtatcaccttagaattaattagtaatattttataaaaattattatattaaattatatagaacttaatattatgtaaatacttagggtgcgtttggaaagctatctggtaattggatttgtgtgtaattagaggtaattacacaatttggcatgtttgtctgacatgtaattacaatgtaactgtgtaattggaagtaattaaggggttccaattacactctccaat

SEQ ID NO: 389414 - DNA, 1822 bp, Cannabis indica
tactatgttttagtcacaaagtaattttttgctgattaaaaattacttttaatcacaaaaaatttatgttgtgattaataaattatcattaaagataacatttttctttaatagcgagtgatgtaacataatgaatttttattattcccctcaaaagaggtttgaagtacacacatacaaatacgaacttcaaatgcttcattattttatctttgtcaaagtgtaactataactatgacccaataatcaaacccaaatatctgaagtgcaatcaccaccaggatatctcatttcatgggcaagagaaggaccataaggctcaactccgaaatccacaaagaaattagggttgatagccaaacctcctttctcgatatcaacatcaagttgcaacaagtgagaacctttcttcatgagctcgggatagaattggcgatcccatgtactgaaaagtgagtttgtcacatagagtcgctttccatctaagctcatctgtatcatctgtggtccgaatctcaatttatgtccctgaaaattttattaagaaagaaaaaactaccactttttaatgtcatcatttaattggtagcaagtaaatgtgttgcctaaagatatgatttatacaataaagatgttatggaccaagttatctttagtattttaataaaggcatgtatcatatgccaaacataaattaactatttttctaaggtttttgaaacacaacaaagtacttatgaaaaattaagaattttaataaagaaatttgtaatttatagtaaaagtaacaaattacaaatatacaaaaataacattttataacagttctataatagcataaaagctaaaacaatagtatctaaataaacacacctggatttttggaacatcgaattggaaagtttcaccatcttctccctcggctaatactgagcttcccttttgaatttgtcctccaacccaaacttggcctgtcaacttgggattcttaggatcctcaatgttgtactgtctcacatcaccatgaaaccaatttataaagtacaaaaatcgatcatcgattgagattagaaaatcagtaatcattccaggcatttctggaagaatccagttatgcactttcaatgctttcactgatattgcaacctagaaaaacaacaagaagaagaagatacaatgtcattcttcttacaaataaaatacatattggatcacttagtttgaataaatgaaattttattaagttagttatctctgttgattcttgttagaatttaaaataaggtaagggtttcatctcaaaactaattgacaataagaagagcatctcattcatcttatatatagtattatttttccacattagcgatatgagacaatttttaatacacccttctcacgtttggatgtgaaaagtgtgggtatagtaaacgaactttaagagaccacatggttgaatgtgacatttgaaaaaaaagaatcctactaggccaaataaaaaaaattgtgagtgtacgccgagaaatttataaattttttaaagcaattcaaagatcccaacactagaaacttgcacacgtagaccgaaaggtcccaaatagagatcaaaggcgaagaagaagcttttaatttgctctaataacatatgggcccgtttggtacgcaggattgaactggattggactgaaaatgattggactggactggacaagattggataatgctgaaagtaatcctgtgtttggtttaagaatggactggactattttatttatttcattttagaaaaaaaaaacttaaattaaataaaaatatataataa

SEQ ID NO: 389415 - DNA, 1371 bp, Cannabis indica
aataaaaaaaatgatattattgaataatatcgaaaaaaaataaattaacaactgaatatatatatatatatatatatatattaacaacttagcatttctctttggggaaagcacgtacgtaccttaaactttccaagaggcttccatggccaatcagtgaggattccaggcttagaagccattttcagcttggtagagtatatagctcgttctattagctagcaatcttatattattatttgtttcacagaaatgtacacatgcatatgattgcatgcgcgtatatataaatatatattaaaaaagtgtgttataaacacatgtcattttattttagtcatatatatataagccacctataaatatgtatatgtatgggaatattcgtatctctctcaaactcaataaatatgtattaatatatataacattcttctcacatataataactaataaaaaaaaacataaattaaggaaacaaacccaacaaacctgaaggagagttatcggattagtattcttgtttataagtgggtacatcttgcatgatagaggtcacctacttaacactcaccttatttttagcctgaaaatatctgtccactttattaagtgtacaaatttactaaaaaaatatgtatattaaaactgtttttagtactgatgatcaacctatttcacttcatgaaaatgttgtgaacaattaatttatctttctatataaactagttgtgaagcacatgcctccatatatacactaaaacttttatttaatcaaaaatatttctaatttattatatatatataaaattttaaattctaattttccataattataaataaaaataatttttaaactgtaattaactatcatataaaaataattacaacttaattaaatatatatatatcatggtattatgtatttatttatgtagaatcaaaaaaatttccacatacattgtatttactgaaaataattttattataatacaataactctttttgatctattataatataataattttttttttattattgttgttacattaaatattactcttttgattttttttctttagtcatagcttatcaattagaatacaattatttagtccataaaagtattcttaaatagaagttttactatatttaaataatatttacatatattctcaaataatattctttgatttgaagtaaatatttgaagggaaaaatatatgtttattttaaaacttttatctgacattaaaatttcatagaataggttattatatatacccttgttgatgttatttttcgtcaaataatctaagaagatcgtaaaaataaaaaagaccatggtgaattaatttgactaataaa

SEQ ID NO: 389416 - DNA, 788 bp, Cannabis indica
taactagaaattacaaggtttaacgcctactaatattcgttatacaaagctatttaaaccgtttttttaaaaaaaaaaaaataaaacgaaaaataaaattaaaaaaaaaacagaaaaggaaaaagaaaagtgcatatttgttaatgtatttcttgtaattgtattaattattgaaataccgttcatttatacatttttcttttttgcagcatgtttttatttgttgttatgtcaactaaaaaaatacttttaactaattgtcgcaagaataaaaaagtaaaataaaataaacataacaattaacaactaaacattatctaatattttgacaaaaaaaaatatctcaaatatgtcacgaagtggcaatgctaatttcaaagaataataaatttttgtggtgatgagatggtatattttttttagtaaattattttttgactttttgtaaaaattatttatcggctatcctattttatatctgcctctcatcttcttcttcctatattgtattgtcgagaatcctttatttggatgtttatgggaaagggtgaatagcagcaaaatctttaaaatttttatttttatttcacttaattctcaaaacttaaatttgggcggtaaaacctctaatactcgtgttctgttagtaatttaatactttcgttcaaattcaactgttaactgcaaagttaaattgtccatgtgacacaatatacacgtgccacaattttattggtccacgtaaataattatattaaaaaaatttaaaaaattaaattaaattaatt

SEQ ID NO: 389417 - DNA, 1693 bp, Cannabis indica
tcgttaggctagtctaaattttcgaattacattttgagtcaatcttttgatttaatttgcacagcttatttaaattgggtgatgtataagttttgaatacctctaccaaatacttgtgaccacaattgaaaaagtatattgattattaaagagaaagagaagttattgatgaccccaacttaattttttttctccattttataatttatgtatatattttaggaatttttaattttatatgataaaatcattcttaataagatgttcttcatttcattccttattagatcacttacataagtttttctattctattaattcttcaaaatacttcactaaaacctttttttttagactaattaagatttttgctttgtgaaatttgataagtactaaattatacccttgaacatttttagtcagttaaaaatttatttgaactattgagattgttaaattaaggacatttgtctagtttcattcaattttacaaaatttgtgattctcatttccttaactttaatatctaccaaatcatttcctcgaactttgacatgtaccaaatcaacccccttgaactttcatctttgttatactttcctaactaaaatttaaaaaaatcattaaatccaacaatctcaataattcatatgagatttttaacagtcttaaaaattttatgggcaaaaattataattagcttttttattttattttatcttatacttttacattacatcatacattaaatttttatttttttgtctataccatttaagcattatattttttaaatatattttattataaaaaccaaacaaattttaaaaaaattaaacgaaaaataattgaaaaaataataaaattattaaaataatatttaaagaataaataattcatagttaaaattttgagctattttcacacaattgatggagcccctttttaagaacatatttttactttctcaacgattttaactcatgagatgtgaatgtgttcctccactaaataccaaaatagtttgtttgagtccatgtgaggagtaatgaacacaattaaaaatagaaataaaaataggaataataattaattggcaaataaatatgagtcaaacttgcgtatataccataccaacttcactcaacatctatattattcttatctcaaaaccttaaccaaaaaagatgaaacaaaaaaaaaaaaaggagcttttcattacgttttgttttcaaattctaaagattcttattgatttgattatcttaattttttaatcatcaccttgattgaatgaaacgtattacatcatctaaagcctattttatagctaagtaaatatgggttactagacaaaaatcaaatgctgaaaatagataaagttgttgggagattcttagatgataaaatttgtaaaaatatacctaaaaggaataatttgaggagtattatactcaaaattttatagtaggacagcatcgttgtgcctcatgttgattgagatgtctctatttttattgtttgcaaaaattataacaatctttttaggataaatacaattttgaattttgtgtgttgtaaaagttactaattagagtctctgttttgttaaataataaaatagacattatattttttaaaatggtaaaaataagaccatgaacttaatttttgactaacttttttttttaat

SEQ ID NO: 389418 - DNA, 1761 bp, Cannabis indica
tttttttttgattttttatgtagttgttttagatattgtttaggtttatactcaacatttaattcgtttatttcaagtgcttgcatgttgctcttacacaaattaggacacaatctgatgatgtgctccgcacttcaaaaaatgatgatgatgtggatgttggtgtcgataatgaagaagatgtgggtgatgaagaatcgagttctaaggaaaatgaagatgagaaaagaattgacaatgttgatgaggaatatagggatggtagtcaggatgatgatgaagttgatgatgctagaaatggtcttaggcagggtgagccaggttatggaaatgtgaaaaatgatgaggcgagtgttgttgttgaagttggtgcaaaggatgatgatgatgcaaaaaagcaaaggatgatgatgatgcaaaaaatgcatatgttgctaaagaaggcaccaataatgatactaaaaagactgataatttgttgtgactaaatgtatttttagttacaatacttgttgtgattaaaataaattagtgacaacttgtaactaaatactatgttttagtcacaagtaacattttgttgtgactaaaagtcacatttagtcacaaaaaattatgttgtgattaaacagttgccactaaaagtagtaatttcttgtaatgtgtgaaagaattaaatttgtgagggtgtggaagaattaaatttctataattaatatatttataaatttatatttattctatataaaatgtggttatataacaaaatttttagtttaaaaatattttttgattttttatgttaattttaatattattctttaacataatattcattattaattttataatattattatatatatttaaaaataaaaaattgtaaaaaattgtataacataatattttttattaattttataatattttttttatatatatttaaaaataaaaattatttagatattttatataagaaaatttaatttaaatttaataaacttagatattttcaacctacattgtaactttattggtttaatttaaattaaaataaaagataattcatagccgtaatagctaaaaaaaacctaaaagattaaaatttcaaactcaatttcaaaaaattaaaaaaaaaaattacttaattaaaagaaaattaaatatatatattgcacttaacatcacctatttacacctaataaaaagaaaactaattatatgcgcataatattaattttaaacttaattaaaaaaaaaaactaattatacgtgatattaaaaaaataataagagaataagaaaataaaagttaccttattatctttagtgaataaaaaataaaaatatctaattttgtaatcactcaaattttatatatataaatttttatatagttaactaatagtgtcttttttcaattatatatataaatatttataaacttaataagaaattaaaaaaatatataaaaaaaaaaaagagatcataaattgatgtattttaagtgattttatataaaaattgatccatcaagtaatagtagatctaaaaaaattaaagaatgaataaatagatgaaatattgaaaattgacaaatttataaagaactcactcaaaattaaagaatatctaaactcaaaaaattaagagtaatttgcagcataaatacttaagttttatgttgggtagcagataaatacttaagtcgtatttttggcggtaaaaatacattttatcacactcctggaacttccgtag

SEQ ID NO: 389419 - DNA, 616 bp, Cannabis indica
tttttttttggtggtttattcttttatatgattatatatatgtgtgtttcaagtaatataagtagtcattgttatcaaatttttatttctctaagaatatttatattagattttattaatgtgcgttctgattataagatctattttttttctttttgattataatacaacttaaatattattttgtaattgatccatacaccaaaaataaagaggatttaatataattaaaggcacgccctaaagttaatttatttttgtttgtgatatatgaattaacaagtaattattttttcttttattttcttctaaatatgaaatattttatttttaatatccggtaaggtatatagagataacacattacaaaagatgactcatttcattaatgagagaagaatcacaatcaggtaaaaatgatgtctaaataaacaagaaagactattaattttttttagttacacgtaattatttcttatattattcaatatatatatatatataaaagagataattatcattaaataagagataatttaatttctatgtataatttaaaaagttttaaattaatcgtcgcatgtagaggcggaggtacgttacaagctgaaggtgg

SEQ ID NO: 389420 - DNA, 743 bp, Cannabis indica
cacacacttgtataaccttctaaagaagcgccaacttaatagttcaggaatgatatcagtggcaccatggggaatcgaactcttaaaaacaaccaaatgagggatcttatactaataaaattaatctattcaaatgtccaattatatatatttatttagagcaaaataagggaatgagataatcattgaaaatacttaaaattgacttgttttaaattaacttcttacttatcatttgcgtgaaagtttactaaatgcttaatttcacatctaaactaactaataacctcaaaataaaattgtatttcatacgcaacttctaataataataattcaaaatgataaattgtatataattaatttagaatataagaaatcctatcatatttggaaatgaatttcgattctcatgcaaaaaccttaaaataatttccatcaaatatatatatatattttggtattattagtctcttatttgacttgattaatctcactaaacaaaattaattattcaagctaagttaagaaaataataacttgagaacaaataatctcattgtagaagtaataataatattatttgaagacaaaaatatatatagtctaattttggtcaatcacggcatatatgaaactcacgtgattgattgacttgtaccaactgcaattcacataaaataaataataataaaaaaacatatatactttttttttctattaaaagaaataaataaaagtaattt

SEQ ID NO: 389421 - DNA, 675 bp, Cannabis indica
gcaaccaatgtaaggtttcttgagctttatatgtgtttgaattctattgttttagaaattcatatttaggatgttaaataacatatatggtagtaaatctagatcatagtaaaatgatccccaacattacttggtttaggagtcgtccagttcttgtcaaattatcggcacacaactgtagtgtggccaatcttcatacagacttgacaaataactttttgattaggaaacctagagaagcctctgcttggcctattggtggagttggctggttagtagagatggtggagttattgttggcaaaaggtcaaacacctctagatctgccatttccaagagccacattagcttgcatttttgacagtgagatcattcatagccaaatcatgttcgtttcgactttcgtgagacaaaagtagagcatggactttttcaatagttaaggcatcacttcttgaggtaatccctgagacaacaaaatcaaactcgggtcctaggccattgagaacttaaagaaccaaatcttgatcatcaataggggacgctgcaatggcttgaaccttatcaatgaatttagaaattgggagattgcctttatgaacaagtgagaattgcctcttgtgctcaagttgtcgagctttggtttgagaggcaaatttttgttcaagagcgcgc

SEQ ID NO: 389422 - DNA, 584 bp, Cannabis indica
gttactaaacgacaccttatggacccatacatgtctcttactggatgacactttcccataccgcaatgaatttggctgcaagaggaaataggaattgctttgatgataatctagcaatgtcacatacacttgctttctataaagagagaaccaatttacatagaccactctatcacactgattagagaatcacaaatctctttcaaaataaaaactaggattctttctactttctcaaagtttttaaaagccaaaaaacaagaaaagactaaacaaaaggtggaccttatcagcttacaaacagaaatgtacttagataatgtcaccctaattacatgtttgttatgggggtttaaatttttaagaatgtaaactcaaacttatgtttggtataattttagtagaagatttacgattaagttcgaatttatttttgagttaatctcaaactctttaaatattttaatttgagagtttaccgatctaactacttcaagtgaaactcctacatgttgctataatttataaacactacgcaagtatacgcaatcaagtagtaaatctcacacaggtgaggtcgatcc

SEQ ID NO: 389423 - DNA, 3061 bp, Cannabis indica
gaaaagtgaaatcaaaattttcttaatagaaatgaatgtgaaaagcaaatatatttttgaatatggaaaagcaaataaagtccttgatatatgctttttgaatgtggaaaaagcaaatacaaagactttgaaccaaccatctttccaataattacatgggaaatttgtggtttcatattaagaaaaacaaaaagaggagagaaatcattgattctttgtctttttaaattcattttgctgtccaagtttatcattatattaaagggttaagatttgtttgtcaagtgtgttcaactgatgacattctttacaatgtgtccatcaatggtaatcttattacaaattgttatctttttctttgtatttggagagtgtgttgatcaattgagtgtgagttgtttggagtacgagagaaatgctcttcttgacttcagaactggccttgaagatccacgaaaccagcttgcatcatggaataatggcagccgcgattgttgtcaatggtggggaatcggctgtgacaaggcgggagcagttattacagttgattttcaaaacaggtatgatcgctcgtggggcattagtggggaaataagaccttcattggcaaagctcaagtctttgagacacttggacttgagttacaactacttcctgagcatcccaattcctaaattttttggatcactaaagcatttgaggtatctaaacctctccaatgcagggtttagtggtttagttcctccaaatataggaaatctctctagattgcactaccttaacatagaatcagtatacttagtatatgttgatgatcttgaatggatcacaggcatgatctctctaaaccatcttgtgatgactagagtaaacctttcaatggcgggtttagattggtttggtataatactaaacaagttaccatccttgacagagttgcatatgtcaggttgtaacttaaatggtccttttccatctgtttcttctgttaattcaacaaccacttgctgttttagaccttagtgttaataacttcaactcaaaaataccggattggttggctaatatcagcagccttgtgagtgttgatttaagttatggtggtctgcatggtaggattccacttggtctcgccgagctaccaaatttgcagactttgcatctgcaatccaatactaatctcagtgcaagttgttctcagtttttcaggggaagatggaaaagtataaaagttgttgatttgagtgataatatgctgcatgggaaacttcctacttcaattgggaacatgacatctctcacttacttagatctttccaagaataatgttcaagggggattccaggctccattggtaagctttgcaatcttaagcggtttcacatatcagataacaaattgaatggatttttacctcaatttcttgaagaaacacatgatagttgtcattctaagagtccacttcctagtctaaacggcttgtatttgaacaataatgagttgaatggtatattaccagattggttgggtcaacttaggaaccttgttgagcttgatttgagctctaacttgctacatggtccaattctaaaatctttagagtcattgcaaaacctttcatcttttagtcttgctaaaaatagattaaacgggactctacctgacagtctaggcaagttatcagaattgtcttcctttgatgttctttcaaccaattgactggtaacatcactgaagcacattttctaaagttgcataagttggaaagcttatttctctcttccaactttttaacactaactgtcagttcaaattggacccctcctttccaagtatggtatctccacttgggttcatgccatttaggtccttcattcccaacttggctaagatcacaaaatgaggtcagagacttggatttgtcaaatgctagcatttcaagttccatacctgattggttctgggaataccctaatcttaaatcgttgaatgtttccttcaatcaattaaaaggccagctacccaatccattcaacatagcttcatttattgttgatttgagctcaaaccagtttgatggtcccattcctattccaaagaaattgaaacaattacttgacctatccaacaacaaactttctggtcctattccagaaaacataggtgattccctacaaagcatgatattcttctctctttctaccaaccagatagatggacaaatcccaaattcaattggcaagttccgatcttccatgaatgtccttgatctctcaaataataagttaataggaaaaattcccctaagctttggaaatttgtcaaaactagttgcattggacctcagtaagaataatttgtctggtacaattcctgactctttgggtcaactaagttctctccaaacattgcacttaagtgacaacaagctttctggaagcatcccatcatgttttcaatatttgtcaagtttggagacacttgatcttggtaacaatagattagggggaaacataccacattggcttgggaaaggtttggagaatttaagaattctaaaattgagatccaatgctttttttggagagcttccatcttcgctatcaaatttaaggtcattacaagtgctagaccttgctgataatgggctcaatgggagcatccctgctagttatggatatttcaaaggcatgattaaagtacaaaaggaaaactttcttctgtcctatggtgatgactatcccaagtattatgaagaaagaattgttttgattgtcagtggccaagaactacaatacaccaagattctttcccttgttgtcagcttagacttttctgccaataatttgagtggagaacttccttcaaatttcacaaatttgttgggtttgttgaatttgaatttatctaacaatcatatcagcggttcaattccagaggatatttcaaaattggggcagttgctatctcttgatctctcaagcaataggctcttaggtactattcctaatagcttgtcatcactttcattcttaggacatctcaacttgtcaaacaatga

SEQ ID NO: 389424 - DNA, 611 bp, Cannabis indica
tgcatatgaagctgattagtaatccttcctctcaagtcttctccaatattgttactgaagaaaatagaggacttattaaaattgactttttgccctgacaccatttcaaacttttgtagaacttcttgcactcggtgagcttcttccaaattagctttacaatataagtaagaatcgtctgcaaagagcatatgagttatcctaggcgcaccattagccactttgcacccatgtaaccagccccttcattcatactgacattacaaagtcgataacccctcggcacataggatgaacaagtagggcgagagaggatctccctgatgaatacctctagtaggaataatcggacccatttctcttcccccatgaaccacattgtactttgccgaggtcacacattgagatagcagtctcacccagaatggttcaaatcccaacttcaatagcatagcctccttctttaatatttagttaaataggaaaattattattttttgttgataattaattttttttaattaatttttggccaacataaaattaggataatttttctaggatttatttttattttattttaaaagcttttttttttcgaaaattgtatt

SEQ ID NO: 389425 - DNA, 595 bp, Cannabis indica
aattatgttgaaataaaaatagtgtattaatataacaataccaaaatattaatataatatataatgttatatttattttgatggaatgaagattaagtggaattaaattattattataataattgattttcttttgaaagtgatataatgtgataacaatatgtaatggtgattacattatgcaataaaatttttaaaacaatgaagaagttatgtaatgaaaattacatcacaaatataaaataaaatgactcaaatactaatttttatataaaaataaaaattgaagtatgaataattttgtgaattaattaattattcaaatatttattctaacaagaaaccgtaatcaattctcattattaatttattttattacattactattattattccaccaaactaaatatcacctaaaatcctacaattttctatattgttatttaataataagtgttgctcctgattttgcccaatatacgtggaccaaccaaacagggacacgtgggcacgaaggtcttaacactcaaattatcagctaagtctttataaagactggcgtcatccgggatctgcctctcggagaaggcatacg

SEQ ID NO: 389426 - DNA, 1692 bp, Cannabis indica
atttttccatactttcccttggaagtagcaaaggagctggaggatgcaaccttagagtttctttaacaactaattttaaatatttcatctcactgattgaagattcattcactatccttttgtgccaacaacttttcttacctcatcttgagctttattttttcatcacttttggatttcttatcatttctaccatagcccaatctacagataataagctgatgtttcactcccagccgaaaagatatcctgaaattaagtcaccataagtaatattttgttgtgactattatagtgctagaaaaagaaatataatgtaccccaattataacacttcacaaagtatcttttaaaagttatgtattctagataaaaaaaaataataataaataacctttttttatatgaactattattttgaaatactacttgccaatataaataagttgatattgatgagaacttacaaagattattgctttaatattgtcatttgatagggtgaaccaaccatcttgtttattcttatgaaacttcaaaagaacatcaaccaaatcttcatcttttccacttttctctttcatatgctccttgatgatattttccattatttttgatgaccttagtttaatgctctcaaaaataggacgacttttccaatcaagaaatctcaaagctggaaacacctcagcgaattcaaagcctacacccgccttgatagcttcctcaacaatcgaaatgaactcgtcgtgatcactgcttttcttgccaaaggcagccctagatgtgatgccataagaacattttgtaaccatttgagtaagattgattgctgatgatccatcttttgaagatgtcatgatcccttcaacaagattaaacaactcttcttctctaaccggtcgaaaagtttgaactcttcccgggcttagaagctcttgcatacaaatctttctgagttgtctccaatactcaccatatgaagaaaatataatgtcagtacaattatatgccatgatctgagcagcaagagtttgaggcctagatgcaaaaacaacatcatgggttctcatgatctctttagcatactctggtgatgaaactattagagttggaatttgtccaattttaaggtacatgaatggcccatatttcttggctaagtctctaaatgaaatatggggagaagagccaaggatttggtgtatatttcccactaatggtagtctccatggtcctggtggtagctttgaaattgagttcttagtttgatgagctcttttcaaaactattttcactaccataaacataaaacctaaagtgatgaagattattgggaaagaaagttgtttaagatccatgtgaaaaactataattgattgataggattggagttgttatatatgtggctttggagttgtgaatgtaatgatataaaagatagagataaggattgtaaatatgcaattttgttatccaataataaaattccatgtggaaaattagatcatgacttagcccatatataaaaattatttttattggggtatatttgtttctaacatctctaccatattttattatattttaatggtaaatatcattttgattcttgtgttttgtaaaagttactaattggatcttttgttttgtaaatgataaaatagactttgtattttctaaaattgtaca

SEQ ID NO: 389427 - DNA, 2117 bp, Cannabis indica
aaaaaaaaaaattatcgatgacagttaaatatcgttagtgatattctcacttttagtgaggacttcttgccgttagtgatactattaattcttgtagtgaaacttgaaaataaagtagaataaaactatctatatacattgatgagaatactctgtatccatatgtcttgcttagttattatcaatggatagcatgtacctctcaaaacagaaagatgagaatggctgaataaactaaaattatttacatcaatatagaagtaaaacatactttgtgtctgtcataccaaaaaataaaataagattaaatacagaagcaataaaatgcaacagataatcaatatatacattcaaattccaagctcacaaaataaccccaaaacacgagtagtattctaaaacttacgcatcacattcttttgtccaaaccgttgcaaccaagagaaaagaagaagcaacaaccaaatgtaaccatgcgttcaccacaattcaacttttccctttcaaaacccttccaaattatagggcttagaatcacaatctcacaacatatgtactattcaatgaaatactagttgatatacacatttgtatgcctacggtctgaaccttgtcgtgagcagccagactgctaacctgttcacccacctgccttcgcaacacttgcgacaacggaaaatagaaatatattaagattgcacaaaaacttagggtaaagaaaatgaaataaaaaagaaccccaattaatgctgaacccaactgagaattagggtttgtttagttttttttttttttttttgaaggaatagggtttgtttattgggattgaacatatcgtatttgaattttttaaaaaaaaaataaaaagataacggttgtggttaactattttttttcaatttattttttgttaaaaaaaaactattttctctttttactaaaacgtaattcatttattaatatgtaaatactaattataaaatgttattaaatttagtcttttgtgccatttttataaacgtgactattcatatattttagtaacattttttatgtgttaataaagtaaaatatgaaaaaaaaaaatagtgatattttttttatcaaatgtcactaaaagataccaataaaaatgttaagtattctttttaaagtgataattttagccaaatgttactaaaaattattatcatcacactttttacaaatgttattagtaatggaaatgttactaattccatttttggtgtattaagaaaattcatggtattagtatgtacgcatttaatctgttgtgtatttatataactgataaaatgaaaagttaagtgtgatgaggcagtgaaagaggtacttatgtggttggtgaagtagtataggttggacaaggaatcaacaattcatagctggtgacaaaatcttattttagccatgtcgtgagatacctctctcatatatatatatatgtaaataaatatgtatatataaatatattaaatattctacttacaattaatttattctatgaaagcacgatgattctaataatttaatatttcacccataaaacaaaagtttttttggggatgcttaaattatatgtgaagactctatacacaatcatttttctaagatgtaggattgttatgggtaaaaagaagaataacagatagaaataagatatacaagaattaatgattatattgacaagtctttataatcatagaattatagataataaattgggttattggtagaggtaatgtggttttaattgattatatgtatacttaatttatgttatgtaatatgtcagaatagaggtggacttgcttaatttgttgtagttggtgagaatgtttgacagtggcttggctgcctgaatttatattattaacagtgtttcttcttggtgaaaatattagatttatagaatgacatattagcggaggtaggtcactgaaaaatcgagtttttgcaaatgtcaatgatatatataaaaatacaaaactgtattagcctgtagaagcagaatgtaattttgatactgcagaaaccagttttgcagcaacaaaacagaacggacagaatataaaaataattacagaaatttaaat

SEQ ID NO: 389428 - DNA, 1329 bp, Cannabis indica
caaactcagaccaaaaccaatactggaacatggactcagaccaggacctgtgacttggcagctaaaccaagacgggactctgacctagaccgggacccggagcaggacccagacccaaaactagggctggacccaggacctaagaaccaaactcagacctggacctgaaacacaaacccagactgggactaggactcgaactcagacccgaacccaaaccgggagctattatcggaccgggaaccgagacccaaacttgaatcggaacacaaacttggacccgaactaggacctacaacccgaacatagatggggcacccagactcgggaattgggccccaaaacaaggaccataacttaggcctcgaaacttggatcaggatctggaacctgaccccagacccaaacctggacctacgaccaacctcaggacttgggatctgggattcgatgattggactcaactcgtaccccgtgacttgaaactggaactgaaaccagaagcggatagggacccaggaccaggacctggacctacacccaaaattgtaatcagaccaagacctagactaagacacataaccacactcggagtctgggtccgggtctgagtcctggtccgagtctgggtccgggtctagaccctgatctaggtctgggctcgggtccaggtccgagttcgggtctcgcgtgcaggtctaggtttgggttctgttcaggatctctatctggatttaggtcctgggttttgatccctgtctgggtctgggtttgagtctagatttgtatttcgatccctatctaggtccgagtttgtatttgggatcgggtcccagattaaggtccgggtccagacctcggtccaggtctgggtacatgaccgtgtctaggccccagtttcgatatcagtttagatttggggctaggtctgagttcggttctaggtttgggtttgacacctggtcagaatcctagtcttgttcgagggtcctcgtctcgtggttcttgttcaggttccaattttgggtcccgagtctaggtcagggtctgggtttgggtactggtctaagtccatgatcttaatccctttcaagtgttgtaatcttgttctggttaaggtcccgggtcccacgtccgagtttgggtttgagttctggtccatgttcaagtcccgagtccaggtctaggttgggatctgttggaatttattttactaggatcttagatctactcacaagtatgttgtttaacaccgtaaatatgaactttctaaaacgataaaataaacacatataaaattaagaaaaccttacattgatgcagcggaat

SEQ ID NO: 389429 - DNA, 978 bp, Cannabis indica
tttttagtaaatacaacttattattttcaataatctcaccaaaaatgtggaatttatcgtttgctctgctttgtcacgctattcatctttcccaatcatttttctcataacaaagtgttctaccttcataaataactatatctgtgagtgttttatttatcttcataaataatatatatcactgatatatattattgatatgaggtgttatagttcaatattttgacataataataattaatcaggagatatttgtgtaatgtaataatatcatttggaacgtgtgaaatggggtaaacttttaattggtcaaatataaatgaaatgcagttattagaaatgaattagatagacccaaaatttgggtaaatcatccccttaattaaatcaaatttgatacaaaaattttcaaatagagaaaatagagcccataggaaaagtctgtagcaaataaacataaatactgttttataaatatgaatcgaaagtgctatcaaattcgatacaaaataatctacaaaaatggctaaaatactaataataatatattcaattatatatgtgcaacttaattttagacctatcacaaaataattggcagtatttattttgaaagagaaaatgagtagttttatagaaatatgttattgttatctatctattatttaattttgtgttggacccatgaataaggcttgcatgtgcctatatattaattaatatggtactaactagtactgaaagtatatgtaagatttaaaagaatttattgagtgatttgagtgatagtgtagacttttggttgttatgtttggaacgtataaaagggacaaaaattaaccatcaagactttaatttcttaattaaaaataaaagaatgataaatgaaagaattgagtggttgtaataaatatactacatactcatgcagtgtagtagtcagtcatatataaacaaattcaaatctgcaactgcaaa

SEQ ID NO: 389430 - DNA, 937 bp, Cannabis indica
ttttcatattaatttgatatgagcgccaccatagacgaaagaaaactaaaatatttccccgcaacttcttggaactattacggttgttgtggccattaattattcaagacaaagaaaagtgatatcatatgaataagagttgctattggcaacaatagtatttagcattttttataagtgatactctattgattggtaatattacttaaaaattattttcttaagctagctatatgagatatgatattaagtttttccaatgacagtataacattgagaagggtcaatgtcttttaggatttgtctgtgaattatgaagagaatagaataggggtgtttctcaaactgcataaatcgcccgcactgcaccacaccgcagaaaaaatacgctttaaaatccttcacggtgtggttacggtttgtagttttttcaaatcacgcggtgtggttcagtttgcgattttgaacttaataattatggttcaaaccgtattgcactatatactataagattattaatttttacaatattatttaaattttttttcatataaaaataaatatatgtaataaatatactgaaaaagtactcaaaatttaaaatattataaatcagaaagcaaagattaccgtaataatgtgtgtagtgtgtgtttggaggaatcactacaagaaatatcatttttgccaacacaatttggtgctggcaaaagttagttatttgctggtaaaatagaatttacttgtgatgcgttggcaaaaggggttggcaaatcaatgttgatattaaaacttttgccagtataaaatgaaaagcgctgacaaagatgacttttcctagcacgtaaatgcgctggtaaaagttagattttagtcactgtaaatgtacgctggtaaaactttgacctctttgtcagtgcagtttgcgaaatgtgct

SEQ ID NO: 389431 - DNA, 664 bp, Cannabis indica
aaatatataaatatatatgggcctagagcagcacataaccgacggtttgttcaatctcttcacatgtacaaatcgttctatatacaaatttaatccattaattgtgtctcgccaacctagtttgggtcgacgtacgttcttctatgtacacataataaatacatatatacacatacatataaaatatatgtatgtattaaataataatataattaagttgtgttacacacacatatgactatatgatgagtacaaaaaagcctttaattatggagaaatttacataataataatattgagttgagatatgaactttttcaagtttctatctacgtagtaataataagacgaaataccattctttaccaccaacaaccccacgttgctttatataaataataatggtttttatttatttatttatttttataaacaaaaataaatatgtaccacattaatggcacgattataatgtatcatggggttgaaactaattatttaattattattttttggaaataatgtagaaaacatttgaccccattataagtcatttctgaaataagaaaataacttaattagacaaaattctgaaaaatatgctaaggccaaagataaaaattaattttttgaataataattaataataacaaataatgaaact

SEQ ID NO: 389432 - DNA, 2525 bp, Cannabis indica
accatgattgaggattcagtggactatgtcaagaatgtgacacgtgccgaagattctcaaagatcctgtccaccaaatgagctcacacaatgcattgtctttgaccttttctatatggttgattgacttgatcggacaacttcctaaaggaaaatgaggagtataatatgttgtagttgcagtggactatttgactaagtggacagaagctgaaccattggcaaatataacttcaaagaaagtcctcaacttttttgtcaagaacatcatatgtcgctttggactctatcaaatgattgcatcaaacaatgggaaacaatgcgacagcgacatgttcactgacatctatattagacaaaacatcattaaaacactatccccagttgcacaccctcaagcaaataggcaggtacatgttgtacacaagaccctaaaggacacaatgaaaaagtgtctaaaagaggcaaaaggcagttggcccgacctcctcccagatgtactttagtcacacaggactaccaagaagacaaccaccagatggacaccctttgcattagcctatggccatgaagcaatgttgcccgttgaatttgaaccaccgtctcacatgaagataacctatgaaaaagtaataaaccacaccttgttggcaaatcctttgatgaaatagaagaaagaagagactaggcaaacttaaaggtacatgactaccagcatatagttttttggtacttcaataagctagtcaaggagaggaaattctttgtaggagacttacttctatgaagaagattcttgaatgctaaagattctgcaacaggagtgtttggatctaattgggaaggacggtaccaagtgacgggaattacatgtaaaagtgctcacaaacttggctggtacaaagagaagaaggatttcctaccaagatattggaatggataacatctctcaaagtactaccaatatcccacttatataaaacactactcttttatagtgattcttgtaactattcaccgtgcaagagtttagaaaatagctatatgaccaccactctttagtggtggcctttccatggtatgccttgaagggtagccaaaacatggtttttaaagaaaattttttatttttaagcttttattacacaaaaaaaaaaaatgtacgtttcacagcaacaaagcatatgcaagaccaattaatgaataaaagatttttcttcagttcaacttgtgtcaaataacttgctaatgaattagctttttaatgttaactcatatttttagttcaacatgcatgtaaaacggtcctcccaaaaaaatgcagaggcaaaggatgtaacgtcctaatgctaaggcacgctacagtgcattttcaattacagtgcaatctttgctaatcaaagaattttcttggaaaaaacgtgtcaaattaaaacttttatatgaaatcttaaactttatattatatcaaaatattaacaagtgtcagctttatcctttcctttacctacacatggaagcagaactgtgagtcgacagactcagtaagaaaagcgtataacatatcatataatttccgacttgtatttaggctcccatacacctatttacaagactcaacaaatgagtaagaactttccatactagggtatagccactataccacatacattacatacctcactgtacgagtgttggtagggtttatttcataccctgagtacaactgagtgatgtaccacacacactcagtaccttccagtacttgtgctggtatcactgtactgtactcctaaccaatattccctataccgatgcactctgtaccatactgtacaagggttggtagtgcaaataacacttcaagcatgcatatacacataacatatacatacactcagatattgatatcacacattatattcagttcttaccttctttctagattcaagtgtgctggccgacctcaacggaaagtctcgtgctagatggatgccctaatcacattatgaaatcgggtaagttacatgattaaaaccctaatcccgagaaacccaaacccacaactctgggttctgttatattccctagaggttactcaaactctggaattagggaaacacccaaccacggcactgaaacgaacaaaaattgagaaaatgaggtgtttgggggtcctgctaaaaccggctaggtttaggggtctggtaaaaccggctagcctatttgcaccagtcaaccccaaacatttaattctttgctcaattttccaccaaatgctaccaaactttccatagtacctaattagggtatatacaacatattccaaccaataattcacagaaaaactcattgaaacaaattatgccattagagatcaaagctttgaattcaaagctcaaactttcacaaaacctattccaaccatcaaaaccagctacaagaagctaataccaactcaaattaagcctagaatttgaactacaactcaacctaaccctaacagccactaaattacaaaatcac

SEQ ID NO: 389433 - DNA, 728 bp, Cannabis indica
taatcagattactgagttaggacaactcatcaagacaaagcaaattacatctttggagctcactaagattttcttaagaagattgaaaaggtaaacaccacttttgatattgtgtgtctatatatattgaagccaaaaaataagcagagtatattattaggtacaatggtgttcttaaggctgtggtgtcttacactgaagaattagcatacaaacaagcaaaaagggcagattatttgcttgacaaaggagtctatttaggtcctcttcatggtattccatacggactaaaggacataatttcagtaccaaaatacaaaacaacatggggttcgaccactttcaagaatcaagtcctcaacactgaagcttgggtctacaagaggctcaagtcagcaggggcagtgctggtggccaagcttgtttcgggttcattagcctacgatgacatttggtttgggggaaggactaggtgttaggaatactgtaaaacttaatatagccctaattaattcatgagaattaaacaataagattaaagaatagcggaagcgtaccggagtccatagaatcgacctttaaatgatctttattggtatgatcttccaatttgcatcaaaatctttctctgtaaactttttgctcttggtgatggggatacaagagtgaaaaagatccgatgcaaatggggaccattacccgttatattaccaacagacaaacctgtt

SEQ ID NO: 389434 - DNA, 1337 bp, Cannabis indica
ttaccaccaaagagagagattgagtttgagattgaatttgtactaggggctgagccagttttaaaggctccacatagaatggcactgtcagaattgaaagaattgaaagtccaatcataaaatctacttgatttacgattcacgaggccgagtacctccaattggggtgcaccagttttgtttgtcaagaagaaggatgggtcattacgtatgtgcattgattatcgtgaattgaacaagttgacaataaagaacaaatatcctttgccaaggatagatgatttgtttgatcagttacagggaaagatcatcttctgcaagattgaccttcgatctggttatcaccaattgaggattcgggaagagaatattcctaaaacttcttttcgtactcgatatgggcactatgagttttagtgatgtccttctgattcactaatgcaccagcaacatttatggacttaatgaatcaggtatttgaggacttccttgataactttgtgattgtgtttagtgatgacattctagtatattcggaatcgaaagaagctcatgaacaacacattcgtatggtattacagtgtctccgagaacacaagctttatgcaaagttcaagcagtgtgaattcttgttgtcccatgtgagtttcttaggacacgtggtaagtaaggatgggattctggtagatccagtgaagattgaagctgttcgagattggccacaacctaagacagcaactgaagttagaagtttcttaggattggctgggtactataggagatttgtagaaggttttgctaagattgctactcctttgaccgagctgacccgaaagagttataagtttatgtggactgataaatgcgagaatagctttcaagaattaaagaagagattgattactgcaccagttctaagcctgccagtcagtgatgaaaagtttgtgatatactgtgatgcctcaagacaaggtttgggttgtgtgttaatgcaatcagggaaggtcattgcctatgcctctaggcagttgaaggattttgaacagcgttaccccactcatgatctagaactggcagctgtggtttttgccctgaaggtttggcgtcactatttatatggtgaaaagtgtgagatttacaccgaccacaaaagtttgaaatactttttcactcaaaaagatctgaatatgagacaacgacgatggctagagttagtcaaggattatgactgtgaaatcctctaccatcccggcaaagcaaacgtagtggcagatgtgtttgaaatcaatttaccaggatcttagatctactcacaatatgttgattaacatcctaaa

SEQ ID NO: 389435 - DNA, 1541 bp, Cannabis indica
tataattatttattattaaaaaattgctacacgattaataatgatttaaaatttaaaaaaaattacaaaaatatctactaacgtaacaatatcttcactttcattcagccgcttggaaaaataaaatcaaaactgggatgaaggagaataagtttgctcctattgtcattcactctttttttatttaagattgtaaaaattttatctatcttatcttattatgacacaatttagcaaagaaagaaattggtagcgtttggactccacagaatatatatatgttcttttttttttttttttttggtaatctactattaatctatctgtatgtatgtgaatctattatctaagggaagatgccgtaagatgttattggctcttgggaaatgcatatgcacgcatctgaatttgtgaacacgtggtagggttagaagcattaattggagaaaaaaggcaggtattggacttatctgaatatataatataaaatacataaagaagatggagacaaaagggtcctttggggttttgtctggaacaataaaatctacacaccacttgtgcttctccctcctcaaggtgctgtcactgtgggttgagccatctccatcgacgactgctgcatgcgcacggtatggcccccctggcccactcaccctattcctactgctcccctcttcttcttaattacatgtggatgtgatttggattgtgtgccatctttttgttattagagctgaaattattttatatattatttttttattttacggtttattaagttatttcggtaatttttatataagttattatgtagatttgagttgcgatttaaattgcgatttaagttgtaattttagtttttatatgtgttgttatatagattttcaaaaaatacaaaaaaaaaatatattttaaaatataaaaataaaaaattattattttattattaatacaatatgctaagggccataagttgctaatttttagtaaaatattgctatagggcaccagtattacctaatgctatctattggtgacatttttcaaatggttattaatgacattttataataattattaaatttaataatgtcggagtcaatacttaaatgtaccaataacaatattatactttaaaatattggtgtcttttaacacttctattctcagtatataatttcttatttttatcttttataaatcttttttaacatatttattattaggcacaagtactagtagttcctaatatcaccgtcacatcacattttttacaaatatggttaataatattttataataattaattataaataaatcaaatcatcatataaaattagagatagaaattaatacagtgagaaattaggggagggaatccctcggcttaatggttaatagggtaatggtgtgaaacaatttcaatacccgaaacaagaatagaactggagtagggataatactattcacactatatgtaactttgatatagttttcttttatttttaatgtatatatagtataataaatatttgtga

SEQ ID NO: 389436 - DNA, 2476 bp, Cannabis indica
gctcctgcaaaggacaaggggaatgagaaagttggtgagggtcaaaacaaaatagctcccttacctcctcgaaaagtcgtgaatttatcaaactagccctcacagacacaaaaggccactaatgtctccgggtttggccgcccttctcctctcaaaggtatgttgcgccaaagaggccttgtgcaaatgtatctaagcctaagagaagaaaaaattgactgagtgattctgttaatccagacggtgggatagaagaataattctcaaaagatagctggtccactatagacctctgaaggcgccttcacacaaagtatgaaaatactaaaggagagaagccaaggccatgtggaaacaacctaaggaatcacttaaatgataaggcttatggatgcgaccttccaaatagtgacacaaaagagttagaagaataaattacttctctgactaagctcatctggaagggaaatggcgccctcttagatccaaaagatgaagacccaaaaccatgtgttaggcggatcaacaaagccccactacttaaaaatttcaaataccacaaagagagttgtaagatggtcatacggatcctaagacccacctatcaaaatagaacaaaatgatgcaagtaacaaggctgagcaatgatgccaagtgtctttgcttgttgttaacgctaaccaagttcacaaaagattagtggaagagatttactcctggatcaattaatagatggaataagttaaaatatactttttggaagtagtgtattgctactagagattgtgatatggaagtcgagtcactcaccaacatcaagcaatagccagcttgaagacctttattcaaaggatgatggaggcggtagtaaagaccaaggttagcgatgacatgaaacttgtagccgtttgattgggacttacagttggctccttgttaggggggagatgcaatgaaaaaggaatgagaccctgtccgagttcatgtccaaggaacaaggtatcatcaatttagaagatgctcatcaacaagcttttggagtccctccaggttcaactccttttgcatcttcaccagttttcaccccacaagttccaaatccaacaattacccttcctaaaacccaatactcatcggttgtctattgacattttacttccgggcatgcacctacaaacccattttccttggtatggagcagcacaaactagttgttcatcctaagatttttaatctcatggtgaacaagatttcatgagcataaactcactaagtaaacccctttctccttttcaggttgatggtgtgaggtcccaaatcgatggtgtgaggttccatgatctctcagtactagcaacgtggggtgccttattggtgatggtactattcgcgttgactcgccttcaccctctaatgtgatagaagagatcacttcattttgttgtatgtccatcgggacctactctggattgttctcctcttacctcacctaagatcttcgacaatgatcaccttcttctccagcgataggtgctagggggtttcgcattgaggcaataagttgagggttgtataggttaatccccacaccttaaagaccatgagagcatctagacattttatgatgttatatgtaaggaagaaacttagtttgagcttgtcattgccacaaatggcgccaaactattgatggttgaaactcgttaacgaacttaaggccacaaaattaaaattaaaacacaagatttatgattaagatgaaagtgtgaaaatttaaaaacttaaagaaatgtatagaaataatggtggaagaggaaatcttgaatttcttggagtcaagtgttacaataattatccaaccccttctcacatttgagaagagggaatttataggctctaatggccatgtgtaataccctataattaagaaatggattagcaaaaccctaattagataattattaatacttgaggaattatattattatatagttcaatatatgaaaattatttgattaattatgtgttaagaccctgttggtgagctaggggcattttagtaattatgacctgagaacggtaaaatgatgaaattaatttaattacgtgcttaataaaactatattattatatagtacgtttgtgttgtcttttcaggtgtgttctgataggttggcgcggtatagtcacaaccaggtatttcgggtcgaaccgggttcgggcccgaaatgcaaattggatcgaattatttggcatgttatttgataatgagaaatctgaattctatttgaaaataattgagcatgaaatgactaaattacccttgtatgaatgaatatgtgagaattggcccttggggcaaaatggtcttttgacctatattgatttacttgaattgaaaattgaattttatgaaatgaaatttaaatttctagattctctctctctaacccaaccctctctccctctctaaccc

SEQ ID NO: 389437 - DNA, 1547 bp, Cannabis indica
aaaaaaaaaaagatataaatgaatttttatgaaatttaactaattgtcttgattgtatgatattattgagaaataaaaatttattaattaaaaaatttcttgcgattatttttaatatagaatgaatcaatcatctattttagtatcttatcgaacacaaataattataatattcctctattgattaagaatttctctatccaactctaaaatatatttcactaaaaaaaaaaactttaatacatgtttgtgagatcgcaaaaaccacgagtagctttattagcatttttttgaactgaaatacaactctaagagcactcacatcagatgttttaaaatagaagatctctataatatttaaagaagtaaattaaaaatatattatatatatcagatgctctttataaaatttattatgcatgctttacatttatagaacattacttattgttttaaatatattttattagttgtttgggattttaatttactttttatataggaatatgtgaaaatattagtaaaaaagtagatttttagtgatgtattttaaagaagttgatatatggtgtaattgaaacttgaaaatttagaggtgaacattagaccacatccaatatttttaggcttatcctgattcaatctaattacatattggatgttagattttaccatccaatctaatccgatccaattaatttcagtcatccaattgatccaacatgttggattggatcgtaaatatcccttcgatgtattttatacatatttattgttttaatttgagtttattcaatattatagacttagtatattttggatcagatcggattcatctaatatttaggtcttagatggattggattagattggatccatccaaatccaaaaaaaaagagtaaaattttaatgttaattttgatatatacatatatattttacgtataacaatataaaatcttattactcatccaaattaaatgaaaatactaattacttcgattggatgttggatgtattagatttttggacactccatccaacatccgatccgatctaattggatattcaaaaataacatctaatctgatctgatcacaattggatattcaatgtttggcagtcggttacaattgaatcgatcaattatcattgaattagatgatttatgcacacccaaatgctacatatctagtaagtatatatatggatagcttgttttaaatttagttttgttttttttttttttttggtccttatgaagaaaagaaatgtattctattatagcaattttaagtgcatatacgaaaaaataatatacttttagttttccttgaaaaacaaaataataaataaagaaatatataattttgagttttgattgcaatttgttttattttcatcacaaatttttaattgttataagttttcttaatatctgcatcatacattcaacttttatattataatttctcagggtagttggggcataaatattttatcttttcagtttgaaaaaattgtagcataaatcacttttggagtgt

SEQ ID NO: 389438 - DNA, 809 bp, Cannabis indica
aaaaaaaaaaaaaaacaaaataccaaaacagaagaatctagaaaaacatccctaatcttgttttatatatatacaagatgtatcttaatttttattttaattaaatgcattttttagttgtatttttttcagaaaagccaaaaaaaaagttggtaacgacagcagacattgaagtcacatattataaacactttctatgtatgtttagtctgttattttcattttaagtgtcttgatttgtattttctccctcttggttcgaatataactgttcccgcctgctttctctttcaacttcttcttcatttctgggttcaaccaatggagaatttcatcccaaccatgtctgatgcattgtcaatccgtgagagagaggtcattaacttgtccaacttaaacatcgctcctccaaggcctgtcagtaatcgattgatctgtgggatattttccaaaaagggatacaaccccaaaacgcttaagaatttcattaccaaacagtgggtaggtcgttttgctgtagccatttcggactatgatgcttcaacagattcatacacagtttcttttggatgtgaaggagatcttaagagagttttggctaaagaaccttggcatttccacaacttacatatgatcctttgtccaccaagtgttctgcaaaatgctactttggaaagttacactcttacccctttttggattcaagtgttccgattaccctttcttagcaaaactgaagcacttgcaaaaatcctaggcaatatgatcggcaacttccttgaagtctttgaagattctctaaatgaagg

SEQ ID NO: 389439 - DNA, 1502 bp, Cannabis indica
ctagcattgaataggtactttgatttttttgttttttgtattttttttatatatataattttgttcaattgtgtttctcttcgatctagttttggaaaaaattaatctaggttaaaattatttgaattatggtattttttgtgaattttactacaaaactcgataagtattccacaaccttgatactggtttgataagaacttgatgcctataatatatttttctaaatatattttgcttcatttgctcgatggagcttgatataaactcgatggttttaacaaattttttttttttctgttttttgcaaatggttccacagccaccattgagttcaaccgcattaacatcaattccactgatgatatcatcgtgttatatcgaattcgcatgagcaagtaccatcaagtttagatcaacaattattgattctatcaatttgtcatccctaacctttaaaagactataaaatatcattatcaaacttaatcacattgtatgctgagaaaacccataaaaatacatattcaatattttcttttcaaaaatcacaatgaaaataataataaatagtaagagtttagggagaaaaaaaaagaacaatgatgtagaataattggtgccgcaatctccgtcttcttcttgctctctttgagtttctctctcaaattcgtatttcaacagttgctaaaagtgaactctaaaaatcctatatataatccttaaaaatatctcattaaaagaaagataaaaattcgaaatttggcaaaattcgcgtcctcaccgcgacggtagcttgttgtcgaaaaattcatgtcacgtgttcagattagtactttggtcataacttcttcaatacaacgtgaaattagacaattcaagatgtttcggaaagatattaatgagatctacaacttttatgttgagctttaagtctagttttgcttccaaagttataaaaatttacaattaaattatgtcttgtaaaactgagcttgcagactttcactatttttcatcaaaatttgctaaaatctctccaaacgactctaaatgcatgattagtctttaaaatatcctaacaaattacaatcacactaatcaataatttaaagaatcaatttaagaaaattaatatattaattcaccatatttataagaaattatcggcttatcaatgggtgtgctcagcatcacatgcatgttcaagatcaacagcaggtgaaaaagagtcagaatccctatcattaaacctatcacacttcaacatggcttgaatgaaatcccaataacagcatgatgtgaatgaaaagatggacatttgacaccagaggcagaagccagacccttaccatgcaccaaagggttaggctgagcatcatcattactcaaatcaatattgacattgatgttactggaaaaattaatgataggcaaagaagcagcaagagaatgagtggcaagcagagcttcaaaagtcccaagattggactctcattgac

SEQ ID NO: 389440 - DNA, 1171 bp, Cannabis indica
cacatcatcatttaaacaaaatactcgacgaaaactaataaaatgactaaatctcagtaaatataaaagttcaaatagaatttttaataagtggtactgttgtagattctaaggacaagaaatggtatcaaaaatttttggacaaaattactaattatactttttttcatttttataacccttgagaagaaattaattgctttaataactaattaattaactaccctttccaacttttgtccaagaaaatggaaagcaaaatagcattcacttatatgatctgtttaaatatataatttgaatttgatttgaagcttgagaaattcaaaataaggaacaacaacaacaacaacaataataataataataataataataataataataataataataataatcaatgtgataatgacattagattgtatcaaaaaaaaaaaataattaaaatctgtataatcgtaggcctagtatttttagattcaaataaattaataaaaccatgacaaatctatttgaactattaaagagttattagatataaattgagaaatatcatgattaattaataacattattatttttttttttaaaaaaaaaacattttttatttgtttcttaatctctaagatgaatgttcaattattttcaaatctgatattaaaaaatataagaaaaagagttcaatacatgctgtcctagaatttaagatataataataataataataataataataatatataataataataagatggggtcgttttcaacttttttattttttattttttaaagaaattttgttttatttttataaaagggtcgttctcgacattcaagtgaacattgagaccttgaactaattaattaatttgaattcttataataataattaattattcttttgatgtagaaataggggggaaaaaattaaatccttgtttgaacattataattcttattcttatatatataataaattaataagactaagccatattttatatatatatatagggcaagactatggtaggacctagcaaaagttccctaccagtagggaactttttttgaccattgattttagatcatgtgattattatgatgtaaggtgtatactcttacgataggactgcttgaatacgattaaaactttatacatattata

SEQ ID NO: 389441 - DNA, 1983 bp, Cannabis indica
taataaaaagaaacttaaaataaaaaatatgcaataacatcataaaatggagcaaccccatcacagaactcacctgtgaaactagttttgaacttatgaaccttgtgaaaccagtttcctgaaataacaaaaaaaattaaaactgttacataaaacaacaaaccaactattaaacacatcaactaaaaaacctatcacacacatcaacgaattacctaaagaaacctaaataataaaaataattaagacataaaaatcagttattcaataaaataaaaaggaaacaaaaattgagacataaaatctaattatccaataatatatcaaattaaattaaaaaactaattacttaaaaaatcaattaaaattttgagacataaaaactatttattttttccacaaagtaaacaaccaattaaatatctaacataaaaaaattggttatgcaaagtaattttgaattaattagttatgtcaacaaaaacgagttacttaaaaaaatacatatcctacatatgaattcttaacaaatgacttgtaaaattaaattgcagaaaggagttacattcaaaaactaattaaaaatcaaacaagaagaaactattttcatgaaataaataaattaaaaacaaacacataataactagttacttgaaacaatataaaagattttatcatgtagtttcaaattatcaaacccacacttaaattgatagaattcttttcataaaattctatggaaaaagtaataaaagattatggtaaacaagcatactatagtaccaacttaattttaaaaaaaaaaaagaagacattttattaaaataataaatcaaaataaacattgaaactagttttatcaaacgccataacataattaatcaaaacgataactttaaaactaatttctacaaaaatacaacacaatacatgctctagttcgtcatgctcatttcttaatgtgtactataataattttagttgatcaacgttaaccccaatatttacatatttagtaagaacagattcttatatgctaaacaaaatacacccacacaatttctgtcactatcttcttatcttttaactccaactgtttagctgtttctttattattgggccaaacaagcttgagattcattatagtagtatattctaaatcgatgctggtccccaacatcaccaccctatcacacattaacatgattttttaatctcactacgcggttatacccattctcaaactcgtcaagcatatgaactgaaacactaaaagactttataagcccacaaaataatcaaatcatatattcgtatgggttcttagtaaggtgttacatataaagatcaaatttaaagcaatcaaaaaaaatattgtaagtcctccttccattacatgattcctctctctcttataacattaatttttttttttttgtaaaaacaactaaatgcaataatatacatatatatatttatatacaagaaaagaactcataccatcaataaaacaaaaaaggttcaaacaaaatcatcaatcaactaaccctcaaccggctacaaataccacaaaaccaactatccatcttagctattaaaaaaagatgaacaatacaaaaaataatagtaataaagagacacgcaccttacagcaccttaaaactagaacacaatccaaaatggaatggcttgcaattgatgacctcagaatagtgtcgacaccaagcaagaagaagaacaaaaaataagagaaaaaagaagatgaaggaggcgtatatagaagagaaatgtagagaaaaataagagagataaaaaaaatcctataatggggatgcaaatattatacctgaagctatatcaactaagagaacaataaaaatagtgaaggagaaataggggtacttttacatgcggactataaaagataactcctattttaatcttaaaaattattttttctaaaaaaacataagaatcgaattg

SEQ ID NO: 389442 - DNA, 628 bp, Cannabis indica
aaatgagtattttcgtcagttttaaagtgacatatgaagattttacgttagtctacaaaattgacgtataagtcatagttgcaaatagttttttatttttgtcgtttctaatatgacacaaaaaataatttttatcattttgaaaccaacgcaaaatatacaatgttctttatgattttctctgtctgtttggaagtgacgcaaaaaggtttgtgccatttcaaaactgacacaaaaactagacataagtccttaactaaaataataacaaactttgctcaaataataataataataataataacaaacttaagtttagttttaaactccccctaccaaacaccccatagtctaatttacctatacttatatacttattaagagcacattaacgagaataaagtaagggtgacaatttaggccatgacacataagttagacacaaatacaactcaaaattttacgggtttcacatgacataaaaattttgtgggtcgtgttcatgttctatcaatttttcgtgtcacgagccgtgttcgtgtcaactatctaaataaatttaagaacttaatacgatacgatgacactaaactcaacaatttagcttacgaccctccaacacgataca

SEQ ID NO: 389443 - DNA, 942 bp, Cannabis indica
cttatatgattgatcttgagatagaattctttcattcggagaattagcaaatttgccactttcagtatttcaacataaatttagatctggaagtaatttataaagggcaatatataatagtttacctttgaagcatgagcaagagactatccttcaattttactactcccaatcacaagaaaaataaaataaagagtccttgccaagaaatagtcaattctcgtaaagtgtcctggtctctaaataatgaatgaaccaattgtgtccagcatagtaacaagattattacaggcatgaaataaaataaagcatatacatttgtggtggtttttacagttgattgtttaataaaagtggtgattcttttaaccctcttatttttgtccacctttaccaacaaatacatcccagcataacataatttggcattagaaggatacaaagcaacactaattaagaaagaacaatgagaataagtcttcaaaacaaaacatagaaatacccacatcataggcccaaattgagaaactcatgtatagttgaaacatgataataataatcattaaagtttctactacagcctaattagaatgtgtggcagcctaatcaaattacttgttcctaaacaaaatctatgtgtatggtgatgtgtggggtcgatttaaatattatatcaccccaaagcataaatttattgtatggtttggcaacgatacatggatcaaagagttcaacatcaatttgaagattattgtttgatatatgtgtacacaagcaatgaaaacagcaggtcatctgtgtggatgatgagggttttacgagtttaatttattttttaaatttaacttaagatgtaaattctgttaaaataataataatattttatttttattttattatatataaataaaaaatcctcaataatttctcaaccattttatt

SEQ ID NO: 389444 - DNA, 565 bp, Cannabis indica
taaattttataatttatattttatccttatggtcaaattcctaactcatttcttttacatgtggaatatatttaaaaagtgaaaatagacaacattttatttcacaataacaactttatttattattgactagttaagattttcgcttttcaaactttgacatgcacaaaataatgttctctaaactcttgaaaccattaacatttctctcaaactattgatgttgttagattcaagttctatctattttcgtttaaatttacaaacacggcaaatattcatgtattaaattgtatcccccaaactatgatatctaccaaatcgtaacctcaaactttgatatataccaaatcgtgttctctaaattttcatccacattaaacttctgtgagtaaaattagataaaaattcttgaatccagcaatctcaatagtttagaaaaaaatttaatagcctgaaaaattcagaaacataatttagtacatattaaattaaagaaggtaaaaatcataattagacttacaggtcaaatttagtattattattatgcatactctttaaaaaa

SEQ ID NO: 389445 - DNA, 856 bp, Cannabis indica
ttttttttttaagattatgatacagcggctgccccacacgatcgtaattgagttgataataatagggtggtgtcttgtttgtcgatttttaacaacgagaataattgattttgatgctatgcatgttaggtaattatatgtaaaaaaacattaagcatatatgatctttaataaaatgcgaaataaattgaacatatatgcattatgaacaaaaaatcgaaataccttcagctattgattttttaatcttcaattccatacgagctttgatctacaaaagaaaaccaaaagctagttagtatgggcatttggacttctaatctctctcttactctcttagatagatttactatattttacaaaatgagtagtgagcataaacaaagacaagactaaggctttactagccatatatgtaccgcaatcagccaaagagttaaaaagctttctcgaaaaagtttcatacctacgacgttttataccagctttgacaacactcacaggcccgcttcaatcattgatgagaaaaagtatgtcttttaattaggggaaaaacaacaaaaaaatatttcttaaaagatggtggtgacctctaccgtagaggatttattggaaaattgttatgctgcattagtaaagaagaagctgaggagtgttggaaattattttaccaggatcttagatctactcacaagtatgttgattaacaccctaaatatgaactttctaaaacgacgaaataaacacgtataaagttttaggaaaccttacattgggtgcagcggaattaaatgactcctccgttcagatctctaaccctttgtatccctttctgtagcagagtatatcaagatct

SEQ ID NO: 389446 - DNA, 907 bp, Cannabis indica
tgaattatctaaccgtgattgatattaatattgcattcccaattagtgtcattagtcagtttatgtcttctccaacaattcatcattgtgaagcattagagcaaattttatgttacttgaaaggagcaacaagacaaggtatagtttataaggatcatggacatacccaaattgggtatttctctaatgcagattagacaggatccaaggtagataaacaatccacttccggataatatgtatttattgggggcaatttgatctcttggaagtgtaagaaacaaaatgttgtgtctagatctagtgctgaattagaatatagagctatggtacagcctatgtgtgaggcaatatagatttatcaacttttggttgaattcgtgtttaagacttccattccagcaaaattttggtgtgataatcaacctgctcttcatattgcctcaaatctcgtgttccatgagcaaactaagcgcattgagattgattgtcattttgttcgttaaaaaattcaacaagttttgatctccacaggatatgtgaagatcatagaacaattaggagatatttttacaaaggctttgaatggggtgcaagtttattatctttgtaacaagctgggcttgattaacatctatgttccagcttaagggggagttagggacagctctgaggtgagacaaaggaggcagccaccttaggtcccccactggttagggcccccattttgaaaaaaataaagtatagtaagtaataaaataaataatactcttaatactaaatatgtgtcgcatgctattggtgatttgattaatttaacaactaagaggttaagagttcaaatcctagcaacttcacaatttcaaaaccctaatttttatttttgcctaaggcccaaattaacata

SEQ ID NO: 389447 - DNA, 808 bp, Cannabis indica
tttattccaactacattataatactctactaattttcttatatataatattttttatattatcccactaacctttgtgggctatactatgatcataccaattctttattagttttaatttaatatttaaataatattttcataatcaaactttctacatatatataatatgggtgtttattcagtgtgcaatttagtatatgttaaagttgtaaaacaaaaatcctaattagtttttataatttaagaaaataaaatattataataatagagaatatagttttaattgtgattggaattaggataaaaaagtgttaaaagttttattatttatgtatttgtttataacaccaaatttaacattaggaattttatttgcaccataataaagatacttcaaaatttaaaatagttacacttaaaataatttttaatatttatttaaaaaaataaaaatcacttaatacattttatttttttcaaattattttatattaatttcattacatattttaattttactttcataattttgttaaatataataaatttatatatttttgtattttaatttttttataatatttaaacatactttatttttgtttgatatatataatttttaagaatatgaattagaagaatttttttttttaaaaaaaaaattaatataattaaagatatatattatatatgtaaaataaaaattattgaaaattgttatatctataaatttttagaaataaaacttaggctatcaaatcttactatttaaattaaaaaataattatataaaatattaatttttt

SEQ ID NO: 389448 - DNA, 554 bp, Cannabis indica
aataagaagtattttccgcattaacaagagttgtttaatttatttatttttctcatgaattaaaaaaaatgataattagtttataaattttaaataattatttattacgtactaaataaaaatatctaatgacgcatacaataaaatatttaagtcttatatttttaatataattaactattcaaaaaaattcgttactacaaaaatgagttttagttacaaattttttcaatcaccaagaaaaaatggatgttatactaaaatgaaaagataaaatactttcaaacctttttagtggcagtaatttggaaataattgagctttcaactcataaaaaaaacactaacaaactcctataaaaccctaacaaaaatcgagctgcctcaacccaaaaaaactaaaaatacgcaaaaactctaaagaaacaccttgtcctctttttcctctctatttttatgtgtctcatagcctctggcgcctcaatcacggcggtcccatctctttttttttttccttacttgctttactttttgtgttttttttttttggttaaa

SEQ ID NO: 389449 - DNA, 635 bp, Cannabis indica
ttttttttttttttataaatgtgtaatttactatttcaaactctaattttagtattgtaaactatttaagaaaatagaaatgtggtggaaataaataatttaactaaaatgtattttttttaactacatttatcaataagctaagaactagtgagcaaaatgaaagttgataaatacctcaattcgtttacaaaagagaaaattgtagatatgattttatatatttaagttgattattttctttacatattttttattagctatgaaattgtttaaaggaaaataatatataatatgtgtgtgtgtgtgtgtgcacgcacttaatttgaatagtaaattgtcactaacttttgttttgttttttttggaaaaaattgtcactaacttctcttatcaaaaaatatatattagctactaactatcacggaaagcattatctaatataaattataaattaattatatatttatatgatattagcaactaactatcaagaactagctagcttaattagttgccaaagtatcatcactatatttatagaatattttttaatggtaatgggtattaccattgataattactaagaaaaataactataaatatcaattttaaaaatattaaattattagatt

SEQ ID NO: 389450 - DNA, 519 bp, Cannabis indica
aaaaaaaatagatcattcattggcagtttaaacctttagcgattttttcggtttttgattttttgatttttcgatttcgattccgtccgttattgttccaatggtgtttggtaggtctatttgaacacttttctcagctttctagattttatgctcaaccttatattttaagtactctttattataactagacctaagtaattaaaaagaccacatccacattttaatatctaggcatttgcatcttgatcatagtgctttttttacaagatcatttctagaaagagaaaatatgtcaatatccacttgtaggtaggatcatctgtacttgaacatatggatgtacattcaagggtggatatgagttatcgtaaaattcttaaaatgattactttagatatttaccttatgccaagaaatttgaaatatttgagaaatttcatgaatttatagcaatattgaaaaacatcaaggtaagtggttaaagatctcacgaactgattgttggaaattatttta

SEQ ID NO: 389451 - DNA, 1386 bp, Cannabis indica
aaaaaaaaaaaaaatcattcattgcgggtgggtaacctagtggaccctttcgggcaagtttcaagattaattttttaggtgaccgaattttgggttagagggcctgcctgtaaaactatttttttctcttacataaactttaataatactacaaatttacattttacataggatctcaaatataataatattaattattcttaaaataaaaatgttacatataagaagatatttttagccattcatttgcattaaaaatatttacatcaaatatgatgatacaatatttcgtgttgaaaatttatatgtatatatattattaagtttaatggtttagttatatgtttatatataattaggtatgtttatatataattaggtgagtgtaaaaaaaagagttgacccacccaatccaaacacgccaatccacaatacgtgaacgggcaggcatgagttcagtttttttcacttgaaacccgccaactcaaaacttagtcaacctacccgatattcacccctaatttttagtattagagaaattataactcaaattttcttatataattatgtacattgtacttatcacaaatactctacttacttttggaaacttttatataatttacaatatcaaaagcagagtttaaatatttaattggacgcatatttatttatttattattatttttatacgagtagttaattattttaaattctattttgaatatgtaaatctataactacaatataaattgttatataaaaaattaagttataatttctttatctggaaaatataacttaatatggaaaattgttatataaaaaattgttatataaaaaattgttatataaaaaattaagttataactacaatatggaaaattgcatggaagcttcatgtccctcccaaagtgcaccaactcatgtggcgtgctttatctggttgtttggctactaaggttcaacttactaccaaacatattcctctagaccaagtttgtcctatgtgtaaccaggtgcctgagaccatttaccatttgttggtgcaatgttcttttgcacggtcttgttggcatctttcggttctaaattggagtcatacgcctatggagtctttttgggattggtttagccacattctgctacaacactcatccacggcccaggaagaattgctcatggttctttgggcgatttggtatgcccgaaatgaggtggtttggcgggacaaatcaatgtcagcggcggaggttattctattggcaagagtagtccttaatcaatggagaaatgctcaacaaaggagaatggggtctctacttgttcctacgggttcaagagaggacttagagcattgggtgaaaccagttatgggaaagatta

SEQ ID NO: 389452 - DNA, 815 bp, Cannabis indica
cgatacttatcctttaataattgccctcccaagaacttaattctcgctccgcccctgccaacaattcatatcagagctaggcttgggctgaagcacatgagatttttggttataattacggcccacctacccaattgcttaaaaaaatatacataatttttagtaattttttagaaaaataaatatcttttaataaatgattcagtaattttttttcctatttcccatcctatttcaggccggctctggcttaacatcatactatataacatggaattttataattagttagcaacttctgtattattatactatatcaaaatatgtaaagaccatagataacaattaggctacagtgtcaatattctcagattgttttattatgatttgagcgttaacattagataaaatttctcattggcatgttgccaacgtattccacgacattttagatgttaaatttcattttacttttgatagtttttaagcatgaatttttactcattattgatgattgtgttacactgtgttgtcattctttctctatagctagttttggagagtgatttctcgagtaaatctcaatttttttttttgtattctaatgaagttataagtttccataaaaataaatatgtaataattaatattaaaatataccaataataatacaatgttataaaataatataaaataatataaagtagatgagaagaaagaagaagaagataaagagagaaagagaaagtgaatgagaatttctgagttatttatttcaatggggtgaacccctatttatacaaatacaagagtga

SEQ ID NO: 389453 - DNA, 687 bp, Cannabis indica
aaataagttgattctctcactcaaaaagttcgaagctctgaaagtaggtagtagtagaatagtagtattacaatttccaaattctaaaagtggcacatgcacctccatagatatcaatttatcttattacgttcacatgtattatgttatatatagtaacagcttagctgtattttccttgtaataatataaataaataaaatagtcattcagcaaaataaataaataaataaagtagtcgaataagtccaactccacacacttggacactgctaattaatcacatgcacgtgcccttcgcatgctggtaggaccaatgtccaatctatcccatcatgaaaacacatatattttcactacaatattctttgatttttttttaacaaattctttgatctttctttgaatatgcatgcattgcatatttagtttcattaattgccaattgatgatgttaatttctaacttggggcgcgtttagaaagctatttgagaattggaattgaatgtaattggaggtaattacacagtttgacgtgtttgtgtggtcatgtaattacatataactgtgtaattagaggtaattgggaggcctcaattactctctccaattctcatacccccatgagaattgggtgtaattacataatgtaattacataccaaaataaattcaaattattttaat

SEQ ID NO: 389454 - DNA, 1660 bp, Cannabis indica
ttaattcttcatactccacgagtaccatcttattatgggattttataaatcgtacacaagaaaatgtttgaataattctctctttttctcaaattggccctcctttgtcccttaggttctgtccctatttataggatttttagagtgataggtattcctttgggatcttatccctgtaaccgttcatgaaatgtggacaatctttacgtttcatatttacatcagatgagataataataaataactgctatagctactttttgtatttatttataaatagttatgttgactatggttctttatctcataatataaacaatccttctatgtagctttgtctaaaggtaactttttgcgcctaagtagacactgggtaatactttttgcgtccttctataaatgttaaaagaagcaaacacaagatactgagatgaattatgttggctgaatttccattagtctttcaagatactgataggtatgtggatcaaagagctgtaagctcttaaataattcatcatctaccctttccaacatactaaagttttgttgtgtattttgtgtatcctgagatgggccttttatgttgatttattcatcttgctggtcttacaagatggtagttattattcacgactcgtcattttctttaaaatagatgaatttgaatatctttacaaaatgtattgtctgaggcgagtttctcagacatattatactactttacagcacgagctggtttattttctagcttcttgatacgtgtcataaccatatttagttcttgaaatatgggtataactattgtcccctaaaaagtgactttttaaaaaaaacttaaaaaggactttttaattaacaaagggtaatgattgcattttctttgtttaatagaaaatgcatgcttcatttttgcaatttagtactttaagaaaaatatcatttcaatatttattactctgaatcttcttttctcaataattcccatttgttcgatcaattatcattacgatcgaataatttccattgcttggatataaagtctaaatcttccccatattttgtccattaccgttttacagagctttagagaaattcaaattctagcttttattctctttaaaatttcatgccctctttatctctagcatatttcttttcagttttcgctagtcttttccctgaatcacagaatcgttaaggaccaaactctcaacaaggatttttttgagaccttctttctctcaacaaacagcaagtgtatttttgccatttctcttttgactagtctcttcttattgttttctatatattttttcatcgcccattacttgtatgggactatctttatatggatttttagcgacttagggctagaaatttagggttacatgattcgcaggtcgtgagttttcatgttcaacatttctagaattttgggacatttttttcttgcaatcaaaacaattccccattgtgatcaagattatgcacacccagaccttgtagaatctaataattctcaattacaagccattgtttttaaaccccatacccatatatctcaatctatacttgagattgtttatcgagttctttggcagctgcatattttttagagcttaggaaagtgataacagaataaatagcaagacaacaa

SEQ ID NO: 389455 - DNA, 821 bp, Cannabis indica
ttgtggatagacaagtgtgaagcaagctttcaagaacttaaacagcagttgattatagctttggtgttagctctaccatcgaataaagagaagttcgtgatttactatgatgcatccagacagggtatggatgtgttttgatgcaaactgattgagtaatcacttatgactttcatcagataaaggaatatgaacaacgatagccaactcacaattttgaactttacgcggtagtttttgcaagatttggcagcgttatctctacggagaaaagtgtaagatttacacagaccacaagagcctctaatatttttttactcagaaagatttgaatatgagacaaaggaggtggttggaactggtcaaggatttatattgtgaaatcctttaccatctcgggaaggccaaagtggtggtagatgccctaagtaggaagggtcccgtgcaaatatctaccatgattatgatttcaccctagctagcaactgacatggtttgatcaggtattgagtttgttgtggggaaatttaataatttgatattacaatctgatctgttagacaaaattaaagcgactcaattaactgattcaaaattggtgaagatccaaaaagaggctttggctggtcaagctaaagattttatagcgttaggtaatgggatgttgttgttcaaagctagagtgtgtgtattaaaaagtgtagagcttagaagtgagatgctcgaggaaggtcctatcactccttattcattgtatacttttgttgggttgtgtgccctaaataaaactcatttcaatataatcagatttactatttaat

SEQ ID NO: 389456 - DNA, 735 bp, Cannabis indica
tcatcaacatcaagcatcatctttgatttttagattgaaggtattggtaagttttcttctctttttcttatacatgctcttatttttctttctttattctactctcaaatctctctctcaaattcaatgttctttgtttgttttattagaacagctcctagtttaaggtttaacagttggagttttttgtttgaggagaagaaattaaatgttaaatttgcttatcgtttgagttctaacaaagtagagaatcaaagaaatgtggatgaaggaaaaggaggaggcactggattcaatatttgctttaggtgttcttttatgctatgcgaagtttattttaattaagttttcatttcagattttggtttgcatctattactgacctattatctttcatttatgttaatgttcttgttttatgctttatcgattttgttctgtaaaaaaaatatcaaacagagcaatttcttacagtgtaaaagaatttatatatacatttctgctgcatctacccatttctttgattataaataaatttttatatatacttacatacatttctgatattcattgttgatgatggttgttgaccaaaattaataatatctaactaagctttattagataaatgaaattggttaattaaggagaaaaacaagtattaatgtgcttacaaaataaatttgattatattttacacaaaaaaatcaattttggcggtttaaaccgaccaaa

SEQ ID NO: 389457 - DNA, 738 bp, Cannabis indica
ttacatgtgtaggtaaagaaaagacaaaagttgagcaccagtgagcccaggacttaaagatgattgtacatatcaagatagttaaacctggagagtttggcctcaggaagacttaggcctttattttatagtcgctgagcgacatgtttataaaattattttgaatattattttaacttttaggacgggatcccaacttttatgtgaggttgtatatttataaaagtttaaagtttaattaaaattttaaatttgatacaatttttgagaaacttttttattcgcaaaagcatgcacaataattagaaaatcactgtagtgtgcttaagaaagtaaggcattacaatttgatatcagagccaacaagttgtttacggaagaccgtcaagatatgtacaaccattgtcggagacaagctcgactcatagttcagtaagcttttacttgtctagtaatttatttggttagaaaaacatgataataagcatgttagtaatacgttaaatgtttaataagttgcttaaaattccatgtatgcgatatttggattatatgtgattgttgtctgacttacctagacttttgagttcagaggctaagtcctgtaatatggatgcctgacgaaacacaaggagtcagggtaatatggtagagaccgaaagaggtcggggaggttgaaattctctacacccccatggacccagcagggtcgtgttggaatttattttaccaggatct

SEQ ID NO: 389458 - DNA, 867 bp, Cannabis indica
gggcataaaacccaacaaatccagttccacctccttgcccttataccatccttcttagggggaaagaaaaatcaatggataagcctgggccttttgaatatcctcatccacctgcctttaccatccctgagttgccatcacactctcttcctcatgatcaaggggtgatgaacccgttcttggcccaatcatatactttcactggtttgttaaattccactataggtcctagttcgtttttaggatcacctatttcttctagtgtccttatgattcctacccttgttaacccgaacctcaccaatcccgattcctctcattttactgagtatgtttaacccctcaccttatggctccgtgcctgcccagatgaccattgcaccaacggattctactattgtctctgatgtatctgacttccagaatcctgaggtcctgctggctgtaagatcacttgctgatgccatcccttctcttgacttgggaactaatgtggaagggcctagtgctccttctgatcctaaggtcaaaggtaagggtcttgcttgtgcctcaggggtcaagaggcctacttttcactctcatcaagtccaagttggtggctctcttcgttcacagctgaagcaagctaggtctggggatagtgattctgttcctgcttccacaactttaccatctaaacaggcgggtgctgttgggcacacccgcccagaaaaatgactcttattagttggaatgctcgagggctagggaactctcgagcattcaaccagctttcccttttggttaaagttcataggctgttggtgttggaaattattttaccaggatctatttactatcatgtatgttggattaacaatctaa

SEQ ID NO: 389459 - DNA, 563 bp, Cannabis indica
ccaagtgaacttgtgtaagaaatgtagaattattctcaaacgatttttaagtttttctaaaacaagattcactttcataatctctattttaagaatccaaagggagtgaagtttcttctctctcctcgaagtagtacgatattccttctcagaaggataatagcaaatgttatacactggtaatagcaaatgtgaaatctattaccaattaaattaaaatacataaaatttaatgtaagcattagcatcaacaatgtatcattatctaaaacgatcaaaggtttgagaagtttcttcaggagcgaatgaagagagtagcgcctctgcaaacatgaagttcaacattgtcaatccgaccaccgggtgccagaagaagcttgagattgatgacgatattctgtattttaatattcccagtttgattatttaattaagtgattaattaaatgcgcaataatgaaattagtactgaaaacagtttttccgtagttacagaaaacaactctgtaactccagagaaacccagaaaaaacaaacagtgcataaaagtaaaaacacacaag

SEQ ID NO: 389460 - DNA, 1478 bp, Cannabis indica
taagcctcagggcgaaacaactaaatgaaagcagaggaatcattcaaagaaggtagtctttttaaaattttcaattgtgttgtggcaagttaccaagagtctaaactctcagctcacttgggggtggtatatacaactatgtacccctaaaaattgttattttatattttgctattttattttttgaagtgtgaatatgcatcagtgtgggagtagaaagtacagcctgaaactcaaacctcgaggaaccaagagtaagccgatatcttaccacatttaagattaataattcaccaatcaatattaactaaatttggaagtagagacacaaactgaaatccacaaggttcatgcctttggaaccaaaacctcagaaaaccatgagtaagttttgttatcttaccataacttaaaattaaaaactcatttaagttaattcaagttaacaaaagaagttccgccttctaacttttagaatgagttgaaaaagaatttttttagagtaagaaaatcaaagtccgaataatccaagtctttttagagctgtaacctcaaggttctaaaagtaaattagctttatgaaagttttcctaagtgtataaacacgcactaccattcgaaggtgggggtaacaatggtcgggttacttcgggttgattgggcaggttgatattattttcaactcgcctaatataaagatttggcgggttatattttcgtcaagttttttagtttgtatatttcaacgagttatattgatttggttaggacgggttattcgggttgggcagtttacaaaatatcatgtacaaccctactactgacagctacagtgcgcagagacaacacatgcatgccaactgtcggcagcaagtggtccttgttgtacgaaagatcacaatcccatgggttgggcctccattcgtggcccctatgtcaatgtattatatgtatttaccacattattggattatgttacacgcaaaccctaacaagttctgggtatgcccatacccggatccttgcctataaatactatattattctttcatgtaaaggattagaaattcattactaaaatactactgcaaaaagttagggttcttaagcttgttaagaacattggtgtacttcaaggctacttagcccaatacgattgactcatggactagggttcattaatacctaaaccacgtaaaaatctctatctctatttcatctacttgatttatttcttagttctaattttattctattgagtttccgaaaatctcagtaaacagatgatatttgcaagttggtacaaaaaatttacccaattttttttacagcaatttgaatattttgatcatgtgcaaaaacttccccattttattattttggcaatcatttttaatttatttcaatagttggtaaaagctagaaaaatagagatttttccaattgtgtataaagtgataacttttattcttacactt

SEQ ID NO: 389461 - DNA, 1023 bp, Cannabis indica
attggtcctggccagtcaagcctgtactatgcagctgctcatggccagccaagcctatgctgggtagggcctggccgcccatgaccccctagttggcttgtgtagccgatgtattgacaagaggtagatcacgctagttgctagagttaggtcgatcgagctacctgaagtgattcgtctcacttcttaaatttttattttcgatatttccattgattccttaccctagtagattgaagattggcctttgaggtgctcgctcctggatgcctcgggaattgagttcactcccctagtcggtgagaggtgcttcactagatggctggcctgtcaaagggtgactaatggtgattgttggtgagtctgagatcccaagctagcaccccagacaactggttgtcgagatctggctattgttgacattagacttttgttgcaaggcctaccctcttttgggtaaggaaaagtatgttctggttcctaaagaacctaattggacagtttgtcgatagaccctccctgatctgtcgactagtcttccttagggaggatctctgatcagatcttggcctcttccaactgttcttcattgaacagccttattaggttgctgacttctcatttgtggttatccagctctaccttatgagatcataggatgtactcttggtcatccatccatctcatgaattcgcatctctactgagcgattacatcgcaattagcagcgcgtggctctatagtttggatggcttggcagatggcctctttaataactcgagatcttatcccaagtcaacatggggctcaccaatagcaggctcaccaattctttgtcatgtctctctagtatagtatcgaggatgaggtccagttactatgcttgggggttgttccccatgggtccttcattcaatgggaggcacttgcagagggtcttctcttggaggtaaaggctgattcttcagacccatcaggatgtttgtgtcaacctggccagctgtagtggccagatttgtggtg

SEQ ID NO: 389462 - DNA, 1065 bp, Cannabis indica
  modified_base (890)..(890): a, c, t, g, unknown or other
ggcttaataatattgtattatggataatactttatgtacacatagattattaatatgcaattaaccatagaaaatagatgaaaatagttaaattttaataaaacgtaaagtttataaattttatcgtcaaaatttaaattttaagagctaattgctaggaaagttcaaatattaaaagttattctgcaatttgatctttagattagatttgtacttataacatcgtccaaatttgacttgaccatgcaagcttgttaaaaaataaaaaaccgtgtccatcgtaccccaataaaatgtgtgtcgaaggcagcagaaaaattattattagtgcttattgtttgtaattagacaatataaaaatgtcaacccgtccgccattatgattataaaattataatatatatttgaactaatagaaatattcaaaggtatattctgagtataaaaacgtgggttatttgtctattgcaacgaccattaagattcccttatataaaaatgaataacttgatttacttttttgaagttaattattttattaataataatgcactaatagggtatattcctacttatatatagttctttactaaggtgaaggtggcataataggaccttcctcttactttagtttagtttaatctatatatctatatataaaggataaatatgagcggtggtgtggtactttaaaattgttttaatgattcttagctattttctcattaattctcttattttattaattttaatttaatttacataaattcttccatttttcatctaattttctaatgaaaaagaaaactaaaattatttatctataatacattactcgtacattttaaatttttgatcaattaataataaaaaaaaaaaattaaaataanactcaccatacatgtatatacataagtatactagcaaaaaattacgtgcaaggcacgtatactaaattttatgttagtttttttctacgttattaaaaagtgatacaattaaaaataaaatatatatattattagttattaggttcaacatcattaccctgtgttcatttttaag

SEQ ID NO: 389463 - DNA, 889 bp, Cannabis indica
ctaacaaaatttagacagcatgatttagtactatgttaaaatttaaagactaatttttattagccttattattaatttattattgaatgccatcactcccaatcgatattttccaagatggtcagaaatttttgacatttggtcgaaaattccagagaccttgtccgatattacagagactattttccaaaagacatcaaaacaattccaccatttatcaaaatgccattcatgcatcaataatgctccttttgctcatttttattctaataaacatccaaatttattgtgtttttttccattttttttaagaaatgtattgttttcatcaccccaaacgaacaagcatcctagtaatgttttttttttacgatttcaatttatttatatacaaaatgattagcaaaatgttcatgtttttgggtcattaaattgtcaaaactagttcagtttgacgttcagaaaagatttgtgttaatccaacagagcttctagtaagttctttgcaagattccaaaagattgtctagggcaggatttggttgatcacttctggcaacaatattactaacctcttggacaaacctaacaagggtaccttcctgaaatctttcggaattcaccttgaataatctcaaccaagccttcacagagaagtctggcaacgcagctaacagaccttgattctgaatgcaagaaagggcagcgacgtagtcttctttctccaacttcatgcagagtctttctttgattagggatgctggtggagttcgatccgcctcgaccaagtagttccatgttatgtccagcaactctccctgaaaatatgaaatggttcacagcaattctaactaaaatataatatatataatttatcagctttttaaggg

SEQ ID NO: 389464 - DNA, 897 bp, Cannabis indica
tcgtaatagcaaaacacaactctgaccaagttatatttatgcctagggaagaccggtgggcttagctggagacaaaagataacttcctgcagctataaatttaaaaacgagaaaccttgatgttttaaattagttcacaactttatcttgtaattattttttttcgtaaaatataactttacaaaaacaagaatcctaaaaatttgaaaaaaaaaattgagcattctcgtacaccatacactctatttgttttggtattatagagaatattttagtttaatattttttttttcacaattgtgtacgttgtagttatttaagatattttattaaattgagaaaaatttaacacaccaaaatttaataatcggttgtacgagtatctattttattttatcaacgtgtaaaataaactatttaaacattgttttctattttgtaaattatatcaaatttttcaaaattttacattaggaaacaatgaatttttttaattttttttagaaactgaactctttttaggcgctcacagactctgtcacccatacccccaatgtcgccctgcttgctttcccccactcgcaacaccacctcaagctcaccttctctctcatgaatggattcgtttagcagagcatctcatgccctttcgcacgacgccaaccctacttgcttcccctcactcactcacatctcatctcaggcgtagagaaatattttttttttctttttatgttcttttaatctattctttgactatagtccgtaggtgtgttaatttgtgttttactttttattatcgtataaataatgtttccataccttttatttattgagtgtttatgtagcgtttggtaatatttttatttttattttttaattttttaatctacaaaa

SEQ ID NO: 389465 - DNA, 4302 bp, Cannabis indica
tgggtgtgtcctctgtccatcgtgactgaggatcatttaaaagacttggagaaggtgggtatctgggcagagttgagtgtttcctccctactccaaatcaccgggcaacaagtccgagggaaggatacgtgtgcttggtcaagtgcgcacacaaaacaaggggcgatgctcctttgctcttgtacttcaaagggattgcggactactatcatctttgtccaacccagttcacacccaagggaatcaagtatttatccgtccttttcatcctatacgctattcaaagatgggatgagccgtctctgcacaataccaactagctctttgatttgaagtctacactaaagcaaagcaggtcagggtacttctacttctctgagttggatgaaaagtggctgaagggcattgtggattcagaagttagcaaaatagggcattttgttaacgagtactacttcgggactggcatggagactgatcatactcgatttcaacagatcctcgtatattgccatcctcccttcacgctgaggcttatggaaagggctcagaaaaattctccaactgctagaggctgctcggaatatcactttgttgaccacagaggccaactttgtgaagtacaagctttacccaacagactttataccccagaccgtgaaggagaagaagaagaaccgagccaaggggaggatgtcgagcaagagaaagagctcattcaactgaagcgtgaggctaagttgaagggtggtacagaagccaaacagtatgctcaagaatattcagagcaggagaaagaggctcaagaatatttagagctggagaggccgcgcaagaagaagaaaactctcccgtccgagcaggtgccaatagaacatgctactcggattagggaacctggtgtgcctgctcggccatcgactcctgttgagggaaagggaaaagtcgtcatgaaggaccaggaagactcttcagacgatgatgatccatccgttattgttcaggaaaatgctcccgtcagcgtgcagagtacttcaacttgcatttatgttgttttatgtcttcccatattttgtgtcttcttctgactgtattactttatccatgcaaaaatgtcttagaagatgatccaggctttgaagaagagagtaggggatagctcgggcctgtctcctccagccaaaaagtctagaggtggcgaaactccgtccaaggagaagatgccggttgatgaggtcattgacctctatgaggagcgtcctgctgtggacccttcaaccctgaaggtttctaagtccaaaagttcccggggagggagttcggacgggtctaagcaagccaagactggatctgagcaggtcaggagcggatccgaataggttagggcccctgccacaaccctagcgctgtgcacgaaagctaggagaggcaaagacatgcttcatcattacgtggctcgatcgcttcccgaagtgagtgaacacctgactggggcggatagtgaattgtccttagagcttgtcttaggaggagtctagaaggagatttctcgagtaagttccctatatcctttttctttcattattctttgaatatttcaaaattgaacacattttccgtacaggttggtgtgaagatggcctatgcctactctcgagccaagtcggccgctgtcaagaatcttgccacatccaacacgatgcaaagagatgtggacttgaccaagaaggccgctgaagatgcgcgggcccagctcgaggtcattaggaaggaacttggagaggcaaataagaaaattcttactgctgaggccaaggttgtcgagctgaccaaggagctagaggatatgccttcgaccgcacagcttgaggcggacaatgtttctttgtcctaagaagttaccagtctccaagatgagagggagggtctccaaactcttcttctccggttggaggaggaggccaagaacaagaagaccagggaggaagaacttgaggcagaggtcggaggactcaagaaggagatttagagccaatagtccaagatggagaagcttgagggggatgtggatgccttagagacagtaggtcttgagatttcttacgatttctggaaagccgatcccaaaaggaactttgagtacctcgacacttccaaggacatgtgccttaattactgcatggctcatgcaactaattagaaccccgaggcgactacttccgatgctcccaccgaccagaacattgacactccttctatccagaccgatgatcctttggttccttcagacccagtcgatccttaccaggagcctgggattccttctatttgattgcctctttatgtttcttttttgtatatgtctgttcggccagtaggccttcttttgagacaaagtgatcagccaaacgatcttttaacttggaatatattttcattttcggacaactggctgaccgagcagcttttaatcctggatttacaggctttgttatccttaatgaatttctttccttgttatgatcattgcgcaattgtgttcgttttgttttttttttatgcttgttatttgtttttacgaaatgctttgtatgggtataggtacccccaagtgacggagcagacttttgactcttggtcacttgcttttcacaaggatgcttttttatctgtttgggtctatgggtacgagcatacctttgtacgcacttaatggtaaatttataacttgctaatagacttgacacaatttgaatttatataatcatagtttgcccagaatgcaacttaagcataaatgttcttttatttcgtacttaagatggtcatctgacctggtacttttactggagtattttcttaaatgtttcccgttccaataccttggtaccagaacgagttgcattttttcatcgtacttactcagtttgtatgcaactgattctagaacttcaaccacttgatatggtccctcctagttctgtttgatcacatctgccgtgctatctttggtgttcaagaatacccttcaaagggccatatctcccgcaaagaatttatgtgctttcacttgtttgttaaaatacagagctatcttttgttgatggggcactagttttaggattgatgtggttcatttttctttaatctcatcaagtgattctgcaaggagtgcatgattaacctcttggtcatatgtcaatcttctgtgggatgggggttttagttctacgggcagcaaagcttcacaaccatatgctatggcaaatggactttttccggtcgatgttttctcaattgtgcggtaacaccatagtacttcagggagttcatccggccagtttcctttagcatcttcaagtcgtttctttaaagtgtctttgagtatcttgttgagtgcttcgacttgaccgtttgcttggggatgtgctactgcggagaaactttttatgatcccatggtttgtacagaaatcagtgaagaattgactgtcaaattctttgccattgtttgagactatcttgtacggtaatttaaacggacaaattatatttttcaccacgaagtcttgcactttcttggatgtgatggttgtcaatggctcggcttctgtccatttagtgaagtaatcaactgcaaccactgcgtattgttctccacctttgcctttaggtaattgtccaattaagtcaattccccaaatggcaaaaggccaaggactttgcttctaagttagttcgttggtcggtgcgcgaggtatctttgaaaatctctggcatttaacacaattcttaacgtaggcctttgaatcttcaatcatggtcggccagaaataactttgccttagaattttcttggataagctttgcccaggtgcgtggttgccacagaatccatcgtgtacttctgacaaaattcgtgcagcttcttcttgtgtaacttatctgagtaatggcatggataatcctcttctataaatgaccccatctacgatgatgtaccgtataacctttctcctcatttttcgagcttcattcttgttacttgggagttccccagtgttgaggtaggctgctataggcgtcatccaatttagagatgtgtcaatcatttcaatctcttccgtgccactgatacttggtttttcaaggaatttgatgggaaatagattagcctaatcatttaaattgatgctcgcaagttgggatagtgcatcagcagttgtgtttttttctcttggaatttgcctgagggcatagcttttgaattatgcgagcaagtcatgtattttgcttaaatagg

SEQ ID NO: 389466 - DNA, 1208 bp, Cannabis indica
gaatgacttttggtcaacagataaggcttggctggaagtgagaattgttgcaccaacttaaacttgcaaggagagcttgagccttggtaaaaaggggggaggggcacctgagatggatcgggaaaggcttgtaagcaactggttggggccttctttaagtgcagctccgagacctgttttgagaccttttaaatctatcgctgcatcaacacaaaggcaaatacaattcggggcaatgactaagctggaaccatctgcagggttagaattttgactgtcttgtctcacatttggggtgagacctttagcatttaagtgcatagcttccctataatcctgcaaaagtcttttaacagaatcttccacatcaaaaaatttagttaaggtattgttgaagagagcattatttcttgcatttcaaatttgccatagaataccaataagtaaaataaaatcatcttttctaagattttctaaaccttggagataaaattccttgacatcacagtttttgtaattgaaataaaaaagttttgagggaggaatgcttccaaactgatctagccttgggacaattcaagagtgcatgtgagactgtctcgacttgacttctacacgagctgcaataggggtctttaagaaaatttttattgaaaaggttcagtgcacaagggagaatatgcttgaaagctttccaacagaaatgtttgatttttggagggatttgttaggtccagagagatttccaccagtggttgaaaggaaggggatttgaggtagaaggagagttggtacaggaaaaggaattggcaaggtagtagacaatattaacagtgaggacaccagagtggtggtaagcccaaattagggagttgatgagaagggtcaatgggagtttggaggacagcttctgcctaataagagggaaggtaatgagaagggtcaatgagaagaaacgatttatctttgggaactattagctcatggatggcaatttttatgatattgttagctattcttagtgtactaataataatgagaatattgttaatagtcttgagtattttattaataagtaaagggacttgcattaataatattaagtcttggagtagtaacaatggtattatttggaattaattcacgaccacccagaaagacttggacaggattactcaagcatttaagttgacaatgatgttgtgaga

SEQ ID NO: 389467 - DNA, 2547 bp, Cannabis indica
aaaaaaaaataaagacgaacttttgctgaaatattaatggtcgaagtaatgatgatgtttttgctcttttccctgctagcaatggaatcagaagaataattaataacaataataattcaagtattatcagaagaagaaattaataaaaccacagtaataataactccccacgtgactgacaataatagcctttagtaaattattactactgcatgaagacttgtgtagccaaagtctaaaaaataaatacatatatacagtatatatatttgtacatatatgtcagtgtcacccctcaattatttatttatttttggggttgtcggcgttttattaatttatttttattaaaaatgatcttttaattaaaatttgaattaattaaaagtgttgtgttgagaatatgggaagaaatgaagcgtggaggtgtggcaaatgtaagctgacaatgcttagatatatggaaattaattattattaatttaacttaattattattaattccttattaatatttacaacatgggacactacttttcaagggaaccttccctttaaacagtcattttcaggccgtgaatctcgttcttttgcttcctctttagggtttatttttttttttatgtattatcagtttattgtactcaatatatttgtagataattttttatagtacttgttatatatactaattcggtaacaagaggggtactatatataaataatatacgatcatattcttcaggagcttaaaactactttttttatccaaatttggagtttgtactatagagaattaatatatggattaatacataaatatatatatattgagggtaggcaaaggtgggggtaatttgatcaattattatattaatgattatgacttattgctgttgtcttattgaaagggatagaattgatttgtaggaaaaataaaaaagctaaatatataatattgatgattgaaacaagagatgattgcattattaagtttattagtccaagcaatatatttcaaagccccatatatatatgaaaacagtgcatgtgcgccttctctcaatgagttttgatgctgattttttttaccatgcatgtatatatgcaaattgaaactcaattctcatttaatatacatatatatatttattatccatatatatatatataccttcttatatatcactccattaaaaacgtaaataatatttacatttttagtggtaataattttttaattattgtgactacatatgtcattttatagttataataaaaaaattaattttgtcatattaataaatggataatatttaaattcaaattgttgttttagctgtaattaatatttttttcgaaattaacatcttcttgataatacatatctaactattattaatttttcactaaaaaaaacattacttttattgtaactgtttagtcataacataattttttttataattaaatttaatttttattcacaataaaaaattacttgagattaaaatataatatttagacacaaattgtcatccgtcttaattacaataaattatattttttatgactaatacttttaactatgaattttttaattagtcaagaataataatttataattagtcagctttaggctcgatacttcatataaacaatataaatataaataatataaaatggttaataagaaaagaaattataaggaaaaggaggtttgaaatatatattggaattaataaaaatagagatctagaaggagaaagaaaggacatgcataggttgcagatcatcacatacattacttacttcgatccaaaggtccaatctctattgatcgatctatatctatacatatacattatatatatcctcaacttgtaatattggatcaatggaagttgattgatcgaaccccactgttttaattgatagtgcaatatttaatatgcctgctgctttcaaaatatgccccacatttaatttatatataatatggcaattagtaaaaaaaaaatagaatatattattgtggctattcttttctgagtggatattataatcctaaccaaagaaagtttagagatatcgttgaatcacctggatagtgaccttagtggctcaataatcaacatcatcaatatttctctctctctctcttttacattaatcccaaaaacacacacaaaagttttgcgtgaaccaacaacattttccaggctgcagtaactagctaatattgtatattttcatacattattttaagacgacgtagtacgctgcataattaatgcatgttacaacaatctaagcatatatgcgtgtatatatatatctactcatattgatattgtacctaaagctgaccggtataaggtacgtaattaattataaacactcctactctttatttaattcaatctgcattattttgattacaatagtaagaatttcacattttggattcaatttaattcgcacaatagttcaaattcaatccgcaaaaatacgaattggatcggttattttaaattagttattttt

SEQ ID NO: 389468 - DNA, 546 bp, Cannabis indica
gacattgagaatgtcgggaatagacaaaattttagaatttcctaaaatacccctaagtgcctttttatccatttagtgtgggaggggcaaaatggtcatttttcgccataagtattttgtcctttagtggaattcttaattgttttaatcagatttttaggttaatattaagctgattatttagtagataaaatcaattctttttcccattattcaaaaatagaaaaaaatcaagaaaagggttctctctctttgtctctctctttcgaaaccccatagaagcagctagggttgctgcattttttcttcatttcaagcttgatgcagcaaggatagagtgtctttgatccctaggtaaacttcttgtaccttctcctttagtttcttaaagtgtaagaaaatggtttatgcatgaatttgagatatttgttactgttgttgctgtagtacgtttaaaatcacgctaacacgcctatgctagttagggtgttacaatttggtatcagagccaccaagttatcttccgaagatcgtcacgacatgtac

SEQ ID NO: 389469 - DNA, 1731 bp, Cannabis indica
aaaaaaaaaaaaaaaaggcttgaaaaacaccaacagatgaggtctgccgttttggaaaaacggctaaccatttttggcaagaaacaactaattgttttcttcaaaatagtaggccgttttctgcaatgacaaaaatttaaaattttgcactctctgaaatactaccgaaacttatccaaatcattctaaactttacagggcacatatataccaaacatacaacaatcccaatgaaatagaaattaaaaatgagctcttaaatggaaaacgccattaaagctcagactttaaattttaaaaagctcaaatggcaacccatacataattttatgaagtcaaaatctccataactactctaaatcacaaagtcaacatataaaaccaattattttcaacttaaaacaaaaccaatacttaccttaagctttccctcttcaatagtttactatcttgctactaccagagcttgaattattaggtttcgaatgaaaattgatgaaaatagatagagagagaagaggattttgctgaacgaaggagaggagagagtttcgttctataaccttttgtttaaaatgtattatatatattaaactgataagtttaaaacttatcaactaataataataataaactttattaataaaatttatttcactattttttagtcactaaaaaatctctacttctagggtactaggtcaaatcataaatacttctaattactccaatacttatactattagctcatcatgatatccccatcaaaattgctaatttaacctatattttggcccccgattgagtctccaaggtcgtcaaatctgaaaatacttttattccataaatagttcatatcatattcatacatgctaaataattttccgtaattaataaattacgcatatttatccacttatgacaaaattacgattataataaaatagattagtaggatcataatcccactcattacccgattaacccataatatgtattaaaagctaattactaaccattaggcttatcaagtattacaacaatcccatccttatagaaattttgtcctcaaaatttacctaaataattcaggatacaactccctcatctgtgactctaattcctaagttgcttcctcaatttcactgtttctccacagtactttaaccagagggatcattttattcgagagtactttatcctttcggtctaaaatttggataggttgttcctcctaagataagtctagagctcaatatcatcgtaactcaaaatatatatatcaaatttgacacgtactctcaatatagatatagatatgcgaaagacattatgcaccctagacaacgcgggtggtaaggtcaatcgataggccacctggcttattttctccagtatctcaaaagggccaaaaaatctaagactcagcttcccttttttcccaaacctatgcattgttgggttgtctgccctaaataaaactcaattcaatataatcagatttactaattaataaagatcataaattattttatgttgcatgggtcacatgatttatttcatgtttatacttaaggtataaattctattaagtctagaacatatgtaaatatatatatatatatttattcatgattatagtgtcatcaacacagtggcatataatcatgattatatcttcaaaagtttaattctcatgatttgtcagttcactagatttagactgacatg

SEQ ID NO: 389470 - DNA, 2131 bp, Cannabis indica
attattattattttgaaagaaaattatattaaccaccaacacatagaataggtaagtcactcttagggagatcacgagcattagattaatatccccattttcatctaaaagatactttagtattaaaactcatcttggctaaataatgagacaaaaaaaaattagcatctctacacttaaatattattattaaaaaaccacacattattgtacatagtgtatattaattttaagtccaacgtagtattattattattattatttgtattgtgttggccaattaaaatctacttttagtgtgttagcaaaaaaaattagtaaatcaacattgatattagaacttttgccagcgctaaatgaaaagtgttagcaaaaataatttttctcatcgcgtaaatatgttagtaaaagttagattctgtcactgcaaatgtgcgttagtaaaattttgacctttttgccagtacaatttacgagatccactggtaactattaccagcacagtagcgaactgcgctgacaaaataacatttcttgtagtgatataatagaaaatgttatataagtggccttcacttcttaattaataatattgtcgatctcatttttagttaacgataattaatcaaattaaaacgattagaaacgattgataataatgattaagcaaatagaatacaaaagttattatacagaggttcaacctcgtgatagtagtaatagtctactcctcttttacttgtattgtgagaaaagaaacaagaaattcttgatctttattgaaaactcttataatggttttagcaacttaattaagtgctctcttaaaaaattaattttggatctctgaatagtggaataactacttcactatttataaaagaaaattacatcaggtatgtttccaaaaagtaataaaaattaaaataaaaaacttgattactttctttaaacaaataaaataaaaaatggtaagtttccttttatttcttattagtgcgaatctatcccataaaattacagatgtaattgtgactcgaatatttgaagatttatgaaaagcatctcttaaggtaatttattcgcatttattatggttacacgaacttactgctggtcggatggtataacatattttgtccggatatttttagtttcttcttcaaatcaattatttaaaagtaataaataatcactctagacgtatatcatggagcgaactgccaacccatgttataaaattatctttacgtcacctaaataaatatcacatcatcatatacaaaaattaggataacaaatatagggatatgattttgtcttgtgatgtactttcacggattgtattccgtggtacattagatgggtctcagggtacattaaatgagtgttagagtacgtttttactttttaaccctaattatccctagatcaatctcagccgtcagatcaaataactccctcatctgacggctgccgtacatcacggattacaatccgtgaaagtacaataacgagacaaaatcatatcccaacaaatatatttattatatatgtataacttttaaaaaatcaatttataacacgtttaaaaaaaggttattatatattcaactatggtcctcaccttgcttaaaaaaaaatctcatggtcctagccttcctacaagctatatatataatttatatagcatggtccgaacattggaccaaaaatataatatctctttgttgattggaattgaaagaaaaaaattgtgatttaaagcatttctagcaaactagaattttttttttgataatttcaagattggaattaaatattttttagcaaatttaaagatttaaaattataataaatagatctagaaacctaaaaatgtacctttttttcctttcttttttgtgttatgagaaataatatatttcaaatttttaacaagtaagaaactttttagaaaaatttaaaaaatacgggaaaaataatataagataactagttacctctttatagtaactggttacttatctgattaccctaagatcatttctaataggagatgcaaaagttgatctatatttaatagagatttttacacctgatgtcatatttcatcatttttttacttttt

SEQ ID NO: 389471 - DNA, 1630 bp, Cannabis indica
tagttttttttctcaaagtatggtaggttatggtcaactaatgaatttagtgtatgtagatatatcatacactaaaatgaggacaggtctcatactctcacggtctataaattaattactccctcaaccaaaaacttgtccccacaataagatagttcaagatgctagcagagaaataaagacagatgcttctagaagtagattttttcgtgaagggtcattctatgactattcacatttgttctaactaggaatacatcacacgacagagagttgctattgggcaccagaagtgtctagcacccttaagacgtgttgctttgcgattggctagcgatactccttaaaagctattatattaaactatatggaactcgatactaaattagacaaatagcaatattgatacgtaggagggtacttggcaccactggtgccttttagcatttctcctagttattatatcaaactatatgaaacccgatactaaattagaccaataacaatattaacacattggagggtgcttgacactactggtgcttttagtatttctcttacaataatatgaatggttgtgttcatactttttaatatcatcattaataaatgttaaatactaggggcctttttaaattctaagcaccacaagataatttaccattattgatacaatttaatattaaattttacatattttaatttaataaattatataaaaaattactctccactcataatgtgtcacataatatagtgttaaataccataaatactgaatgggaatgttttaataaattagatcatctcctaatataaaaattatgctatatttagtacaaaaagtagttttgtactaaatttacactaaattttagttttgtggtccaatgcacaatttcaaaattttgatgtaaaatttaagataattaatgttttaatttttaaaaaataaaatctaataactttaaaattaattttattattattttaatttgtaagataataaaataataatataaatatttcataatttgatgtgatagttaaatatattaataaaataatagaaatgacataaatgaaaaaaaaaatagtgcatctattgttgtgtaaattttacatcatagaaaatgttatgtcaaatttggtacaaaatttgttatataccaaatttacatcactttttgacacattattggagcacactttttattaaataagttatattttaattttttaccacttatttacacttctattggagatgctcttaatagtacaaaatgataaaagtgtaaattaaggctcaaaaaacacaaaattatatacaagctacaaaaaattgggaggagcaaggcacctacgagcactcacattcagctcccttaaaatatttttatatgtaaaaattaagctaaaaatagttaaatggctcatacatcatatgagttactctaaaattattttaaagaattatacagtaacttttttaaatgcgtagctacaattatttattgagatatatttattttattattatattactctctcactcctctttcttaccatttctttatttattttattgatttttctctattatttaaatgtgtattgaaaataataa

SEQ ID NO: 389472 - DNA, 1179 bp, Cannabis indica
tgcctcctcgggttaagctttttggatggaagctatgtcacaattggctctcggctaaaacaaacttaatgcaccggggtatgaagatcgatcctaaatgtgacttttgtggcaggcacgctgaaactctcactcatgctctatggacttgtgaaaaggttagagcggtctggaaacttttgcctttttacaagatcattgggaattgtgacggtagctctatgtttgatctgcttgtggactttaggaataaactctttaagtttgagtttgaagatgtgataaaagtcttatgggctctgtgggaaaaacaaaacaggcatcggagtaacatgccttatatgaatggaactaagctgctgagtgggtgttcagtaaatacccgagtcctactaccaaaatgtgtggagattcgaacccacattctaccttatcttcccaataggttcggtggttggcccttcccgagggtgtgatatgtactcatggcaatgctgcattaaaacctgggaaggttggtgtgggaattgggttcgtttggagggactggtgtgggaatctaatctcaggtggtatgacctttctccctagctattgtacggtggctgttgcggaggcttgggctatccttgaagcacttaaggctctgccgaataatgaaaccagatctttcgagatccgataggactgcaaaatggtagtggacgctgtcaaggagaaggaaaactagcttagcacgatgggtactattatgcaccaaatcaagactcgggagaggttctcttcttgtgcaaacattctttttataaagagaaataacaatgagattgctaaatgttagctaggaaatgcctagataacaaaaattctcaattcttttgtaattcttttcctgggtggttagctgatttgtgtaaagctgatctccctacctctgtgtagtttgtggtgcttgtaataataaagttccctttcaaaaaaaaaaaattaatatttttaaaataactgtgcaaaaaacaactatattatctagtataaatacaacttttaacgcgggcgaaaaataatatgttaccttgtataaatacaactttgaatctcaaaatataaaatgtgtgagatccactaaaatacttaatttgtttggaaaaaatttaaaactcaaattaaaaaatgcat

SEQ ID NO: 389473 - DNA, 797 bp, Cannabis indica
aaaaaacttatgtatccattgataaaaagttgttaaaggtgttttcctttgtccacataccttccttgtctaaacctaaaacattgccactcgaggtatgtagttaatagtagcttgaggaaataaatacaataagctattaatttgagatacaaaactatgtagataaaagtttttttttttttcaaagaaaaatacaattcatcaagataaatctactgttacaaaagaactcaaaaattgtagacaagcattcgtctatacatacacaactctcctaaattagtaacagagattgtactgtcaatgtgtgggcaacaccattcacgtaagttgtgaaatagtactgcaagaaccaccaccaacaacaactaataaagaattaatatctaataaaatagactgaaaactaaaatttgattgaatccaaccaattgtcacagtagaatcactattaataatggagatactgaaaccaaattggtgcgcaagagtcatgccgagtttaattacaagcagctctgccacattaacagaaaattcacctaacacactagatgaccaagctagccacaccacaccctcagcatctcgtatcactccacccaatccaataaaactcctcccaagaatcactgaagtatcagttgcaagagcaaaggaatcaggaggaggcatccaccgagtaggtcgcttttcaattaggtttgaatatagcaatcccaaattaggggtgaaaatcggtcggttatggtcggtttttacaattttataaccgaccggtcggttacggtttt

SEQ ID NO: 389474 - DNA, 680 bp, Cannabis indica
aaaaacaagatatagtggcattcatgtgtgtggctattatcgcctatggtgacgcgcagaaaatgaatgtaaaagggttcagtgacacgtgtgaagtgtcactgaaaactgtctttccagtcaccctcattataagtgacgcgcgctgaagtgtcactatatagttttagagttactcaatgtgtgtcactaaaacttaattttctagtagtgtttattttataagcacattatactacattctacaactacaactatacaaattaattgtttaaaaactaaatattgtcttattcttttgatttaatattaataaaataataatatattgttatatattatgagtaactacaatattaatatatattatatttagaaataacttttaaatattcgtcctaaaaatgtataattttttttccaaatttacaactctataaaaaaaactcaaggaagaaaagaaaactaatataaataacatatattttttggaacttgcccttaaagatatcattatatatactttaatatacttgtaatggcttccatgtttagtattttgtagtttttttttttggtatagttcacgatactttccctactagtattgtttggtggtcatgcattaagttatagtgtttatatttttatatatatatatggaaaaggtttcaatggtt

SEQ ID NO: 389475 - DNA, 732 bp, Cannabis indica
aaaaaataaaaaaaaaccttttaaataaacaacaagtcctttttttcagtcaagcaaatcaatggttacaaacacagtctttcatgcaaagtcttgattatgatagtattttagattttataacaaattctccattacaaattacaatagttttttcctttttgatagaagcttttttctttttttttttaaaaaccaataaattgtaaaattaagttaggaaaaaagaaataaaaacataataaatttactgtatatacgaagaaaactaattcatcatacctaacgcacatgtagcaaacgaacatgatctatgagtagattttttaaattattattattttctaattcttgtaaaaagaaaaattagaagattgattaaattatttttaataatgtgagatttttaataataattattaatttttttaattcttgtaaaaataaaataataatataatgaatacttcaacaataaatttttgaaagggtctaccgatgaatgtactcttgttaattttggcatttaaaataatttttctaaaatttaaatttttttattgtactttatgttatagttatttaaaatattttataaattttattttaaaaaaatagaaaaatttaacatgcctcaaatagtttgttacaagttagactcttttatatgttatatgtgtgcagaattaaggaggcgtttggttgagaggaatgaaaatatagaaataagaa

SEQ ID NO: 389476 - DNA, 975 bp, Cannabis indica
taagcagggagtgctcaggatcccgcatttgactccaagtcttccaacatgcaaaagttacgaaatttgttggtgagataatccatctcccaactcgaattattgacaactttagcgacaggattagtatcaccttattaatattattctgccatatcaacatatagaaggtgctttaggtcttagatttcctccgacatgacgagaacttgaaagggagaaaccaagtcgttagtacacaaacaaattgaaaattataggcacatgagaattatccccaataactgctcagagaggttcccgctaaccccaagtctcagagttagttatgcgggaacacaaatcccagacaacaaataaagagcccaggaaaaataacaacagacataaaaacatattattatccaaaaccgtaaaggtccggaactgagtaagcatgaagcaaaaaagtcctcagggacacactttttacatctatgagattgaccgtaaaagaaaaatagtaatagggatagctttttcgtaaagcatggcaatgtcttgatgttaaaaattttcgtaccatttacatgtcagaactaccaaaaaaattctagaaaaataacccacgaaaaaccccaaaaatcatggcactaccttatacaacacactacccagagcaaagtcataccagaaaatcattacagaggttgagaagaaaagcacttatgtgttgtattcagaggtggtgcttacggattatgagcaaacatgagatgccttgactaaaaatcatgcagcttcctttcaagttcactgaaagtcttttggaggtcggacggagccgatattgacacggggatgaatgggggtgcatctggtaaaagcattaataagagaagaaggagtttatggtggagttcgcagtagatatcaaactgttagaaatattttaccaggatataattttactaacaagtatgtttcattaacatc

SEQ ID NO: 389477 - DNA, 647 bp, Cannabis indica
cggtttggctagcgaatctagtactggtcccaaagctaaatagaacgtggagaatgtgcattttttcacagacttgaataaaacttgcccgaaagattgtttttcccttccgcgaatcgatcagatggtagattatgccacatcaggatatgaattgttaagttttataaatgtgtattccggctacaatcaaatcaaaatgcacgtagcagaccaaaagcacatcaattttcaaatggataaaggactatactactatgttatcatgtcatttgggctcaaaaatactggagcaacatatcaaaaattggtgaacaagatattcaagaatgtcatgggaagaaacataaagatttatatgacgacatgctatttaattcatattctaaaaataaatatgactaaaattaatgtaacgatttcaataagaaaacattcttaagtaatttcatataaattaattaaattaaatcctctccaaaattatattatttctttttagaataaatctcattacatgtataaggtccatcaatattttatcagaaacaatactttattattttctatacatatattcctcgtatatttatgtaaaaagaagagtcactttttgtaagaaaaatttaattttatatacttaaaaa

SEQ ID NO: 389478 - DNA, 575 bp, Cannabis indica
aattgggaaggaccttacaaaatatcctccataattcgtctaaggatgtacaagctcgctagattaaatggggatttgtgccaatagcatggaatgaccaacatttgaggaaatactatcagtgaaggtagtcgcaaattttctcaaaattgaacaattttatggttttttagttttaagtgccatttcaaaagcatgatatttaaatttttttttagacatttatttttttaataaatgtttgcacttttttgcaaaaatgtttcttttataatgttaagtcatcacccaaagaagttacaaaagtaacccaatgcatttataacttagggggcatatagggtatacgccataactatactctaccactccacaaaataaatcttattgtcattgtcggcacgtcactttacgagcaattatcttcaattaatttggttagtaagcttttataatcaaaggatatgcttattgatattgctatgaaaaaataaaggggttaatttcttttttcatgggatatagagaaacaggtttttataacgccttggataatgctaaggaaattgctattg

SEQ ID NO: 389479 - DNA, 686 bp, Cannabis indica
aaaaagttaaaaatataaactaaaaaataacgagaaattcacttacaacgaaaattataatacaactataaataactaaaaaataataaaaaatggttattattttactaaaatattttataataaatattaaaaagtaaaaataaaaaatatgttaattttacaaaaaatttctaattttaactagggttaatacatactgaccaatagatgtatagtcaatattgagcagtaaaggcttttcaagatcaaagagtttattttgactgaaagatgaaaaagatatgacaaaactaatggtcataataggaattgaggaatattagttaccctcccttttcttttcttttttctttattcaatttaaattactaaagaaatttattcacattcactacaggggtcaactatatataatttttttttcttaagaagaaaaagcatttgatcactttatataacttgtaaatgttcttactatatttgatgcctgaccagtactttcgagttttgatgcaaagctatatatagtagggttttgagttttgtctataggaagttttatgggataagatgagcaatttgtatttattaatcaaaacactcttatattatattgtgacagtcagtagtcccgtgatccgtaaggacaaatccgggtaagctgtgcaatctcacaccgcctg

SEQ ID NO: 389480 - DNA, 721 bp, Cannabis indica
aaaaataaaatctgcacttagcggggatcggatgcactatgagcgaaatagtgcgaattggattggatgaatacccctatgtttgatatggtatagtgatataaattttcagaaaaaagatagaaaaaggtatggtgtaatgtatgggaataacaaagttttacatttttgtcatttttagctgaattatttttaaatatattatgaagtattttttgttttaatttgaaaaaatattattattatagatatcaaattacatggatgatttatcttaaattctttaaaaatgtagtatctacatattttctcaatgtttacccacctgacgtggcatctccacgtggccaaaagctaaggatacgtgggagacaagtcagcactaaccggctatggtagtgtcgtgcaactccctgatcctcaagatctcacggttgcaagatgagctcaaacaagaagagcattgagacttacaagatccacatcttcaaggttttgaaataagttcatcctgatatcaaaatctccagcaaagctacggggatcatgaacagtttcatcaataaagacagagatacaaaagtgttgaccctaaaaagtgatcaactgactgcggggtcaacagatctgatgtttgccacgtgtatgagaaacgagatttgttatagaggttcgaaccccttgtgatagcggtaatgacctactccccttttacgttgta

SEQ ID NO: 389481 - DNA, 1105 bp, Cannabis indica
ttcatatatagtagctacacaagtgtgtgactacacataatgctgcatgttgcgcatggtacttaaaggcaagcaatggtctaattaaggttggtggtagagttcgattgtcttaatgtagtacaacctattccaaactctattctcacagtttatttaagtgactgcactatttaatctggttcagtaaatgtttatgctataacaggccatcttaagcttcaacaagaccttaagtgaagcttaaataaggtctttgtcgaaaattaaattacacatttttaataaaattattaattatatcttcaaaatttattttcaattaaaagacacaataattaattaaattataagatgtttaatttttatattaataattatcacactatgattattttttttcgactttcaatttatttatgattaagaaatctttcataaaataaaataaatcaaacagtcaataaaaataaatcaaaataaaataaatacatttataaagaaacattataatattatttagaaataatttatatataaaatttcttattaaaaaaatcattaattattaattgagttctaaaattttaaattaattaaaatgtaatgttgatatctaatgttcaaatttattgaattaatgtatatcactcatattattaagaaaaatgtaggatttaaaatctgcaaggtcataataaaatatcttaaattaatcgtgagtaaaactttaaacttgtcttttgctctctttcgagaagagccttcacgagatgctgaaaacgcctgaaactatgaatcaaactgatatcaccatggaagacctcctgagcagaacatctaacctaactgtcttggacgaggatggctgggaaatcaacaacgaaggtggaacagaagtgaactccctctgcgccatgggaagatgggtttcaaatcgacctatgagtcgttctctattgagaacgattctaggacgggtctgggggagttcagagaaaaaatggaacgtggaaatcaaatacacttcaaaagaggcaagtttcttggtcttcactttcaaatcctctcaagatttgaacaggattgtgatcaagaatccttg

SEQ ID NO: 389482 - DNA, 2228 bp, Cannabis indica
atataatgtcaaagaattgaaaaacattttctttagaaaggaaaaatcaaaatagtagttgtaagtgagatcaacacataaatacaacagaaagctatatgcgagttgaatgcttaacgactcacattattctagcatgtattttaaacgaggcacaagaatactttgaaaaataatacttaagctaatatatgaatagacgatttaaactattcatatgaacaattaaagggtattcaaaatagttcttaaagagctattaaaaatattctaagtttgttcttaaagtttggcaaattataaattgctcgcttataatagggcagattagaactactcacataaaaaaaactacaggtagattagaactgctcgcgtatgtacgtagtagactgataactactcaaaatatctcaaagaaaaacaagtacaatagaaatgcttccaacctaaattatcttaagttcgatcaagatataaatgtttagattgtgaaataaaacgcaataaacaaacatatttagttcaagcataagatatgaggcataaaaggtaaagatgtatgtataaataagcaaagttggccatccaacaatgcaaaagtctttacaaaatgccattaggggcaaccattgtctcggccaaatattaaagaaaagagtaaatattgataaaataaaaaccaagtctacatggtggaagacttggaaggatattcttcttcttcttcttcttcttcttttttagaatctactgcctcatctttcttggtttacttgcaataagcaaacatctccgagacaccatctttcaggaagtttaaattcatgtagggattggctatctaggctctatagatagaacgttttgcaacattgttgcacctctccttggcatcggcgtcaacaccctccagctttttattttctttatttagctcttcctgaaggttttacgagcctcgcgtcgatctttggcttccttctgagcgctttcaagctcagccttatgattcctctttagctccttgacatccttggtcaagcgagtgttctccttttgggcatcagtccactgcttcgcaagacccacgcattgtttgatggattgttaaagctccgattcaagttgttggattttttgaaggccccattgttgagccatgtgagacattaaagatgcccgcaaaagggatatatgagtttagaagaaagataaggaccaacataaaataaaaaaagaatggtgaaaggaactaaccgagagactaaagtttagactcctctcaaacaactcctcaaagttgtcgttgttgatcaaatcccaatcgcatgattgaaaggatttgaaatggcaccaacttgaggtggcatactgtgagtagatctgcgaactggtaaatcctgcttcttggggcaagggccaggaaggttctaagaagaccattttaggtgctttatctgagaatttaacctggtgggtcgaacccagggcttgctctttagtgtcaacgacggctggagtttgagagtgaaattggtcatcagctggctcaataattatttgttgcaaggcacatttttcattggcaatagttttccttgatctcttcatgggttctgggttagctcctgatgaagtctccgaggcggccaccctcttcttcccctttttgcttgaggcattgagaaggttctccaaatccatatctgcgagcagagaaggaaaaaaatcaacacttattcaaaaatagataataaaaatgtggggaatcaactcacacttaaagaaagttaccataattatcagatgattaagaggaagaactatgataattattaaactccctagacccagtgatcatgcatatatcataagggtttactggagacaaattccattctgaatccagatgactcgccctatcgaagttagtaccatactgctcagcaatttcaatgtaggaactagcgcaactaagttggacatgaaactgaaggtaccaactatcaaacctatgtgttatgcgatctatacagaaattatcccaagtatagatgttgtactggctatccttaaaagttactagcgaggtatatttagtcctaagtacagttggtgaccatccacattgattacctcaggatgtttcttcttcaacttcccgagggactacttttttgagataatgggtgcgagccacataatcttttgttggaaattatttt

SEQ ID NO: 389483 - DNA, 1167 bp, Cannabis indica
ctatgatgctaatgaaatagcttacaccaccaagattcttgattttggatagaccctagagattagagtgtatgtaggccaatttttctttggtagtgtgctgaccagtagtaaacttaaccatgcaacttttaccataaacacgttcttcacagaaactaagttagccactcaatccaccttgaaataacccttgcttgtcaagtttagtgagacctctctcactaacatgaccaagtctcgaatgccataggtttatgctgtcatttttgacatcattgacagcaggtgaacagcagtaccaatcaagtagtgcagaccatttttgagtttacctctaacaaccactagtgaacctttagaaatgttaagagtgcatttgtctattgtaactgtgtatctatgattatcaaacataccaatagacaataagtttcttttgagatcaggcagataccatacattttgtacagatcgagttatgccatcatgcatcttatgtcaacattgccaataagaatcttgcatgccttgttgtttcctaaaagaactttaccaactgaattctcttcataacttgtgaacaaattatttggactcatgtgaaatgaacaaccagagtcaagaatccattctccttctgaatcttcacttgagacaactaagacatctgcaaaatcatagccacttgatgcaacatctgcttcacctctttctttgcttgtttctcttgagcttgttcttcagtaggtaacattcatccctgaaatgacattctttcttgcaataaaagtatttcttccaagctgcatttctgctcttggagttagacttgtgtccaatcttggatttcttgaagtctctcttctctgatcttcctcgagcaaacaatccttctccaccagtctcatatctgtcatcaaccttcttttcaatctctttacaatttagggcagcctttacttcagacatggtcagtgcatccttgccatataggattgtgtctacaaagtgttcataattctttggtagagaacttagaaaaaaatcttgatcttcttcctcaattttaatcccaatgttgtttaattaagcccaggatcagtttgtgttgaagtcatcaagatgctttctaagctctttggtttcatccattttcatggtgta

SEQ ID NO: 389484 - DNA, 613 bp, Cannabis indica
cccgtgcggccaaccatcaacagcattcttcacagtatgtgctacaccagcaagcaaactttaaaattactgtgtcacaccagcaaggcttggctcagcacgatgcttcaaatcacaatgtgaggcaagcaaatgggatactatggaagccactagatgtcaatattattaaaatgaatgtagatgcggtagtccacattaaagattaggtaatgggtactggagtagtggttcgaaactacaaaggggaagttattgttgcattatccaaaacagtccaaggttgttttagaagcgatgaaatagaagcaaagacactctttcatagtcttaattgggctaatcaacaacaaatcccaatcgcaaaagtgaaaacagatgcttccactttgatctcttctcatacagacttatcttattttttagatctaattgataatgttcgttatcttctatcttttttccctagagttactattactcttgctcgtaggcaagccaatagagctacccacggcttagtaaagtaggctataaagttagatgaagatatcttttcgatgaaagaaattccacattctaaaattattcaaaaaaaaaaaaaagtttaaaa

SEQ ID NO: 389485 - DNA, 1243 bp, Cannabis indica
tatatataatattgtttttgtttgccacttagaaattacttggccaatatagtacttgtatgttccccagtcaaaaatgggcattatttaaaaagctatttttatcagttacttttataaacaaaacaaaagtgtggaaaacgatccaaagtgggcattatatgattgaaaaactagttattatatgtcacttgctttggatttggagggtaaagcaagtcgtgtcactttatatgtttctttcttctgtcacttttatttgtccaaattaaactgagtattattctaatagtagtacacaatcccctgttacccatttttaaattatgcataaatcaataaagaaagaattattttttattttgtagtctacttccaatttttctttttcatttggggactaattttgtgaagaaaccaacaaaaggaaaaatatcaatatggtcatcataataaagtttgttctttctttttcctctctctttcatgggaattccatcaaaggtctccgaaaaattcctcatatatattttgtcacttcaaaattgcaaatatattttttattttgttttgatcatttttgacccaagtagtccaacgagtgttgttttattcaaataataaataatttcttaataaaggaacacataaccaatcctttcagcaaatatttctggtttggtaattaatttggcacttttaagctacagaaatatatatatttaaaattaaaacttattgttgaccaatctttttagtgtcttcttttttattgagttcaacattttttgggtagctagtcagttgatcactttttatcacttttaattttattaattattattttttaaaaaaaaaataggtcgatatcgaacccttataaataattgaccaaaaggagtgttattggtcgttttcaatgaaatagcaattacactgtcgttttcaaacaacaaacaaagagagaaaagaaatatgaataatttatatttaaatattataagaaatcccaagattaatattggaatttataaaagaattaaccaatctaattcattattaaataattaatctatttttcaacatattataataattagcttagcaacaacgtaatatatcatttttataggtaaaagaaggtaaatttacagttttataattaaagatttttttttacattttgtttataaaaataatacaaaaataacaaaaaaaaaattacataaaaataacaagaaaa

SEQ ID NO: 389486 - DNA, 801 bp, Cannabis indica
tgctattatataggagataggtttattgagagagagagaaatgcacttatatttagatatcaatttcgacttaaaaatgcatataaaataaaatttctccttaataaaaataaaaataaacagcataaatataattaaaatttatatattaaatatcatttaatgggcagtttattagattggacaaagatacaatcatacaaacagaggatctgtgcctctagttgttccctttgtaaatatgctcagttcaattattctttagtcttctcactagggatgcacatttttcccatggggatggggatgaccccgcggagacccgcccttaatagggcggggattccccgtctaaatggggaataaggcgggaacgggaattaaattttggtcccgaatgttaaacggggcggggacggggataacactcctcgaccccgtgtgcatccctacttctgactcgaaaaaaaccttttctttgggatactttcatgatttgttttggaatccttaactgggaattttatggtgtttctaatgtcaccaacaaaaaaatagaattagttcagaactggcctatcatagacttccattccatggaaggagcttgttgccccacatttgattgagatcctatatatagatgatgatatggtaatgctgatatattttctgaaattttttatcaggataaatagataaagtaaaaaagttattagcacactaaacaacaataagctgtgaatttttaattaatttgttaaaataaataacactgaaagacaaaaataaaaaaaaaaa

SEQ ID NO: 389487 - DNA, 1275 bp, Cannabis indica
aaaaaaaaaaagaaatataaaaacaaagttgaaaataagccgatctaggaggctaaaagcttgaccaaaacagttgttaaatattgaaaaccgcaccaaaaggcaaaacaagtgaatgcagtggggcttgttgttgttggaactttagtgataaatttacaaaattattgtatgagaagtgaagtatgggagtccattgagttttatatgggattgaaatattttattagaaatgtatataatgtgtaattttgatgtatgggttgtggttttaagggtacctaattttgtatgtattggtggtgaggattcattcatcggatgatcacatgtggctgcagatgggtgaggtgtcattttatattttagagaaaatttatttattaaattttatttttatttaattaaataaaatatttttaaacgtatttaaattaattggtaaatagagacgtgttcttctcctaattttcagcattattctcacaaacttacttaacgttgctatgatcaacgtctttctttccgtcactacctttttctttatttcctatataataatgtattataaccaacaagagaaacatattttttattacatgagaaaaatcatttacagtttatatttatgattatattatacaagtatttcgggcagtagtatttggtgtaggtttttcgtacaatagagcttcgatatagtggtattttgattgggctgttttatttagagagcgatcggtaattgctgagaaaaagttaaagaataccctttttttttatacattaaccaaatttatcttcaaattaaatttaaatcataaatacctctttttatgagtattatattcaaattatcctcacacactcacacgattaagacataattttaaacataataaatttgtattctttgtagatagatgtgtaggtttgtgggaaaaatggagcaaaattttaattaaagatgaatgaaaatcatcgtaatgtaatagaggtaaaattggtagaatgattgaaaaaataaataaatataataaattttaaaagaaaagataaaaattaaagacatcaaattaaaagaagtatgtagtgtaattttctctaatttttgaatgtttacacatttttagatagcgccgcgaatatcctaaaaataatgacctagtccacaactcaactcataaattttattgagtaatattattcatcttttatttattcagtaacagtctgttcaagaggactagacaaaagcaatcaattattgagaaa

SEQ ID NO: 389488 - DNA, 438 bp, Cannabis indica
ttatgttttaaaaaaaaaatgtaacgactaaaatgtaaaagttaattatcctttaaaaaaatataagaactctttagcacattaattcttctcgaactttattaatttcttggattgaatatgatttgttagacatgaactgcaactgcaagtacaaaattaaattttaattagcaattataaattcaacaaacacacacatatatattgtatacaagttatgtaatacttttaccttattccctaagtaaggtttaattttaggagcatttataaatacatccttcaatatcttcataacatagtatccacattcaacatcgtttgattgtttacgacacgtttgttgatcacagatatacttttcttacttcgttctatgaaatacatctcatatgcattgtcgatagtgtaacactctaactagcataggcgtat

SEQ ID NO: 389489 - DNA, 719 bp, Cannabis indica
aaaaaaaaaaaaagatttttatgcttattaatgaagaataaattattgtcttgaattaatgacttaaaataactatttaattatgtttaaatatttaattaatttagtcaacgaaagttttggaaaaacactcatattttatgagctaaaatagctcaattggtaaattaatatagagaaaagctcttaaaaaaatccatcgagcttaaaattttacattattaatataatttaacagaataatttgtagcataagaaaatatatacataagtttaattttttacattattaatacttaaaatataattctgtaattttcgtagttacttattaagtaaattgctacatggtaattgtaagaaccatgttgtgacaaattatgtccagttacgtctggaatttgtaatgttttgtctgaatttcgtactgttagtattagtccacgtcaacaaagatacttttgggttttaattgtttagatggtaacagctgtctatttcaggattcttggttttgctaggtataaatataacttcttggtaatgttgatgaatcttttggatcagagattagggattacgtttctttcttcttgtttcgtctttatattccatggcataagatctttgagtttggtggtattaatccaaagttgcagaacagagcatgaagatgttgagttcaaactgaagggatttcagtatcatcttcatcacca

SEQ ID NO: 389490 - DNA, 550 bp, Cannabis indica
caatctgaaatgaaaatattgttaacataagcatcagatcaaaattgtcacgcattcaaacgaaacaactaatttccaaaatttacagttcatagtatatcttacagcaaactcaaattcgacatgttcttttctcttgaacactctagtgatctgttcagtcagtgcaaaatattaatgaaaagaaaaaactccatggcatgaactatttgagacatccaatcaatcaagagaagaggtaggaataagcacctgatatatccatgaattgattctctgatgtacttcatccaatattggtccccggaaaacagtaagaggaacctgaaatttccaatcatacactctagatattctattgattacaagtaagtcatttattcaaagtgttttaaaagcatatcattacctaccttcttttcatatctaataggataagtgagattaggacgaaatatgtatgctcctgaggcctgcatatctacacttccatcatcaccagagtaatacccaaaggattgttctactgactcatccaccttgaatagca

SEQ ID NO: 389491 - DNA, 956 bp, Cannabis indica
ttaaaagtaattaagtacgaatagaatatgatacatagaaaattgagaaaaaattaaatcacattaaaaccataaattgatgtcaaacaatatccatcaataccctaataaactatttagctactcttgttcattgtaacaacttcacacatttcaattaagaataaatgaagaaaatagagaagaagagaatattgaaaactctgtcgaaaaagccttcgtggttgcttcagctctctaatttttgtactctcagaatgcttgctgaaaaatatgaaagtccacctctttttatagccaaaaaaagataaaaagatttgaaaaatatcatcttttcaaattttaagggggcgggccgcgacactagattcttatgcctaggcataacaccactaaatgtgggtagcaagcttactgataaatttttggtaataactcttttaatattactcgaaattagacgatttaagatgttttggaaagataaaagagagatctagaacttttatgttttaactttctccaaaatctaattagaatatagtctaatttaagcttgaaattttagctttattttcttttaaattttctctattatatagattattattttttgaaatttgactaatttatacattccaagtattgaaacctgaaattaaagaaaataagcgtaattctattctaaaaagtgataataaaaaagataattaaccctaaaaatgacataaataatatactaaaaatagattaacaagggataaatgttatccatattcctgaatgcccggtacatgacagtcacggaaggatgtcactgttggaaattatttatcacttgctgtgtgtgggcactactctaatcactaagtatttcaaaatcttaaggaagaagagagagagagagtgggcggccaggtatagagagagaaggctcaggtttttctgaatgagaa

SEQ ID NO: 389492 - DNA, 1334 bp, Cannabis indica
tgactaaatttaccaaactaagcttgaggattctgtttcaaaccatataaagatttgtgaagacgacaaacttgccctaaattctccttgagcaacaaacccagaagattgctccatatatacttcttcaagatctccatgaagaaaagtatttttaatatcaagctaattcaaacgccaatgataagtagttgccatagaaataaacagtcgaacagatgtgactttagcaacaggagaaaaagtatcacaatagtctattccataagtttaagtataattcttggcagcaagatgacctttaagtgagcaattgtgctatctggattgactttaaccgtaaacacccatttgcaccttatgacccgttttctaaagtactatttgcaactaaaacattcatctcttttatcattgcagcaagccaaccaggatgagacattgcttcacgaacaattttaaaaatagtgataaaatcaagagaagcaattaaaatgcatattctcgaaagccactaattttattcaccattagaaacaaccactaattttgaatctgattttgtctctgccatattctcgaaagccgaaaagaattgaaagagaaaaaaaagaaagtgaacaccaaagattgaacacccaaacacgaagaagacaaaagtatcaaaccacaaaatgagaagaaccgttagagaccgatgtaaggaggacagggaagggctgggagcgtgacggacgttgaccgtcaccagaaaagaggtcgggtgtgcccgcacgcgctgatcgggagttggggcatggtggcgcatggggtccatgtgcggtgaatctgattgctggacttcgaggttttgcaggttgtcggctgggcaatctgtctatttgggcagtgagaataaactcacacttcaattagggtttctgaaaaaggaacccttaactcaaactcttaatttttttttaatgaactttaatttcgaatttcgaattacaattttaagtattgatcttatattatgtagagaatgatgaattgaattgtgtatcttattcatgtatatgttatatatttatacaacttaggagaaactaaaataggaaagtatgagagataataagaaatgataaaattacagttgaccctattttctagctaaccaaacatagtttggtctgttcttgtaatgtgttatcagattccattaacacaacaacacattgactttgctaaactttgactaaggttgagcacctatgagaaagaaatatcaattttcagaaaatttagtttatttaacaagtgtatccgtaaatcaaataggaactgtgaatgtt

SEQ ID NO: 389493 - DNA, 1199 bp, Cannabis indica
aaaatgaactgacacagcactacaatcagcttactttctattttcctttttcattttacataaacttatacataacacatatatcagcttattctattttttctcttatataatttaatattatattgttaatatattttatttattgaatttattttatatattaattaatatagataataggaaaaatagaaaagaaaacaacaaaaataataataaaaatagtttagttaagaagtaaagtttagcttaatgtggagatgcataatatatgagttaaaatattgaggtattatagttcctttttttaaaagttttgatgtatttttgacactataaactattcgaaaatttttaaaaatttaaaggaataatgttataagcataatgaatacggttgtaacaggaagttgagggtagcacttttcagttttatttggtcgaaattaactctttgataattacttgttattgacagccacattagcaattagcatatttttgttttcgaccacattaattttaaggctttgttggtgtttcctaatgtaacctttaggtgagatattcttgaaactttttcgaatcagtatgttgttctcaggtgagcttgtagatttcagggtttcaggtatttgaaccacctaatggtagggaaaattgcccaatatgagtgtttattgcaaatattgaagtgatgaatatgaatatattatgatttctactcatattattcttttttagagatattttcttttagcgactgaaaaataatataaaatatatgtatatttgtctgtatgtaaataaaatagagtaattagcagtatgagcctacttaaaatttataattggcgatattgtgggtgatgttcagccatagaagtttgagactctccatacctattcttgatatgttctgaaggtttttctagtaggggtgttgataaaatagtcagttcaatttgcacgatctaatccaattcaatttataaaatgtggatattcgtacttgtgcgtattggattgaattggaaaatttaaaatatgcacttgtgcggttggatgttaattagtatgtaaaagtaaccgatccaatccatacatatttatataaaaattaaaaaaatttatatacaaaaagcattttaatgtaaaaaaatagtaatttaaaagtctaatacatatgatacaattat

SEQ ID NO: 389494 - DNA, 578 bp, Cannabis indica
ggaaatgcatctatagtaagcacaggtgtaatttcttcgggtgcattttgtgcagataaatccacggctggtgcattttgtgcaggtaaatccacatccactgcattatcttcgggtgcattttgcacagataattgcacagatggattttcttcattaccgtgaaaattatcgtgatataatatatgtatacatttaataatagaaattaagaaaaatgccccgattaagagcatcatgagcaaaatttcagttttttgactaaaggggttgttagtttgcttatgtgcgtcttgattgtattgggctaagatagtaggaagtagtaccattacgatggtgaagtaataaatgattagtgccattgctgcaaaaataatttaaaaaattaataataattagtataaaaaagtattgatatgtgttaactagaaagtagaaaattatgaaaccatataattagagctcatctcttttatctgtttgaaaatattttaagcaaaccattgaaaatatatttatatacaaagtatacttataacctgagccaacaaaaaaataataaaaaaaaatcttta

SEQ ID NO: 389495 - DNA, 1479 bp, Cannabis indica
ggatggtgcaatctttaacagctctggttcttatggcattgggtagtggctcgagatagtgacggtcggttgttagaggcatttactgctctgaaagttggtagtgtacaaccagccactgttgatgctcttggaaataaggaagctttgagctggatcaaggctaaagggtggtctaatgtagttgttgaaactgattctattgtgtcagttcaagctatctctagtttgctttctatgccttcagtttttggtttgttaatttctgagtgtaaacatttgctaaatttgttgtgtgatgtgtctatgtcttttatttcgcgatctgctaacagaaccggccattgtccggctcgggattcttgttattggtctgattgcacttttaatgtcagcaatgttcctaatgttgtacattctgctataatggctgatttggctattataagttaatgaagttcaacttctattcaaaaaaaaaatatatatttttttaggagccatgttaaatagcgagtttgcaattcataacaaaaatgacaagaagtattaattttcatgcgattgtttagattatactgtaatatttatgtcactttgttacactttttctgttatgaacttgaaaaaaaaaattggtttatttctttacttttctagatttttttctacaaggtgtagaagtgaatggttagatatgtaatttttaaagaattatagtgtgaaacatataatttctatatataagtgtgaattattattattattatcggtaccataaatagaggttttggtaccatatatgatgttatcaattgatatagaatattcgtaatgttgtattaaatgaaattaatttcagtagtttttcaaaaatttacaaaaaaaaaaaatatattttaataatttattatattatttatgaacataacgaataccaatattttgaatttatgtttttattttatttttttaaaacataataagatctaaagaaatatcgtaacaatatatgtaatttaaattttattttttctttttttatttttaattaaataataaatattataataatatggtaagaaaagtatatagtgcacattttttaaatattttattaaaaaataggatgagtaataataaatatacagaaatattataatttaaaaactccacactttttattacttgtttaattatttttattttgtatacaaaaattataattaacgataatattattttttaaaaaaaaatcttaagtattactcttaactacttttaaaaacatatataaatatcttatcattcataataaaccaatatctatctatctataaaataattaaaaaataataaaaatttctacttttacttatggtggatgatatataattaattttaggtgtgtacatcgagtacttagatactactctgaacttaaatatacaaatatatatatatgagagatatgagacg

SEQ ID NO: 389496 - DNA, 923 bp, Cannabis indica
accaaaaatagaaaattcattgagtagcttggtcttctctttgcgaatccaagttccatggtggccttggctttctaaaatccttcaaccaagtcatgcttgccaaacaagcctagtgccttattcaatctcctcactctttggtggcctatctactcaaagctcgctatttccccattctacttttctagatgttgctaaggggaatcgaccctcgctggtttggactagcatttgttggggtaaggagcttctcatctctagaactaggaaaaattttggaggtggtacatccatttcaatttatgcctaggttccgaggtgtggtaagcttgcataccttagtaattcatcccattgcaacaacactgtatctactttaattgcttccaattgtgcttgggatgtcatcaagcttcatacactattcctaaatgatatttttcaggccatatctccatccctctcactaatatacactcacctgattcctttttctggccttttacatctcatggacaataaacaataatttctggatatcaccatgcttataccctagctatacaaaatgaaccttctactttaaactccttagagcaacaaaaatggtggaaatccttttggctcatccctattccaccaaagatcaaacactttgcttggcgggcttacaatgatgttctcccaacaagatcaaaacttcaacaccggcgaatcatttccaacccagtttgttgtcgctgccactgtgatgaggagaccctagtacatgctttgtttggttgctcttctgtccaaaaggtatggaaactcacacacttttatagttttcttttaaaacactagttgttctctattgttgatatattgcatctgttggaaatttatttttccaggaacttagatctactcacaagtat

SEQ ID NO: 389497 - DNA, 960 bp, Cannabis indica
tttttttttttttgaagaaggcgaaataatcttttagactaatgtgatattaatgcatttttcaattcatatagtgtatgatctctactaatttatactcaaggttgtgagtactgaataatcttctttttcttcatgttatatatattatataatattgtataatattctttattattctacattatatataatatatagtgttatatgtgtgttgtaatttaaaaaaagttttgatattcgttctataatggaaatcatgtgtggtaattatattagagactttttaatttttatattttaaaacaatttttttttgtatttttatggaattcttcatagaaattcttattgcaactaacgctgcaacttaaattgtaacagaaaattgtacagaaactcctatattgtaactagcattgcaaccactttagaaactcaaactgtaaatttaaaagaaaaaaaagttaaaaaaatagtatataaggtaatttctcattatactatatactataagggaggtcggcaaaaaattaaaagaggaaggttagttatatttaataaaaattattatattaaattatatgagatttaatatttaattatattaatagtaatatatatattagataataatacacacttaatgtatcttttaacatttcttaaattaaaaaggaataagataaaatcaggccacaaaagaatataatagccacacatatatatttatatttatatgatatatcaatatcataatttttggtgccaaaaataaatgtataccataataattaacgtgaacatatatgtatatatatttataaatttatatacagatatatataaatattatataaaggccacaagagaagattccacattcctattttaaattttaggtagcatttagttggaggtaataaaatgaaatggaatggaaagtaaataatttttatt

SEQ ID NO: 389498 - DNA, 1077 bp, Cannabis indica
aataatgtcatcagaaataaaaaaaaaaacacaaaccaaacaaaaccacacaacacaataatgacattattacaaactcaacagaaggctctctacacaaacctcatactaccaaaaaagcaaacataaagatattactaaacaaccaatgagagaatccaagaaagaatcatgtgaagcaagaacaccaaccgaggaattcctcctgaaaatatatgaggaaaaaaaaattaaacatcactattagaaatcagttgaagataaatgaagctataagcatgtttcaacaacactaaatgaagttataagaatgagtattttccatgtttgccaattgaagtttctggtattctttagcaaacaatctgtaatatttgtggtaagttttttctttaaagttaaacttcaaataaaatttaaaagagatcatataactgatgctaacagaggcattccaaaatgtgaaagaacaatctaataagtaacattgtgtacctgagtgagtgagtgagtggatcatttgtcataaatcctacccaaacacagatttttgatcaaacaaatcttttcccaatctgcaccaatatccttttcgcatctccttaataacttgtcacactcttcaatctgtagtgtctctagaagtttaagctcccgaatcgattcaggtagcgatttcaaattaggacacaagcaaatcatgagtttgcttaaattatggagttttcctatccattcagggatttcttcagtaccacagcgccagagttggaattctttcaagctgactacatgttgaagcccctcaggaagactcaccaagtttggaagacaatcaaatctcaagaattctaagctttttaaagttctccactcaatttcattaccatagaagttttcaatgcctacaatccggagagccttcaagttggagagtggtggagatgatgatgaggacgacgaggatgatgcttcttggggtgcagttttcttgtttaaggtgagttgaaatggcttccagcaagttgagtccagagctaaaccttcctccagagttgggaatagaggaatggaagt

SEQ ID NO: 389499 - DNA, 927 bp, Cannabis indica
tatgattggatggacattggatgatattggattagatcggttcagttatccattagatcggatgtctcatccaacatccgatccaattggtaatttttaaaatttgcatccgatccgatccaattatgattggatatccaaattttattggatcgggttgggagttggatcggatgtactttctgcaccacccctaggctggtcggggtttagggtccaagtctgggtctgtgtttgaggtctggattcgggtttaggttctgggttcgggatctgaatttgggttcggggttcgggtcttgttatgtgtcggggtttggggtccgggtccaaggtttgggatccaaggtctaggtccagggccaagttcgagtccggggtctaggtctagattcgaggcatgttctgggtccagagtgcgggtctgggttgggatccgggtccgagtccaagctgtggttggggttggggtcgagtttattttaaaaaatttataatttacataacctattagtacaaatcaatatcaaacgtagtattgtataaaataatactaagacaatacaatacaacccaatatagtactatacaatacaatacatcacagtgtattaaatgaaacttaaattaaattatttatgactcgatatttaattacactactagttatatgacatatcaggtagcgctagggctaagcaccactgataatttatagcatttctcttattaaaaatgataattttacaatttattttaattcattaggtattagtaagtttatttatatttatttacaatctctaatatgatcaaggggagttctatttaccctctcataaaataataagcacaccccaatatttaaaaaaaaataagcttaaatataattttaaaaattactcttaatatttttttttaaaattt

SEQ ID NO: 389500 - DNA, 2678 bp, Cannabis indica
ctgctgcgctggtgcattgatgagcatttcctggttcaggtcatagaaacggactgcaaagccataactgatgccctctaccatcacaaggaatattttcggttttcggagatctcattctgcaaattaaggaaactttgctttattcccagcagctcaaatatctcacatcaatcgcaatgtaaattctttggctgataaattggcgagatgggcttcagggttagacgaagttgcaatttggataggcgatgacccctgcaatctagtggagtttcttttttttttagcgggctccctctctctcaaaaaaaaaaaaaaagagtaccatctactgaaataatatattatatatactttacaaaaaataataaaataatatattatgtatatcttttctactatcaaactacagttgaggtaggccttaggcccataaaatttatatcatatacaatatataacataaattaattgattgaatgagtataccaccaaactcctacagtacacttgcatgacctagacggagacaagctacaatatattaacttaagtgttatattctaaattttacatattgactgctactatttctacaattattcatataaattgattgctaatttatgcaatatttatatattgagtgctcattgttctcacaatcaaagtaactaatacttacattgaattacaagttgactgcatcacatcattaacttgagcattacatcaagagacaaaaaaaaaaaactggtactattactttgtttattacttaatgttaactctacaagttgactgctacaatttggaacttagctaatctaattacgacatgggctctcaacatgactgctactataaaagcaaggcacaccattctcttgaaccaaatttctcatttcaaccacttcttaaagcctaattgggtgtagtcaaaattagttacacaagttcaaatgacacaaatatatctacacttaaacacacacgctaacgtgcctgtaaaatgggacacactgtataatacaacgttcatgtttcaaagtaccaaaagtgttcaactatgctagtcggacattctccgattcaactaaacatagaacacaaccgggcaaacaatatatttcaacaagggacctcataatttaggcttttcacaatcaaaattctaaagattatttgagtccaaaatttatactctttaactcgagcaaagctcaacttaaagagtaggaacaaactgtcgatgccaaaattgggctcaggctcaatgtcatatgtgataatcccaaagaatgctcaaacaagattgggttaggctatttgactaattacgatggtacgctcacaactccaagcccaacaggcccaaaacaatacaatcaagtcacacattaaattacccatgacccatcattgagctcacaatgattcgacccgtatacgagaccgagtcttatcactcatctaacaatctttgaagaggtcagttaattgaccacgtagataacgatctccctcgtaaagtgggagcggagcacttcacaagggaggtgagcggtcatgagtaacgcctttccatggatgcctataagagccactcttagttactaagagagatatataaaatttaagtcatctcaatacttcttacttatcgttcaatctcattctctctaaaatgacatacttatttccgcagtcaagataggtggtaacttagttcgatcattgattctcatcaattttattacgttgttaacaatcttgctgacttgaccgtcagagtccctttggtcggcaccatcccagtgtcccaaggtttcccggttactctcttctttgttctatattgtcggtgcccgtacgatcatctttgattgattgtggattttagcttcgacaatcagtatttaaattaatttactacttaaaatctaacaattatctttgttaaataacgaatatacaaatcatggtgataggacctcattatatgacgagtattatcttttatgtattatgatatatttattacataataatatacttaatgtggcaatgtacttaagcgaacaaatcctaaactttatgtttattctggtcatcttacgataatttctcaaacgaaattaaggtgcacgtgaatatgagaaaatatcaaaattagagtttcgttgaataatttttagttgtacaactaaaaactacataaggagtagctaaatctcatatttactttacaatccttaaatttatgttgcaccttgactttagtcaaggatatgttgcatacttaatgaccacttatcacacctttttatggctaaatactcaatgtcgatatgttagtttcgactagaactattacagctcttatccataaatactatagctaaatttattgcaaatttttttaatggcttaaaatataattctgaactctaagcctagtatgaaactttacaatacaccatatgagatatatcttcaaaataataaatgaatctgactccttaatagaaataacaattaaagtttttcacaatacatcttactggtgatcttaaggacatcatcaaatgttaatttatgtgaatcaacataaccagtgaaatcataacttaagtggttaactaaatttccaaaatatcagttcatttaaataa

SEQ ID NO: 389501 - DNA, 635 bp, Cannabis indica
tgcacttcaagtgtgactcacagacacaggtgattccagatttccaattatgacagttgaaagtttcaaatttgtatttgttatgctctgcactgaaaaagttggctgctccccgttatttttaccaacatgacctgccaatatgcctagcttaattttactgtacatttcttacattttgattgtatctggtttgtggttgccttccatacttgaatcgattttctgtgttacataaaaatttcattttatttataagtttcacatgaatatatattattccgttccttgctattatattaacttattagcattgaattgctatctgtgcaatactgtattgaagatattatgctcgttatagagcttgtactgtatctaggggagccacgtcaattaaaattccacccatacatttaaccgtcctctctaaaagctacctccgtttgtttggttttcttatttaatattacttttagttaaaacaaaatatcatccctactccgtctctctcatgatcatataactgccattgccattttttctggcatttttgtaaaaaggggaatatattgataaatgaatacattttctaacttaattaccgtagaacctctatttaagaatactctatt

SEQ ID NO: 389502 - DNA, 1657 bp, Cannabis indica
atagggaagtgattgatggttaatagatgagtgataggggtgattcacgtgtctgatgcatgggagagtgtgcatatggtatatgtgtaataaagtaaagagtaattgtaaaaatgttgctttaaccgtgtgtaagtattaatgtaataaaattctattttatattttcgatgtaaaaatttcattactaaatatatatttctaggttcaatatatttatataattttttaataataatcatattaaaaattattagaatttttataatttatatacacacttataaatacttaaacttttatgtcatactttataaataaatcaatgtatagtgctaattttatattttctaataatttaaattataaaattataatattccttctgatagttgtccggtctgtgtggaaaaggagactcaccaccacttgtttgttagctgcttcttcacccgcagtcattaacgagatcacaacctggtgcggcaatttcaactggccgtctaacatcagagactggttcttgaacccctccaacagcctgcagaaaaaaaggttatcaactcagttgttttggcgaccttgtacactgtgtggataaataggaatcgttgtattttttagatgaaatgtaaaactgctagaactatgagtaaggagattaaatcttgtgttcaaaccaggtgtctaaatggttgtattgggggaaaagggaaacttgaaagttatattcttaatgtaatatctaattggctgtgagggctgagggttaggcttgtagccttagctggtttgtttttgttgtctttcttgcttgtttgaataaagatatctcttcttgttcaaaaaacaattataatattcagtgttatatttaaattttattattatataaatttatttataattaacaaatatatatcattattaaattatgggatttttaatgtttcgcattgtactttttagactcctcatgtgccatacctttcagactttgtttattcgtatttatatattgtgccttttgtaccctcttgtgcttaatcacatacattttatatcatgtcataccaatttatagtattgtatgctcgtgctttttgagctcgtgctaatttcgtgtcttgtcaagataccagcacatatttatagcggagccaaattacctgtccccattttttgtcccattttctgtcccaaccagttatattttgccaactcaattaacattccacctgtacatttaatagatctttctacaagctaactctgtttgtttttatttaatattttcttttttaaagaaacagagctaaatgtgttcctgtattctttctaaaagtaactctgtttctttttttatttaatgttttcttttttattctttatttttttatttaaaaatttctatcacttcatctctctcacgatctgtagctctaatagattattaagcatcctaactaccattgtcatttatataataaaaggtatgtataataaaattcttattatagactagattaatgaagaaaaccgataaaaacagttttttatattcatttgaaagaattataagtaaagagaaaataagtaaggcaaaatgttgggttttatgccctaaataaaactctttacaatctgattagttatc

SEQ ID NO: 389503 - DNA, 901 bp, Cannabis indica
atttccatctctaatcatgcaatcataacataagataatttttctgacttatgatcagctatttcaatataaataaagtgtcaagccaaccatttgaaggttgatcagtattaattcctacaaattcacttttcattttctcattcttctctttcttttttgcttcaagtgtaactttgcgaagagttctttcaattgttttctttttcttttttttcttttagaggttatctgccaatgttaattgtaacttcattaccacctttcatatagcatgctaaatgttttaataatggaattctcttagtcactttggtgaaaacccacatttcgttgggttctgttcttcgatcttattggcctgttacctcactttaacttttacattaacataataatagtgtccgctttgagtctaagcgcttatgtggtttatttttggtactttctcaaaaggcttcatactaatagagtaggatgaacacacacatatatatataaattcaagacaacgtctcttgtttattctttcgatgtgggacttaaattgatataccccaacacatttatattaaatttcttattcagagatttgaaatttgttatattatatagcctagtagaacaagtactcataaatgtacaaaagaattttttctcttactacaatcaaataacaaaatataggtattataacatggcaaaactgttattataacttaatttattcttaagatatttgagagaaatataactctcttcacactaaaaaaaacacaacatttggtgaaatctctactactttttgttggtgtgtctatttccaaggataacaaagactatacttgttagtagctgggtcaaattgacatggtccatttgaattaacaatccattcatt

SEQ ID NO: 389504 - DNA, 740 bp, Cannabis indica
aaaaaaaatcataaaatcttgtccaaaaaatcataaaatgaaatagtagaaaaactactttgttttgtaggcccttatttgtcatctattaaggtgaactatagtaaccttttaaaagggtttcttacgggaattttctatttttttaatagttaatacaaataatagagagattatgaatgagtatatataagggaatagattaaaaaaatttacatgtgaaataacatatcatagggtattgttgtctattagtaatactttaaaatttttgggtaattatgaaattttttaaaattttaagcaattattctaataaataaattttcactctcattcttattagttttaaaaagacaaaaaagaaaacaacaattacctatcatagttggtcatcttaattcataattttttaataaaataatgattatttccttaaatatactttacttatgagtagtgattttaaaaaatcactattgaaccggctaggttcttaggataaaccctagaaccggccaacccccataacaaacactatgggtccgccaagtcttaaacaagaaccctatcgtcagccaaggtgtgttttagatcaaaatatgttttttcaaaactcggacatgttcttcgtgttctcgtgacccaaatagttaagaatcacaacaaatgtcaaaatcgaatctttttcatcaagaaatcacacattatgtatcataaaactatcatgtggatcaaaa

SEQ ID NO: 389505 - DNA, 1538 bp, Cannabis indica
ctttcttctctgtttttcgaattcccttgagtgatgagtagtgcccacacacatcaagtggtatctcaatcatagtatggaagactatggaatttctgcatcaaagaaggagaaaagaagatccaggttcagatcttggtgatgctctgctacagaaaggaatcaagggctagagatctgaacggaaggagtcatattattccgctgcacccactgtaaggttttctaactttatatgtgtttattttcattgttttagaattcatattaggttgttaatccaacatacttgttagtaaatctagatcctggtaaaataatttccaacagaaatactgttagcgaacctcctcattttatcatactcattaccacgcctcttcacgtaaaattgttcaatggcctccagctgcactttaactcctctagcattgatgtaggccttactggaagattgaaatagggaggaggtaatggaggcaatgtcgtcttctccttagacaattgtgtagcaatggcaggaattcttttgggtgcaaagggtagtggataggactgtacacaaattttcgtaaaccgtcgaacccgaataacccatctaaaccaaaccgaaataacctgataaaaatttcaaactgaaaaactcggcaaaaaaacaaaccgcccaatctgtaaattgggggggttgaaaatatagccaactctcccaattaaccaaacataacgcaattatggatttttttcttttaagtttttattatatataataagataaaaaaaaaaccctaattcctcatcatgcgctgcactctccctctttcagtctccctttcccattcgcattctctgtctctcccttactctgatctctcttagtcccaatctctaatgcctctttcgagtctttaccgttggtaatccttgtctacgttgttttcacaattttcatttttgcttcacttattcgatccctggtcagtcttccctgtgcacgacgtcgaatcgttgtccccagtccagccacttcaaattacctaacaacctctaggacaatgattttggtatcctttctcttctttattttttctaaattgtatatttgaagaactttattttggtgtttctcgaatggaatcacattttgcaaaatatattatatataaatgtttgtttcaaattatttcaaagatagttagtatttttttctctattgttttctgattctctttgtctctcctacaagttgttaagtggctattgaaggaggcatcacatactttgggtgggagctcctcaggtagtaacgacaagaagaggaataaaaaaattggggtcggtttggtcaggttaaatccaatggttggtttgaattttttttttattatttgggcaggttgcacctaaaattttgtaacccgatttatacttagggttaaataaaatgtattataaaccgatcaaatcgaccgatgtacaaacctagtggtggaggctcaatgtaacaccctaactattatacgcgtgttagcgtgattttt

SEQ ID NO: 389506 - DNA, 514 bp, Cannabis indica
tatatatatattactgatatagtggtggccataaattttaatttattttatacaatattgagatttaaatatttacagtataaaataaaatatatagatataagtactcaagatcttttgatagtatttcaatttttattgaaacaataatcataatatcaatattattattcttattatttaaataatactaaattaaactgcactaatcaaacttttatttcattcctaaaaaaaaataaattaattgaacaattgatattctttagataatataaaatataacataattgtttttcaaataatgactgaatatgatgataattttttaacatagtttataatataatatgtaaaaattgaaaagacattatcattactctattaatgaataatttgatgataaatgtaagaaataaaaattataaaattaatggtagaatattatgagaatttcataataaaaattataataattaagtacacttttgataacatataataattactacta

SEQ ID NO: 389507 - DNA, 666 bp, Cannabis indica
atttgttcgaataaaatgcttagttaattttatgcgtctaaccaattttttatttgtctcccacctaagctgcgcatgaaaagtccaaagccaatctcgaagaacaataaagcttcatagggtcattctctctaaatacaggtagtccacatctttacagattaatatgtttatttcactgagtctctttaagactcagattgtcaaaggggtttcttcattctcaaatagatattcctatatctatatataaaggctaatttattaataatatgacaaaaaaaaaaaaaaaaaatactataagcaattatattagtagattcaacaaataaaaagacattttttaagttaacaagagatatttgttggaagataacatttttcattttaagatttcctttgttggaaatttgaacaaccctggatgattataaaaacttttggtatggtatgggcacatagtactttgtgggtaattttgtttagtggtatgtaatttaagtacctagacttctgctaaaatccaattaatataccaaaccaagtgcactgaataatgatattggaccaaaaccaaatccaattctatttcaattattcagagcattgaatggtagaaatttagtgcatgtttggcattataactaaaaaactgttttttatttt

SEQ ID NO: 389508 - DNA, 784 bp, Cannabis indica
acaacaataaaaataaaaaggaactcttaattttttatgtaccttaggaatggtaattgtcctccaagtctaaaaaattactatatttatgatagttcatctttacacaaaaaatttactcttttcttgatacaatcatgatataaattttaataaaaagagtaccaatagacatatttttcaaaagaaaaaatcatctaaaaaggtggtctacaatgaattcagtatgttgttttagatttttcattcaatggcacgaaagtttttttttttttttaaatgagttaatatttataacttagatatttaatttttttattagaaaatagaacaaaaagagagaaaatcggaaaaaataaataaataattaagttttaaataatttataaacttaataaaaaaaataaaaaataagaaaattaaggagataaaagataaatggctttaaagtgattttaagatgtcacgtcaccgcatcatgatagaataaccaataaaaaaaatacaattaaaatatagtattacccacctacactttgtgccctttgggtctgtagccgttattttccttttaactaatttcatcttcaactgccttctattttcttcatccttttcaaattctcccctggtctaatcgttccctcctaaagttctgctccgatcgccgtcctctcctcccatctccgcccttcctcttcaactgtcttccttctcccctggttctatggattccatttctaatgatatacattcttttctttctcttactgatgaggaaaga

SEQ ID NO: 389509 - DNA, 864 bp, Cannabis indica
agagagagagagggagaacaatagagaaagagactagatgagacaaagaagaaatagaatagtgattttaaggtttagtttaaaacatttagtcttaaattaatagttgtgactaaaagtgccagtaaaagaaattgttataactaaaagtgaattattagtcacaacacaaaaaaacagtaatcatataattattagtcacaagtttaagtcacaaaaatttataattatgattgaatatatctttagtcacaactaaatattatgactttctacaaattataaaatttaaattataaaaattgttacaaataatttattgtgattaaaacattatttatcattgtgattaaaaattatattaagttacaaattatttttattctgactaaaactattttttgtgtgtgtgaagccacgtcttcccctactcctcccttgcatgttgtttctttcctcacaatttgtttttgtctttcaaatgcattttttgcttctattatatacatttaaatctttattcttaatcttggtggaccattgaggtctcttatagcttccttcattataaaatcaggtaggttgtgaaaaccaactaaagttattcctagtgaaaaaaccataattagctagttgatcagcaacttcatttccttccccgatatatatgtgaaatcatgacattcatatcttgaatttcgttgtaaaagtcagcaaccactcttcctttattgtgcttggaacatcaatttgcttattcattatcatcgacacagtgagaattgagtcgacttacttccaaccatacacaatgccattggtttacaaatgcaatatgtatggcattcataactccatatagtt

SEQ ID NO: 389510 - DNA, 1760 bp, Cannabis indica
atcacacggaaatcttttcaaaacaacagtagattaccagtaaaacatcagtagaacactagtgaaaacttaacacatatgctgcagtatgaaacttataaaaaaatacagtaaaaaagtaaaaaatatagtctagcagtatttttgtaaaaaaatcacaaaattagtataccatgtaaatttctctcaattttggagttgtcaaccattcaagtagtttttgtatgaaaaactatcaaatctagataaaataaaaatatatatatatatatatatatttatatatattttaagataatgtgtacactttttttacaactataattatactttatcaacagactctctaatacaatccacacatagcaaattattattggtttaatatttttagatggacatagctttacataatacaaaaaactgatatgtgtggctggctgctaagcatttttgataaagtaatacagactatacagttgattgggcaagtagcaatatttttagattatagattgggaaaaaaccaataactaatgaagcaaattgtcactttcaaacaaataaattgattgataactcaattgcttagttgttatatatatgaggagacctataaactggatttggttttatgttctagagcaaattcttgtgttaagtaagtcaaatcggttctttgacatgagttctctgtttcgccgtcgtgggctacaacttgaagaagaacatgtagtagcagccggcattgtcaatcccgaattagatcctcaccagataacaaaggccggaaacaacgcctttcatgttgcagtactacatgaaactaatcccaaagatttacctgtgcagagattgctactatcccattccttgcttgcctttcagccaaacaagaaattcgacaccccgctacatttggcggccaagttggggaatgagagtttcgcaatggttctgctagatcatgcaaagacattaggcaaggatagtgactacagaaatctgctgaggaaggtgaattatgagaaggaaaacacagcacttcatgaagctgtgatcaacggtcatttggaaattgcaaggcggttgattcgagaagatccgacattgacatctttggtgaataaggcaggggaatctcctctgtttcttgctgtagagggacgtttttatgagattgcttctatcattttggacactacttttcctgattactctgtgttaggaagaaatggcatgacggtcatgcatgctgctgtcattcgttcctgccctacaggtatgtatatatatatctaatttcatcatctctaatccatctaaacatcttttggcactcttatactgtggaatactaatctgtttctgcttgatattatagtttgtgttttcattagttgcattgatattgtgtaggaatttaataccatatataggttaatattctcattatcaaatggtgttcaaccacgttctaacaaaattagaagcaaaagcccagtcaaacagagcacatactgttgtttgctctacctttttgtgtatgtgtttctgttgagtaaactgctagcaaaataaaagaggaacgatattaccgaatgaagaattctgggttgagtcgcggactaagtcgctctctttaagacgttcgcggcactgcccaggagtgtgcaagcagtcggaaattgccggtcgtccccaggataaaacagcccagtcgttgcactgtaccggaaccccactgcactgtagagcac

SEQ ID NO: 389511 - DNA, 1408 bp, Cannabis indica
tttttctttccttttttactttgttaagaattttttttagaaaaccctaattttctttagtaaagaaaaaacaattattttcatgagaaaaattttgttttagcattgagacaagttttttaattcaattcttttgttattaactcaaaatttcgttaacaataaatgagacttttttatgaattaaattaaataatttctataagaacttttgaagaataataaacacaagatatttacgtggttttttagttaattctacatagttcaggagtcattataatttttaatgttttgtttacaaagtatcgaatgaaaagacatacaaagaatcaaagatgaatatctttcaaagtgattacttgatcgaaaattgaccatctcttgctcagtagtcttctctcctatttatagaattttcatatggcagttatttttttctaagacttatcttaataactgttcatgaaatatggtcaatccccacatttcatacaattacaacgtgtggtaaaatgcataaatgcttagtaaccatcatttggtttaatccaataaacggttatttcattgagaaccttcctacactttgctgctcgcatattacattagcagtttaccatgtgggtttcttaaattcgtctcgcattccatgtggtgactcatctcgcctttgtatatcttgcatttccttctaaggtatagattttgtacttagtcatattcgagatgattgcaatacatgctattttgttctcgcatgttctctagttaacatttaaaaattttactcacctttaattatcttcttaacgtaagacttaaatataaaattgctaatagttattttcgaggaactttaaataccatatttatttttcttaagtcgtgttgtgactatatttgttgctcgaaatatggacatcacatttacattgtagttttttaagattacttgtatattttaagaaaatttgataacaataataataatttgcaattagataaaaattaaaatgatagttaatattcaaactactacaaaaatagcttttcctggtgtttttaaacagtcgtttaagagattcccgtcggtttctataatcgtcgcctattcgaccgtcgcaaaacggataaaataggcgacggttaaaaactgtcgctaatgtggacttcccgacgatttaaaactgtcgcctataacagagtataggcgatggttttaaaccgtgccctatattataggcaacggttttaaaccgtgccctatactataggcaacggttttaaaccgtgccctatactatgtttctttcatggtggttgatttgaactgtgaattcaatctatatatatatactagtctcattatcacaattaattaaaatataacaattgaatgtaaaaa

SEQ ID NO: 389512 - DNA, 1260 bp, Cannabis indica
tttttcttaaaaaaaaaaaaggtatttttattttaagactttttgtatttatactctttacttttaatattgtatattttttttttttgaaaaagtatactttaatatgtatattcacattttagattttttctgtatatattttttgagtagaatatatattttttaagttttgttctacatagtatatgcagactttttcgggtagtccattgggtggtaaattaatactaaaagttatttaataatgtacttcgtttagattttttttttttttcaaattgaagtacactaaaaaaatgtttaaaaatccttttacaaaaaaaagaaaaaatgtttaaaatcctttttacaaaaaaagaaaatgtttaaaatccttgtcaaaagaaaaatgtttaaaatatttccattccaaaatgttggctgttagattgtttttccgttattttattgtatccaaattaaaaagagatacaacatttcatttcatcatactatagcttaaactaaagtattgttcggtaattattaaaaaattaattttttaattaattaatcaaaaattataaagaaacgataaggttttattattcagtaaaatttaaaaaaaagaacaaaaaataaaatagttcccgaacaggcattaagttaatctatacaagaatggagtgcaactgtctaatattatttagatatactcataagaatctaaacacatggggacctaatcaaatgtcttttttgtttttttcttctgctaataattttttcaaatatatatgattatggaagcagagaaattgatggatatataatagagggtgtttccacaataatttctgctaataattaaaagacctaatcaagtgtaaattccacacgcatacgcatatgtctcctgctaaattggcatttagttacaaccccaagtggcggggccaataagaaaatttgaatccattgagcattttaattaattaaaacatgtacaatctaaataatatgctgtttctttttataataataataataataataataataataataataatatgatgtttcatgcttgatcaatacaaatttactcggggaaggaatgatcttttgttatctcctttgaatgatagggggcggaaccgtgagtattggattgcacctgtgttaaataatgaaaaaccgtgtttttgcaaatgtcagttgtatataagaaaatataaaaattgtaagcgtttgcagcagcagaaagtaattctgcta

SEQ ID NO: 389513 - DNA, 1336 bp, Cannabis indica
ctaagccttggtatgaagccaattatgtcctattcattataaagcttaggaaagaaagtcattgagtttttggccgtcttgatttgaatgaggggattttatttctttataattctttgaggactaccaaaatgaattctacagcaaagaatacaatgaagacttattctattttgccccctttgtttttttgatctccttggattttggaagaatatgtcccatgttcttgatttaggttctgacccgaaagctcctctaagggttgtggagattgctagttttccatctcagcagaaaagtgagtttttgttttaagtttttcatatgttgtataatatttgtttaactgttttattttcctctttgaaaatagtgattgcggagcatttgttgctgcttttgcagagttcttcattcatgggaaagatgtccctgatgactttaatattgaagtttaccgcactcgtcttgctgccctcttgttttcgtatggtcaaaggaaaaatgatgaaagcattgatagtggggatgagaagcagagcaagtcttccaagacttctaaattgaaaaagtagggtcattttatgagaaactttgttgtgcttggttgattttcatttcagacaatatctggtttttttaatatttttaggtactttatacgtttgatgttatggaactggttatcaacttataggatatttgaaattaaccattatattatgttcattttttaaaatattttaatagcaatcgtgttatgattttacaattaatatttttggtatatttttaggtgtacaacttttaaaaactattatatgtacaaactaatttggtagtcaaaatatttgtcatttcatttctaacatcttatctctacagattaccaactgttatgcaacttttttgtactttttattatacaacttataaaaactcatatcggacttttaaaaactatttctattgaaattttttatgtaataaattcttaataagtatcataactgtccagaaactattttgcaactacgaataaactattttaactttgctaattaatagaaatctatgaaaactaacatttaatgctatcaaaattctcatagagatttaaacaatttaaataattctggtatatcaatttaattgcttaattgttacatgtctttcggttgtgatcatgttgaccacattaaatttatactagcaccaagatcacataaagagttctcaaattttaaaccaccaatctcacaaggaattgaaaagctacatggatcttaagcttttgaggcagcttcttctgaattatggcactacattcctc

SEQ ID NO: 389514 - DNA, 962 bp, Cannabis indica
ttaaccaaaaaaaaaaattacaacctaagccattattaaaaaaacaaggctgatgaaaccagatttaagtcagagcaggtggagcaacaaaccatttacaactcaactcaaaaggatctttaagacaaaacaactcagcacaaaaggaactccaatataaaacagagcatacatattaaaaagcttgcatatacattaatttcatatcatatatgaaaactttaataagtaaattcgtacctcataagatggctaataacttctcctgattctctaaagtaagcaaataataacatatgaatcaagcttaactcatttaaagtaatttcaaattatctcatgagacaataagatatacatctcattataaaaaggattcatacttagtattgtgctactgccacacatgaaatacaagaaccaacagttttccaatgaaaactgaagaaataatatacatgtaagagatccaccttaatagttagaacgagaatgaatttatttcagagaggcttctaacatttccagcatataaatacattgccaagtagagtaatatacctgctattagataatattcaataccacaatgcagttttaatgcatattttttactccaattcatggttcttcatcacttgaagtggaagacaaaattcttacaagttatcacccaatgaacatatgtttaaatgaaacagttttaaagaaaaagttaatcacatatgcacttaagaaatatatacttgatggtgctgagtcatggactagacccgcagaaaacacaatcaaaattaatgtagatgcagcactctttgatagcgacaataagtatagtttcggaattgttgcccgaaaccatcttggtcaccttgttgcaacacgggccagttgccagggccggccctgaaacaaagtgggccatagggaaaaaaaaaatttgggcccttatgttagaaaaa

SEQ ID NO: 389515 - DNA, 1101 bp, Cannabis indica
agaataaccaatagtgattactattactagtattctatgaaccaagataaagtatttttttaaaattcttaattcttttaatgagaaaaaatatcaaagccatctagttgacatttaaataatataattgataaaaatgaataataaagtaagcattattagtaatggtgataaacattacacactactatgttatcatgcacatacaagaatgattatttatttattttatgtcggtatcatttttttttaatatgtaataaagttatcttgtcttgtacaattcatatttctaaatctcaatcactaaaaatgtaatttttgtagtgatattgaatttaaaattcatcattaattttagtcttgaattaattattcatgaattttgaatattgtaattcctttaaaccaatgtataccatgaagaccaaccactatgaaatctttaattaattattttgttgtaatttttaaacaaagtacctacaattataattttatatatttatatatataaaaattaagttttttcaatttttacacttaaaaataatttttttatatatatattttatatatatttttacagatttttacgtaaaaattcatatagcacccaatagagcaacttagatcgcaatcaaaattcatattgtaacacacatagaaactatcggaagaactaccaaaacaacccaaaccgtaaaatttttttaaaaaataataatacataggttaattccattaaaaaatttccaaacaccaatgttttttttttcatgttatattttattttggaaactaggtatttttgttaacttttgttatttttgagtgggtaaataccattttggatcatgtgttttgcaaaagttatcaattgaaccctctattttgttaaatgacaaaatggaccttgtattttctaaaatggtacaaataagatcctgaattgattttttgtcaaaataaaatttaattataatccgatctaaaagtgttatgacaaaattatttatattttttgtatctgttcgtattaggaattgttttcaagttgattatattaaaaaaaaaattgttaaaaattaagctcaagat

SEQ ID NO: 389516 - DNA, 1601 bp, Cannabis indica
aggagcagaaacatgcaaaccaggtgcatgtcaacttaggtgcagggtcctgtgcccttgttaacttgggtgctgggtccatgtttaaacccctaaaaaatatcgtctactccccaatatcacttggatcttcgttattttttatgacaaaaaagatattcggagtacattttgggaaaaatgattggaaatatcccaagttgacaaaatattaacctgggtgatgggtctaactttttgccacaagttggttttgtttgtttctcgaaaacactcatatctcaattatttgaaaaaaagacaaatattcccgaaaaacttctaaaacaccgattaaaagtggcccatgttgaccttttgtcaaccttagcgctaggccccaactctggctcccaaatggcttcgtttgttccctgacagcacccaaatcttaatttttgatgaaaatagagaatattcccagaagacttcttccaatttttttttggaaaatggcccaagttgacaaagtgtcaacctgggcgctcggtccccgtttcggcctccagactaatccatttctttcctgaaagcatttgatacttcatttttgatgaagacgaataaaatgcttgggatacttcttcaatgttgtggttggaagccacatctcaacctgagtggttcttggggcacctggtgccttgggtgctcaaaaattaaagtgctctgattttgattctaatgcctcaaatacatttgtgacaggtcttattcatgtcagagtacaaagtttgagccatttgaactaagacgaacccaaaaactaaaaccctagttgggatgtcaacttgggtgctaggtgaaaaccctaggtgcccgggttgccttccatgatggagttttgtctcttttcagttttcatgccttggacttgatttttcttgtcttcttgatttagaatactgaaagatggtgagttagaaataagttggtgggatcgaaacacacattttgtaatccttggagtcaacctaggcgtagggctagggactcctccaggtcgactgctatgactcgggactacacaactctgggatattttctttcttgccacatgtcaaatatttatatccacatcactaaggtcagaatctgggtaaacacactttgttaatagatgtttatatttatatttaggaaaataccaatgaatcagccaatttatagatttatcacctaactatttagtaagtttaccaaaaaaaaactatttagtgaaaaaaaaatccattaaacaaaattagcccgacccaccttctagtagcattatcaagtggcccaaaactgagcccaaatacaagaagaaagtctctagggtttcttccatatttaaatacttcctttcaagcctccatttgtaacgtgagcttgttcatactatttcaactcgaaaaattacgatgaagttaaaagaaaatccaagatcttactagcactatggtatgtaagaatttaaagaagaaataaatgtacttaaattcaacaatttcaatagttagaaattttaatgactaaaaaaatttaaaaagcatgatttagtagatatcaaagttcaaagg

SEQ ID NO: 389517 - DNA, 638 bp, Cannabis indica
tgttagtgtttcataattatgcagtgtaatctctcagttttcatgaggacttatgaaaattagagaataattgcgacccgtcaattatttctaactatataatttctatgtaattatctaattaaccaaagaattctagtaattacttcaaattacaatccactccaattataaagtgactttccaaaactaaaaaaaaattgtcatggtaggatttatatccttttttaaaacttttaactgttggattaatcatatatattactatggatccacatgatgacatgaaacaaatataagataaaaatctataaatagcataacattaaaaaacatttaccatattcatatatttttacccaaacaatattcaatgttttcaaatcttacacattacaaaatcttttatatattattatagcaagtatttaaaattgttgagaaatattttatttttctaattttctttctaaaaattacaattttgtcccttttgtaacaaaattattcttttcagcctctaaaagccaattctggctctatgcctcaataaaaaatatacaataaatatgaaagcactccattgcccccattacccaatcacatgggtgccacatgtcccactatatggggtggtg

SEQ ID NO: 389518 - DNA, 1934 bp, Cannabis indica
taagggttctggttgaaaagttgtagggggtttttgaaggttgaagatgatgaaaaaaatgaaaaatgggttcttgaaacctatttatacttccgttgggatccttgcaatttgaaatagatggcccagatcacttcttctagagagcatcttttgatccgacagatgggagttaaaaagattgcatttaatgctcaacccagacatttaatattcatcatttcacgtctcgtgtcctatacgcattaaaggaggggtcacctcaattgtcctgccatcattacaactcctcctaagaaacatgcccccacgcgtgcgtgttaccaaaagttgcattaaaggtgccgcatgcgtgccacaccaatggtacctacagttaatgaccctttacttggtaacagctcatgggatgcgtccgtgatcccatccagcaccacatgtcaaaagcttatcttcaaggagcagaagagtactgtaagctcccggaccgcattgtatcccgaaagcttggggagtaaatgttattcgtgtttctacaaagtatgacatgtggcacttaatgaggaggattattctaatacttccctaatcaaatccctttgatacaaccctgacacgggcaagcctcttggaaccgggaacaactcgagatggatgaacacacggaagcctacttaagcctaccttaacttcctagacgcagaaggaaaattgcttctcccggacccagaggggtttaagaagggaggctctcgcggacaatacctggacatgtatttgaaaggcctaaaatggatatcgaccattctagagtgccacaaattttgagcttttatgcacgcttgatcaccaagtgacagttatactttttttttttttaacgaagatcagatcttgtctcctacatctaagcatggtagtgtgcgtacctctactacctttttgccagacggttattataaacttctactcctaaagaagcaagctttgggcgacacgtgcctctactattaaaggttaaacctttgcatgccacatgtccatatggtacaaaatggttcccattatctagctgctgcacgcacgggcatagtgtttcccactggatcattcagccaactctcatattgcatctaatttaccccaatggtgaaattttagtagaaaccttaggtgggtcatgggcttgtctaaacccgccacttaacctataaatacccttcaattctcattggaagggggcatcacaacttacgtagctaaaactctgctaatattactctagttcttcttcttcttcaagagaaacttagagtaaagagttagggtttcctacaaaaatattgtaaacacattaaaattgccctaagaggctaatggacagacacgtggagtaaggtttattaatacccgaactacgtaaaaaaccttcatctatttctttctgtaaattattgtttctttagctcctaaatatttagtttatgaaaatctcggtaaataattttgtttcccaaaatcgaggtctttgatttttggtggtggtggtgtggtggttatggtggtggtgataataatagtgggtagtgtggtggtatgtgtggagaataacgaaggagaaagaaaatgaagatgaagacaaacaaattatttatttattttggattttacattttaattttatttatattttaagtgattttataattttttataatatttaattatcaatattatgcgaactactaaaaatttactatgtgtgtattagtatatactatggtatatataccgtgacacttaactaaagtttttacacaaaagagtaaataacctaacagaagtgaaatttagatagtttattgtcaaaaaattaaggctaattagcaattttttctcccgaactttgttatatatcaaatcatgccccctga

SEQ ID NO: 389519 - DNA, 1138 bp, Cannabis indica
agtttaatctctcttttgatgttagtaaaattgttgagaccgaattaatttagttgaatacaattttcaattaataataataataaataaataattaccaaaaaaataaaaatccagttccgttaggtttgtgatttacttttcacttttggattatacggacgaaagttgtttagtttttgtcttaccattagaaatttaacattatttaatttgatcacattatataatgtggaattttcaaatattatctatcttaaaattgtattatataaaaattaaggtttgaatgtataaaggggcatttgtgtaaatttaagtttatgttctaataaagataataaataaataaattagagtacaacttatataaactaataaatgtgaagtgatgaagagatttagtctgaaattttgtccccaaaaaaataaatattactttttaaggcaatattattgtctacaacaagtcttctctcttttactccttttaatggtttcacattaagatttgagctcccacttttcattttattttccttcttaatattatagttttcccatatcttttttcacaataattatttaaatttaatgtgcttatcatttatcatacaaaaaaaaattaattactaaaaaaaaagtcattatctttatataattatgtggaagaaagtttatgtttatcaccgcaaatttcatgctaattgcctaatttgaagaaaatggaaactatattatataaatatataaatatatatatttatatatctcactttcattcacaccccaattttcttggactaatctttttaggcacaatttcaaccaatgctacaaacattttagataagaaaaggttaaatttaactaactttttttgatatagcattaagcacaaactttagtcaaatcaatatattatattatatatataaaatttatatatatgtgcatacacctagtgtaagtatgtaagtatactatgtatattcgattcaatctacacaatgacatcataattcaaataaaaagtttcattaaaattttaaatatgaatacaagaaaaatgaaattgatcgaagtcattaatttcttttcttttttattaattattatttctttgtttttttttctt

SEQ ID NO: 389520 - DNA, 839 bp, Cannabis indica
atatacatattagattaatgttacatataaggcacgtatgcttagttttagtttttcaatatataaaaagaaataaaagtttgttcttcaatcatttacaatataataaaaaactacttcaagcatctatcattataatttatgaatttatattgtatagacaatcatacgtgtttttcaactaataatttacttacatgtctttgtttcatacaaagatctttgacacatgatatatatatttcatactctttgattatgtgtaatatttcatcttcttgagtttttaatttcttttgaaaatatttgagtagtaaataatatccttaatcatttaaaattattgcattcacttcggggaataacgttgaataagtataacattattataaattttttagaaacttattaattttttacccaaaaaaatataaaaattattcaacaatttcttttataatatttcaaagaatatataaatataattttggcataattttcaagatgtatgcaaaatacgatctttaatatatcatatgcaataaattaataatgtctaatataaatatttgcatcaatcataaattttttcaatattctctaattatattcataaatacaatttatttttttgataaatatagaatatttactgaaatttatagcaatattacaattatttttttattattaaatatataataatatatattcattattattatatttcaatcaattatatattaataaatattatgtttgcataatcttatatgcaaaaaatttataaagaatatgtatatatatatatatgaatatatattcatctcttttattat

SEQ ID NO: 389521 - DNA, 672 bp, Cannabis indica
tttaaatcattgcctatactctgttataggtgacggttttaaaccgtccggaatagtaaaaaaaaatacagatttaaaaccgtcgcctataagggacccaataaattttacaaattccaattaaaaccgtcgtctatttctgtaaatactgttataaactgtcgggaatattaattttttctgacggttttaaacagttacttaatttttttagcgacggtccaaaaaaaaaaacattttttaggactgtcgcgaattttgtagtagttccactatactaaaactaatatgttaataaagataacctttaattaaatatagtttttacattagttgtctctaagacttgattgagaacatgtaaagatgagtggcctaacctcctataccacatatctattgtggaaagaaaagactgggagactgatttacattcaattctaaggctactgttgaactagaaagacatgttggtctaaaacatcttctaaacttaaataattttccaaactcttaggtggggtttggttggaggtaatgaaatagaatggaatggaaagaaaataatttttattctattcatttgtttggttgcattttaaagtattagaatagcattctaatggaatattctttccaccattatggtcgaatggctattccattttaaaa

SEQ ID NO: 389522 - DNA, 2671 bp, Cannabis indica
tggatatatttgcttcaacataaatctgatgtttccactatcataccacaatttttatcttatattcaaacactaatttaattgtgttttcaaaaaattcagatactgataatgctacctgaattagtctttaaagatcttttcttaaaatatggcataatgcatgatttcacttgtgtcgaaacacctgaacaaaacgcttattgccgaaagaaaacatcagcatcttttaaatgtagcccgtgctctatattttcaatctaaggttcctatacgtttttggacagattgtctaatgacagctgtgtttctcatcaaccgcactcccacaccaaaccttgggaacaaaactccttacgaattactttttgatgaattacctgattatactaatatgagaagttttggttgtcttgtgtttgcttcaactcttacagctcatagaacaaagtttgaaccacgagctcggacatgtgttttcataggctacccaaaaggaatcaaaggatacaaactctatgacataaactctaagcaaatctttatctcaagaaatgttgtttttcatgaaagtatatatccttttcataaattgaataatgacacaagcatgcttgatcctttttcaaatatggttttaccaacatctaatgtttctctaacacctattcaagattttcctcctacaggtactagaatttctgccactaatgatgctttgcaggaacatataccagcagcaatggacaagaacacaccagtccatacatcagttcctgcttctttttctgcatctgaacctatttcaccagcagcaagcgatccattagtcacaccagattctcccaagtcaccttcggatgcccctgctgttgtgccatgtgatcccacaaacagtgaacatacttcatctcagaatttaagacgctccagcagagcctctaaaccaccacaatatcttagagattatgaatgccactctgtcataaatgacagatcttctactcctcatcctcttgataaatttctatcttataataagctttctgattctcacaaggcttttatccttgcagtaacagctctctttgaaccaacttcatacaaccaggctgttcatatcaagatctggaatcaagctatgcaaaccgagatctttgccctcctcaaaaacaaaacatggaccgttgttcccttaccaccaaacaaacgtgccattggttgtcgttgggtatacaaaatcaaatataatagtgatggatccgtagaaagatgcaaagctcgcctagttgcacaaggatatactcaacaagaaggacttgatttttttgacactttttctccagttgctaagatggtcactttcaaattgctcttagccatttcaacaatcaaacaatggcccattcttcaacttgacatcaacaacgcttttctcaatggagaccttcaagaagaagtctacatgacactcccacaaggacttccactacctactgatgtcccctccaatacaacacttgtttgcaaattgcacaagtccatttatggccttaaacaatcatcaaggcaatggtatcgcaaactttctgatgctcttctagatgatggtttccaacaatcaaaggctgattataccttatttactaaaggatcacaagacactttcatcgctcttcttgtttacgtggatgatataatcatcactggacctagcctacaccttctccatcaattacaagagactctcaacaacaaattcagcctgaaggctctcggccccttaaaatacttccttggttttgagatagcccggtctagtgaaggactttttctatctcaacgaaagtacactattcaattacttgaagacactggatacataggtagtaaacctaccaaaacacctatggatccaagactaaagctagatgatgagcaaggagaaccacttgataacccctcttcatatcgacaattgattggccgccttctctacttaacattgtctagacccgacatcacctatgctgtcaacaatcttagtcagttcatggctaagcctcgcactcctcatctacaagctgttcaccatttgattcgataccttaaaggtagccccggccagggtcttctttacactactacctcctccttacaccttagaggattttctgattctgattgggcatcttgccccactactcgaagatccaccacgggattttgtgtctttttaggcgactgtctcatctcatggcgcaccaagaagcagcctactatctccaaaagttcagctgaagctgaataccgagcccttgctgccactggtagcgaattaacttggcttcaatatcttcttcaagattttcaagtttcccaaaatggtccagccttcatatattgtgacaatcgctccgccatccacatcgccaacaaccccacttttcatgagcgcaccaaacatatcgaacttgattgtcacttcattcgtgacaaaatcaagaattccaccatacggctcatccctgtcaacagctctcttcaacttgctgatgcctttacaaaaccgctgccttctactattctctcttctcatattgccaagatgtccgttcatgacatataccgtccaccttgagggggggatattagaatatcaacaacatta

SEQ ID NO: 389523 - DNA, 713 bp, Cannabis indica
ttttttttttctataataattaggaatggcaaatggagatgagttcatgttatttatggccaaatgtgtgcttttagtttggattattagaacttatttaggtgttggatcgaaagaaaaagttcactgatcaattttaactagagctaacttcctcaatgaattgattcaaggacatccacgtagatgttatgacttattacgtaagaatatttcatgctttttgcgacttgcaaatgagatgagaggactactgaatgattccagaatagttagtgttgcggaacaactggcaatttttatatttacattagctcataatgagaggaatagagtagtacaaaattgtttttaacattctggaaaaactatcaatcatcattttaacaaatgtttgcaagtatgtgtaagactaggaaaacattatctcactccagcaggtagaggtgttccacaagagatatcctctaatcaattattttatcattggtttaaggttagtttcttttttttaaaaaaaaaatataataaagatatttaacataattatatttattttttagacttacagacaatactaatatgttatttggaattatatatattttattaggattgtgttggagcaatagatggaacccattgataaaggctgaaattgatacatttaaagcctttatttgtgtatatataattaatataaattaaatatt

SEQ ID NO: 389524 - DNA, 1200 bp, Cannabis indica
tttttgtaaattaaaattattaaaatgaaatatatgtataaattttttaaagagtgtaaataaaatttatatatccaatacaaaattgtaatgagtattctcacttttcagcagtatcaaaaaccttgacctacgcattaatcttctactataaaaatgcaatattaaagtcattgaaaagtaaactatactactaaataacaaatttatatatgattttcataaagttttagaattgacatcattccaaaaaaacatacgtggagtattttactttaataactcccacagtcataaaatatgtgctttgatacatattattatatatctttaagatgatcatgagaagtctttggatcttggtaatacattgtttggcttgaagttgcttagtgcagcattccatcactcaatgtaagacctacttacggcaaataatacaattaattaattagcttttcaattaataaaaaaaaaaattaattagcttttcaattctatatttataaatatatacaaggaaaataaaatgaaagtaatacatatgataaagtaattactttgagttatataaagaggttccaaaaatttggtctaaaataataagattctaaagactgtaagtaagatccatccaaatgtttgaaatctgttagctcacttggaagtgatatataaagtcactgtttccatatgttgttcctaaaatctaaattttagtgcaaatatatttttataaaaacataaattcaaaataaaatttttaaatagttgtttacctttaagatcattttttcttgtaaatcatgggtaacacattgggttgaaattgtggatacatctttcccttttgtagcaatatcatctacaatactttcttcatttgaaacctttaagaaaagaaaaaaaaagtactttagtctaagaaaatataaagagaaagtcaaaaaatatatttaaattaatattaccttaattctttttcataggtatcgactttcttattatctcgtacatttttcttcatagaagcaactttctctaatttagaaattttatgcttttttggtggtcattcatgtctttgtacaacctattagaatatttctaattaaggaataaatatattattgattatgataaatgaatattttatattcattgaatctggatagaatcaattacgtaatattctatata

SEQ ID NO: 389525 - DNA, 1292 bp, Cannabis indica
gctaaaatagctcaaaattttatattatgaacactgttgtatatatgggcgtgactttttgacacaacacaaaacttacacaagtccagaaagcacgagcatgattaggcacgaaaaaatatgggtttaggtacgacatgatacgatgctataaattggcatgacacaacatgaaaaatatatctttaaacacgacacgaaaaatacgaaggcacgacaggtaagcacaaataaactaacccaaaaagtacaatacgcgataagcctaaaaagcatgtcacgatatattaacaaatcatataatttattattattaataataataagatacaaatttattaattaaaaataataataaaacttaaatataataatgaatataattctataattaaaattattaagatatgaataattaagattatatattaatttatttatagagtgtgctattaaaatttgagtatttataagtaaatatttaaattctaatattaataatttttttatataatgatttagtaaaatattgttcaaaatttatataaatataagtaaagttataaaatctatatatacttcaataattgtacaaaaaaaaatgaaaaaaattaaagtatgaatttaagtccagatatgaaatgggctagtctgttttaaaaatatgggctggcacgagcaaagcacgacacgaaaatatcggtcttataggctgtgtcgttcctaccctttaaaatattggtacgatacgacacaattcatgtggcacggcacgacacttcttattttttgaaaagtacgaataaatatgaattgtgtcagtacgacacgctcgaacttacaatactaattacgaatagtgattctctacatatagacaactactattaattcttcaaataatattttaaaaacctctttctattttctttttatttttgtcatttaatattttttatatatgagtaaaatatattataaacataatatttaaatgatatacataaagaaataaaaaaagctaatatatggtataatgtaaaagtgtgagataaaatagaaaaaagtaaaattttagtgaatattttgtaatataaaagtgttcttatgacatgaatttgtaagttaccttgaaaattgccactcccttttcgtattcacaaaatccaaactactattaatatgcaacacaatacaaccaatagcaaaaacaaaacggctttcgcaagagattgctgaaatttattgggaaatttacatggtatactaatttttgccatttttttacaaaa

SEQ ID NO: 389526 - DNA, 843 bp, Cannabis indica
attttacccatctaattatttttcaaaacacaaaattttttaaatcaaaattcaaataattcatttaacacatgcatttttaatattttttatatttgcgacaggtcttataaattatatataaacatagatatattatacaatttagagcattatttttgggcaccagtggtgcttaacattttttataagaggtacctcaagattagttagcgatattttttaaaagttattttcttaagttatatgaaacccgatatttaattacactggtaacgatatgacaccgataaaattactaggcgcgaataatattttttaacaattctctacaacttattatcatgcaatgaaaatactaaaaatactcataaatattaagtagtagttaaaaacaatcattatatatttgtatatatatgattcacatgtgtttcattgcatgattagattcgaaaattaataacggcaaaatctcacttttgataaaatttggatatggctaagtgtgttttgggtattaatcaacatgttccacgttatttggtttatggggacacatttacatgtaaaaatgtcaatatatataatcattatatatattgatagcataacaattataaatttatatatatgtatttacatataatgataattatttttgcattattaatgatcgaataccttgaattgaattggctcggggattgcttaattcaagttttaaatcaaattattattaacagaaggcaaatttgactaaatatacttatataacattaaattttttcccttaaatttataattatcaatatttgtaatctaggccaactttaatgttat

SEQ ID NO: 389527 - DNA, 1055 bp, Cannabis indica
aaaaaataataataaaacttaaaactaaaaataattaaacaatataagaacaaacttaatgtacagaaaagtagatttttttacaaattaattcaattctatacaagagataaaaagaaaatcttaaagtaaattataatggttaaaacattcaagaattgcaatatgacattttcaaacaaaacagatctaaaaacttgaatttggaagcttattcagatgagcttctttgccataacacaatgtctttttttttttcatttattagggatctgaaaaagaaattaaaaataacaaaaaatattatcaatatgaaaacctgaaaaaaaaaatttcaagctaaattattttgaaaacacaaatggcaaatcatcaaattaaatatataggttcaaaaccatcacatgaaatgaaataatgcagaatccataataaataaataacaaaaaataataattttttcgagaccattttatcaattatttttgaaaaataaataacaaaaatatataaagatgaaaaaacataccaataggatctgaagatatatacattgataatcatcatccatgcctccatttttttcaaccacatgaaaattgaattaacaaataaaatttcagctctaataactaacattaatcgaaaactagccaaaaataaaaggtaacatccttaccaaaaatagatttgggctgggaagaccatgtgatgtcatctcgagctaggtgttttaatggtagggaagaccatggaagagctatttaggctaccaccagacgccaaagaagatcttgggattaccgagagaaagaaatgaggatcaagagagaaagagaggaccaatatcctcgcgcaactcccagtcaaacatgcccaaatccctagctcgccgtcacatccatggcctaaacctctcgtccctgtcgtccacggcctaagctcgacatccacggccccatcgtccccaggctcccaccccgttccgttcaaccactacttcattagacaggagaggcgagagagatagatggaaaaagatagaaaaaaaaaat

SEQ ID NO: 389528 - DNA, 683 bp, Cannabis indica
aatacgttgtaggttgtttgactttcaattatatattttcatataagaaaatccaaaagaagaagactttaaactatattttttttagtacaataaattatttaaaattttcttttaccggaaaatttacgtctgaaaaatctccaaaaagaaattacttacccaaactcaaaatatgactatttttctttcaatccattcaattcaactctcctagtaaagatggaccacaagaaaatgaaatacacaaatatgtagttcaatccaaaatagtcagctttatttagcttcaatactttatttggcatttctactgtaatttagtttcttataatataaaaatccatattttgaaaaaaattaaattgatttttgtaagaattcgaagaaggtcgtgtttttatgtaaagaaaaaagagtattcctgcaaatattcatagaaataagggagtcatggatagcctttcatgcagttgggcctgtctgaattgggcttttggtacaataatttttacaaaaatactaaattttgggcaaatatttataattttactgccttatcattttttacaaaaataccatctttttataaaacaatctaaaacaaccgtaaaacaataaaatagaaaaattaaaaacaacagtagaacaactaaaaaataaccgtagaacaacaataaaaa

SEQ ID NO: 389529 - DNA, 1506 bp, Cannabis indica
tttttttttatagtcgtgtacatcataatcatttaagacaccctacaaaattttaagaaatttgaaaaaaattaacacgctaataaagttcaaattataaattacacgcaacactcttttattattttatactcgtgtaaaatatattgttttaattttaatattattttccataatgtaaattattctgaatatctcaaaattttacaagatattttaaataactataatgaacacaactatcaaattaaaaatttaaataaaaaattagatgataaaacaaatacaggtgtatcgatacaactattttagagggtgcattgcatttgtagaatgtgtctttgcagaattacaatttatttatttttttttataattttctccaaaataaagtgcggagaaatgtgtttggaatttaatttctatacatatatcgacacaattttatctttgtaaaaattaaggtggcgtttggttggaggtaataaaatagaatgtaaaggaaaggaaataatttccattctattcttttgtttggttgcatattaaagtgttagaatgtcattccaatggaatgacctttccaccattttagtggaatgacaattacattttgaaatggaagtaaagaccattctaatgcatgatcagaaaaaatttaataatttttttatcaattttttttatgcattttaaatttaatttattctattcctattctcattctcatatttttattcttcccaaccaaacgccaccaagttataaaaacaatattattatatacaaaatgatttaataaaattaataatattttttcaaacacttgttgactttttttctaataatgtatatacatatgtatttctgccagtaattatatagttcatatatattttgttttcacactaatatatataaattgtgagaaaaaacagatattatatacagctttctacgtatggctgtatctggaaaattctctcaattattttattttatttaatatctttattcacattacaaaaaaaaaaaaaaataatgaaaacagaaaatattaatagacaaaaataaaaataaaaaaatactattattattagattgaggaatttcagccttggtccagaaagctgacgtggcgagatgatattggataaggtgcaggtaatagtatgtggtggagagtagaggattatagaagttaactgaaagggacaacgaccagagcatccgaggacaaaaagaaagtatagttggttctttttccaattccatggatatccattcttatttttcactcactctttctctctctccttatatatatacatatatatatatatggttgtataaacatggacttttcacgaaacccagagttggtttttgtttggtggctattgtagcctagcttcttcttcttaattattattattaatattaatttttccttactcgaaaccgataacattttttaataatatacaaaaacaataaaaaacaaac

SEQ ID NO: 389530 - DNA, 570 bp, Cannabis indica
taaaaaaaaaaaactaagagaagaaaaattacaattcaacattattccaagccttcgtaaatcactgccaataagtgttctatctattgtcactgtaatggtaataaattagtttttgcatcgtatgtcttcttttacgataagataatgttgtaatttagaacacttattggcagtgatatattaattggcagtgggcactagaaatagatagaacatgtaagaagacaggtttaactaaaaatagaaagaagtaaatatttatattaattagtatatatattagattgttagtaaatatatgtaaataagataattaataattaaaacttacaactttttgatctgttaagtaattgttaggatttgtacgtgcggtgacatcactaatatatttcaatacataaaaattacattttttagtttttaagttattttggacaattttctatcgatattcctagatacgtcctaataaacgcatttcatccccttgaaatcccgtatatactttcttgaaaattacattgacatttcaattaattaatatatatatataacttagttaat

SEQ ID NO: 389531 - DNA, 1625 bp, Cannabis indica
ttgttattattattttttatttttcattttctgaaaaaacatatttgaagattttatggcagctagtaggtgtgcacatagattgagttgggttggctctcggttagaggtgttttaatggattaacttaatgattgcagtttgaaaaagttataaattatttatttttttaggagctaattagaatttttacctcctaaactttgacatgtaccaaatcatgctccctgaacttttcaggccgttaaaaaatcctcccgaaaaactataaaatttttagatttaaggacttctgtctaatttcattcaattttactaatatgacgatagactttgttagtaaaattgaataaaactcttttaaatctaacaatctcaatagttcggggagaatttttaacgacttgaaaagttcaggggacataatttggtacatatcaaagttcaggaggtaaaaaatccaaattagcattttttttttattgtacaacttaaccctacttagtataataatataaggggggattggattgagatgaatatttaaactttaatatttatgttacaaatatgataaaatatttaacctagtgcatataaaaaaagaacaaaaaatatgtaaatatatatatatgtgtgtatgtatgtaaatatagtgctttaaaaaaatttaaagtgatagtggtattattgtgtaggtagcaaagttaataataatgactgattctcacgttagacttgttggtggaagtagtaagataattagagactacgtgttagtggtgtgttttcggttaattaacattataaggttatcataataatataatttatttattaaaatgtaaaatatatatttgtatatttgtatatattttgtgaatgtaaaatatattttatgtttgaaagttgtctcaaatttagaacgtctatcaagaaatgagttggattgggtcatatagagttagagtaggggatggaatgttcattggaccacatccaatatttttaggctattcagatccgatccaattatatattagatgttagattttaccatattcaattcgatccaattaattttatctaatcgatcaaacatccattaaatgttggatttgatcggttctatctcggttctatctattggatgtatttctattgcattgattcagatttatcagcattttagacctagtatattttgaatcggatcagatctatccaattttttaaatgcaggtccaatccaatcccaaagagaaaagttaatttttatatatgtatatattaagtgtaacacaataaaatttaattactcatccaaactaaatgaaaatactgaggagtttgattaaatgttagatgtattggattttcagacaccacacccaacattcgatccgatctaattggatattaaaaaataactaacatccaatctgatccaatcacaattagatattcaatgtttggcggtcagttgtaattgaaccagtcggttgtaattagattagatcgttttatgcacactcttcaagtgtgcccaacccataattacatgacatatcatttttgagcctaatgagccatgacctactcttaacataaccctttattataaa

SEQ ID NO: 389532 - DNA, 531 bp, Cannabis indica
atatatattatagtgatgagtctttttatgtattggtagtgatataattgcagcttttaatgcattaaaccataatatctcacacaaactcacattatattgtcagagcttttaaaaattaagtctctctcccaaaacatatctcgatctatatatgcatgtgcagccctgtttataaaccatatatgcatgtcagagatatttatatataaatatatttatatacatccatatatatatatttaaatatataataagattaatatatataagtttggatttgtttttttgctcccttcctcaagttttattaataatattatgaatatataaactcaaatgaagttccatttcatagttaatatagtgtgtatatatatagatatgtttacgtacgtataggtttctattttcttaggtggatatatatataatatattattatatagtatataagtatgttacacccatacgtactgaagcactatatagtatatatatatatagatataattaatgtatatatatata

SEQ ID NO: 389533 - DNA, 740 bp, Cannabis indica
acatatacttgcatgttgcaatttaccacaacaatagttacgttagttgagaacttagacagttatgttagttggttcctaaatagctcatgtctataaatagcactatctaacctttttgtaactaatgcattattataacacttttatactcaataaaaagagaacctgcatcccaaggggattcaaggcccgatttgattcgatttaacattgtgtgtttgcgtgagtttgtttgagtattttgatcaaggcttagattgatttggaatctattcgaggtgattgatttgtgtgaatgctcaacaacaagaaagcacgtggttgatacaattattaaaagatttacatcaaccaatcaattacttagtgatattatactgtgacaatcagtcagcaatttgtacagccaaaatcctgtattttttatgtaagtacaaagcatgtaaaagtacactatcactatatgagagaaggcactccaagaattcaccataggattaagcacaatcaagttttcaaaattcagaaatcaactaaatttcattaaacgagatgaatcttgaagataattccaaacttctgtaaagagcactagaaacttgtataaaacttaaaaaattataagactaaaaaacttagatgcttcactctcgtagcctataaatataagtatgatgtgtgctaaaatacaagtttgagcaaaaaagttcaagtgtgagaaagagagtctaaagtgt

SEQ ID NO: 389534 - DNA, 1292 bp, Cannabis indica
acttaacactgagaaatgtttccctttgtaatgtaattggacagcctcacatgagcagtggaatctttcttctttttcttgaaatgtttagatgcagctttaagcaccttattccaaacctgtaaataagaccccaaaaccaaagtagagacttttaagaacaattgacttattagcacaagttggagattttttttctttccttctttctaatttcataaaatttacgaggacacctccaaatttttaaggtgaaaactttataaatcaaaatttcttacctaaatctcaaatgggtacctccaaattgaaaatataacagggaaagaaaaacagaaataataagaagagctagagcaatgtacctttctagtaaggggattgcaagtgcctttacacgaaggagttgaagagaaatcagaaaccaatttcttcttaaagctgttcttgttcttcgttttgctcttcaaagcactgagatttaaggcaaaacccgtggtcgtcgtcttaatcatcttctttttcttcttcttggaatgaactttttgaaagctgcaatttgggttgcctaactcaaaacccatctccagattgaggtttctgggcgaagcgaaatccgaatcagagtccaaatctgcgtggctgtaaggtcgagggaccaagggagaccatattgagctctgagaataatcgaaatcgaaagcggaattgtcgggaaacttgcagagaagctctttggacattaatggctccaaatactccaccacttttgcgttgcaaaaatccattaatgcttcttccttgttcaaaactttctccaacttttgtgatgaaagctgaaaaagcaaacgggaatggtggttttattttaagcagcagcgaaagggaaagatacagaaaaagtgaccgttggaatgggatgggttcggtgttgcttttatgtactactaatacttactcacatagtacgtaattttcattttataattgttaattgctgtgcttgtgtctcaccaataacaccaaacatagattctctaatataaaatagagaatttttttttttgtaaaataaaataaagaatctttaaatctttaaaattttaaacaaatgaaaagacactacaccaaacaagtcaattagtgacattttatttaggggattttagaaaaataccaatttttctttgttattttttatatttttactgttatactttttttttttttaataattttacggtatcaagttatcaaaaatattgtgttaatattttaaaattacaaaaata

SEQ ID NO: 389535 - DNA, 1087 bp, Cannabis indica
taatatattaatatatcattcaccaacgggtagcatttttataattgtaagattattccatatatacaatccgtatatactgtaagttccttcattatttcgtctcatcctatatatgtatatatgtttataatttacataaacacacatgccaagccatgattatatatatccatatatttttataatatgtatggccattgaaaaatttatgaaatgacgagacctcttttcatgctttactatgtagttgatatttgacttcacaattttctaatatctacacagtaaattttttcattattccattatcaagatatattattgtatataatataatacataaatatatacattacactattaaattgatgatacaaatacatatatttacatatttatatatacatatatttttttagcagttttttttacagcatatatatcttgatatatatataaaaaccttatgcctatgcccataaattagctatttgtggttccacttgaacatttacatcaaattgattttgggttttttaccaaaagcttttatatcagctaagtggaagtgactaatttgaataattaattattttgcattgataattcccaaacaagtattaactggatttattactttcctccaaattggattcatactttataataactttaacaacataaaaattttgttttggattttttattcttccctttggttatataccacatatctgacttattttctgaagtctagtgaaccaaaaggaaactttgaagattttcaataaatcgggcagcataacgccataaaaatttataggtattattctcttcgattatatatcacatatcgacttattttctaaagtctagtgaatcgaagagaaatatagaaatctacgatgaaatcgacaacatgagaatattagtctctttctttccccttttattatatatcacattaacttatttctgaagtctagtgaatcaaagaagtagatctatttatggatcttcacttactcttgtagagctttgaagaatgactttgaataatacagtttttttttttcttttcttt

SEQ ID NO: 389536 - DNA, 1096 bp, Cannabis indica
ttgaaaaattatataaaagaaatagacactaaaaaatacatataagtgattaattcatggtcacttaattcattaattataaaaaatagtaaaaaaataagtctaaatttaagctcgtataaataaaataatgagttattatgaaaaattagtcggctcaaataaaatatagcacaaatccaagcacattacgaaaatataaatttacagagagtgccgaacttaccttttaaaataaaaataattacataaagtattaattttgtaattttttttacatatttacctttaaagtttttttttaataatcttacaacattctatataaattttaaaaaataataaaaattacataaaagtaataaaaaaataatacacaaataaaaaaaaataacaataatataatataaaaatatactaacaaattatattttatgtaaataaaattataaatattataaaaattataaaaatattaaaatttttgtactaatcctaattttatattttgtatattttttaaaaaattatttctttaaaatattaatataacttatatatttttgtttgattaggagacagcatgacactatattattgcgaacattttagaaatattggccgcccgacccgatagacatgtatttacaactatggttatcactccctcgtcctgacactgtaagacaaatcatgataagttttgtggtgggcccaccttttctttttgagtctgacccatcatcacacggcacagatagaatcaacaaattgttattggaattgtaaggtgcataattaaatactcaatttttttttttttataaatattattttgtattttgtgttttgtaaaaattattaattgaatcttttattttattaattaataaaatagattctgtattttttaaaaaggaaatttagattttatatacttaaaaaattaaaaaatttattattaaactaaaattttacaaaataaaaaaactaatgatattttattaaactaccaaaataccctcacaattcaaaccattactctctctttcccccaaactctctctacatcatctctctctctcctaccccataa

SEQ ID NO: 389537 - DNA, 1096 bp, Cannabis indica
tttttttttaatcctttcttttatactgccatacgattatttttacatttatattgcacaatatatgtattgtatattgtgtaccgtataaatttgtataatagagttttatgccatttgtcacctaaaagtgtattttactatatttttgtttaaaaaattaataaatattaatttgaagtggatttttatgtctgtggcagtttttattcatttttaattatcaaacaaattaaaaaaaatagcaataaaataaactctttatcgctattcttgttcaatttttcttcttcatctttttttttattattatttttattttctttcgtttttgtaaattttagtcacgtttatgtgtagattgctgttgaaagttagttttagttagtttcagttttttatttttcaaaaactattttccctctaattttcgccccatacgttgttacttttactcttataaatattcatctcatttcatttccatagttgttacatgttctaattctttgttcccagttattaaaaaaaaaacccagaaaaaccttaaataaccttacctcgtcatcaattgggaagaaaaatttcaaagaccactccctagtcctacgtccactgttgctcccaaacagaagttcgttgttgaatctttggacaagaggaagtctaaatgatctcgacctattttggaaaattcgaattctgacttcgagcttgaagatgaatattttgaaattcgcaaagttcacaaggtaattcgtttgtttttgaatttgtttagggcttttgtgtcctattttttaagttgtttctatctttatttaggcttttcaatgaacactatttagtgtgttattgttttttttttatgtgtgtgtttggtatttttaaatgatttatacgttttttaacagttgtcgaggtgttttttcattgatctgttccatgtagggcaagagtaaattcccaattttccatctgatgaagtttttgaggaacttcctcgtaaagaggttgttgaggtatgtagctatttttttagtggttatatttgcttaattatttttcatttatttttgtggtgttttagagttgt

SEQ ID NO: 389538 - DNA, 970 bp, Cannabis indica
ctgcttcgccatgccgttgctagatgaaggtgttattctcctcttaaaattattagttctctgaatttctcgttttgatattattttatttctcaattatctaagtgatgacatgtcacttgtaattgttcttgtgaggattagtattattctgttttagggtgagttgttgttgacgaaaactgtgatagaattgttgttattcaaattatttatttaattgcagcagtacccctaatgttctgatcttctctacatcattgactggtttatttttatttgctttgtttgaaattttgagttcttgagtaaccaaacaaaagaaaagtagaaagacctgatgatcgcatttttggagtgtcgatggtgagacgtgtggctctctaggaaagtgaagtctcgccggagaagtgtgaggaagcctaattcgtagatctgaacactaccgtaccagaggtgtgaggaagctaaattagtggcgagaatagctgcattttacagcgtacataacagttagtgattattattattattattattattattattattattattatctttattttagaagtcaactatatctttaccataattagttgattctttcatttccttatatattaataatttttagtgaaatgtaagtaaatgaccctatttctaactctatagatagttaatgttctttttttaaaataattaagcaaatgtattttttactttttaatacctaaaataccattcattatataaaatgtattgtatgttttattcatttaatagaaattatgaaaaacaataaattaaaacatttctactgaatttttgtcaactatttttcattatataaaaggtattatttattttattcttttagattttgctgctgttgttgtctaatatgttatttaaccatataattaatttttgattaatatatcgtatgatatacaaacaatatacctta

SEQ ID NO: 389539 - DNA, 834 bp, Cannabis indica
aaattattacatttgaatataaacgattcgcttaagttagcctcaatttatgtttagttgagtaactgacaaatttgtaattctaaacaatgaaattaatcattaattcatcaatatggagaaactgacaataaaaaataaaataaaaagatatttaaataaaaactagaagaaaataagttgagtttgtaatcaactaaaccataactatcaatgcaccaaaataaaataaaattaacccataataatagaagaaatcactgaaaaaatgaaccacaaactcaacattgaatcaaatccatgtttatattttctagaactaaaataaagaatagtactatacatttgagagaaagtgaatactttggataatcttcatcttcatcttaaacaagaatactcatgataatgagttaagatcaagtttgttccatatgttttgaatctcttcatctattgtttcttcaagaattttacattgttttgaatctctttatattgagtagacaccaaaaatgcttgcattatcatctcattcgcttttaaatccaaaaactcatttcgttccacaagtaatcatcaagataagattcatatgatatgtattgatcatcaatcaaaaccacattgatctcaagattgaaaaaacaatttcaacacacaaaatttctttgagtatcattcgaagcagctcgaattctatttccccttgatcacttaataactccccaattttgaacaaaaccaaacgcttattctaagcttttgtattgtggacattgtctcacatggaataaattaggggtgggcatccgatccaatccaacctttttt

SEQ ID NO: 389540 - DNA, 642 bp, Cannabis indica
tcatggatctcttgcacaacatggcccatctcacagagccttagaacaaaggatttcatctcaatctatccatggcgcgcctgcttcaaatcaagtcttaatccacgatccaaagagaaaatttctccatttcagaatattatgacaaggtcaagatccttaagtaggataaaatatctcctttcttgtagtgtactattgtgacttagggcctccgatcatcgaaaagatctttactcaggttgatcaacacacatgaattagaaattgagggaagaaaagtatctagatgaacatatgcacatgtttatagtatgcatgtattatattgcaatgtagctagcataaataacggtatgtgtgtacatagaattgcactaagatactaatatctaatatgttaagcaatgttgaatagtatggattaatgctaccaacaccaataaaactagctagagtactgagcttagattggtattaaggttaatcatgctacgggtactaacattcagatctcaatatatacgtataggagattgagtgtatgagcgctcaattacaagttatatatatgttttttttatgctatgcttttcttactaagtctgtcaactcagagatatatttctatgtgtaggtaaa

SEQ ID NO: 389541 - DNA, 662 bp, Cannabis indica
ttatttttaatgtttttttttacaatttttttcataaaataattttttgagtaaaaatttatttttttgcaaacttaattcaaaaaccgtaaaattttcccatcaattaaattagtccaaaatgatacattatgtaaaaataagtgaaactatagcaaatggccccaaatcataagatcgtgctagtaaatgttcttattttaaaacttgtagagaaatgacctattaacggttaaaactcgtcaacgatataataaggatttagaactatctcctaaaaaaaattaatagaagaatgtttgaagtagaaatctcatgaagttaccgttacattcttttgtgcactttccaaacatgtggtaaaatggttacaaacacatatagttaagaaaaattttgagtgtaaagttttttatttttggtgagttgtgagagttgagaaaacaactttttaaacttttattgatcatttgaattggcaaagtcaaatttttggaatttcaaacatgacatttactagagggattaattttatgttaaaagagcctttgtatttatttctttgtaactttattgtatttctttatatctttatttttatatgttgtctcttgtcaaaaaaaaaaaaaaaagaaaaagaaagaaaaaaagtaaaaaaaaaa

SEQ ID NO: 389542 - DNA, 1194 bp, Cannabis indica
tttttaaaaaaaaaaagtaaagaccaatttcattgatgactaaataatgtcataagggctaaaagattatacaattgttgaacgagaagagtaagagaagaaaaccaaaagtaaataaaaccagagaattgtattgatcttaattgttgattatattgattgtataagttagattttatatacaaagctaacagaagataaattattacaagagagaagttagttacatcaagagtgaaagtaacagctcactatcagaaactaactaactaactaaagtaattaactaatctatcatctaagaatccccctcaaactatgggtggaagctaaaaccatactaagtttgtctcttagaataggaaattgttgaaacttgttttacgaggatcaaaatttattaatatatatgttaattataatttagaatctaatatcttaaatataaatttcctaaaacaatgaaataaacacataagagattaaaaaattcttacattgatggcagtagaatataatgactccttccatttagatctctaacccttgattcttgcctatagcatagcattatcaagatctgaatcttgatcttttctccttcaatttggttagacacaatcttcctcaccatgctaggtattgatttgacatgagtgggcatactctcatttaaccataagcttcgaaataatcagtagagaagaggatagattcgaaatagaaggtggctctctttattttctaattgtttgacaaaagagtctgatgtaggttatgaaaataagagtcatctctttatttattaggattttatctaggcataaaatttaaattatatggattaaaaaaagataaaataatagcataaatttactttaagctgcctgtcatatatgtgggccccataggattcaattttgtcatttgtttaacaatttatccttttttttttacaaatgtcatattttaattctaatcctataaatgtcaaatttatctatttaataattataattaattatcaaataaaattatcatttaacttatttattaattagatcttataaagtctcttaattaataaataaaccctaaatcatctctttcttctcaattcagtccttgcttagtgaaaattcataaacaagacatagtcttatttagaattctaattgattaattaaaattaat

SEQ ID NO: 389543 - DNA, 751 bp, Cannabis indica
ttaagtcagcttgtcctataattgataattaagtcaaagtgttataatttgataaaaaaaagttagacataaaaatctttttgtgtcaatagaaaagtgtaacaaataacctaatggggtaagacgtctagtttgggcagtgataagatgagttttgtagacagcagtccatggttgacgacgtttaccaggatcatccttagtagtaacataaacaagataatcaccagcaacgcatcctctatcctccatacgaacaccatcaaatgtgccatatacatcagcgaaacaaaagattttaactctatcattgaagcgaaaagctatgtaaagcttttcaagatggtcgcgttcagacacaaaaatcatgcccgaaagacgacctgagtcaacgtcagccgcattaaagccttgacaagctaatttagggcgagtgagaatttttttaagagcaattgatggaatggcttggccattgtaattgtagtgattcctatcagtcataaaaatctccctttcacatgatgacagaggaaactgtggggatgaatatatgtctaatggcactggcggtcggtatgccgagaagaaaccgatgctttctctcttctccttatctgtatctatatatttatatatatttaataattaataattatataataattaattatgttaacacaccatcaaataataaataaaagttaaaatatatttttttaactgtaaattttatttaactaaactaatt

SEQ ID NO: 389544 - DNA, 1083 bp, Cannabis indica
atgcaccaatttaaaatggagtggcgaaggaatgtcacctctcggcttagaattcatgatattggtgaaaagtattgaaaatatatattttggggtgtcattgcgcgcacataacaacacatgggctgtagcattattctccaacatcccacacttaattacactactcaattctcgagtaaagtgtactagtctgccttgttaccaaattttgaactcgataatttcagaattgagctataactatgagacacacttagatcctccttgaaaatatatttctaatgcaagttgaagcatgtcatttgtatacaaattgagagagttatgtccgttttaccgaagggcaatttgtgttgttttgctccagttgcgagcactaacacgaccaaatcgcagctcgcagtcatgcatgtttttggaccccttgaggtgtattttgacttattttttgatggtgagtcatattttggatgtcctgggaccccaaaacctcattttgacgttcaaacccctaacgggagaccattgccactagttggggccaaacagtggcagtggtcagccatggctcatggaaagccttggatggtgtttcttgtttatttcaaacatatggatgttagaaaaccactttgttcacattagttgttggccaatttattaagagagcactgccaccatttctgttaaataaaagagtggtagttgtagcatacgagggttatggacccttgagtgatttttctcacttgtatttgatacatggatgttggaaatagaatttttccaaagaaactctcacttctatgtggtggctaaccactgccatcatttgtgtcacaagtgtggcagtggtcggctaggcttgtccattggtgagaaatagtttctttcacttgtgttgcactccttagtgttgagggaacaaattttgacaagttccctttggtacttagagaatggagagcactgttatctccttgtggtacagttctccaaaaactagagagcactgccatcactgttatctccttgtggtagtgttctccaaaaactagagagcactaccatcttcatgtg

SEQ ID NO: 389545 - DNA, 1806 bp, Cannabis indica
aatcacaacaaaggtcagatttaaatcttttttctctagaaatcacacattatgtatcctaaggctatcatgcagattaaaataccaaaaggataacaatcgaacataagaatcaaagcattttcaaattgaagaatagaatagtgttcatacatccatggaaaaatcaaccaaatcaagcaaaatggtgggaacagaaagcttacccactacaagattttgttggagaagaaggtgggaagcttagatcatcgaaatggcacaaaaacctcaggaagatgatgcttgtggattcagccacttagagagaaggaaaagctttttctaaaaaaagtttctagtgagagcaagtgaaaagtaaaaagtgagaagtgaaaaaaggttttccccctagaagtcacttatgtaatgtatgtgggcccattttcctcacttacctcacctacacatcataaaggtaactaaagcagctatttctctatagcaatgagatcagacagttaagacaaaatgtttcaaaaggctaaaaaacgcatcaacttttattcagtaaaggctacaatagtcccgtccgcaccaacatagatggtaaagtccttatctgtacagacgtccacacagggacttgcgggcaaataatatcccaatttttttctccctaacataggatgcttacatggaagaaattagtaccatgtggcaatacaacttagcaataagaaggccaagttaacacctaagcaaatggagacaccgacacccaaacgagcatcaagtgacagaccagctccctcacaggagcttggctggccaagaggtgctctgtatggttttttgtgcactttaacacgtggacaacaactcatgggctacaaattaggccttaaaagtccagcagaatggatgaatagtatctagattcaagggcaaattagtcttttgtaattatctaacaaactatgcaaatacctagggttttgaactgtaatctagggtttatgcctcctatgtaaaggccttaaccctagtctagaaacctaagttgaatctaagcctaaaacttgcctctaagctctaagcctaagtctgacaacttctctcttcctcacttcctctctcacatgcctacactaacatcatctcaacacttgagttctaccatcattgattcatgccttgtattcctaagagtgttataatttatcccacttatagtgatcgagatagtattacccttggtattaatacaactaaaaggagagtaggtcattactcgttattacaagggggcaaaacctctataacaaatctattttttattgtttttcattcttatttgtgcaaacacgtgacaagcatcagatctataagatctcgctgtcggttgatcactttttgagctcaataacatagaacactcgttatattccaaatatagatacactatagattatccattgtttcaattcaaataatcaaatatcttctatagatgatttacatcgagtagggacaaatttatcgttctacccctcaatgtattttattcttaaagacttagctttctataaatgatattttagtaagctaatataatcactgaaataagagctcttccatttatatatgttaagccaagctcaaaagaaattatcatttcacttctatataattataaaagctatagattttgtatctatgattagcgctgccactcaattgcactaccatgttcccaagaagtaagtattgggccgatctaattggtcagctttaacgaacaagtcaaagaacacaaataataca

SEQ ID NO: 389546 - DNA, 996 bp, Cannabis indica
aaaataattaaaataaataattatgtttgagaattgaattcaaaaatttaagttgataatttttcaaactaaaaaatgcaatcaaaactaggcaagtccaaaccaagaaaccataatgttaaaagtaacagaagcaaataaaatgactatgaagtgaaagttgtttgaaggcgcacccgtatcggcgaaatcgctctctgattgtctggtcttcaggatcgaagtatcttggagaagcatccatatcgacgtccatattcgctgaccactcgaaataggagagtgaaaggcccaaaatcagagtgactgaatgaagcttaaaccctagaacgaaaagcttcgagcgcgggaagcctaacttagccggaaagacagggaagtgaaacacaacgtctacagtctacacagacagaacgcaccgtttaggctgtactctctgttttaccaaatgtgtattattttattttttattttttttaagctaattgtaaaatctctaataatttcacttttctcgcaattaacttttaaaatttaatattttacaatataaaatattcttattacaatattttacaattattgtgaatcatcataacaaaattgatttggagaccactctagtgttactgtgtaccatcaatacttgaggtagaagatgaattttcaatcttaacgaaaataaagaaagattttaaagaattggatattggtgtttttatattaaaaaaaaatcatatttttaagtatctcataatgtgagtgctctaagatggtcgacatgtacagtaacattgtggtacttcacacctctagttaataagctacagcttgtaatattaacgactttctgaaaaattaggtaaagctaggataattggcaagcaattcaggagtaaaaattggagagcaaaatcaatcgcgaaggctttttcaccggagttttcaatattttttttttattttcttcttttattctgaattaatatgtgtgaa

SEQ ID NO: 389547 - DNA, 894 bp, Cannabis indica
aggagtaaggatgtgaggatgaataatatacgtattttataatcatgcatatataatcataattaattgattaatcacttaattataattcactaattaactgctagtttacatatctaattatgcaatcatcacaagtgataagaatgtagacaaatattctcataaattatatctatatatttttaccaaaaaattaataatatgtttattaaaaaagaaacatcatccccgatgtactaccttgaagttgaatcatttatgctttgtggatgatcttcttctcttttcttgaggagacatccactccattaagctcatgttgagaacatttatgaggttttctgagactttgagtttgcaagcaaatgtcagtaaaatatagttgttcattgttcagctatgaccaatgataatgttcatcacatcttagactgttcaggatatgttagaagctctttgccttttagatattttggtcttcctatttgttcaaaaaaaatctctaaagtgatcagagtatcattgataagatggttactcgaattcgaatatgaggtaccaaaaatatctcttatgcaggtagatgtgtattgattaattcaaatctcgtggctatccatatctattgggctcaaatcatgattcttcctaaatacattttaggaaaaattaatagtatttggaggaatcttttatggaaaggtacgactgattcttcctcgccaggccttagttcttggattgagattcgtcattctaaattgcgtggtggcttggggtttaggaatattgagcaatggaactttggtgctttgggaagatatgtgtgggatatttctcaaaagaaagataatttataagtaaagtagattaatacggtttatttgaaaa

SEQ ID NO: 389548 - DNA, 760 bp, Cannabis indica
gttaccaaacggcacctaaaaaagttatttttgctgaaaattttaaaatgaaaatatttcctaatatattcttataatttaaggtcatttactataattttctataccatattttgaatttggactaaaatgttaaaatgagcactgtcgacccaacatgtagggtcagaaatcactccatgcatatgttcgcgatttataaagctttacttagcattacaatcctttttcttttctgtttctttacatttaaaagtgaaattcatttttcataaagaaaagaaaaacaaaaaagaaaatgattttcatttagtgaatgtacatatttttaaaataataataataacaaagaacaaaattttgacgaacagaacaccacagggtgaaccacttgtgcaacatgatgcatggtttacttgttagatatcttcatcatgcttgggactattcgtatagaatgataatagtactctattggtcatacgtactcacaattcacataagatattccaagaatgtgtgatgggtatagtatttaaatataatatatatatataaatatttatatatgcctcttgaatccatgcaaacataatttgaaaaatctaatatacacccatcttatggtcatagaaattctaaccttaattcaactttttttttatttgtatggaaaccttaattcaactttagtgcccactaactttcatctattataggaatgagaatgagaattaaaataagaatggaatgaaataaa

SEQ ID NO: 389549 - DNA, 948 bp, Cannabis indica
tttgatttgggaggctaccacctttcggaggcctacttacttgcatagcgccttggttattcttctaatttatttgagccctctggatgcatctcttgctttaggaattcggttcaaggatctacaaagcaataaccagtcttcccatgtgtgggtgggcccttctgccacgtggtgccacatattttggtaaaaaaatatatacaacatttacaatacttagacaaagttcgtgatattctaatttaccacgtgtgttctaaaacttcaaacctattcttgcactataagaggctatttggttgtgtttttcagtttttagttttcaggattgtgtttttcaaaagtgagaatagaaaataatttttttatcaatttaaaaatttaatggtgtttggcctaggtttcttaaaactatttttatatttttttactaaaaaattaatattctacaccataccatgacatgaacccatccaatcccggaccaaacctcggacccggacccgaacccagaccggatctagactccggacttggtcctagaccctaaacctagacccagacccagacctagactagcatttgggtccgatttcgaggtctgaatcggggttggggttcagggtccgagttaagctggggtctgaggtcggggtccgggtctgagtctggaggttcggggtctggtgttctggtccgtgtccaagatatggtgtccaggtctaggttcaggcccgagaccagggtctgggttcggagccggggtccgtgtccgtggtctaggtcggggttcgattcaggtttggggtttggagtccagggtccgggttccatggtctgggtccaagatctgagtatgtgagcaaaaatgtaaaatataatatgttagataaaaaaaattaattttaaaaaattgaaaactatattttaatattttttgttttc

SEQ ID NO: 389550 - DNA, 808 bp, Cannabis indica
agtaatgaagctacgtctactttaagtatttatttctcacgagatgatgttacagaaaaagactaagcgtcagaaactctaatttctagagagagaaattctgaccttgtgggtagtattctcaaagtaaaaaatgagcttagggatctctccttttataggtgaaggaagcccacaaaaataggaaaaaaaaaatacaaattagatattttagaccgtagatgataatttaatagtaaaagttagctcttggtggtgatggccattttttggagctcggcggtaccactgtgggtaatccacagcttatttttgtgacacccttggggtgaaatttgctgtcgatagctttaaaattgcgattaaagtttgagacatgacttgacagagcatggaacttgtagggtgaaacttggtgttgaagtggatagagtcaaagtcggagggactccaaaagcttgtcgagcatctttcaaattaatgataccttgtgccttggacatgaactcggacaaggtctcagcctttttcctttgcatctcttaccataacaaggagccaactgtaagtccagactgaagggctacgagtttcatgtcatcgctgaccttggtctttgttgccgcctcaatcatcctttgaataaaggtcttcaggcttttacctagttactgcttgatgttggtgagtgatccaacttccatattacaatctctcgcggctataaattgtttccaaaaggtggattgtaattccttccaactatggattgatccgagagccaatctcttccaccaatctttagcgg

SEQ ID NO: 389551 - DNA, 3134 bp, Cannabis indica
gtgattctaatagccaaacactacgtttcaatgttgccgggtacaaaacatgcaaaaatatgaaattccatacacgacgtagaacatgcattctgagttcaaataaatctccgtaaactaataattcataactaatatgtaagtttcataattaaatcctatttatatgctaatttccaaattaaagttaagcggtctttacagtttagcttctagccacttagtgaaatagtcaactatgactacagcatatttctcattttcctttaggaagttgtctgatcaagtctatctcccatatagcaaaaggccaaggagattgcatttgtgtgagcttgtttggtggagctcttgggatcttcgtgaatctttggcacttgtcacgtttttttacatagttgattgaatcctcaatcaaggtagtccgaaagtacccttgtctaagtatctttttggttaggctttgccccctagtgtgatttccacagacaccttcatgcatttcaattaatagcagttcagctgcttctttagtgacacatctcagaagtggcattgaaaagccacgtatgtacataacctcgccctgaatgacgtatcaggttgctttcctcgtgatttttcttatttcattcctatcctctaggaggactcctatttgaatgtatgtttctattggtgtcattcatgtagcactatcatcctgaatgtctatttcttctgaaatattaatgcttgggtctttcaagaactaaatgggcaccgaatttgtcttgtatatcaaggtgttgctagctagtttggcaagtgtgttggttgttgcattttcttctctaaggacatgtcaaattgtgtactccttgagttaacttaaaatgtcttgaatcttgctcaagtaggccatcattctttctcctcaagtagtgtactcacccaggacatgtttgaagaccaactcagagtcactatatatgtccaggtaatctgcccgaacttcatgtgcaagctttatttcgacaattagagcttcatacttagccttattattaaaggctttgaaacaaaacttgattgttgctcctaggtgtaatgagggaaatgcctgcacaagacaggtgatccgtttattgcctcttcttttcctcttacttttctcctgaatctcgagaaattttaggagatatgattgtgcatttagcaataatgtcagcgagagcttggccttttcttgccactctttgctggtaaatgagttcatattggccaagttctattcctcacttgagtaactagccagatgcttcaggtttcaaatgtacttgtcgcaagggctggtcggtgtacactcttattggatgagcttggaagtaaggtcttagctttctcgaagctaggagaaagttgaatgttagttcttcaatgagtgggtatcgacttttaacttcaataagtctcttattgacataatatactcggtgctgaaagccattttcttctctaatgaaagtttatagaaaactctttgacttcctggtatatgcctaattcttcattttctagaggcttttacaggataggaggttgagccaattgtttctttagctcttggaaggtagcttcacactcctctattcatttacgtttttttatttcctctaagtattataaagaaagggacacacttgttcgtggactttgacacaaatcttcttagagccgctatgcgaccagttaacctttgcacttttttatctttgtgggcgactttatgtaaaacgtcttggatcttctctggcatttcttttattccacaaacattcactatgaagccaaggaacttgcttaagcctactctaaaagaacacttaagggggttgagtttcatgttgtactctcataggatcttgaagcattcattcagatcctctaagtgccccatcctttttggacttgtcaagcatgtcgtccacataaacttccatgttctgagcgattaggtctttgaaaattttgtttataagcctttgatatgtttgtcaagaagtttgtatgttcttggtcaggttgatgcattttgatttgattttaacctgaataggcatctatgaagctgaggatctcatgaccagctttaacatctactagttggttgatcctcgacattgggaaatattcttttggacaagccttattcaagtcagtaaaatctatgcgcactcaccacttgttgttttgtttgggcaccaagacaggattggatacccatagcagatagaaagcttcaatgataaagtcattggcacacaaccttgtgactttatcttttagagcttctgcttgctctttatccaacaacctcattttctactacacatgtcaaatgtttggatctacattcacaacatgagaaattattaatgggtcgatccccaccatgtctttatgcgacaaggtgaagacatcaaggtttacccttacaaatttgatcagtatgaattttatttctggtgctaaacattttccaaccttcaatttccttgtaggaagggtgggatcgatttttacatcttctaagtctgcctcctcactttgggctaaactttacagcccttggccagacactcagttagagctcttggaaggcatcttttctttcttggtattggacagagcgatgttgaagcagtgtcaggcaaattgttgatttcccttaggcaccctacccccatgccttgttggtaagtttaggcataggtggtaaattgaagtcactgccttcaagtcctacaaggatggctggcctatcattgtattgaacgctgatgcgcatcgatcactatgaactgagccattagtgtccttttgtgggactttctccaactgtcaaaggtagtcgaatgtatcccaagggtgcaagaccatagccaaataacccttacatcagttgtgtacaaggtactagatatgttgattggagcaccatattttcataggttaagtatgtttgaagaggctccattttcaaccatgcacctgacaactgtcatgttccctatttgctctggtatgaccaaggggtcattatgagggcaccttacctgggtagcattgttgagttttatgccctaaataaa

SEQ ID NO: 389552 - DNA, 624 bp, Cannabis indica
aaaaaaaacgacaaatatcttcttggtttaaataaaacgacacaaatatataatatgtacaaaacgacattaaactaataaatgaaaatgcataatgaacatagttttacaaacgacagctccgcaaaatagttttccatgactattttggtacaaacttcatgtcgtttttatcatgcaaagaacaactttatgtgctaagttttatttgctacatgaaaagaacaacttgatgtcgttttttaattgactattttgctacaaacttcgtggccttctttgttaaaacaaaataaaagaacaacttcatgtccttgactgataagcaaaaaaacttatgccatcgactaggaggtttttctactctatattttaaaatatattatcaaaatttcatttttttttttattttaactcatatatttatattatatcatacattaatttttcatttttttttaaaaccatttaaatataatattttttaatatattttattaaaagtgaagcaaaagattaaaaaattaataaaagtaataaaaagtagctagtataagagatagaaaaggaataaagaacaaaaaaatatatatagatcatttttaatgggtattacccatgaat

SEQ ID NO: 389553 - DNA, 884 bp, Cannabis indica
tgctactattggagatgctttaatggtaccatttacattctatagatgatacattgcaattagttagtgatattatctaaaagcttttttttaagttatatgagactcgatatttaatacttatagtgatatgacatcgaagaggatgctagacactaatagtaccttttagcaattctcttattattattataataaattttaaaggcactcatggtgcctaatatacttgtggtgtgtaatattattattaatgtaatttaatattaaattttatatattttatattaataaaaattataaaaaattgataactaattataaagcgttactttatagtatcattaaataccttagtgacctataataatactttattattattagtatattttaatagtaaatttaatataatttaatttaataaataatataaataattactaattaattataatacattatatattattgaacacgtttctaactcataataatgtagttaataagttttgaaatttactatttttcttcaaataaaaaaaaaaaaaaccaaactcgattaatatttatgagctttgttatatgagggtatcaccagtatagttaagcaaatgttcttttccagataaatttaaaacaaatatagttgcacaattcatctacctcactttttgaattgtggccaatttagatttttccatttttggtcttttttcctattaactagcaccggtaacattatatttcttatatttatcttctctctccaaccacatcatacaacataatagaggtagagttcataatagaggtagagttgattaggagtgatcccggggccggccctaggcataggcgggctaggtccgtgcctagggccc

SEQ ID NO: 389554 - DNA, 798 bp, Cannabis indica
tctagtatatatatatatatatatctagtattattttttatatatatatatacatatattgatccatataaatagactttaaactttgtgcaggcaattaattatatggatgaatgaagtacaattatagttatttatattattatatgtttatatataaaaaaatatatatttttattgtattattatatagtatttagtaaagtaatttttttagtcgtgcattatatttactaaatcaagtttataattttcttttattttcatgatttgtgatattttaaccatattttttatcaaatataatgtttaatgaagtacattttttattctaaacaatattttgtcaaatgaattactaatgtatataggcagatatttttttcaacaaatatttaccttccaaaacttaagctttcaaaagatgaaaataaagatcaccaacaaatagtttatggcctacatattattttttattaaatttttatatgaatattgtgagcattagatttaaacaatcgcatgtaaagcgcgagctgatttttagcattataaaacaatactcacattcaatcttattccacattcaacggtgattggagctatgtactttataaaaaataaaaaagatataagtaatgaatttaaatttgaattgtaatggtttttttttaaaaaagaatagtttttgttatataatcacatctaatataacatagaaatatatatatatatatctctaatatctatacctaattatcttttattttattatttatctattttctaatttttttt

SEQ ID NO: 389555 - DNA, 1539 bp, Cannabis indica
agttagtaaagaaaaaagtaggatacgaaaagtattaaggatcgctggacagagaggatagacatgttacatccgaacagagaacgtgagaggtttaggaagattgacaatgctttacataacactaacaaattaaaggtattaataaagttattaattttagtaatactttacattgtagtcaataataaataataattgtaacacaatatgttagtttaggcacgagcatacaaaaagtaagaaagtcttaggataaaatgaaactttaaggaggttggggatcaaagttattgtttcacatgttgtcgatagagtaacttcatataatacgttgtcattggtaagggtttttttttttttttgttaaaaaatacaatagtcacactttatttaaaatataggctaatcctgagactgggaacttccaacagatgtagaaactttttagaagttctatcataatgaaaatacttggtgcaacgaatacgcgcaataagcttatatgtaagtttatcttttttaagtttcatctctaacgtcgatttttattttagtgtcaaagttacaaccaacacaaattaattattatttgtggcgattaaatattaaaacaaaaaaaaagtgaggattaacttgaccataagttgattaatgacacaataactcatttttgtagtaatgtttaattattatattagtggaattaaatattattttttatcgcgtccaaaaaaaatatatattatttttcatataatttaatttaaaaactattatcaaaatataactacctattttaaaaaggtgatggtttttaggtagtgctaaggttaatagtaatgctgttattatgaacatatgcaaagcgagatcgagatatatacgtacgtggaagattagtaatcacatgtagtgcaaatattttctttaattgagaggacatgaatgcattatcatatcactatcactaatactccatatgtgagatcttgattcctaccttttagttatctacactataacaagcgccatcttattaaagtcgctttaaaataaagtaatggaaacaatgtatgttgctttattattagaacaatataattgaggagtccaattgttgataggaatagatgctttttatttttgtgttgtgttcatctagttatttgaagaataaaagtcatcattaaatcatcctaaaattaaatcttacaaaatgtacatagttatcttttttggcctattctaaagtccgtcgcagtggggtccgtctcccacttattatttgtcatttgccaagtgatggaggaatctattagaatatttctaattaaggaaataaaataatattattgattctgataaatgaatattttatattcattgaatctggacagaatcaattacgtaatattctatatatggtcagatttctatattcattacctgatttgatttcctgaattaattgtcaaaatattctgacaattaatgtggcacagatactgatggagtatctcacctataaatataggg

SEQ ID NO: 389556 - DNA, 1480 bp, Cannabis indica
ctactactcttcatccccatttgaggtaaaccaacaaaagttccagcaaattctctataacttggccctacatttgtctcatttactaaattcacatacacatcaaatttcactttcacatccctattaattatgactccataaaccacaagaacttcctcttctcctttcatctcatccttaattcgataaggttttggcctataaacctttattgtcattgggttttcaagacttcgaccctttatgtcattgctcaacaaatatagccttgaagtttccttatagtaattctctcgaattttcaatgtatgtttcgctatttgtggcgaaacaaagggcttaggtcgcttgtctaaccaagtaagatcagtcttctcgtaaatatatcccatttttgtagtattcaaaacatcacagactttcatcttgattagttgaagattctcatcgtagaaataaaaatgtgaatcgagccaaacggtgtcgtttattggcatttgcatatcatgaatatctctccaaatatcccaaattcgatcaatatttgcatggtgtgaataaaacacatgggtcaaaccctgctgagtagaaagcacccatgttctcctggttaggattcgattcaagaccaacccaaatgtggatagtattgtgtggtgccaactcaatcgtaccaggtccatcacaaaacccatcatcaccaggatacaaagggcaacccataaaaagttcaggcttctttgcagctgaaacaacttggttatacataaaggctaaattggcattaactcgttcttgtccttttacaattcccaactcttcatcatagttcaagtcaacaatctcatcaaaatgagtaggttctcgttgcgaatcatcgaaagggccatcacgaaacattttgggaaaaaccatggagtcagggctatcccaattccaaaagggcaaggcgaagttatcatcacctattagatttcctagaattcgttcatggaaatagagatacatacggtggaaagcaaaaaagagccattgacgatggatgttgaggttagttgaggagtgtttttggtgatatgcaccagtgcaaaaagtgcaatgaattgaagcttggcgagtgaagcttcgaggatcggtatggggtagggatttcataatggtgagagctttggtgtatttggtaatataatcgttgtccacgtggtgggctgagcggcgaactcggatgttattcaagttagggaattgaaaatcgatgggtgtagtggttggttcattgtgtcgacatcctatcgatacacctacgacatcctatcgatatacattaacaacacagacaattttattggtcaaaactcttcaaattttgggttaatttgctttttaatcaacatgatatcgacaaactgtcgacaacatgtcgataatggtcatccctgacctttcttagcaggatatcgacatagcatcgatattc

SEQ ID NO: 389557 - DNA, 879 bp, Cannabis indica
acagaagttcaaatattttaaaaattaaagaaaaaaaaaaacatatgtgatcgaggagaatcatcagatcttcctattcataaatgatgattcaaaatgctcagacaacatagtctaagcattcatccaaattaaaaattcatcatttgaacctccacgattcaattctaaactgccaaaatttcaaggagactcccaacctcaaacgaaggaggagttgttatcatatatgaattaagatcagccccatctatttcatctactactacgacagaaaatcgaaaattgttgaataaagaaacaaactttcacggctaaccaagtaagaggaaagttaaattagggtttcagtgaaaacccaagacgcgaaaaagcactacactgcgcggcgcctcaaatgcgagggagagagagaggatacgtttagggttcgaggtgtacgtgtatttataggcagacatcaatttttaaagcaccgaaaaaaaaaatacagtaaaaataaaagggtaaatacccatttgttacccgttttgttaaaatacacacttcgtagttggtaccttctatttcatataataattaatgggtaccctctaatttgaaaaattacacaattagtaccttaagtatattttaattttttatatttcccaaattaccctatttaaatacattatttgattatttttttattaatttaaatgtaaattattaattatatatgaaataaaacttaaatgaaaattaatttatgattatttatatatatactagcaaaaagttatgtgcgagacacgtatactaaattttatgctagtttttttctacgttattaaaaagtgatacaattaaaaatttaaaaaatattattaattatta

SEQ ID NO: 389558 - DNA, 1482 bp, Cannabis indica
taggcgacaaacttttgtaacatgcactatgaaatatttgtaaatattttgtaaaactggatctcggtttaatacaagtatgttattttggtatttataattagttaaacgaagttttaaatattcacgatcttcaataatcttgttgattagtaacgagctgcacagttaagttaaaaatcacgttaacacgcctaaactagtggggtgttacaagaactctaacatttttctgacaagaacaaattcataaagtttttcaccaatagtaaaatattcattagcaatatcaaacaatgtttcataaaactcagacatggtttcatttttagacattctaagaccatcaaatttgatctgaagcataataaccaagaacgcttaacatcagagattcattcaaactgagtttgaagaatttaccaagcatttttagcagattcaaaagaagatataaacataataaaaccttcacctactccattaaatataacatgtaaagttttactattgtaagcagataattaacttatcatcttcagtagaccattcaagttaatggttttaactttgaattactaattttgaaatctattacaatgggattaaatcatcttgaaagaattattctccatgctttgtcatattgggacttgataaaccctcattctaaccttctaatgaggatatatagttaaaatcattgagaagtggtggatgagaaatggaattttcttttgcaaaaaaaaaatgacatattccaaaaaaagacaaaaaaacgttaaaggatcacactaatagtttagtgtctcgctctgataccaaataaaaaattccaattttacgtatgccaataaatttctttaataatagtaaagaaaatgtgactgtaaagatctgcaataacatattagaacttttttactacagaacacaaatttgcagtaacagaacaaaaataataatacataatatataaacttgacataagagaaatatacgtggaatcagtattctttcaaatactcctagtctatagggtcatgtacagagaatgaaatcaattagtaaagtctcaaacaattacaaatacaattaacttaaataagtttagactccctctaaagctttgccacaatcctttgttatttacttttccaatatgatttctaaacaccaccaaacagcgaactcccttcatcttttgatgtgagagtgcttacttccttctgaaaaaagactttgataagtcttctctcgaagacccttttctggaagacccttctcttattcaattaaactcttcaatctattctaagaatagtgtaagaacaataaacaaggacgtactaaaacctagctgaacactctaggctcttacaaaagaaactctcacctcacatagataaaaaaaaatatgtaaaaatgaaaactagaagaagtgagaaacatttgactgctctctaggtcatatttatagaa

SEQ ID NO: 389559 - DNA, 737 bp, Cannabis indica
gagtatgatgagagttgagaattatagtgcttagaaaatgatgtctactatgtttatttatttaattatttttaactaccatagttatgatgagttagtaggaacgtgacatagggttttagctagagtcctatatatagagccttagttattcattatttactcattaattaaagccatcacatatcaagattttctctttctcatctcttgctactactccctattttgtccattgtgccataaatttcattgaccataaatttcattgaccatacttgcattatctcaagaaattagctcacgccaccatcaataccatcatcctttatcactttctcatcaacactctcagtatcattacctccttgatctcactatccaaagtttcatctctattttaatttcaagagtttcatcttatttctagaaatttatcttgaatgagtggtaagtctctaaactgaaaccttagtttctttccttgtttattatataaaggccctaatagatttgttatctctctaatgtgaaaacgttaggtgagatttcacaagggttaagctccactcactccctataggctcgactagtttgtggaaacaaaggttttcttaaagcaaatattggttcttaaaatgttactgttgcaatcaaggccacaatctccacattcgaggtaaggaaattaagtagaaaaacataagttttatgtatgtaataacattcatagaaag

SEQ ID NO: 389560 - DNA, 652 bp, Cannabis indica
cacctcccctatatttttcactttgccccaaactaatttttgaagcacaaactcactcccaataatttctaccaatagaaataaccaatatccactctccacaaacaataatattctaatatcacacaatcgacaactaattactcttaaatcacaaaacttgaatgaagagaaaaatacttacttgtatgatagaagcgttgttgcaccaagaatcccaaaaaaatgatgaacacaataaatattagagtttaggtttttctaaaatttttgggttgaattggagtaatgtgggtggctattgatgaaataggtgaatgggttatgtttgtggcttattagaatcaaatttgatgaaggaatttggtaggaaaattgtaaaaattggaaaattttgggtttatagggcttctggtcatagctatagaaggagagaaaaagaattggaaaaatttgtttctgaaaaaattgtggtgaatggcaaaaaatttcgctgattgagtttttttaaaggaggcgcgctgcagcacagctttcttcatgccgcggcccgtgtgaccttcctgagataatttttttgattgtccacgtaagcgggccgcgacacactaaagctgggttggggcccatgtgctccactgctccatattcc

SEQ ID NO: 389561 - DNA, 640 bp, Cannabis indica
taacttttacaaaacacagggtcgaaaatagtattttctcaaaattaaacttaaatatttatttcaatcggtatttatactgcaaattactctataataattaaaagataaaatttaatttatgattattttaattttttatataaatttttaaggtaaacttaaatttattaatatttttactaaataaataatatataatattttaattgaataagagggtaattaatcaaacacttgtataagtattatttatttatagattttatgggaaacacttaatattagtaaaaaaatatgacttttatttataaattttatgggcaataactaaagtatttttaaataatgtgagatttttttactaatttagtaaaaactgatattacatttttctttattaaaaacttgaacctttcaaaaaattgtaaaattacattaaaaaaatatgagatgtcacctagggatgcacacgtggggcagggaattggcgggcggggagtgctccccctgtctccattcccgttaaggattttaatcaccatccccgcttattctccatcgggaatggagcggggaatcccctaatgggaacggggacatggccgggaatcccctaatagaaaaataaaatttttaa

SEQ ID NO: 389562 - DNA, 2091 bp, Cannabis indica
taaacattgttgcctgcttcaaatagaatagtagcattagaaactactagatagccctaagggacaaagaggagggaaagggtcgtatacggtgttagagtcttaccgagtctattgacgatgagaactcatcaacgaaattagtggcgggaaactcaatgtgtgagtattgggaagttagaatgtaggtgtaaagaaagcaaaacttaaaaacttgcaaaacaataatggagaaaaaattagtatattttattgatgatattttaactatggttacaccaagtttccaacccctttgaatgagggattagtctctatttagagaagagctctcatggctcttgtttacaaattgattctctagtggttcctaagggagaacaactagtacatagtacactggtcaagtgacaggacttagaatagtggttgttgggttagactagtggttttatttagagtattattggtacagtgtacttgtgttgcagggtggtggtgacgccactactcgcccaagccttttcttccacgattggtttgacattgtgatccatacttggtggttccagattcaggacctttgtaccgtcactcttatccaagcttgggctcttagtctcccgtattcttttaccatgggctaagtgttgaagttatactcatagtaattgatccatttgagtatttccaagacaaaggggactatggcggatttttgaatggttgtgctcttaaggaaatgacgaatcagctccacgtgggtcctcgcaaggacccctcctcgcaggtcatggggtcttcacaggggatcccctcctcgcaggtcttagggtcctcatagggaaccccctcttgcatgcctcaggatctttgtttcaccatctttatgttagttgggtatccagcttcacatgtttctttactattgagtaagtaaatattattcgcggtgatcgagacacttgagcatcaacagtactagggagacaatgaagagaaactctgtattacccaacgatcaaggtcccaacaaagggtcgccattggtgtgtccccaacacaaagagtccacgccaaaagggtccccgcaggtcccatcttgcaggtctctcctcgtagggggcctccttacaggctcagtgatcttagtatattggccataactttctcgatatgagtttaaattgaatgattcaagatgtgtttgaaagataagaaagtgatctatgactttttattatgactggatctaattctaaacacatcattgcctaaaacaactaataatttctacctggtaagctggtctcactaactttccttgacatggactaagtaaactatgtttgtagtagtaggatcatttgagcatcaccaggacttaggagacaatgaaaaaactccagactaccgaacgatcgaggtccttacaatggttcatcatttgtgtgtccctgatgcaaggagtttgcgcaggagcccttaggagtttttcgcagggaggtgtacccacatgagtttcctcgcaggagtgtccccacaggtggggccccgcaagtacctcatcgtaagggccttcttaaagggggcgtcctcgtggtcctcggtactccgccttcctgtaacttcatcttaatttcttctttccatatcttaatgagtaacagaggatttctcttgcgtaaattctcccattaatagggtccattatagattagggtcttataaggtctttttgttggggttctatgccttaaataaaacttttttatgtaaactcattatttaatcaataaataaaataaaaaatcttttatgactatgtcaattgcttggtttacacattttattttgcgtgattatgtgtttattatgtaaattctattaaattcaaaacatatattaattcacaattatagtaatttcatatcaatagaaaataattatcattataagattcaaatattttagtcgtgagattaattagtgcactgaatttatactaacgtgataatcggtgatgcggtctatttatactaaggcaagtggtgtaatgaccacataattagacataaaattagagcttat

SEQ ID NO: 389563 - DNA, 1778 bp, Cannabis indica
cacattattatattatttttctatttattgtaactaatttatttttcgataattaatcttcaaggatttgatttgagttgtgtgaagaagatttgtgagtagcaaaatgtaacaatcaaaggttggcaagaacagatatgaaagtcaccttatgtcaatatccatatatactaccaataccaaccattatatataaaaaaaaaaaaaaaaaaaaagtccacacctactcacaagtcttttacttacaaacccaaaattctatgtttgaatattatttatttttggtgtaatgttaattggagcctataaaatatttttcaacgtaatgccgtgacagctctctctaaactcatcatatcatattatatataaaatacattttattatgtataacttgttccatatctgaatcaaaattatcatgcaagttacaattaatctttattttaaaataataataataataataatctcattttagctatatatatgtttgaattggttaatgttaaatgattgtgtttgagttagacatgtaaggcagtttcccaaatactccagcctaaatctatgtatagactagacattttattaatccatgtctttcctactactattcttactataaattgttttcggaaaaaattgtaaatggtggcttttttttttttagatgttgtaagtgatgttttggtaaaccttttttatttttgtatttaggtaaaaaaagttagttttttgtttttttacatgattgtgtacattcatgtattggtttttatagactattttaaataactacaatatatgattataaaaaaaattaaactaatttttttttttaatactgaaaatacacttttttcattgtagaattttgtaaaactagttggaagttgaaaatattaagggtgtataggtcattttagaatgcacttaaaattttcgttaataactttgtttaaatgaaaacaaacggccaatagatttgcagttggtggtgtggctcttctaccaatatgaccaacttacttacacgtggaccaagaatcaaattacacgtggaccaagtggtggtgggcccaactaaacagatacttgtcatttgtcaataaccgcgcgtgctcacagactcgtcattagagtctgggcattcgtacctgaaatgtcagagtattggtcagcaaaatatagggaggcacaaatctgtgtagatgtgcgtgccctgccaaaatgtgccacgtgtacggttccatgcaaagacaagtgtcatcaccgacgctctcagctcttgtgaaagtcacgcgcaagaaacacgcgcggggattcaattgaaagaatctaacccatttcagggtcaggattcagattgattaaatataaaaactaaaaacaaaagtgcttgagaaaatgaggttttgtgtctcaacgaccgacacgtttaactctagttaaatatttttataataattattaaattaaaatataataattaatatttatatgatttaatacaaatttttttaaaaaatatcattaatcaatcttacagtatcatttttataaagtattaaataatattagtattcaataacaatgttctcgtaagaaaagaataatattaagtatcagtgatacctaacaccttttatagatactatcctaaattgtttttttaagatatataagactcgatatttaattatattaataacaatataacattaaaaaatatgctaattactaataatatttttttaacatttctcataaaaaaa

SEQ ID NO: 389564 - DNA, 682 bp, Cannabis indica
tcgtgcagtgtcaaaaagcgcactcgtatttactacactaattgtaagaaaccaggccttctgggctcgtgcagtgtcaaaaagcgcacccgtatttactacaccaattgtaagaaaccaagccttaccaagtttgagtgtaagaggttgcaatttaaatataagcaaaaacactatttgttgcaagcactaataatgcatctgacaaatcaattattacttctgcggatgaatttgccaagttttcaaggtaccaggaatcactcaagtcctcttctccttttgtcattgcaattgcctatttaggtaaatataatgcatgcattctttccacattctcaaaatgggtcattgattttggtgcaacaaatcacatgacaggtaattccattttccactcttcaatcttatagtcccacttcttctgttaccgtagctgatggatcaccattatttgctcttggatctggcactgtaacttctacaccttctacaccatggtagtttaaggcttgatctccacatgatatgtgaagattgaagaacaattaggagatattttcacaaaggctttgaatgaggtgccagttgattatatttgtaataagctgaacatgattaacatttatgccttgttctagtctcaatgggaggtaattaaagaagatttgatgaaagttat

SEQ ID NO: 389565 - DNA, 822 bp, Cannabis indica
aactatttgatttttgttgataatattgagaaagacttaactcatacagaaatcatggagtttataaagaaaaaggtgtcgatcacatctcaagcatttctttttcctagtttgtcatcagatatttgtactcgaggatgtattctgttggatacccaaaatcactttgagaagttatgtaactttttgaataatccagatcatattatcgtgtctttaagtgggaggtaatttccacaaaatctttgttatgaagttcttatgattcttttatttggtgtttagtgaatcaaatttctaccaaattttttgagtgtgaattatgaactgatagaagagcatcttaatgtgattatgaagttttcctcaaatcatgctattgctacatgctaaattataatggaatatactaaaccattcaatgtcaaactgtatatgttagttgtgctgtataccatggccctaattgagatctgagtatagctaagaaagtcttagtcttactcattgaactggaatttcgatgcggtgattcttttttttgactgcttgcttatatgcttgttgcttacatatttgactgcaggccatgggtaatgactgaaacaatgaaagtgaatgattctcttcgagcttcaatccgaagcctctcacttttatctcaggttagttttctgttgtaatatagtttgagttgtattgctttttggttggagtagtgcactgcatctaatagtgatttgtactgcaaggttacattaggaaaatgagattagcataggattgcattaaaaaatataatataggtgaaagttttgactt

SEQ ID NO: 389566 - DNA, 1099 bp, Cannabis indica
acaattttattgtacacacggaattttttacaaagatatgttttttataaaacaatcgtaacacgacaaaacagaactattaaaacaacagagaacaactaaaaaacaaacgcggaacaacaatgaaaacttaacacaatacacattataaaacttacacagtatttttgataaaatatctactccacagtaaaaaaaaataaaaaaattgaattttcagtatgtggtgtaaaaactccataaaaatatttaaaggcaaggcccaagaatgcccaataatgaaattttcctaccagattggatccaaatatatgcgtctaagcgcaccaaatatttccacaatcagacgacaacttgagcttagctatgctaacctcaaagcggaaagtttagggccacaaattcaaataatcgttgagttggttgtgcttaattgactcaagttatttttccaccttcactacctaagttataaataggtgtaattgagtacaaaaagggtcaattccgtctcaaattcaaatatattttccttctctcactaggattcatttggattaaagcatcatagagtttttttttttttttttatagaaaaccccctctatactccaatcagtccaataagaagaaagaggagttagaagaagaagagagatcaaggaatctagacttgctataattggaaatgtccacaaagcaattttttgacctcaaccattggcgccatctctggaaacttctttgaccttgatcggagataagtcctactaaatcattcatgtaatcatatgagatcactgagtgaaattctaagatttgaatagaaaacatcattctcctaaaactgactaataatagagctcagatgcaaaaagcaatggctgcgaaattctcagatttgaaaaatagaaagcatcttgctaccaaaactaactaattagggacgcggagagcttagctcagatgcaaaaagtaatggctgatacaacatccagaagacacgtccaactaatttgaatgtgatcgtggctaaggacagatgatgcaaacgtgtaatcctgtaacaccctaactaacataggcgtattacgtgatt

SEQ ID NO: 389567 - DNA, 1966 bp, Cannabis indica
agggatatacaaatctgtcctttatacaaagatccatacgtgaaactcatacagacacaaatgaaatccattaaaaaatgctttatactagaaaagtataatcaacatgaaaacgtacatatagcaatgaattcatcagaagactgtacgatttaacaaaaaagaaaaaagaaaaagcagactttatgacaaatttttaagtagataatagggcaggtatgcctctttgttcacattgcatgactatgaccgtttatagtttagggtacgaccacaactccacaaggttatctctctattctttatgtttatgctatatagtaaccacgtaacactcacattttatatagatagatatcttatatttatatagatacatgagtttgaaagttcatcatagaagcaaatattaattaattctaatgtaatcaactaataaccacaaaactcccaatgaatccttcattgtgcaacacggcacgttagtaataaagctttttaatgagaagccggcatttggattgtgtttatcgaaagttattctttgtttatttatataatacaaaaacgaatttgtagtatagttcctccaaatgaaaaaggtgtacggaagaagtctcgtggaaagttagatgtagtctcgaaaggagtttcaaaagtccagtttatctacttcagaagttgttcgcctttatgaaaagttagatgtcattcggaagggcatttccagaagtctaacttgttcatccggaaggagtctctagggaaagctagtcttcgtctagaaaggagttctggatggcttgatgttccctcctagatctttgttttggggatcttgtagacagcttttgacctgtggaagaactagaagaagtggagattgatcccactcttctatccagaaaactaacgattgggaaaggtttagagccaaaaataaaatcaatattgataaaatttccaaggtcaaaccctgacctctttgcatggtcacatggagacatggtcagaatagacccttccgtgatgacccatgcactaaacattgatctaaacatctaacacgtgcaataaaaaaggaggttggtggacaaagagtgcacccaagtgctgaaatatgaagtcgaaaggctacgtgccaatgactttatcactgaactacccactttgggtatccaaccccctgttggtacccaaacctaacaacaagttgagggtgttcatagatttcaccaatctaaataaagcatgtccaaaagactacttttcgcttctaagaatatatcagttggtagctgctacagctagccaagagatcttgagcttcatgaatgcttattcaagttcaaaatcaagatgcacccaccagatcaagaagacacaagtttcttgacagacctaggcatatactgctacatggtcatacccttttaggctgaaaagtgcaggggccacctatcagagacttgggaaaaaaaatgttcaaagatcacattggccgcaatatggaggtatacgtggatgacaagctagtcaagtcttaaaaggctgggggaatgtggaggatctagatgaatgcttcaagatcctccaagagtacaacatgaaacttaacccccttaaatgttcatttagagtaggctcgggaaaattccttggcttcatagtcaatgttagggaaatagaagcaaacccaaacaagattcaagccctttcggacatgaagtctcccacaataatcaaagaagtataaagcttggtgggacatattgctacacaactgctccaccccaagagtaaatatcgtcccagatgtagacttcctgtcattaagacaagcttggaaatctgagtcggcatagcctacgggatttaaagcactacccttgtagactaacacataatgccttgtacttttcaaatatttcaaaatattcttaactggagtccaatgttccttcct

SEQ ID NO: 389568 - DNA, 1059 bp, Cannabis indica
aaatttgggaaaatatattgacagaaggttctgatgagtccggtgatgttgatgttgtacatgacgataactcatgaaattttacattatttgcgaatttgggggaattgactgtgcaataacctaatcaactgcgaaggattgacaatgtcccaaagtttcgagatggtttcgaatattgatgatattagagatgatgatgatgaaaaaattgtaaaagatggggatgatgacttgcttattgatcgtcttgaagatgaaattgaagatgtgtccccgggaaattcaaattggattagtgatgatgattatgattaatgtatttgatatttttgtattgatgactagtttttctaatattattttgtttcgagaaatgactaattgtactattattatttaatctaagttgattagttgttttgattatcttaaagtaagggctcatatgattttgttatttcttttagcataaaatgtcaatagatgttgctagttatcatggtggagatggtgatggggataatccgttagatcctaatagtattcctgcctcttgtgagacctctggtgaatctagaaaaagttgcgggaggaatgttttggctaacttggaagatagaagaaaaaaatctgggacgtcgttgccattagaatttgacaacgtatccaacacaattgtagggttggagagtaaaacattccctcgttttgtagggagagaggttacattggatgttcctggacattatcctaattgggcaagtgtcccagagcagtaagaacaccttattttaaccaaactttgggtaaattttttgaaatttatatctaaatgaaattattagtatgttatctcaatatttttttgtcaaatacagtactattacaaaattggcagtcatccaaaattgctagctatttcgttagttgaaatggccaaaaaatataagacgagaaagaacattagattcgtacatttcaaagaattttacaaaaatccagaagacgtagaaactgcagtcaagaaccctccccccaatgaactcaatgaagaac

SEQ ID NO: 389569 - DNA, 940 bp, Cannabis indica
ttttgtacagaaaattccatacattaatccaatcaaactaaaaaaattatctcaatttgacaaagattgtttttttcttcatattttctgctgtttcgattaatttctcggcaagcaattaccaaataataataataatattctgtaaactaaaacgaggaatcatacctttgagaatagagataaggaaagattgggattactgataattgggacacctttggagatatatttagacgcaaattcgggatcgacttcattatcgtcacctaaaaccacccaatttaacgattaatttccattacagaaagataaatttcatcatcttcaaattcaaattcaataaaattctacggatcagaaatgaggaaaaagaaaattacttttggaggcgagagagaattgagcaggtctagatgagaagggagtcttcctgggaaagaaaattgggaaagtcgaagaagaagcagatgaagaagacgtggttattggtgcagaacaggggttaatcaaggattccatggccaaacgatttttttcttttgagacgactcagtgagtccgttcctttcgactcgctgccacgatgacaatacttttatgcagttgcaggaaaatatcagaggctgccaagtgggctgggcccattggtacatcccaatttcaggcccacttggcccgaaaataaaggcctcttagctgagtaacgatagccacacagtatatagggatcatttttttttttaaaaaaaaaaaagaaagaaagttacaaaaatagacgtttgtaccaaattttaaatatatttatagttttttggattttatttacataaaatataatattttaatatatttttatattgtattcttattattttgttgttaattttatttgttatttgtatattattttggagaattatcctatacattgtttttt

SEQ ID NO: 389570 - DNA, 1072 bp, Cannabis indica
aaaaaattctaattagccaaatcttattgtacccgagtctagaacatagtaaccttgaataatagccatgactattattaatataataattgaaaaagaaaaaatagcaatgaaaaaactccacatcaaaagaaaaaggaatactataatttttagtaatgtaatataattaaaaaaaatccgtttcaaaagaaaaaatataattaaaaatagaaataactcatattaaagatagaaataatttaacatcaaaaaaatataaatcatttaacctcaaaatggaaactataatttgtgaaataaacaactaaccaaccatatagaaacaactttattgaaatggaaactattaaccaactaaacagaaactatggtcattcaaatggaaacaatttaacctcaaaataaaaattgtagtttgtaaaatagaaacaactaatatttaacggcatatatatatataaaatgaaaacaaatatcataaaaaatagaaacaatttaacttcaaaatagaaactatagtttgcgaaatggaaaccattcaccattcaagtagacacagttcaacctccaatggaaaccattgtttaggaaattgaaacaactaactaacatcgaaatggaaactaatatatgttaaattgaaacaaatatcgtaaaagtagagattattatgttagaattattataatggactaatacaatcataggtttaattctatcattaactatgtgcctaatattgctaataaccataatagaatggttaacaacttaattatgtgttagaggcacatgagagctccttaatactatagttggcccatcaaattatagtttactattattgaactacttaagcccaattagtatataatcccttagggttataaaggtatgagagaaaaatatatatatatatatatatgtcttatgtgaagatgtggttttgtgggttaatggtaatgagtgaaagaagagttagctccacaaagtgctctctagattttgctcatggattttggtggtgattctctttgaagacattgagggctcgtttggtacgccgtat

SEQ ID NO: 389571 - DNA, 1701 bp, Cannabis indica
tacatatatatatatataaccatgaattaaagaacaaagaattaattattttttccattgattcaagtgtatcatttgatttacaaaaggcgttataagatcatatatcagccatgcatataatattctatttaatttatttttggttaaaagttacagaattaagcagagtcgccatatcagccatgcatcatgcaatgcatatctgcaaatttccatgaccataggagttaggaccacgtgtaggactactattgatgagatttaattatatcgaagtaattatgatcattaaaacaaaataataataaatgttactgcttaaactaaaaaattgtttttaatttccagagaacctaaaaacagaaatgtaaattatgggacaaaaatgaaaaaaaatacgtttatatatttatggtcaacagttgaacaggctaactcatgtagttggaacttggaagatggatgtttgagttgtgtgggaggtaaggtacagttggaattggatactaaatataattgaatacattatatatttcatctattaatttaaataataagaatctgttttaaaatttgttcttagacccctggaaatcttggtagaaccagccaattttggaggagggagcaaccacttggaagcttgaatgtagcccagtgtaataaaaggtttaacttcattagccgttaagtgcttagcgaatttttctcttttagctacgtttgacccttctcccgtactcttatattctccgtagtaaagtttactgcattaatatataattatatgaaaataataagttaggagtattcgattaattactaaattaatttttaattattgtttataattaaagacatgcatatacccggcgtctttagggtccttgatggtccatccaccggggtggacaaccttggtcatttcagtgtaggcataaatgactcgaggcatgccaccccaaggtctccccaaataggtagtgcctttcccagagccacgaataacactgtgcacaaatgaatatccagtgttctctgattcagcatttcttccttgtgctgttaccactgttagtcctttttcaccgtacacaaataggtccgcgttctgccagttaaacaattatacccttaatattggttaatttaattatataattaattagtttaattaattaattatcacacatctatatataccaaatacaaagatgttcctctgccgaagatgaaatcaacggtaccctcaatataacagttcttaaaaaagtgatttcctctgtcatcacaaagcgtatcttgatatccaaggaatttgcagttataaaaggctccttttatctccattaattctcattgccagagcttgaccatctttcttgtacggatccggtctcggcgcagaattctgcacgatcaacatatataaatattagaaaattccaaatattatttcaagtttagggtgtgtttggaaagtaacgtaatgtagtaattactaggtagggtaattactagggtggtaattacacaatttagtaattacactatattttgaaatgcaaatgtgtgtttagatatgaggttggaaattacatataaattcctaatatcttgtttggcaaaatagttagtaattacatgggaaaataatattttttaatagctaatgtttaatatggaaagtttttagta

SEQ ID NO: 389572 - DNA, 511 bp, Cannabis indica
ttatatttttatcagacgtgaaaaaaaagtagaaactctaacatataaaaaactttaagttagtgtgatttgttaatattaaaaataaaaatataaatggtcatagacatatatagcttagtagtttcacatttctcctcacaaaaaaaaatgtcaggttcaaatttccctcccctaatataaaaaatatatataatataaatattttttaaagagaaaaaaataaaaaaaattaaatattatatattctattattttaaatatttatattatttataatgcataagtaaatatatttttaatacaaataaatttattatagttttttaataaaaataactctttattaaaattgttggctcctcatctttcatttttagcctcaccataaattcttcatataacttttatggcatgtttactaataagtaatgggaatcaatagtaaggtaatcattctcttatatttgtttacttgcattattaaaattaggaaagggagaagttgatt

SEQ ID NO: 389573 - DNA, 3148 bp, Cannabis indica
cactaaactccattctacacaaaaaagacaaactaaaccttggcaaatgacattttaccctcatacaatagccactttaaggcacttacggattttgggaaattctgaattcccgacaattcttgacattcccaatgtctaaactatatcgctccgctatactaaaaatactaagatgtgattctaatagccaaacaccgcgttccaatattgtcgggcactgaatatgcaaaatatgaaatttccatatatgacaaataaaatgcattctgaatttaaataaatcatcataaaataataatttagaattaataaataattttcatatttaaaccctaattatctgctaatttcaaaatttaagctaagcggtctttacaatgttgcttgagaggattgcgatgttgatttttgttctgaagttgctgaagctgctagtgaggataacatggtgatacacatactgcttagggtaattccaacctgaaagtccataaagatcagtcagttagcatcattgatgagcaatggatcacaccaagaaggaaggggactaaacatgttcctcttaaaactactactcaagttaaaattggttatgctctgttgagagatgatatgggagacaaaaaccacaaccttaataatgaatagcagtaatatattgggtgggaatgttagaggcctaaataagtttgaaaaacagtgtgaagtgtttgatgttttcaaagtgaaaaatgtgggttttggtgctctttttgaaaccaaaatcactcatgagaaagtccaaaatttgatgaataactttcctagttggagctactactcaagaaacaacatatcctattgtattcttcttgtttggttggacaggctagttaaggtggagaccattatggattacatgcaatttgttcactgcaaagtgaaaattgctagtacaaagactgagtttttcttaactgtagtctttcggagcaactctatggtagagaggaaggacccttgggctaagttcactagcatgggaaaaatgaatggcccttggattatctttggggattttaatgcgatgttttataacaaagatagaactgagggtcgtccgactaaggctatggagatccaagatgctcaagattggttatgttcttgtgatgtagaagattctcactcccagatcatgtttattagaccaagtatagtatgttccagaacacctcagcttgacatgatctgggagtgagaatcttctccaagcttgacatggttttcacttatgagtgttgtcttgacaattacccgaacagtgctgccactttcaagtgggagaccatttcagaccattgcttttgtcttatcaagttccttgaggccaacaactatggtactaggcctttccatttttgcaagtactggacgtaaaaaaaaatgattttaaagcaactactcttgctgcttggagagataacaaaccggctacacttaagaacattattcagaaactttttcgagttaaatacactctaaaaagatggtgcaaagcagagactagtcccctatgtttatactaaagaaatctaaagaggtttataacaatgctcacgaggtccttgctactaatccttcttgtgatattcttatgcaggcagagaaagatttgtgccaggagtttataattgctcgaaaatagtacaaaagctatcttgaatagcaatcaaaagtcatttggctaaaatttggagatgagaatactagctacttctatgctattatgaaaaaaaaagaaaagctgataacaaaattgtctcctattggaatggtgattccattgtggaggattatcctttagtggttgaccattttctttaatattttcattattttatggggaagaaaagttcagctactacaaggattgatcttttaagcttggagaataggcattagcttagcttggaacaataaattcacctaattcggcctttcaacaaatctgatgtcaaggatgcccatttcaatattaatttcactaagattccaggtcctgatggatttggatcagggttctataaaaacctttgggataatattggagaggacatcactaaggtggttttggattttttccaagatggctccatacccaagggaatgaatgagactaccatctcacttatatccaaaaaggatagcccccgaaatgctagtgactatagaccaatcgcttgttgtaacactctgtattaatgcatcttgaagatgatatgcaccaatcaccttaggcctaccaaatggcgtgcttcagaatgtggcattattcttgacaaaattcacaataagctcaactactggtctagcaagttcttatcctttgctgaaagagcacaactaattcactctattctgcttgggatacgtgttggaattattttaccaggatctagatttactaccatgtatgttgtttaacatcctaatatgaatttttaaaacaatgtaaataaacacgtataaagttgaagaaaccttacagtgggtgtagcggaattaaatgactccttctgcttagatctctaacccttgtatcctttctatagcagagtatcaccgagatctgagcccgattctccttcttgttgattgaattcttcacagtcttacatactatgattgaggaccaacttgatgtgtgtggacacttactctatcactcaaggtatgaaaatatgaagagaagaagaagagaatgtggttcaaaattaatagaaaagaaggctcatgaaaatttgactgaaggtgaatttttatcgccttttggtgtgagccatcactatctatttataggcaaccacctaggtttaggctaagatttattaggcattaaaataatgaagaaattaaatggaaattcctttccctagtggtcgaccataggatgtttgggccccacttagaatttttccattttatcacaatctttccttattttctcaaaaatgccatttttctaattctaaccatctaaatgccaaaactatttatttaataattaaaataactatcaaataaaattttcatttaatatatttattaattagactgaataaagtctcttaattaataaataagacctaggatctctttt

SEQ ID NO: 389574 - DNA, 1232 bp, Cannabis indica
ttcctaaatcaaaaggtggactcagatttcgaagtccatagaattgaaccaggctttactggcgaaatggggatgggcccttcttactgatgagcaaacccgtttgttgcaaggtgttaagggctaaatatttgagaggtaagccattcatggaggctacctacaaaaaatcagactcttggttctgcaaaaatgtggttaaatctaaagtgattctcagaaaaggggcttgtaaacttgtatcaaatggggaagacacgaatgtttggtcggatccttgggttattcatggtaatgagttctacccaagacccgttaaccctaagcctgagagggctgtaagggtggttgatttgctaaatgaagaggggaactgggacattgccatgctcaattcactatttgagcatgataccattaccaacatcctaaaaaaggggggagaccgagttgccaggggaatgatagatgggtcaagaccaaagaagcaagcggtaaattcacaactaagtttgcttatctggtgcaggcttatgagagagcccttgcctgtgtggctgctccgtccttatggaacaaactctggaactccaaaatcttagaaaagcataaatttctttggtgaggtatcctttcgaatgctctgccagttggggttatcctggctaagagaatcccaattgacgatgaagtttgcccgttatgtggagtgagtacaaaatcgatgcaacacctgttcctctattgcagctttgcttaccatctctggaggtcctccccctgggggatatacccgatccctgactctaggggtcaagtttatgattgggttaaatttatgtggaacttgaagtcgaatggggtggactctgacaagctgtttctttatgcctcaatcgtcgtcgacattatatggaaaacccgtaatgacaaggtacataactctctcccgagtaacattacaatggccattgactctatttctcattgttacacaaattatgcttcttgcttattcccttcgacacttccggtggcttctccgatttggacccctccgcttgaagattgggtcaagatcaactgtgatgccaaggttggtggagatcccatgtgcattgcggctctggctagagatcactctggttttgttttgtgggttgctgtttccaatgctcaattttcgtgatcctctgatcggcgaggcggcggcgtgccatcttgctttagaa

SEQ ID NO: 389575 - DNA, 1431 bp, Cannabis indica
tatcattgctcaaaatcaaagcgaaattcataaaaggcaagcttattgcatataacattatggtatgtcaagatttagtaagacattatgagagacactcttcaagaacaaagtggatgatcaagttagacctctagaaagtatatgacacgattgagtgagactttatcgacgaaatattgaatgctttcaaatttccaaagaaatttatagaactagtcatggtatgtgttagaactctaagatatatgtagtcttatgattaatggttctttacatggattttttgaagcaaaaaggaatcttcgccaatgagattcaatgtctctcttgctttttattttgggcatggaatacttatgaagagatttgatgaaagttggggagtatggagatttaaataccataaaaggtgtgacagtctattgagattattggattcgaagacttatgtataattttgttcaattttactatactaaattgtgctccctgagctttaatatctagcaaatcatgcatccgaattttgacatgtactgaatcacgttctttgaatttttatccacgtcatgaatccattagtaaaattatataaacaaaattctttgatccaacaatcttaatagttttgaaagaatttttaacattttgaaaaattcaaaacttcgggtcacatgattggatatacttcaaagttgggaagacaaaattctaattagccataaataaataaatcagcccatttgctatattaagagcactcccaatagatactttaaacttgatctttctctaaaatactctaaaatagagaagagaaaatacaaatttataaaaatatgacataaatagatgttctcgtactttttgggctcataccagtttcatgttatgtcaaaaaatcaaacatgtatttacaacactagttgggagtactctaaaagcatcttcatcattaacgaagatgctttaaagaatgattaatgacatggatataattttttacatcttttaataaatatttatcgttaaagtaaaaaagaatgtcaataaaaaatattattatatcttacttattattattattttgtcttaaagtaaaaaatgttaattatttaatatatgttaaataataatataataaatattattttggactctatgttttgtaaaagttgtaaattggaccatttattttgttaaatgataaaatggacattatattttccaaaatggtacaaataggaccctgaactaattttttgtcaaaataaaatttaataagaatatgatctaaatatgttatgacaaaactatttacaatttctatatctatttgtgttaggaattgtcttcaagtttgttatattaagaaaaaaaagttgtctaaaattaagctcaaggtcttatttttattattttaaaaaa

SEQ ID NO: 389576 - DNA, 880 bp, Cannabis indica
ttttttttttttttggaaggtcctaaattcatggttgcatatacgacaaatatgatatatatataacaaacataatatatatttggttaaaatatttataaaagttgatagagttgatgaatattaactaaaattatatgtattaattaaaattagatgtatagtttgttaagtatgaaaaaaaaaagcgtaattatataaatgaagtttaatggccattacaaaaaatattgtttggtattgaagaaggtcaagtaagaaagaacctttaaccatattgatatacatattattttattgtgcacaaatatattaaaactcacgtaataattaaggcaaacaaattaattaatacatgataataatttaataaataagctcaccataatactattcaattttccttaatattatgattgaataatgctttctaagtatatacataacaaaattaataataaaaatctattattttaagaaagagggtatgcaatgcaagacaaacctttatctcatcactttttttcttttctttttctatatataaaaacaaaaaggaaagggtaacaacatcacattattatatgcttaccaaagagaaaaaataaaaattaataataatatgaaagcaactatatatatgaaaattattgctctcttcactcccatttttttttaaataaaaaaaatagaaagatggaatgaaaatgcaagctaagaatcgaagtagcaacatagaaaaagatataccaaacgcaatgtttaattaatatatatatatatatatatgatagagaaatttgcatgttatgttgctagtatccacatctaccaaatttctgacgttttgttatttgttcaatgaatttatgttttgcat

SEQ ID NO: 389577 - DNA, 1382 bp, Cannabis indica
gtttggcctttatgagtgtctcgatggtcgacccatcccatgccgattgccaacacccctcacatcgtgctgagagaatccttgattcccaggtcgtgattgcctagcatttgcattcatgcgggatgattctgggtttttaggttgtatgttcccgcaatttatatttccacaggaagttcatggatcgttgggtcgagtttccatgtttccattgtttcttggattttggtggttctcttcatctactgggatatccctcctgttctcaggttggtcatcgtgggatttctaaggctatccctctagggacatccccgtgtcttctggtcctagagcctcggggtcttccctgaggccgtctagttgatgtgttgggttagtttagaggggcatcaccacccgcagcccttgcgatcgctgcctcacgctctagttctgcatttcttcgatttgactcagctagttgttgtcgaagttgcctattttctacttccaccaatagaacatatattgtgggatcataggcatcttcgctttgtctttctaggatttcatccccagtttgttcaaattctccaccatttctcccagagtgaggagtctcaattgtatttgtcctatgagaagtctgatgctcatttccaagacgttgagttgtctctcctagttgattctcttcgtttcgaggagtatcgtctgccatggatggatggtttagattttttatcaaggagggtattatctgaattttctcttacaaagctctcattgaatgcaccaaattgttaatgtagatttttattaactaatatataggcctttttatgtaattaatatactcagggatctaaataaataatgatgatgataataatagtaataaatgacgagaatttttaatgtggttttgaagttatttcttaatagtccacgagtccatcttatttaagaattgataaattgtatatagaatacaataaattgtttacataatgaatgacatgtatatttctctttctctctcaaattggtcgtcctttattttttagattttgtccctatttataggagtctaggatgtcaaatatttctttgggatcttatcacttataaccgttcgtaaaacgtagacaatcctcacgttttacatttacaaacattggataatcacaaataacttctcataactgctcttttaattttatctacaagcggttatgctaattatgcttcattcttctcgcaatgtaacaattctcctttagacgctttaacgtaaaaaacgtctaagtatatatcagtagtacttttcacgttcttttattaatgttgagtaaggtataagcgagacacttttcaccatctgacaattgcgaggt

SEQ ID NO: 389578 - DNA, 1057 bp, Cannabis indica
cctcttcaagttagaaatatttcacctatgtctgaacaccaacatgcacaatcttttgtcatgggctcgtcatcttgctcgagctgaaaaatttattcatcttgttgagaagtctattcaatatttgctcaggaacacttcaatgctttgcaataatgtataattatgactctgtccaaatatttacatcacacaataattggctttgatacttgtccatatcaacactatttagtttccaactttgttcatgctgttgttgctttgctttggtttggcaaatataagacatttcgagtttatggttcattccttctattctcttcttactgtagaaacaatataattctggtgctatcctttacaagtttaaaatcatatttatgtagaccttattaggatagcaccagaattatactgtctgtatagtaagcctatcaacaatgatggggccattcactgggtccaagtagatcgaccaatctgcccataaataaagttgaatgaaacatttagatccaatagccactttctcactaagctaaacatgtggttcttgaaggcaattacacgttcagttgaaaattttaactaattaaataattttaaatttctccaatgcacaaaataaaaagataaaaaatgtatattataacctcacaaaatgttaaatggaaacaactatcatttaatcttgaaatggaaactatagtttgtgaaatataaacaattagcatttaatctcaaaaaatagaaatcatttaacttcaaaatagaaactataatttgtgaaatagaaacaaccagcatttaatctaaaaaaagggaaacaatttaataacgaaatggaaactatagtttgtaaaatggaaataactagcatttaaccttataaatgtgaaatggaaacaactattattaaaaaaaaatggaaacagttgcccttaattttgcctaaaatacgtggacctggatatgggtgatacgtggagccgaaagaattagcgtttatggaaatcaactaagtcttagacgaaagaggagtgtctcagggaag

SEQ ID NO: 389579 - DNA, 844 bp, Cannabis indica
tttttgagaccacttgcatttcagagccattagagttcaagtatataaaccccatttgaacacttgaaaaggggttaaaaaagaatcatttgtaaaagattttagagattcgatacaatattatattactccattaattttcttagtttctcttaagttttttatcttcacccttttatatttgattttataactaaaatttagttgatgagttcttaccgcaaacatgtattttaaaagataaaataaaaaaattattgagagtactgaaagaaagatcgataattttttttttcaactaaacaaattttttattttatttaagtactattatttatttttctcacatatttattattattaataatctcaataaacaaaatttgtttttagaataatcaacattattacaaactcaaacccagaaaaaataatgtttaaacatgtcacacaacattcaaaacatagaaatttagggtaatgttataactacttttcattaagcccttataaatttacttttcgattttacccacaaatcatcataaaatattatttataattatacatgcatgatcttgtcaatttttaattaatgtgggattttctttttaaggaaattaatgtgagattttagttgcatatctaaatagttactaatgaattttttttttgaaagaagttactaatgaaattaatgctctctctctcttctctcttgtctcaatgggaactaataaagtgggaaattcctatttgggcaagcaaatttcttggagatttatctaatttaaggataataaacattataaataaaaaaaataatagattatataaaaataat

SEQ ID NO: 389580 - DNA, 991 bp, Cannabis indica
tttaaattttattatatttcattttaatttatatttttattcttatttctatttccatgtttgtattagcttcaactaaatcccaccattttagagcactcccaacacttaatttattttattctttaaaatattttatcaaaacactattttttatattttacttctaatttttcattatatcatactttagtttttctattatttttttccttatattacttaaatactaatttttactaactaaaaaaaaagttaaataatagttaatttagaaagagaaaaaaagaaaatgactaaaataataataaaataagtttagagaagaggtaatcccaatcttaactacatttagttaagaaaatatagtgagctaaaatagagcaatggtttatctcatagaggtatatttttttttttatgattttgagttaaattttacaagtttaattattatagctcacttgtttgtgaatacttttaattaatgtctaataattactaactaagaagcagtgaaagcaaagtggttaataatgaatccaattagttaagggcctatttgtgcaaaaggaaacaaaagagaaaatcacaaacacctagaacacctataaatacatgtatttatagtccgtacattcactattcaataaaaggcgttgttgagcactcaacgattttgttccccttgcaatagcacccaactattttttgggttaaaaatttatttttcagaagaaaaagaagggtataaaggtatttttgaggcattgcctttaagccattggtgaagtacagctgtcatcatgacataaggtgacttcactcttacgaggctggaataagatgaaaagtccaaagtggccatctgttatcataaataccaaattacccccctatacactgtccaaagtgatttcagaataagaaaaaaaacatatattttgacaaccaaaagaattaaagggcaaaaaaaaaaaacaacttaact

SEQ ID NO: 389581 - DNA, 705 bp, Cannabis indica
atatatatattttatatacatatgattatatataagtataattttatttttatatatataattaaattaatttttttatataaaatatctatataatttttatttttaaatacatataataatcttataaaattaataaaaaatattttgttaagtaattaagatattcggttaaaattaacatacaaaactaaaaaaatctcattaaactaaaaatttggttacataatcacactatatagaataaatatagtatatactatctttgaaaccgttacccgtgacatgaatgtcatttatttgattttgttatggaaaatattggtttttttttttttgaaaatagaatttatcatagataatcaacttgcattcgcaattacaatatctcttaaagaagagggagcattatgctcataaaaaatttgatctgacgaaaaataagacccctagcaacacaatgaacaacactattagcagaacgattaacaaacttataaataaatattataaataaatgacattggttttggttcgataacattataaataaatattaatatatattatcatatcacacacataaatatacttggtatataattaattaatttaaaattcctttttttaaagggaaatttgattttctatgcttagaaaatcaaaaaatttgatttttaaaccaaaaatttaaaacctaaaaaa

SEQ ID NO: 389582 - DNA, 618 bp, Cannabis indica
atataaatatatgtgtgtgttttgactatgttattatctctttaggtttcctgcgttgtgagtatgttatatattcacaactcaaattgtttcacaacatatatatctatgtatgtatatatgttgtgactatatgttatatgctgttaaggtttcccgtgttgactaaatccatgtttattatgtgatgtgtcattattttaaatggtgagagagccttttgcttgtttacatcattccagtcgcacacttatctcgcatatctattatgagttcttatgtattttattctattgttacaatttcataaactccaattgtttcaaaacacgacatccttactcaaattagtaatgccctttttcctattcttttttgagactgcacttcatctgatagcaagattaatcaagatccttagtgaattgcttcgaaacaaaatttataattaggtacgtaccatgaaatatatagcaaaacacgcgaaccatgtaacagaaaattatgttgtgttctttacttcatgcttacttaattatatctgaatatttcaagtacttggtacgtaatctcatctaatataatcatccaagtaatggaaagaaaaaaaaaaaaaaa

SEQ ID NO: 389583 - DNA, 2439 bp, Cannabis indica
aaagaggtagttagagatgagatgcttaaataattagatgtgtgtattatataccctatttttcatagttcatgagtcaatttgatccatgttgttcctaagaagtctagaattactatagtaaaaaatgcaaataatgaattaattcccactaaaatccaaacttgatagagagtgtgcattgactatagaaaactaaatagcctcaccagaaaagactatttcccgctacccttcattgaccaaatgattgaaagattagttggtcacgagtattgctattttctcgatggttattcaggatacaaccaaatcctaattgcacttgaggatcaataatgaccacttttacatgtccttatgtaacttttgcttatccacacatgtcttttgacttatgcaatgcacctgcaacgtttcaaatgtgtatgattgtaatttttctaatatggttgaatattttttagaaatctttatggatgatttttctatttatggatcttcttttgtctataaataataattagtatttatgacataatggagaaaaaaaattaaaaagttaagaaaatacattgttcttattaaaggaattacaaataaattagattttaaataaatactttcattaaaattattgtgataaattttatgttgaaaatatttagtttggatttgattttatttgtgtttgattgagaaaatagcaattgtgaaaataaagaaaagaaataaaaaaaaaatggcaaacatgttaaccaaagccataaaaattagcattttcgaatcccaaaagagagcacaaaggaccaaatcccaataggccgatatttgcctctccagctgacatcaggtgccccatggaacctctaaatttgtgcgtagcagtgcaggccctacgtgaaacaggtaacaggcgcctttgtccccctcccttcctcatgtgcgtgtggcgcgcacggcccctcctgggcctttcgtttgctcgtcacgctaaccacgcgactggcctccatttgacccaagcccttcagcccaaaattgcttcaaccactatccacgtggctttctctcctcttgccatgtgtccacatacaaccaatgagagagtgacacgtggcaagtctagttttaactatagagtaattgcacttttacccacatgcagtttgtaataaatttaattgtgtattagtccttttacctttctataaatagaagcttacgatttgaattcaatacagtttcagacaaagtaatctagagaaaacactagaagcgctcagtgttagtttaccgctttttttaattaattttcttatgagtttctaagataccgtattattaagttggatgatgaaatctaatgtattgagttaagtattcatttttattttgattcttagtacaatatatgcttatgatttccacttcttaaaataatttctttcatttttaatatcacgtagttttgatagttagaaattaataatgctggattttatatttttttaattaaaaataatattctttaattttttatatttacattaaattattgcacacttaatgcttagaagttatgattttaaagcgaaggaaaatctattttttgttagaaaataattagtttgattactaattatattatgagaattaatattaatataaatatttgtatattaagtggattttgaacccttaataatttccttaaatatcactgaaaatatctgttattgtcatttttaccgttaaaatattttattttattttgtttccaaaaatctcattatttttggaactaggttagagttttaatagcttagcttaaataagtattttctttgatctcatgcaattcctatggatttgaccttgttcttcacaatctctatactacaataaagattcatgcgcttgcgagttgataaatataaaacatacaattttggtcacaataataatagtgttagatttcgtaagataagtattttgtaactacaacatctagtttgactcattcccaatggatgacaacttagactagtatttacaaagctgaaacaatgaagaagtttataaaataagaatggcgtagatgactatattccaattattctattctcttagtttttaattaagaaattgcttaagattgtatattattagacaagaaggtttataaatcatctacttatgatgtcactctattttcttctataaaatgagtgacagagatgactatattctagatattctatcccgtaatgatataaatcctttatcctaaaaaaatttcctacttatatatgctaagtaaaggcaacttaaacttagagttgaattagtactttaatggtggtccaagctagaataattactaattgaatatttggtataaatttatatttttgactttaaattttagaatccaaa

SEQ ID NO: 389584 - DNA, 931 bp, Cannabis indica
tcaagaagcaaccaagttagcttctgattaataaaaactctgaaaatttcaataagaataaaagaatactatctatgtatcgacaattagtttaattcttgacgagagttccaagctttttcttgagccacttttttgtttttgttcccattgtctcttctttttttgtaaatttataactttgaagaaaagttcgtctagaagcgtagtattttcatcacgaaactttgaaccattacaattaggtattgtaaaagacttattgtcatgataatcttcttcaccgttgaatatgatcgaatttgtattagaagacattaaagttggatcctcaacaaatttgttggtaactaaactttgatcggccattatgaaagttgatgaattgctctttgtgattgtatggtttattaagtgtgtgtgtttactagtactttagtttaaaccctttctatctcttctaagtccttttataggccaatcctttacgtgtttatttaaatttataatgttaatctatattttataaaaaagataaaatatttgacaattacaaaaaaagctatttataaaaataatcaagactccttttcctatactttttaggacttaataaatagaaaaatcaaatatatatttttttaaaaaatccttgatactataatgtggcagtttgatcactttcatgtatatataatctaaataaaattgaccaagtcaaacgatactgaactagtttttcgttcaaatgtaatatatccaacaaacagatattaaaactataaatttattatttttattattgctgaaagattaaaaaaatatcaaattatttagagattaaacataaatttagtaatcctctaaaatattttacaacaacactcaatttatttaattttttcaaatttaaaatatacgtgtgagaata

SEQ ID NO: 389585 - DNA, 494 bp, Cannabis indica
gtttcattatagaaatattaattttttgattccaaagatatataaattagtgactgaaataaattaaatagttcatcataaaaaataaaataatacagacaaattgactggtttgttaaaaaaatacaaaaacaacagcaacaaaaattaaactcactcaattattattattttattttattgaaaaaaactcaattattatttatataacaaaaggaaatagaaaaataaaaaataagtaatttcaaaaaatgataaaaaattattatatatctatgtgaggtacctgagacaaaataataataaaataaataaatgaaaataatcttttatcttatatttctctatttaactatagataaataggtacataatatatatattgtgcctatagatatatctttatatattaaaagtgcctatctaacggtatttcttggtttaacattcttggtttaacagaatatacttaaaaataaaagaatattctgtta

SEQ ID NO: 389586 - DNA, 835 bp, Cannabis indica
taagacatgataagtggagtcgctaaaattttacaaaactttcaaagactctacttttagcacattctagtttttgtatttatcttggcccaacattgtctctaggtcgtctaagaagcaaagaacagtgtctaagttcagtatagaagttgaatatcgtagccttcacattttataaccttcgaaccgaaaccaactccttcaactcgattcaagctttactatttgagagattggtgtcagcttcccaaatcacaaacaatgtggtgtaacctgttcttatggctgctaatcctatattgcattctccaaccaaacatatagtatttgacctctattttcttcgaaatggggtggttaacaaacagcttttaaacacccaccttcttataattgatgtcgtcacactcggtagagtctttttagaaacaaactcacaaacttaatctggtctctatagccacactaaatttaaggggccaggggggcgttatgtgtggtcagtgtgttatgagtgtagagctgtattaagttttattttgggggagcaaagtggagtgggggttttcagtttttatgggaacagcatcgttgacaaaacatgggctttcctttttgaccaaaaatcgagcgtgcactccacgcgccccaagatgcgcctacgatttcaacctaatttttagatcttttctcttccttctctctctctcagatagattaggctccagtttcttcttgtttgtacgctaaaatttactcttcccaagacaaaaacaaacccacacttaaaaaaaaaaaaatacatttcattttccaattaattaattaattaatt

SEQ ID NO: 389587 - DNA, 823 bp, Cannabis indica
ccctttagcgtcgccctgatcagcgtcggtagcgaattcgacgaaaaccgacgcgtgaaacgggcttaaaaaaccgcctctaaaggggggttttgtagagtgaaaccactttatcaatgctactcactgattttggcataacacctcacacactattttttacatcactacaactattatgcacaattaaagctatccttctcactttagatagccaaaatgctttattttaaaccttccaaacataatacactaccgttgccacagaagcggcatagactaattcttagaacttactcatatgagctcgagaaacccatcgcaacagagttcttatctattttagctccccaacgcgtcttctctttcaccttttgtaaacatctcttgctaagataacattcaaagaaaagatgatacataccttcttcatgagtataacatgataagcatgttatccaacatctgaaatttcaacaatctttgtttagtctttaatttttcaagaacaaccatccatattataacactatgtttcggtaggttgagtctctcctacactcataaataccattgggttcggatataattgttataaagtaattggtaactattttttatggtatactcctcaagaataaatataggaatgtcaattaaatttttaaatcttccttttgatacaaagtagatggtattggaaaaaatagtgaaagtcgaaaaaagataatctctgtattgaaaatagttggtgtatattatgtacccacttgacccaattttttttttttcaatgccacagtccaaatatatttctaaagag

SEQ ID NO: 389588 - DNA, 1434 bp, Cannabis indica
gtgtataaaaattaaaacataaacgaattttgccgcaaattactctataaaaaaatattcccatatatattttcttctcgagaagattgattgaaaaattgtaattaacactcattactctcgtaaaattcatatattttataatggtcaattttcacttcacttatttcttttatttttcaatgtgatttcactttttttttttcaatcactttttttttttagacaaaaaatgagatcaagtggtgtttatctctttcccattccgacaattttgagaaccatgcaagatctaattcaattcaattaaacttaatcggtgtgatcaaattcaattaaattacaaaaataaaaagataaatatccaataacaattagattagattggatgttaaatgttagattctaattaaattggatcaattataattagatgtcaatcttgaaatttaattaaaacctaatcaaatcaaattatatttaatatatattaaaaaattatatgtatttatctaattttttttaaaaaaaataaatactattacaaatatatcatttatatttgatttttatatagaaaaaaactgaatatacacatttgtatagtcttgtttcatcaatttttggttttcactcaacaaaaacttaattttatcttcggttttgtaaaaaaaatgcagataaaataaaagatagggcaagcgcatgatgaaaataccgaagatataggctctgctcgcgaagttgtaaaaggcctagtaatggaagacctatatcttaagttattacactacatcaaatcacactttttacaagatatgagcgtaagtttctttgaaaagtagtattgtaggtaatataaataaagcggtaaagttgaaattggtaaaataaagaaagatggacttataaaattttttagaggcataaatttcttcaaatataaagtttctctctctttactttctcttacctaaagcccacactcttcttcttctcctctctctctctctctctctctctctcatattactcaatgggaagcgagaaacacactgagagctcaccttgtttgtttctctagatcttttctcggggacgatgtcgtagattcgcaagaatgataatcggaaggtagtgacaatggtgagcttgcctccagcgacaaaatgagcttgcctcactcatacgaatggaggggctttcaaacagtagggttcactcattaatgttagatgagagagtcagttagtttctgttagttagttttgtttagttaattttcaatgtaactaacaattacttgtaactaatttattaatcatctcaccaatttagcaagctgatgttgaccacttaattttcatcgttaacagttgcaatacaaataagatagattacaaaatcaaccaaatttatgtgttaataaaaaaa

SEQ ID NO: 389589 - DNA, 661 bp, Cannabis indica
tgttgtattattatattttacttttataaaataaataaaaatataatatttaaatgatgtaaagaaaaaaaattaaaaatttaatgtatggtataatgtaaaataaaaaaaaatagtgagattttgatgagatatttagaaaataaagtaaaaaatttaataaaattgcttttataatacaatcaacaagaataaaaccatacacaaagtataaatcctaaccaaaaaaaaaaaacaaatgaaggaaaatagtatgcatcaaaataagcagcattagatggcaattcatattaaattcaattgagcatggttacaagataatttcaacggatttaatgatgcctagttagcaattttttatgttattgtggaaattattgaattgaatcaaatggcaaaatatgcagcttctttgtaatgcttaacaccttaagagagaaatgataaaagacatcagtggtacctaacactctctaaggtgttacatcgttggtgcattcaaatcgaatcccatataatttaatgtaacaattttttctaaaatatcactatctaattataaacaaggctaactctaagctaaggtaagctaggcttgcgggccactcatatcagaggcccaaataaaaaggggttttttatttttacactttaaaatagt

SEQ ID NO: 389590 - DNA, 2155 bp, Cannabis indica
tcacaccaatttaatgagacgctctaacaacttttgacaacgtcttcattttctaccttgtaattttgaagtgagattatccaagatatggagtgaaaattagcatccttatgccttctatggaacaaaggaagccttagatacttaatgtctatggttggacccgagactccaagtgcattcttcatacccactttcatccccttattaatgtttttactaaagaaaatagaagtttttagttgctcagagcaagagcaaaagtgctctaggcagttccaaaagcttttagcttcctcgaaatcactaaaagccttagtactaaatacttaattagaagctagtattcattcgcatttttaacatactggcttaaataattaacaatgtgattaaatttaaaagtaacatgatatcttcttaaccaaagaagccttttaattacttggagcttaatagtactatagtagtaaaatacattatttaaggtgaataacatattacataattttgagaatccaaacatgttttggatggcctagaaactcaacaccccaattcattaaaaaccaaacaaaaggaattaataaacaatcacaaaataaagacaaaccagaaaacaatatataaaacaaaaccaaatagtttccaaagtatatttggtagtaacaattacaaataataataatattactttagtagtaatgtaataattaatttgatggtggggggtttattattattattattattttattaaagaattatcttaattttaaaaccccatcatcaagtccttgagtacatatacatgatacatacatgtattaatacttaatatttaattaagcttacaatttgaataaatcaatgtgaaattttccattatactcacgtgaaaacatgagtttaatatattctttactagtcattgttttgtataaagctggattttgttgagtgaccaagctttgtattgggcctatgtcacaatcttcatttgcattaagaaatgtgacaatagacattctttcctttgcagagttcactactgctctgtggatattgctaagatatattccatttgttataatctgcaaattgcatatagtaacataataattagaacactcacaataactaatgtgtacatagtattgaaaaaaaatacagagaaattgatatatagggtaatgatatgtgcggtaaaataaaaaaaaatgaaattttagtgaatcccatattaataatgtgtgggagtttaatatcatatataagatgcatgaactactcctttcattaccaattaattttgagattgaacccgatatgcattttaaaattgaatcccacccatcttaccaacatttaccctaaattagagaaattttaaaatatttaaagagtcatattaaaaacacattaaatgctctgaactcttttattttaaagcttttttaaaaataatattcatgctctacatttatagaatattatatttgaaataaataaaatatattaaaattttaaaaaatattaaaattttaaaaaagtagagttttcgtagtgtattttaaaaaaactaatatgtatgatgtaatgtaaaagtatatcgtaaaaaagaaaaagtagagtttaagtaatgtattttaaactcggaagaatggtgttattacctctagttgatctcctagattgacgaggaaagcattgggaagagggttgacagggatccacatgccatctttgttgacttggaagccatcaacttggttcaattgatagagaatggtaatggctgctgcatcagaatgaggagctaaacctgaaacttggtctggttgagggcatggagggtaatagtggagacacattccttgtattccatcttcaaataactttgaaatttccttgctttttattcctagaatcttttccatttgggagattaacatcatcgctagctttgcaagttctactgaataaattttcaaactttcactgcaatatacatacttttgtgtgttagaagaagttaggtgacgtttggtaatactttttaatcagttttctgtttttaaaattgaaaaagtgaaaatattttttaaaaacatgttctataaaactgtttttacttttcaattttttaattgag

SEQ ID NO: 389591 - DNA, 859 bp, Cannabis indica
atatttcgatatgtattttcgaaaatattatgaaaaatttatgcatgggtaactaaatgatttttccttaatagtaaaacaaattcactaatatatatttaatatatgattaaatcccccagcttacaaaatatatatacatatttatatgattaaatcatcactatcaaaaggttagttatccaagttatatcacagaattatatattgtaaattaaattaaatacattttctcagtccaaacaaaagctacatcaaataaaaaatcttatgagcacgtacgatttatattaaataaaaaacttaatttgaaattatatattataagtgtgttttccaatatccaaattaatcccaagcaaatttccataaaatttgaataaaaaatcgtgtaataactttgatgccattagaagttatatgattatatataaaaacttcatgattatgttattgtaatttaaagttataattaaaacgattgagtaataaaaaattaattaccaatacattaaataaaaaatatatatatatataatagagaattaatataagaattcttattaatcaaacaatgagagagttactttaccgactaatcttaatcttatctttggacgtgtccctgtaaattaatattttaaataactatgcgtgtaattttactttctgtactactgtttgattcatcaagtttgtgttatgatcaatcaacttacttacaatttcaaatttattgaattgattatataattaagttggtaattataaataacttaatttcaaaaataatagtatatttagtcattaatatatttatagggatatgattttgtcctgtgatgtactttcacggaat

SEQ ID NO: 389592 - DNA, 1434 bp, Cannabis indica
aaaatgataggcacaacaccaaattggatgatacccatagcagcttatctcaacattggagaacttccaaataataggaacaaagctaaaaaaaaagatgagaaaggctgcttggtatatcatagttaaaggtgtgatgtatagaagaggtttctccatgccattacttagatgtgtaactaaagaagaggctacacgactcttgtccgaggtacatgatggattctgtggcaaccaggcagcacaacagagtctatcaaagaaaatactaaggcaaggatatttctggccgaccgtgatggaagattcaaaggcctatgtaaataaatgtgataaatgccagagatttttaaagatcccccgggcaccgcccaatgagctaatagagatgcaaagtccttgactttttgtgatatgggggatagacttgattagatggttgcccaaaggtaagggcacagtacaatatgcagttgtcacatcagattatttcacaaagtggacagaagccaagcccttaacactgatcacatctaaaaaagtgttggaatttacggtaaaaaacatcatatgtcagtgcggacttctgcacaagattgtttcggacaatggcaaaaagtttgatagcagaatgtttatagatttctgtgctacacatgggatcataaaagtttctcttgagtggcaaacccccaaacaaatggtcaggccaaggaagtcaacaagacactcaaagacaccatgaaaaaatggctcgaagaagccaaaggaaattggccaaaggaactacttgaagtattgtggttgtaccgaaaaatagagaaaacagcaaccagacagacaccatttgctatggcttatggctatgaagcaatgctatctgtagagttagagcctctatcctgcaggagaataacctacaatcaagaagctaataatgccttcctagaaaaatcacttgaaaagattgaagacaaacgaacctcagcaaacctaaagctagtagctcatcagcaaaaggtggctcggtacttcaacaaggaggtcaggacaagaaaattctttgtgggagatatgttccttagaagagtgtttttaaacacaaaagatagcacgactagcatactcgaacctaactgggaaggaccatatcaagtagtggaagtcacaaaatctagagtatacaagctaggacggtatgacgaaaacatggagcttgttttggtaccaaggtattggaacggtgaatatttgagaaaagtgcataaggtctgatgacctcttataagtgcatgatgcttgaacatctactcttaagtaggtggctttctgagcaaatctcgctcaaaggtttagataaaatgactggtactcaggtcagatttgttgggttttatgccctaaataaaactctttacaatctgattagttatc

SEQ ID NO: 389593 - DNA, 888 bp, Cannabis indica
aaacaacagagaacaacaaaaacaatcagtagaacaccagtgaaaacttaacacagatactgcagtatagaaacttaataaaaaaaaacacaagtaaaaagtaaaaaataccacctggcaatatttttagtaaaaaaataacaaaagttagtataccatgtaaatttccccattttaaactgcagtttgatgcattgagcccatttgtccaagatgctagtatgcaagctcactttaacttcaaagttagtatgatattatttgttttgggtttagtcctctcaaatttattttcaaacacattttcaaatatctcatatatactaatagagttgataaattactttatattcatgacaattattctttattttttttagaatatgtgacttgggttgatacccgagcatgatgaacactacatgtattacaaatcatagttttacaccatgtgaatttaagtcttaagattttcattttttttaaccattattgcaacattttggtgcactaatatcaagcatatatatatatatatagggatatgattttgtcccgttattgtactttcacggattgtaatccgtgatgtacggcagctgtcagataagggagttatttgatttgacggctgagattgatctagggataattagggttaaaaagtagaaacgtactctgacactcatttaatgtaccctgagacccatctaatgtaccacggaatacattccgtaaaagtacatcacagacaaaattatattcctatatatatatactaggtgaatgtacgtgccgagccacgtattgctagtttcatttaagattttgaatgtattttatttttaaagattgcaaatttttatttgaaaaaattaaatatttata

SEQ ID NO: 389594 - DNA, 299 bp, Cannabis indica
ttgtccatgcctttacttgcatttaggggtatttgtagtgcgggttgtaacatttttttcaaactaaatcgcatatgtaatttttttaatttctcaaatcgcaaccgcaccgcgagatcttaaaacagcaaaacccacaccacgaaatgaaagtatatggtgctgtacgatttgagtggtttacactatgatcattttcgaacattacaataaaaatttaaaaatcaatttataaagttttaacaatacaaaaaaaaatcttattaaaattttaaaatcataacatatatactaatcat

SEQ ID NO: 389595 - DNA, 1373 bp, Cannabis indica
aattatttttttagaaaaaattagaaatcaactaaaaaaaatgttatgtttacataaacaacatatttagagaaaaaaaaatagaatcaaacttgttacccgtaaaatttaatttttacacaaaattgaatttttaattaatttaatttaatatctaaatgatattttttttttatgaaaattaaataattttttaaattacttaattaattttaaaattgattttttttaattattttaattattcaaaatgattttttaaagacctaaattaattttttaagatttactaaaaaaatgatgaatctatcttattttattttgagggttacgatttgatagttatcaaaatttagggagcaaagttgctaatttataaagatatgtcatcattaaaacgaaataatgagacataacctagtaaaatgactaaatttctataaatgtaaaagtttagagagatttttttaacaagacatatattttaaggggtaaaatcagtattgtcgaaaattcagagacaaaattactaatgatactttaattattatcgtggcttttaaacttttaattatagttagctagtgattgttgcaacactaaaggtgttttgttattttgtaatcaatttttttggtgaggagtgagtgaatggtttgaattgaaatgtccaaagtaaaagatcaaatctctaggataatcctatatgatccaagttgtggggatgatagtgtgagattttagtggtgcctataaaatggtcaagttaatataagatcacttggatttttgggaagtgttgtaggaaaccaaaaggtcccccacacttgattttatttaatttttaatgaatgaaaaaatcagaaatttgttgccgtatagatgcatgcgttcagtgatgtccaactaccaattaattgagagttgtgtgagacaaacaaacaacacttgttaccagcaaagcaccagcttttgtatgcattacatatatcctatgtattcattaaataacactggtatgaaatgaatatgcagaagagttggagactagtctcaacaaacaaataagatcctgtcaggtgtgctaaaacccaccatttcactaatttagagcatctctaatagtagcattctttgaagatgctctaaatctccacatcatccaaaatttaatattttattttatttttcttctacattatttttggtacctttacttttaaaaatattccaatagtataatatcttttaaaaatgttataattataatatcacatattattatatacatataagtttatttttattaaactattatatatattacacttttaattttttattgtataaaaaagacatagcatcaatgccat

SEQ ID NO: 389596 - DNA, 1584 bp, Cannabis indica
tactacattgttttatctagattcaatgatttagaatcgtgggctttatgcgtgctctagtttaagacaataacgagatctacattaatgaaatttgaaagaaattataatttataaacatttagtacttataaccgctaaaaataatattaaatttatattatttacaaacttaaattttgagtatgttatttttttttatattttatataaactacaagaacaattcaagaacttttacaaatggtaatgcttttaaacaataagctttttggctctaaattaaattaaaaaaagaaaaagaaaagtaaaagggtagaattaaacaatttccaacaacaagaacaaatcaactatatgataaaaatccaatatatatataccaacagtgttacagtagtactcatccaaattagacagttgttctttctttaattaaacaaactaatcacaataattaaaaaaatgagaagagctagcagctggattggaatgaaagactaacatttttaatgtaaaattttaaaaattggccttttattttagaaataaaataaaattcaaataaatttttaaatcgttttagcaatagatttttttttttatggaagattttgcggcctaatgttaaaagaaaaaaaaaatgggaagatctcttgggctaagggccaggggccataggcaatagccacaaccaccctatccaaccctgattgtatgttgtacttttagtggtgtaattgtttcattttcctgagttctaattgcacatttttctttgagctaactcaaacccggtgggtcgaggggcacaacaataatacagaataaagagattatggctcctgtgcaggtctaatcctgagcataagcaggttaggcctgtgcttagagcctacttagcccaggagctcaaaattttattttccttttagaaatatacaattgttttattaagtttaaaaaaatactatatttttttttttaaaataaggggctaaaaataatttttaaataattttgactatattataatattttttttttccttttcttatttatctaattaattaggaaaacccaaaaccagaattgtgacgatctcttaaaaaacaaaacaatatatgccttcttatcattataagtcccttaatcaaaattattaagaaaatataatatatatcatgtgtgtcacaatacaaacattaaacaaattaaaggccaccaaattaccaacaagagcaaatattatataatatatatagaattagtaagtaaataaaaaagaagattaatgggttattagtacgtacaaatttaattaattaggattcgtttgatacgccgtattataccgtattatattatataatattaaattaaattgtatgctatataatatttttatgtaaaattatatgtaatattgacttatatggacacataaatatataatattttagtataaaataaaaattaaacatagttttatataaaaatatgaaatatatatataatcaaatttaatataatacaatacaatacggcgtaccaagcgagctaatgaattaatatataatatgt

SEQ ID NO: 389597 - DNA, 1194 bp, Cannabis indica
aattttaaaaaataaaaattaatgttaataacatatagtaaaaacaataataataaatagtcatataactaatcaataactcaattcacaataaaaacccacattcttaatatcataaaatatggaagttataagaaaatgcaatatatatatatttttttatgaaaaggaaaaatgcaatattgataccatcaaataattcttattttccttttctcctcttgactgaagactcgaaaacatacaaactttgtatatattggctcacatacattcatttagtacttgaccacttattttctttaatttggggcatcaatatgaatcaatcaaaaataaatatataaattttattgaaattaattacgtgagcattcaaatatccatatacctcattaaagccaaaatctatccatgagagcatcaagggcaaaatgcacatacatcttatactatcaatgagagttattatccttcaatgtcttcaaagagagtcaccaccaagatccttgagcaaaaatttagagagcactttgtggagctaactccttttctatttaccagagaaactcatatatccccttttccacacataacacacatacatatacatgctattactcttataaccctaagaggttattaaccaatagggcttagggggtcttttatggtgtactataatttaatggaccaactatagtattaagggtgctctcatatgcctctaacacataattaatttgttaaccattccattatgattattagcaatattaggcatataattaataattgtgtattatggaattaaacttatgattgtattaatccattataataattctaacattctcccacttggacagtagaattaagccaccacaatgtctatcctctcatataacgtaaacaaataaaacatacataacatcatatctagagggtacatatatcatgtatgaattgaccttgtagatattcaattcaaagcaatcatcaacaatcaatccaaacatgcatgaggtacaataaaattgagattatgcgcattcatctcgttttgtacctgtcacttccttgaaatacaatatatatgtataagcatacatatgtaacaacaataaagaagtgacttcatcatcataatgcatgttcttaacaaaacacaagccataagcaatccgtacaaaa

SEQ ID NO: 389598 - DNA, 1834 bp, Cannabis indica
ggtggtgtatgggctgtaatcattatatagcatttattttttgaataattgttattattattattatttattatttattataatatcattttcttcgtcactaaataatatttgggtgatgttttcatgtgactcatcaatgacgctcttcccatttatttaacaaattaattatacttttttaaaaaaatatatatatattagttaattaattttttttcaaaaaaaaaaaaatcactaattagtggcatgtgaaaataaaagtggaagtaagtaagaaagattattgatcatgtgaaatgtgaatacactttgttaatttgagttttgctatgatactttatggaactttattgtaaagaaaatagttaaaagattccattttaagacatgatttcttttataccactttatgtgacatatgctttatataacatgttgtaaccttttttaattttttttaaaagttttgaactttattaagaaatctgcagccaccaatggcaacaaatcataggacaattattcattctataccgttgtagagataataaaatgttctagcaagtcaatgagcaactaaatttacagacagtttaacataacaaatagacacactcataagagaaccgagaagttcttgacaatcatgagtaataataccaaacgtagaaagcatttcaatagaactacaaatggcattattaacaacattgatgcagtcggtttctactttggcatgaacaatagggttattctttaaccaacttaaagtttcttttacaccctagccacctctgcacgcacaaaaccctcgacacagtaaactcgggtctcaactagcacaccgtcagtgtcacaaatgactaagaataaaccatactttcctgcactgttaaatattgcaacatccgtgttacttttgatcgtatttggcaaagatttcgaccaatactcaacctccctaacagatccaaaagaacttttgaggaacaaaatttctatcttcttgagcaatattttctaaactatctaatatttttttttttcatgttttagtattatagaattgaagaatatattaaaaatatctaatttgttcatctatactcatatattatggtgaaataaaaatttataattttatgtacattatttttagtgtctactatatatccatctttgatagagatgctacatctacaaactttatattagtttatatacatgttttgctataactattttttaaaaaataataataaatatttgtttattataattcataatttcttatataccacgattttactaattgtgtatattttttggtaacaattttattctcatatatgattatacacgaattaccaaaattattgaaaaaaaaaccctcaagtttgcctttttttttctcactaaaagtccccacataatagttgaatatttcacttaaaaaaaaaaggagtcaaagtctttcttttgtagtctaaattatatgatttagttcaaatgtgattgacatgttgtcaccattattaatatagtattgaattaggattaatttttatcttttttctatttttttttaaggagaagcttcttactttacaagttggtaagtagtaagtagtaactatataactttacaaaagttggaaaaaacaaatattaaaaaggatatgatacactcatatatacatatattattagaagcttctattgtatttggcatcttctattgagcatattaggtattggtattgttcagtattttttataagtggtattaattttatgattggttagcgatattttttaaaagttgtttttt

SEQ ID NO: 389599 - DNA, 1435 bp, Cannabis indica
cacaaaacaaatacagaaatgaatgaatataaatatataatgttaaaagagttgaaatttagaggaatgaaatcatacccagatgggcaaaacttataaaaccctgaaaggcttctactttatgtgaaagaagaagaagaagaagaagaagaagtgaatcaggtttgagtaagttaactatagctagttgttatctatataaattatcatctttttttaattcaaagattgctctcgacacaaaagaagaagaagaagaagaagaagaagaagaagaagaagaagaagaagcagaagaagaaattatatgaataaataaagtaaaaaccaaaatgtgagataattaagggataagacttaattgggagaaaaaggcatgtcttaccaaattggcaaaaaagaaaagatacccagatagccttttgagaagaaaagcctaaataggaatttgcaaaataaagacatacggaagaaacctattgtttttccttccgaccaccacaatacatatatgtatatatagtataattgtattatatatctgtatatataagagctgtgtgagtttattataaatgaattaaagaaaactgcaaagacaaattcacaaacacaccttgttcagctccaacgattcttagtatgctaaaaatggaaagatctaaacttgaagataatgaaaccagaattttaccaaataggaaaataataacccccaataaaagagcaataaacaaataagagaagtgagaaaccagcaggggaaagtatcatttggattattattattataattttccaaaagagaaacaataataataataaacaaaaatgaacaagagtatagaaagaaaacaaacaattaaattaggaaaaaagattggcaagttgattgacttggtttggatcacaaaaccacctttttttttctttctttctttctttctttctttgttgtgtattggtctcactcacacacacccctttcctctcttcccctctttctttagtaggataaatttctcgaaaccccaccctagaaaagtagcaactaaaatttcaattattataatttattactactgtggctgtgaccaagtatagtgataattaaaataaaaataataataataatatacagagaaacaaacctaataatttgttttgcttgttttggtaaaaaatccagaatctacaccaacaaaaagaagactcgatagaatttagaaaaaaatatatatatttttcttacataaaccaaaaaaaaaaacgtaaaaaagaaaaaggtattatatatgtgtggtgtataagaatatttttattttaagaaatatatttctattcaaggaaataaatttctatttaaagaaataaaataaataattgattttgtgataaatgaatattttatattcattgaatctggacaaaatca

SEQ ID NO: 389600 - DNA, 1228 bp, Cannabis indica
taagttactaactaataacctttagtacaaaaaaaaaaaaaaaaaaaaaaaaaaaaaaaaaaaaaaactttacctttgacaattgaaaattgtcaataaaaactcttaactaaaataataaatatattttgttttgataatgatattgaatttgataaggtccaacacaactctacagccaatatctagttttgttttgaaaatgatatttgaaattattaagattctgaatctaaaaactttttaactttaatgagattcactttcttaacaatctttataaataagaaattaataaaacaaaataaagatacttattagtaactagagcttgaacaatatttaaacttgaagaaacaaataacttttaaataaataaaccattatcttcacattaagcatataaatacatatactttgcaaatcttggaagtaacacattaagcaaaataaaattatattcaaatagagtaatgattcatgcacttaaaatataatacaataaattaatgtacttttttacacacaaaaatatccccaaaaattaaaaaaatatatcactttatatataaaaaataaagtaatactagatgcacacttaaattgtacacactaaaaatttaacacagtacacaatattttttttcgaaagaacatcatttttaattttatagttaaaattaattgcactgtaatttaagtgtgtctaaatcattattcataaaaatttggaatctcacccctcataaaatgtagataactttgtgaagaaaaaaaaattataatttagataaatataactggttgaaaattgacacattagcatatatttttagtgtgtaaattttaagctaattaaaatttttgtctcctgaattttaacatgtactaaatcatatcccttgaacttttaaggccgttaaagatggttagatttaaagacttttgtcaaatttcaataataaaagtttaacattaatcaaagtttgagaggtatgatttggtagatataaaagtctagagagcataatttagtatggacaatcatagaattagtaaacttgaataaaactagacaaaattctttaaatccaacaatctcaatagttcaatataaatttttaacagctaaaagagttcacggagtattattcagtacaggtcaaaattcatggaccacaaatcctaagggaaatttgattttctatacttagaaaataaaaaaaaa

SEQ ID NO: 389601 - DNA, 1425 bp, Cannabis indica
attgttgtaaactaaaaaagaaatcaatttaaaaaaaaaaaactacaaaaaattaattcagctagaatagttcattttttttttctaatatagtccaaaattattattttaacttcatatatatatatatgcagacacaaattaatctatataaatgtttttacataaaaaaataaacaaaatacaactttatataacttattatatgctaacatttaaaaatacatactttttttacttttatacaagctacaaaaatatctcctccaatgtgttttcttttaaatatgaataagaaaatattaaaataatattaattaatattccattaaataaattgagaaaacaaactaaaaatatacattaacaaattataataaatatatatgtcagagattcagaacgaaaaatatctaaccttatctgattactatgcaataggtgtaagagctgatgatctccaagtgtttagctagcagaaaaaaaaactattaaacatgaatatatatatggatcatttcctaatgggtattacccatgaatgattactaaacaaactaaacatatatataaatatcaatatatagtaaataaatattaaaacttacatagagtagacgaagctgcaattgtgtgctagtataaaaaccaatgttagcttgttcaaaagtgccaccgtctgcccgtcggagaggaagagatcgagagagagaaagagagaagaggcaagagagatttagaaggagaatagaggcaagagcaagaaggagaagaaaagaaatcaaaaagaaaagatgtggttagttttatatacatcaacttattatcggcacgagtccgctggtaataagtataacaatgataagtatctctggtaataagtccgctggtaataagtgtctctatcggtaataagtataacaatgataaattaccagcgagttccctcagtataagtctgccgctaataataaatcaaaaataaaagcgggatatttcccacacatttcacattttgaataattagcaaaaactttcactgctaatacttcgtttcacgctgctattaataaataaaaatgattttaaaataaaaaaaaattaaattttttgaccattaccggtagaaagtgtactctgctgatagtaacccctattattaggggcgaatctcctccgccggtattaagtctgcccctaatgataatttttgttgtcgtgtaagtagagaatgtgtgtaagcagggccggccttaaaaatatatgggcccaagacgaattaaattttggggccctcaaaaatatcgaaagaagagtgttatgggagctgaacacatgaccttgaatattattccatccacctcaaccaactaagctatgtatttgttatttacaatacattaaattttacttaaataaaagcct

SEQ ID NO: 389602 - DNA, 1707 bp, Cannabis indica
gggcggcggggtggcacatcattactacctacagcaaaagccagagacgaaggaatgtcagcaatgtggaccacaggaagagaatccagttgggctgtggaggtggaaatcatcagaggagcttgcagctggctggaggagggggaggatgagccgcgggaccctagactagatgactgttggggagaaactgagcacgataagtttccaccactggccactgataaaagagctacaaagtttgggccgggggtgtgagagattgatgttgtccaggaggagcaaaggaatggattggacctaagttggaggggcctgctccttgatccatgagcaaaggatttcccaagttttggttcgagcccagaaatagccttgcagcatcggaataatttgttgggttgttgtggaatgagaaatcttgttgcaggacttgtcctcgaggatgattgactggtatcaaatttgtggtggatgggttaagtggaggggcattggggagggacactatggatgatgagttaaggagaaaaggattggggaggagtccaaaagggccatggttttgacgggttgttcctcgcaggacattttcataggggaggggtggaggttgggtagattcgtcggaggctctcatgtattcaatacaggaggggtaagagtgtcctaggaggccacagtagtaacagtgatcaggtatgtcctcatacttcaattctaaccaggttggagaagctatgccaggaaacataattggtatgccacggggtaagggtttggtaacatcaaacatgatacgaactcgaaggtaagagccccaagttttaagcaaggagggctgatgaacttcaaggagagtgccaggaatttgacccaacaacttggcaagggagatagaccttcgtgagaaagggatattgtggacttggacccaaaaggggatttttttcattgtttctggggatagtgtggagtcggtatcaggaatttccagcaggataggacacttgtcgaagacccatggttggttgaggatggttctacgtctatctccttcacaatgaaaagcagcaagatacaggttgaaattgggtgatctttccttaacactcactgtgaagcgtcccttccagtgtttttccagaaaatttttgagggcattgtggttaaaatttttcgttgtgaagagagttgccaaggtgaaactggggtggggctggtggaagtccctcatttgggtcgacatgctcagcaagagaatggattgtgttttcagtatcagtgaggtggagggctgcagaaaaagatctagctaagtcttccattttcagcaataaaggaatgcacgaagaaagcacagatggataatgcacaaaaagggtaagttgccctaaatctagaatgggtttaaataggaaacaaaacttatagcaatcaagaacctagctaatagatctcccatatcaggagttgtactcgagtgatacaggaagaataagggacagacatttaatatcggatcaggcgggggattatccaaatccatccactgaccaggtaggtagaaatagcaattaaaactataacccctattagaactggaatagacagccatgattaagaaaaaagggatcattatgagaattgttcagagagggatcaaacctgtaagggaagcattaatggagtggcacgcctgctccg

SEQ ID NO: 389603 - DNA, 936 bp, Cannabis indica
aggtaatgttccttcaatgatgttgctgttaaagagtttcaagcgtttctctgaaattaacttcgggtcttcaagtaaacgctttcaagacttcagtgttctgttggggtatgaatgaagctgatgtttttcagatgccgtttaattacttggagtgcccatttgttccaaaataatatatctagtgctgagtgtgacttgctggttgaaaaaaatggtccatcacattccagtgtggggtctagacatctttcttatgctggtcgatccataatgctgtcttagttgctatccacttttattggactcaagtgatgattttaccaaagctcgtgttgccaaagattgatcaaatttgtagagttagagtggaaatgcttttgaacttcaaaaggatcgggttctataaattggaaagatgtttgtaagcctaaaaaacaatgagatttggggttccgtaatattgagaattggaacaaaggagccattgctaagcatgtgtaggtgttggcaactaagaagaacaatgtttaggttaagtggattcatgcattctatttaaaacattttttattggtggaactaccagcccactcaaaccaatagctggtattggaggtcgataattcaagtgcgtgaattggtgaagaattgttacacgaaggatcaatttgaagcgcttcatttctccatcaatcaagtttgtaaaaatcttttctcctacccctcttcatctatttggtatgcttctttgatttggtctaggtttagcgtctccaaacattgttttattacttggatagatgttggaatatattatactagaatttagatttactaacaagtatgtttattaacatcctaaatatgaatttctaaaataatagaatttaaacacatataaagtttaaataaccttacattgattgcatcgaa

SEQ ID NO: 389604 - DNA, 578 bp, Cannabis indica
catcaatattgataattttttcgctgcatttaagccccatacacccatagataacatacattagatgtcccatacactagcagaacctattcaccatttgcacactacaaataacactgatagcaacacaatagttccaccaacaacttctaccaagtccggtagaaacattactaaacctctataccttcaagattatatatgtgataaggttacaacttcaacaaactatcccatagctaactatgtgtcttatcatcatttttctaacatattcaggactgccatacttgcaactcatactttaactaaaccaaaattatatactgaagcctcaaaatatgctgtctagttaaaagccatggatgatgaaagagaggctttagaaagaaatcacacttggattgtcagagtacttcctcccaaccaacatatcattggtaacaaatggatatacaagatcaattacaatccagatggtttacttaataggctaaaatcttgactagttactaaaggatatacacaaaaaccaggtatagacttctttgacaaacttatgctcctatagctaagtt

SEQ ID NO: 389605 - DNA, 541 bp, Cannabis indica
actgctcctcctacctctggtttcggtaggagaagtagtgactcaacctctaatcaaaggagaaaagttccatttgcacctagtggctccagtcaaagtaagaggttttgagggaactaaggccgtggtaatagatagggtggttttgtgtgccgttacacttacccaaaatgccaagaagcatcatctgagtgattgtaagggccgatcatttttccaatgcggtgtaactggtccttacaagagagacatcccacaatttatgaaagaagagcagaaagcagagccacaactcactccaactagggtgtttagccttacccaagccgatgctgaagctaatcctgtagtagtgacaagtcaacttctagtcaacgagtcttatttactctatattatttgattctagagctacacattcttatgtggcggccagagtaattgatagattggataggccatgtgacagttatgaaataaggtttggaaccctactacctggcggaaaattagttatctccaaaaggtggattaggtctat

SEQ ID NO: 389606 - DNA, 616 bp, Cannabis indica
atttaacatgccgaaaacaggttcaaacagtctgttgcgtgtattaaattttttaaaattttacagaatgtcctaataaccataaaaaaaattatgtaagttctaaaatgcctagtaactaagttcgattaccaagtttcagtttaatcctattaaaaattcgattcacgagttcaagcatcaaaaaaataaagaaacaacaataagagacaatcaatttacaagcttctcctgttactgaaaacacattccagttaggtattatttgagttcactaaactaagaaatttcactaaataatttgtaaaagtacaacgaccaatttgtacaaatttgtcaaatcccttacagaagtatttatcccaatatactaaatcctttggcaaaacaagcaagatccctttgcttattgttcgttgaaatcctttcaacaaagctctagatctgaacacctttagatttgtaacaccaagccttagctgaaatcgattcagctttcactacttgatttcagcacttgctctgaaactttaactcacaagaatggagtttcttgtttttttttttaaaaaaaataagcaatatataaataggaaaattagacctcgcggtcatt

SEQ ID NO: 389607 - DNA, 809 bp, Cannabis indica
agagaggttaagaaccctaattcgagcagtggcatcttgaccagactgaaggagcaaagcaatgtcacgcctcatttgcttaaccacaacctgtctcttattcttcagcagcttaatcctagccacagccattttagcagctgttttactgttaccaaatcaaaataattaaagatcaaatttttatgatgaaaatgacgacaaaaatggaaacagagtaaaacccattaaagaaaaagttaccattttgaagaattaaagcctctcctgaaaagtgagagaccaaacttcatgatcttcttggtggcgacggtcattgctgagtaaagtatattcttcttctttacttaatagagagagtgaagaaagatatagtaacggttgctttgaatgaaatgagttgtaaagatgtgttttttgatcggacggttgaaattttgtgccgactaactttatggtttgtgatgaaatttgttgaataatgtaatgatggagtttgattgatcagaaagaagaaaaaaaatagccgttatgtgagatggtagagaaggatccgatgcagctgtcctattcagacacgcgtacacccttgggagttgggagaagagtcaaattgtagatttcaacattagttgggcctaatcatcatgcaaaaagcccactcctaaaagtccattgggcctgtaactgtcttattatagtgttcacttatttagaggaaattacattctataccctttttatattatcctcttttatttttaccctttttttttaaagttctatcatttttatcttttttttttaaa

SEQ ID NO: 389608 - DNA, 545 bp, Cannabis indica
ttcatttacaactcacaacacaatacaaaccccaaccaaattcttaatttttcttaagccatatgatttggcaagtttgttatcaagattttcaaagttatccttaatttgtgtttgtcggtcggacgactaatatagctgcacatggattaggaatacatgctattcaaatagataaacaacttagttaaacaccttatgatgctgcacatatatagtatggttatcaatgatattttgctaaattttgaaaattttgcaatgtttataatacaataaatatagtttagatagtatatttcacacacgcttaaagtaatagaggtatgtgccgctcaagatgtgactgctactagtggtagttgtagtatagattgggccgtcaattccacatgaagatgtggacaaaaatgttaagaaaaaaaataaaaacaaaaaattaataaagagtaacaataataaccaatgaagtttgtgatttttattttgataataaatattaaaagaaagcaaataaaatgtgtaattaatggtaaagagagaaa

SEQ ID NO: 389609 - DNA, 1408 bp, Cannabis indica
aatattgtgtttaagtctagattaatctttctcttttacttaatattctcactagtttgttgtttcttccatcaattaaaaccaagattgagtccattgcaacatgcttaagtcacaatcttatttgtgatcatatatttttattttttaattaacttttacatataatttttaataatatataaaaaaaaaaaaattggggactatggcacccccctaactccgttattactttgagcttgagtcttttaatagcactttagtaagtatgaatctttctctttacgaatatatttctctaattgccatgtgctgttttgaatcccatcattagcaaagacatcatataatggaaccttgcacacttgatcactcgagacacaactaaagtcacttcacatggaactaaaccaatcctatgtgacataatcaacttaactaaacttgttgtcatttattctttttcaactgacttcaatagaaacagaagactataaatacatttgatcgatctcattgatcagattagaagagcaagaagttttcttcaagttagtgagagaagctctaagattgtcagagagagagacaagaaagagaattagtcaattggttttctgcaagaaaagagagaaactaaattagattataatcgagagatcattgagattttcagtcaaagagtgtgacaagaaatctccatcattgttgtaactgtccaaatttggatcatagtggaaaagagatgttcttcctaaggagagctcataagaaatctgatcaaatgtatttattctataatgagcctataaataagtagttgtctccaaaaaatactagagttcttgtattctctcattcccatcaaagaaaatactttagagtgcaatctccaacaatgacttcagattagtgcttccattcattttattatcatcatcttcttttttaatttaacaaatgttctataaaatatgatttaagattttttatattaaagcacttttaaaatatggttagatttgttattatttacattttttgagggttttataaatcctaacaatcggaacataaacaacagttttcatagtgagaaaaaataacattttctatctctatcttttaaaacgattcccctcaaaactaaaaaatttattaatatcaacaataccaaaattctcatcggtagtcatgacagaaacacaacgtcttaaaattgttgaaatggttgctacagaaaaattaaatgaacgaatttatcgaataaactttgggaataccactgtatcagaactctactgcacgttttaacgtgagatcgtgaaaacaatgctaaaagtcgagacgagaatacatctatgtttaccaattaattaaacatgtttaaaaaaaatattttaattaa

SEQ ID NO: 389610 - DNA, 673 bp, Cannabis indica
aataaaataatacaaataatatagatgtaatcatgtaaataaaaaattagtacatttattgtggtatcaaatattacataatagtgaatattgtattaaatttggcacaaaatttactatttactaaatttatattactttttgacacattattagagtacaatttttattaaatgagctatattttaactttttaccacttattcacatcttcacgataaatgctttaagctaatataaagtagcagtagtcgagtgctccactccttagcgccattgtgacgagattttgattctgtaattgaccaaggagagcatcagttcacaacaatcacatgcattcttattttcctacttttaaatcctttccaagtctagcaaaagatatagatataaggcattgattatatggtgggcatgcctttggctgtgataggagccttttacttttacatgactaaaaattataatttacgtcacgtttggttgaaaataatgaagttaaatataattaaattgaaaggaaataatcttcgttacattgttttatttggttgtatattaaaatattgaaatattatttcagtgaaatgatttttttactattttagtggaatgactatttcaattttaaaatggaaggaaagaccattctaatacatgataagaaaaa

SEQ ID NO: 389611 - DNA, 693 bp, Cannabis indica
ctttattatttattttatgataaaattaaaatataataaaaggttattgtaaaaattatatctcgataaatattattaactaattttatattataaagacataatttaatagtataaaaaatttagctaataaatataaaatactaattattaatattatatagtgataacttcaactttaggactttactaagtgtcttactttcctatattttttttattcttttttaacaaattactttcctatttatttttggcttaagtaatttatgtgtattgcaggctaataaaacctttcagtgtaagcacctgtaaatattacaataaaaataaaatattaaattataagtttaatattggctccatgtggcatcttctagagatggttagtgtcaacttcttgttttttgtttttttttttttttttgctaaaatgtgtcaacttctgtttgaaaattaaaattcatccatctctatgagctttcacattactccccttttaaggtacactatcaaactgtcaaaatttgaaattagaaaattcaatagagtaggatgaaaaatatacaaacataactcagtatatactagtaatattgtaattataatttatacacaaacatataatacatatttacataataaattatttttaataagtgagacatatcttaaataaaatatttaaaaatt

SEQ ID NO: 389612 - DNA, 1014 bp, Cannabis indica
tatatatatatatatattatggtcagagtcggttcaaatattttgagggcgttgtttaaaagtttaaaattagatcattaattaaaaaaaaaattatttatgtacattagaccataattttattactagcttttatttttaagatacaattataattttttttatttatgtatgtataatagaaagaaaataaaattggttaaaaaaaatgaaaaaaattgaaccttaaaaaatgtaaacctttatacaatggcctaaactatctaatatttgggccgcgaccctggttatggtattggtggcggagtttacatgattgtgtttgagtcattgtattcgggtttttggtagatgccttcaatgataatttctccatttcttaaaaaaaaatacaaaaattgggtcttaaaaaataagagtcttgtgcaataattcaagctacttaatgtttgagccgattctgattatagtttggtgaacgaatttactaaatttgtattcgaatttttgacaaatgccttcaatgagaatttctccatttctaaaaaaaataataatgtatatgtatgtactatatagactaacttttcatttatcttatccaatacatatttaatgtaatccaataatggctaggtataaataattaataattacctatatatatatccttttaagataagctttttgtgagtttataagataagcagccagagagcatgtgactcagcatgattccaacatggttaattattaattctagtgtaataataattaagattaccttaccaaaaaaatattaagattacacattttttaaatttttgtttgaccactaatttagccgatcctctaaattttaaaatttaattttacatatatatacaacaatattaattgtttttagggaaatttacacccactactgatttttcccattttattacatttatactgtgccacgctggaaacaacatttatactgtttttttttttttggcagtttactgcctt

SEQ ID NO: 389613 - DNA, 905 bp, Cannabis indica
aagatttctagtttttgaaacttaatttttaaaaataattagttgttattattctactaatatttattagttgtgtaaaagcctaaagaatgaaatgtcaaaatcttataggcccaaaaaaggcccaaaatgcttcaagcagaagaacaggaagagcttgatgcagtcacctgtcggtgaggtcagtcatgaatggagactaactaccctctcatcttcttcctcctacagctgctgctgcaatagttttcaagggacctaatttctacacagtcgaagaatcattctttgattcggcctcttctcattcatcagtagctacgatcagccagaaaaggtccttccttccatggggtatctacaggaagctcgtgaaaatcacgtcaagaagaaagtagaagaaggtaacaaaaacccttaaacccctaaggttttttaatttttaaatatctttatatatagaaaaatatttgagtttgtatatattatatgagtgcagccttgaggagcaaaatgaaacagaaggcactgaaagagtgtgacgattacgctttgaaatacgcggaatgtgctacgggaagaacattatccgttgtttggcaatgtcgtaaagaggccaaggaattgaacgcttgccttcaccaatagtaagccctttttcttggattccatggaactcttgtttgttttttgtttaaaatgcttgggttatatggattaccataaattagtgcttgcaagtaggacaacattgctattttgttaaaatgataattgatttgttagtgttcgtaggagaattgcacattggagtgaatgactccattagtactaattgttttaatgatcttgtttataggagacttgaaaatgggttagcttcaaggctaattaagatttttttt

SEQ ID NO: 389614 - DNA, 1036 bp, Cannabis indica
ctctctctctctctcagtttgtatatagtatttacatatgttattatttttatatatattgtaattaatatatagtttgatgggttattaatgaagtcaaccatattttctctatatataaaaaaatgaaatctatatgacagttctaagttcactatgagttagaaaacaatataatatcgtgtctgtagtattctgcattatttacgagtttagtttagtattaatatgtctatttagcagggctgtcgttttgtccactctctttcttgcgaaataagtaaacaactttaagagaataagtctaatttattactcttgactcatcatcgagtctagcttgtttaaataaaattatatgtatatactagtttgatgactccgactccgagtgcgatgataggaatgcatcaagtacttaggaaccaatgaaaagggaagactagtactaagatttcataaacttgagctaacaatgatatcattaattgtcatatcttaactgtcatcaaaattattcttttgcatctattctgctaaagagaaaaggactttataggtaataaagcttaaagttgaccccattcaggcgttcctttacttctccatgtaaatccgtacaaagatattataattaaggctatttttaccctgaactttaatatgtatcaaatcatgtcctctgaacttttaaagtcgataaaaataccccctgaactattgaaattgttggatttaaggacttttgtctaattttagttaaaaaaatctaacatggatgaaagttcaggggacatgatttagtatatgtcaaagttcgaggggcatgatttggtagatatcaaagtctagaagcatggtttagtacataaacaatcacttgaatactaaattcactactacaaaaacccactttagaggcggttttttagccctttcagtgtcggttttggcgaaattcgctactgacgctaatcagagcaacgctaaatggttatgaacaaccgacgccatatatacccctatggcgtcggtt

SEQ ID NO: 389615 - DNA, 1372 bp, Cannabis indica
gttgttgaagccttttctgctcagctacaggctgttattcctctggaagctgaggcttgggcgcttctccatgctgtgcatcgttgtctaagccaaggatggcacaatgttacttttgcagtggactgccaacttctggtgtggggcattaaggctcgaaaaactccgaactggagggttgcaggggtgttcgcacggctcttggatgctctggattgtatcccgtcagcctctgtagtttggattcctcgttccgggaatgaaaaagctcataagcttgctaagtggtcctttaattcttatcagtttggttttttcaatgctgaggagttggcacctcttgttgccatctaaaacctttttgtgtgttttggtttgtttgccttgtttaatgaagtgatcttttccagcaaaaaaaatatatatatatatttctcttagtctcatgagaagacaataattggagcatgtgatggttgagatatgaggatatgacaataattttacataattattcactcattttattagatagttcaggcatgttttaggcatttcgtacttggaagaattgttaacgtaattcttgtgagatttactaagtctaattaaggttagtaatgtgggaacattggcagaatgaatttagccaacaaaaaggaaaagtctatgtttaagtttatgctcttagagttaatgatatataaggggtagaggccagggagttgttgattatatagttcttatttttacactcttgcaatcatgtattgtttatgagtttggtaggaaacatgtcagtattacttgttgttggatggtatgatgtgactattaaaataaattagttctctaaatatcattctaatatagattgtgcatgcaaaaatattactctttttaactctcaatggtaattttattttatattgagccaacgaatttgcagtaatacaaaatcccatcctaaagacatgtttaggtgagaagagaaacttagagacatgttataaaaatttatttgcatttaatggtggctccgattacacttttctcaaaagtcttatgggaaagttataaaatttgcttagtaatgcaccaatgtcaccttggtatcttaaaatatgctaagaataagtaacgaagttcaaagtgtttaggttgatgttagatgtcaacttggacactgatacgttaacatatgtgctagtatcagactagctcctaatgtgttggtcgtatctcactcgatataatttaaattgatatgaatacaattgcattcgaaagatcttttaatgagtgtctcacgtgtatattacttgagaagaagatgagatgaaaagtgagcttgaatcaatacagaggctca

SEQ ID NO: 389616 - DNA, 1196 bp, Cannabis indica
ttcgattcgatccaatggatgtattggattggatcggttccaaccattggatgcattgaatggttttttattggattggattggatccatccaatctattttagctaccatttaagttaatttccttaaaaaaatacatataaaaaaatataatttaaaactttataatccaacatacataataaatattagtttaatccaacctaattctcatgatctcatgataataaaaccgctaaaaagtaaaatttattatacgcattgacaattttattagcattttaaaaaataaaaattaatattttagatttaaggttttttttctttaatatatgtgttaaatgaatattgaatcaattaatatatatatacttttaaataaaatatattaaatatataaaattataaatgtatttaaaaatatataaatataattggatgaccattagatgataattggatcggtttgttcggttatccattggatcggatgtcctatccaacaaccaatctgattggattttcaaaatttacatctaatcctatccaattatgattggatatctgattctactatatcagttggaattaaatcggtcggttgtaattgaattgaatgactttctgcacacccctaggtgcgagtatggggtcaaagtcaaagtctggatctagtgtacaaaacacctcaaaataaagtaaatattgatgaaataaagtaataaatataatatgattaaaaaatatatttaaataaaaatattctacatttctaattaaaaaataaaaactgtttaaacgcattcgtttaaatttccaactttatattttgacaatataatttgttaagattttgttgcaattagataccaatagttaaatttacataataaatgttgatatatctgtgggaaatttataattaaagtatagaattaaatcaactaaaacttaaacaacaaataattagtaatgttaagatcaaaaattcacacacgataatcaaagattaaagcagggatgaatagagtattgaaatcagaaacgataaaagaataaaataatacaatcaacactaagatatatactgcagggttcaagtcttatagattgatataatctatgactctactccagttctagaataccaccgaaatcttctttattgatggaacaaaaacatggtgttgggattt

SEQ ID NO: 389617 - DNA, 792 bp, Cannabis indica
taagagatatgattataaccacagattttgacgggtgttacatgcctctgacacgtactccccaactagtatatatatatgatacaaactgacacaacatagcataccggagacttgtttgtgtggatcacacgtgtttaaaaaactttaaatgtatttttggcatgataaattatttgaattttttaaaaacatttacaagaataatattgttagtataaaaaatactgtcataaaaaaatattgcaatatgtatttgggcagagagattaacttttcttttttaattaaagcacataaattaactaaacatatataaactaaaatattataataaaagattgagggcttcttgtgaaaaaatatgaaattatataaattgtactgaaccagcatgaaggggtactgtacattggatctcattcaatgtattttgacctaaccgatctaatccaattatttattgaatattgaatttggtcatccgatccaatccaatcgaattgagtcatccgatccaatccgatctaatgaatgtattggattggatcggttctaaccattggatatattaactggtttttttattggattagattggatcaacccaatcaattttagctactatttaagttaatttcattaaaaaaatgtataaataaaaaacataatttaaagcataataatccaacatacaggagagacattagttaaatccaacctattctcatgatcttatataaaaactgtcaaaaaaataaaactaattcaatacgcattgacaattttatt

SEQ ID NO: 389618 - DNA, 647 bp, Cannabis indica
aaaatgctattatattaattcaaagagtcataatacaataggtattagaggaaaagacccaccgaaagagcataatttgctagtaaatgagtaacagtattcacaaatctataaacatgaaatatttgcactctaagaaaattagacactaaaagaaaaattcgttaacaaataataaaagtcaaaaacaagagcttgagaatgctgtaatcctttaaccactaagagagaattggtttcaatatagtaaattggtaaataaagatctttaagtcattgcgaactatacattaagttattacttccatcactttcggtcaaaaacaatcttggaaaggctttgacattacagcgatggtatcacctttacaattatgtaatatcgcaccaaaaccagaagtatgagtcatattgttaacggttgcatctgtattcaatttcagtctaacggaagggggttcatccaatgagcatttgtattggtaaaactcaaagaagaagaagacagagcattagcaggcagcttggaaattcgagcagcttgaaattcttcaagataagtcacagcaaagttgagcaatatgtcataggattttggctttgttccatgcctttctttgtttctctcactccaaatactccaaagg

SEQ ID NO: 389619 - DNA, 1059 bp, Cannabis indica
gtaataaaaatgtcgttctcgagtttataaagaacaaggtcgtttctctcttgtccaggaaaatggattctcctcaaaactgtcattcagtctctacctatatatgctatgagtgtatttcttcttccagttggtacttgtaatgaacttgaaaagttaatggtgagcttttggtggaagtctaacacaagcaaatgtcgtagtataatttggatgtcatgggatagtttagccactcccaaggaagagggtggtatgggctttaaacacctccatgcatgactttaatcttgccatgcttgctaaataagattggcgtttgttgtaaactcgattcccttgtggctagagtttatatagctaaatactatcccagttcaaattttcttccagctgatctcggcaacaatctgagttttgtgtggcgtagcatctggggtgctcaagatgtggtctgtttaggtgctacacgtgttattgcaatggtaccactaccaatattattgccctacaaaaaacagctatatttagtgacaactttttagtcacaacataaatttattgtggctaaatgtaactttcggtcacaacaaaaatgtacttgtgactaaaacatagtatttagatacacgttgtcacttatttacttttagtcacaacaagtgttctgactaaaagcacatttagtcacaacaaattatgatttttgcgactaatacctttagtcatggaccttttagtcacaatataggaatgataatttataattaggcacaacttttttagttttagtcacacgttttgttgtgactaaaagtaagattttttgttgtgtgggtctgtagggttttgtgccctaaataaaattttatttcaatgtaatcttgaatatttatttatcaataaagaaataaatttatttcattacttgtttaatgtgttatttggttcatgtgatcacttgtttgatttataaattcatccaaatccttatcacatcgatattcttgtttattgtgatgtcaacacagtggaaagtaatcaagattatgtgattaa

SEQ ID NO: 389620 - DNA, 1359 bp, Cannabis indica
ggtccattatcggtatgtacttcacttctcagctttacactaactacgctaaattaatgatactttaccgcaaaccatttggtagagtggtagggatgcctagaaaatatatcccctgtcaagaatttgaatccactcaagtccaacttcacaataagtggttacaagctcaacgcaccagtgtgtgtgaagctcacaatgcaacatttgagcctttgtagggatccaactcaagtccatatagttggttgttgatactaatgatttacttatataagagtaacgatatgtgcactcaaattatgcatcaaaatattagatacaatggcgtgacaatttctttcaaccaatcataatcgttttagataatacagtgttacgtcacagtgtgtaatgttttggtgcgtattttggatccatcttaagtagcgagtgatcttgcgaaaaggaaagagaaaagaaaagcatattaagcttcttttcttaatattaattacaagtagcttttgttgtactgcagtttttgacaaagtttaggataccacatcccggaagagttggtggaagattttttatcgacatagctatgccattgatgttagattgggttttaggtggtaacaggtaaactttctcttctctacatatacatgtatctatattggtacttttattcaaattagcaatgtttcctatttattttaacattatttttacttgttatttttcagctcaaaacttgaaggaagaccacaaagttgcaggctctcagataaagtaaactatcttatctatctatgtattttcagaccctcaaaaaacactaattataattgtcatattaacataagatattgttaaaaacaaatttctatgtaggcaaatgatcagcttcgtaaatggtttgaagatgatgatgcattagaacgggccatgaaaggagagtatgtgtctttgatcattactcttcatttttattttattatttctttctatttttaatatatttttgtactttttttatctaatttttgtaggtggtttcttctgccctctggaaacaacagtgcaacatcacaacccatttgtttaaacagagatgagaacaaaaccttcataattgggtacaaaacaaaaatcatacccttctttaatctctaattaacaagaaattaaatgtaacacttaatatatttgatttaatttcattaattagactaatataatgatgatcataatccaatttcttttcagaaaaacaccaagtgatgacgtttcagcaacatccattactctttcttttgaccaggtaataataatatggaattttttttatttttatatttcaaaacaattttt

SEQ ID NO: 389621 - DNA, 1417 bp, Cannabis indica
agagaagaaaatgagaggctaataattgaaacactactgtttactcacatataaaaccactttgcatttttattggatatctacatatatatcagttaacaacattaacttatattaatatatatttatatacatttatagtgcatatatatataccatccatattaagatacgtgtttgtatgcaaaaaaatttacctgttactttcaccgagaagacttttcttagagtcatttgagtgggaaaccacgtaagtattataatatagatctacttaattacttgtttgataattttgttaataaatataacactaaccaaatatggcatccttctcacacttcacgactgcatgtaaacaacgtcatattttgtctttgtcttttgcccatacttatataatgccttgttctgtttgccaatgctgcatatcactaattataggattacggaaattaagttcaatactttaactaaggtatataatggtctaacttctaagtatttcaaattttagcagtatataagtactcaatatatttgtagggatatgattttgtcctgttattgtacttttacggaatattaatgtatttcgtaatgtacgacagccgttggatgagggagttatttgatctaagagtataattagggttaaaaagtggtaacgtatcctgagacccacctaatgtaccctaagacctatctaatataacacggaatacattcgtgaaagtacatcacgggacaaaatcgtatccctatatttgtaatactgtaatattcttttaattttgtcattttttagtataagactctattttaaatttattaaaataagatttcaaagtaattgatactacatccaaattcaatgatctagaatttaagtcttatataagtattctatttaaggcaataatagagtgtaatgataaaactataagaaaattactgttttacaaacattgaatatttatgtcgttaattttttaaaaaaaattataccacttacaaattcaaaattttcattattatttatatcgatatttattcttttataaaataaaacattatttaatcatttatttttgtggtgcatgtatgctactacacccaataactatatatgaaacgagtcagccatgactaacaagatatgatcattaatataataatgtatggctataatataatctattaaaataaaaattttaagggctaaatcctctcaattatcgttttacttatacttaatttttataaaatttaaattttggtggtaaaatattctaaattactgaatcattagcaaatttaaggtgtcattaggctaattaccaccatgaattacttatgtgtatacatgacacttttatattaatacacctaatattattattttaaattatataaa

SEQ ID NO: 389622 - DNA, 1246 bp, Cannabis indica
gtgactagcaatccatttagattatccgtacattaatatttgctgtgcttttttttttttaaataaaatatgcatatactttattagatattactcagaattacatccataaatatagtagggacagtagattccttgtacgtacaatcaaataaaaaaaacggaagctctaactacaattagcagatcatttcgggcctgccataaagaccaacaaagcataattgcctaactgaattcgtcttcgctccatctaacagccgcatccctaaaccagcttcgaaaagactgctcctcaacagcaccagttgaacagcatcaaaaatatttattatatgtatataaatgtttatttaacattttgtaacaaaatttattgaaacaaagttaactttaacaaaaataaatggttaacaatttcatcctctatgaaaaaatatacaattactcgcagtgcacccattcatatatgaaaaattatttgagaatagtacccatctatttataaaattaatatgatatacataaaaattatataaaattattgacttgcttatactactatggttcgtgattctcggttagtaaaactatgtttattaaaatataaacatatttttattgtcaaataaaataaagaaaaatcattacaagaaaagagacttttaccacagtattacaatatgggcctttagagtgtttcttcaacccattttataaaaagagaagctaaagggtgtaaaaaatatactcgctggtttgaaattgacatttagagacggttttttggtaaaaaccgtagatatagaatttaattatacctataccgtcggttgggagttgggtaaaattaagggtttcttattaaccctatggcgccggttatttggtattaaccgacgccataggtgtactcgttatacgacatgtgtgcacctatggcgtcgattaataccaaataaccgacgtatagggttatataaaagaacccacagcttcgtcttcctcatttcaccacattgttcaggacgaaaaactagcagccatagtagcccccatacccacggaaaaaccttcaccaaccacccataaaaacccctcattctccctcatttcttcaccattttaccctatttttgttttaaaatcttctattttcaatatctaaacttatactgtaagaaaagtttagcttttttcccctctatcactataaccgaacctattataaaaaaaaaggtggtgg

SEQ ID NO: 389623 - DNA, 794 bp, Cannabis indica
cattgcatcatcaaaatccaactattctacaaaacaaattttgacatgatttaagtttaactagtctattctccaacattcaagtggttgacaccaattaattagagaaacccatttaaaataaacaaatacatataaactttagccaaaaaaaaaaaaaattgtaaaagaagtaacattgataccttcaaacccagaagagtagggtaagctttaacagatgcagagtcacgaagagcaaaagtggctttgtgtatggcaatcttggatagtggctgctccccaaaaccattaccgtgagcccaaaccgatccaaagttggccaaaactaacaagtagagtaaaattgaaattctacacattccctccattcccaaaaattcaaaatatggaattgaactagcaatttttcagttgagtattagcagagtccatacaaagttaaatttgaatgaaaccaaattggaaatcgtgagtgagatcgagttttgagttttgactggtagctgagtagaaattaattattgtttgatttggtttacgtgttaattcaaatcagccgcatatgccttttatagattcctcggctagaatagaaataaataagaacccggccaattaggagttttgttttggttttggctaattagtaatttttctctctaaatttaaagaggtagtaaattatgcccctgaacttttttggccgttaaaaattcctctcgaattattgatattgttaaatttaagaacttttctctaatttcattcaattttattgtttcagtgattgt

SEQ ID NO: 389624 - DNA, 781 bp, Cannabis indica
aacctttaccggcacataattatgccagcaaaagaagtcaatgatacttggtcgataaaagagcgtttgtcagcgcaaaggtgaatttcgtcagcaaaactagcttgtgccggcacttattagcgccaggacaacttctatgtcgggataaatgaatacccttatctgccctaagccatcttaaaaaactgttactgacgcatttatgcgccaccaaaaagtccgtgccttttccccacattggcgcaaaatgttttgccgacgcaatacgtgcgttggcaaacctttcacgtcaatgtagggaaaagacacaatatgcgctggtaaaataattttttaattaataaattaattataaatataaaattatattttataaaagcataattaaaaaaacaaacaatatttagattgataattggaatttttttttatcgaactaatatacaaaaatgttagttttatactaaaattagtaagtaataaaaagttgtaaaactaatagtaaataaataaaatattaaaggatgtttggaaaaaaaacgtaaagttctaactgtgatataaaatatgtaatattctaaagacgagtaatatcatcatcgttgttcttctgagtcttgggaggatgcaatgacgatccagcaccaggagcagtgggaaatggtgaaagatccatcgaaggcaagttgaaacccagcacatgttgggttttctgccctaaataaaacacatttcaatataatcaaatttactaataaagatcagaaatcacatttta

SEQ ID NO: 389625 - DNA, 1038 bp, Cannabis indica
attcaaatcaatgtagaagatgacatcgatcaaaaaataagcagccattaattagactacgaaaagtaaataaataaactggaaaaggctaaattgataatcaaagtaggtagcttacagaaaactggctctgaatttgttcaaaatccgaaaggaactgctcatttctaggagctagctctcgattaagcgcgactacacgcttttgtgtcttgttactgtacaagatcatagattcattcaaatgccactaaacaaagacttaataaagcaaagtaaaaacaaaacaagaaagcaaaaataaaccccaaattcaaagtaagcaaaataaaccccaaaattcagagtaagaatttcgtatccaactcaaaatcacaacttatatcattctagcagtaaggttcaaactaaacacttcttttttatcactgattaaagtttataacttttcatatataagctaagctaaagctaacaaaggaacactgttcatacaatatgatttggaccaaaactcaaaactaaaaagaaagcaattaacagcatgaatgaacttacggaggttctcgaaattgatcatcaggtttttggcgactacttttctgcaacaaatacattaaacaaagcataattacaccaaattctgagagaaaaatatacaaaaaggacaaagcaagagaaagggaaattactcctaaatataggtcaaagagagtgataatggtggctcggcctgggtggaactggtaagcccttgaagctgaggaaggtctctggttttgatccattttttggagttcggagcatagctatggtgttacactgccctgggtttaggcgaatttggccgaccgagtcgagccacaatatatttgatttattagttttttttagttgaaattagttattattatttatttacatcactaataattttttttttttattgctaattaagatttttgtccaatcaattttaacatatattcaattatacctcgtaaatttttaaggtcgttaaaaatacccatgaactat

SEQ ID NO: 389626 - DNA, 835 bp, Cannabis indica
aaaaaaaaaaaaaaaactaggtaccctataatataaatatatattaatctttcttcatgaggatttttagagaattgagttcatgataggacgagctttgcacatagcttctaaaggtatagctttcgaaacagtaactccttttccttcagtcaaatctattttttcttcactcactcttttccattcaaaacactgaatcaaacaccccaaagtcaaaccaagtacacggtttgccatgccattgccagggcatgatcttcttcctaacccaaatggcataagcaagttaatgttgttaacaccttcgctattctcaaatctctctggtttaaaactctcgggatcttcccatagtttcgggtctctatgtatagcccaagcgttaaccattacaattgtatcgcgtggaatgtcatatccctcaacaatacaatcttcggaggaataatgaggtaagagcattggagccgctgggaacaatcgtaacgtctcatggataatattttggaggtatggtagtttggaaagatcttgttcttccatcaatttatgttcaccaatttgttcatcaatttcagctttagctttttccaaaacatgggggttgttgagtaaattagtcaatgcccattctaatgtcgctgatgatgtgccagtagcggctaataatagtacctgaatagaaaaagaatagtatgttagactataactaattaatatgcatcaaagttcatatatatttgagtaatgattaaaatataaaatctaaatattacacgtacaaagattaaagatgtatttttttttatttaagcgtttatatattacatca

SEQ ID NO: 389627 - DNA, 880 bp, Cannabis indica
gagagagagagagaagtatttagacggtttagtatgaaattaaaactgaaaaagtaagtgtagagggagaagcaactatcaaatcgtaatgattacatgcaaaaccataaaaaaaaaatagttatgtaaaaaaactgatacaaaaatttgaaaacataaaataactaaaataacctacagaaactacaaacaataaaatatgagctctttaaacatacatttcatatttatgggctttaaaagcccataaaacatgcccaaagtttaaaataagcataaaaagtattcaaactaaactatgtcatatttatcataaaacattttaaaaaaaccataacgtaattttcactattataagaagtgggttgggcttattgggcttgagtccatcatcctttttcaatattaacatacatgacattttgtttagcaaaaaaaaaaacatacatgacattttaacatcggagggagggagaaatgcaaacaacttgtccaagtgaaatctttggtgaattatacttccatgattaatctgccaatgttgctaaaactatataaacacctggtacggacacgtggtaatgatcaaaaggttgagaggggatttggtgtgaaatggacggaggattggggattaggaatgaggaaaggggacatagactgagtccgcttgtggcggatctgatctgatcaaagtgagtgcagttgtgaatacacagtgtggtggcacatttggtggaaaaaggctgacacggacgttgaccttattgtacggagtgtctacattatagtcagagacattaatcattttctttctcattcttatgataatgtttgtcacaaattttttaaaaaaatataataatatatacttttcctg

SEQ ID NO: 389628 - DNA, 204 bp, Cannabis indica
aaaaaaatataattattattttattataattatttacgagacctacattcatatatatatatatatataataaaactatatatattcttaataatgaattatatttgaataagtaaacattaactttttaattttttcatccataaaaaattgtgcctgtattaatatttttgcatatacttctacgtatgattatctatatat

SEQ ID NO: 389629 - DNA, 805 bp, Cannabis indica
agaagaagaagaagaagagagtaccgcttgttgaatggcagtaaggtaaatagcaaaagaacactcatcttgaccagggcaaacggctgacatggtgacatctgtaatggatgtaaacatagccatatttgcaaagaagtagaggaatatcgtcacatacagatgacccaaatctcttattttcttcttcttctccataataatattaaccaccatatcactgattttcctttctttctttccttaatttcttaattaattttcacttatatatatatataattatatcacacccccactacatacactactactactcctcaataactaatatgtataaccaccactactttatatatgaaaattactacccaatgcccaacactattaaattattattattattatgtcttcaactgcagatatatatatccataagtggaattccctgtaatcttttaaatatatatacatattaatatatgtatatatggaggtccccccaatacctctttcgctttaatttttcttttttatttatttttttttttgacttatatttctttttgaaaaaatgtgtagctttagctttaattaatgtcctcatgtctttgcattacgacaatgagttgaaatgactgaccactgttaaaaaaaaaaataatatttgctgtgaaacatgtttatgttttaattttttatatttatttttttttggcaaaactttttatatatatttattaattaaatattatcgttaaatattaattagattaatattgtattagttttaaaattttacttt

SEQ ID NO: 389630 - DNA, 1215 bp, Cannabis indica
agcacacacgtggtgtccctatgagacaaggcattacaaaattactgttgaccattaatgattttctagctttcgaaaatctttttggatgcagtgtgaaagtgtacaaagcatgtcccatttgtgagaagaaaatatgttctatgtatttaaaacactcaaagaaaatgtgttatatgggacactgaaggttttcgccaaatgaacatgtgtttcggacttgggaaaaacatttaagggtaacgatgagtggagtgcttggttagattatgatggtgatgatggtccatccatgctaggaggatctagtgttgatcctgaacaaccatccatggaagaagaatgtagtgttgatcctgaataacaaacacagaaaaatactcatgggagaagcaaacatagcgatataataaaaatagttagcgagggaaaaaagttggaggttgagtacaacaactatggacaaagaaaggatagggaacgacgacaaaagttacccaaattggaacatgggtgcgaattaatgttccaatttgagacatatcgtggcttaaagtgagtcaggacattaaaaactaattatgggatgacataaaggtaaagttaattgattgtaatttatacttataactattattctcaatttatcaagtcgtgttcaatatactggagacagacaagaaattaatcatttcagaaggtggagagaggtggaaagattagaaaaatatccttatagatggtatttttaaatttaaagatgtggctccccaacttcttgagacattaaaactgtatgaaaacataattgatttgcaataatggagagagtttgtcgctataagattgagtccaaactttgaggtgaggtggaaaaaggcctaatagagaagggcaaaaaatatttacaaccatcacactagacgaggtggtgtaaggatggtacaagaacaaatagagaaagaggcaagccaccaaattattgaatttgatatatctgaaatatataaaagacttcacatgaacacaaaaagaaaggtggagggcccagctgtggaaatcgttaaacagattaaaagtttaaattataatttcatttgaatttttatgttttataatttatttctaactctatttattatgtttgtaagaagattttcgtaagcaagtgggagaaggagttgtgcaagtggaaggtaagagggatgtgttaag

SEQ ID NO: 389631 - DNA, 1572 bp, Cannabis indica
gtaataatgaagaaaataaaaaaattaaattacgtcattttgtagttaaatttaacatattttatcactctatattatttatgagtctctttgggttgagattaaaatttggtagagtttttctaagccatcaattgtgttgtttcttttacaatattttcactgctatttatcagagtggaatagtaattacatttaattttatctatataattgttcatgaaatgcgaacatttcctatgttgtttcgtttaattacataagcgagaaacaatatatagatgcttttatttaaaataagataactatcatgtttgacttggtctttattcaatgacatattatcatcgaggctcttgattgttgaagtatagtcattgaggattacgctaattcttggatattcatctagggtaacatactctttagagaacaccttgacttcaattatacattctccgacgtgatgaacatgagtaggcttaagcaagttaagcttctcataatttcatattacgagtgtattaatcatctcgcactaaatgttacatttgtcaatttacctcgtgtatgacttttatattttgaggaggtcattatgtctcaatctcctcgttaatcgagttaatttattatcttcgttgtacatgtgtcatatatttagatgtatttgttttttgctcaaaaaataggtataacaacacttatattgttatgattgttaacaaattattaatatagctattgtaaacattgctactgaaaacaaaaaacaaatagtattaccaaatgaaatttatgggttgagtcatggactagatcgcattttttaagacgttcgtaacacttcccaagaatgtgcaaatagtcaaaaaatgttggtgatccccaaaataaaataaccaagtcgatttttgtatcggacctttactacattgtagagaaccgttgaatacaccttttaatatttaatatcactaaatttgctcaaaaacaatataaatggaaaactatttatgaagaaatgatgtctttcttctattgttactaatgcattatatagagaacacagaaaaaaataaacaagaagaaagtctttttttacgaatcgtgagagtgttggatcgtagctaaaaaatttaaagagaaaacgtctttgtttaccaattaattaaacacatttaaaaataattttaattaaataaaaaataataatattttaataaattcagatggtggcaacaatgcgcgtgtagtgtttaggtcagcctttatgcgactctccctcttctacaaaagtaagtaccccttagggcttagttgaacactgtatcagatctccattgcattgtagagaactgtcaaatataccctctaatatttaatattattaatattattgcttaaaaataatataaatggaaaaattgtgtgtggaaaaaaaatgtccttttaattctgatgtattatatagaaaatgcacgaaaaaataaagggaaaaaaacagaaaaatacaaaaaaagaaaaaaaattacaaaaatactatgggccggcccattaaacatttataca

SEQ ID NO: 389632 - DNA, 489 bp, Cannabis indica
tcctagtatttcgttgtactccatgggacaatccaccacagcaaaagttcaatgtttgaagacacaaatattgttttctcctttaaggtgacagggagttggatcttcccctttagcatcaaagtgttcccattgaagccttacagctaaataggacaaggtgaaaagtctacctttgtgagcccaattgcctgaaatgcaaacttgaacaaaatgttcattgagcttccattatccaccagaaccctagaaactcacttgttggctatttgggctttaatcaccaaggggtcattttgggaaagggcatgtgtcgggcgtcatccactgtgaaagtaataggtagattcgttgtttgaggacgctgggctggtgattgcccaacgacacatgttttgttagggtgtatgccctaaaaagcctataatgatattttctgattattaaataaagagttgaatatttaatatatgtatgaatattaagtta

SEQ ID NO: 389633 - DNA, 1044 bp, Cannabis indica
tgtaattttgaagttataagtgattatatctctatttgtggatttggtactttaccaaattgagtaaaatttcttcactttgtttctttattatatcattacgcttgaagtttattatttttttccaacatgtggtatcaagagctaaggttcaaatctacaccaaaaatgtcaaagatgactttcaaaaaatttgagattgagctttttgatagaaagaacgatttcagtttatggcagagcacaatgaaagatgtgttaatacaacaatgactcctgaaggcactgtagggaaagaagcctgagagtatgattgatgaagtttgggagtattgtaggcaaaagcggtaagcactattcacttaagtttaactcttgaattaaagtaaagtatattgaataaaacaattttttctgggttatgaaaaatgttagaaaaactctatatgtcaaaattcctaacaaatagattatatttgaaaaaacaattatatgagttgaagataattgaaggagatgatgttagggatcatataaatagatttaaaaagtgcataacttaattgttaattttagatatgtcaaaattgatgaagaggatgatcaaactattattttgttggcttcttcaccaatatcaaatgagacactagtgactacaccttgggttggaaatactactttaattgtggatgatgtgtcgactgctcttttggagacatatagcattaagcaaccaaatagtatgtctcatactgatcaagctcttatgacaatgtcagaatcaagctgtggtaggagtacatcgagagaaaaatatgatgacagtagagacaatcgcacttattgacgctcttggagggaagtagaatgctactgttttcacaaaaaggacatgttaggaagaattgtgaagagttgattaagcatcttgaagcaatgaagaattaagaatgcaaagacacgtcagattatcattccacaaatgttgctggttaggggtgttcacaaagtatccgatccaatccaatccgcacgatccaa

SEQ ID NO: 389634 - DNA, 805 bp, Cannabis indica
ttaagtattcattcgacgatgataacgtcgactaaatttttgatgagttgttaaaggctaaggtgatatgacttcccaaaccaaaacgacccagcgaggttggtatgacaaatgactaaaattattgccggtactaccaaattgtgagtcattcactgttagattgctacatccttaaaaatattatcgaaggcatgatcaagagaaaagagattgaaattgactcttctcttggaaaagcggtgacaaatacaactccttaattgagaatgaccaaataccaaacgatctcactcaaagggatgtaatttctatggctttgaagttgacaaggaagttacgataatccagacccactttgacatgccaaagccaggaaacccaaatattcctacattgatgagctcatgacagagcccaatctagaaatttgggatgactggtatgatagtgaagagaattcgaaaagtacatggcaaacatgtactcaaaaagaccttacgaaaattccatcttggaaaccatctggacaccccagagtcaaattttgaggtagaccagatataaagaatcaaaagaataagaaaaggatataaacagccaaaacgaaaatcctattactctggaggaatttttaccaaaagagttacatgacaaggcaactattggtgacgacaacgtgtcaggttgcttcatgaccttattggcaaaagatcctgaacctaccccacttgaaagtgaaaaggaggtagatgaaatcaccttgcaagatatgcggcagaaaatttttgcaaagaaggaaaaa

SEQ ID NO: 389635 - DNA, 1663 bp, Cannabis indica
gatgtattaaattttaattaaaaaaagagtttatttaaaaataaataaataattaataatatgaacatctcaattgtggagactcattttttttcttcaattattttctctactttataaaaaaattcaataatacatttttgaaattggtgcactaatacattcttatctgtttcggtaccaaaaaaaaaatatttatttaatttttttatatgtcgtatatgttgtagttatttaacatatttgataaaattttgagaaattcgaaaaaaaattaacatgtcgaaaataggattcaaagagttagttgcacactcatgacttttttattttatacacgtgtaaaatagacggtttaaatattagatttcatattgtaaattattttgaatttttcaaaattttacagaatgttttaaataactataacgtacacaactataaaaaaaattcttataaatagcgaaacagttagggattgcatgagtgcacttattttagtggagtacattgtagaagcaccctattttataatttgaatttatcaatataaattaattttcataaaataataaaaaagtaatagtattttttattaaaatactactaagaaaatttagcaagaaaagtaagaagtaccctacatttacggagttccatatcataatctgagagtcattttttgtatggttggagttcattttttttttttcaagtctcactttcttttttaactaaaaagtgtatttagagcgcatggttggagatgctctaatacaattaaataattccaacaaactaagaaaaaaaatccaaacaaaaaaaaataaatttcttattttttatgaagtccatatatgggcaatttggaaaaatttagggagaatttaaatttgaaggtctttccaattctctatatcccttcctccctatttaggagagaggatcgtcttatttggtgcatctaaaatagaggtatgcttacaatgaggagtggttaccggacgaatattcgccataaagacttaagacaagctatcttttcttcaggtccatcaaaatggtggtatggtccttaaaacatgcctcccgaggttcaaatttttttatggaaagcttcttcgaataagatcccgccgtttcggtggtcaatcttgcaagccacggatctcccaatggcaagacttgtccaatttgtgaaattaagaatgaaacaattttttgttaaatagttatttagagttattttagttgttagttgtttatatgaaaaaaattcttattagtggtattgtttcactttttaattttataattaaatgaaaccttaatttttctgcatctcttttctttatttattattttttttcacaaataattatcatttttcatgttttttgggattgtcaaaaattgaaggcaatcaagaggctttttcccatccaaattccttctaagttttaccttggtgtggacttctatgaatccctcttgctccttattgctatagaaggaacaaattggtccatgaaggagtttgtttatcatatatattcatgggataaacaactctttagacttttgagatatatcatctgtaacgtccgtattttataataataaactcgaaaattaattttaataatttatatattaataatca

SEQ ID NO: 389636 - DNA, 1141 bp, Cannabis indica
ccgtaaaaatgtaaaaaaatatatttataaacgtaaaaatgtaatttttaatttatactttggaaaaaaaacgagtaaataccattttggaccctgtattttgcaaaagttatagattagaccctgtgttttgttaaatgacaaaatggaccctgtattttctaaaatagtaaaaataggaccctgagcttaatttttgacaacttttttattaatacaaccaacttgaagacaatgcttaatacgaacagatacaaaaaatgtaaacagttttctcatagcacttttagatcggattataattaaattttattttgacaaaaaatcaattcagggtcctatttgtactattttagaaaatacaggatccattttgtcatttaacaaaacacagggtccaattggtaacttttgcaaaacagagggtccaaaatagtatttacccaaaaaaaatcaaataaaatagatatttctttttctctcctaccccaaagttaaaaagaaattttagtcacatcattaaatgtatttaggcctaaaaaaatagtaccattatgaccatttttcaatgtgatcattttgagatggggaagtatatgatttgtcaccaaaacaaaagtaattatttagttgtttacaatattaattatatattttacatttcaacaatgtgtaaaaataattataaaaataaaaaatttataaataagtaaccaattggttgtgttaatctattaattaaaatatcattgactaccaccaaatatcacaatattttttattggcataagaagcactttttgtttttcatgatggtgacaatggaaacatatattttttacacgtcaaaatgatcacatttaacagtagttttttttttatttagttaaccaaaagttaactaatttgagaaaattacatgtattcattttattttatttattttaatttttacttctatttttatatcctttaagatatacccatttttatagatgatgttctcattaaatctcttaaattaatgtaaattatatgttaaacttaagtagagattgagaatataataggcaatccacttaaaaaaaaaatagatatattttaataaaatataatacgaaggtatttttgattaatggat

SEQ ID NO: 389637 - DNA, 2312 bp, Cannabis indica
gggcagttcgacataacataccaaattattaattaccacaaccttagttccctcgaaagctcttattctaactggaattatcggatgcaaacaagaggcatgagaagcaatggccccaccaacgatttaaggcctccaatacttctgaatactttctactacaccctcggctcgtagttcgttctctaccatagtagcataagtagtcgtgtcatatgtggtaatcatcaaatcatgcttaatgttgggattcaatcccgccacatacttttcctttttactaaaattggttggcactatttttaaggctaacctggccaacctgtcaaattgagttgtatattttgtcactaacatactctccccttgggccaactgggtagtacttagtgtagtacttagtgttgaacaaatttcctcattgtagtacttagtgttgaacaagtcctggaactcttctcaggtaattctggtaatgtcctaggtgaggaataccatctcccaccaaaccaaggcatcctcctagaattgaatggtggcacatgacactttgtcattgacagtaacacacatgaagttcaatatttttttgatgactgttaaccgtttcttgactttcataacatccactagtagaacaagaacatgagatatctacacttcaggtcgtaggagcaccttgttgccttaatcaccaaatctcttcatcttgttcataaattcaggttttcatttctacaaacctctattcccaatcctgggcagcctacagtgggttaacattacccttactgcatgctttacctctttggcctctacctcggccacgaacattagggggaatctaaactccctgagcacaaatggatgactgaatcgccttggcttctcgtgtttcacctagtgtccattctattggacgagcctgcgaaatcataagttagcctagtcagaccgcgatcaaggttaaaatctaattactgcttacttgagaatctaaaatatacgcctatttagttatcgagctacgaacatgctttctaacaagtttttcttattccatactataaatgaaactactaaagcttaaaccttacggaaccgtgagtcgagcttatatcttatgatcattgtacatattgtgatgatcttcggaagacaacctagcagctctattaccacagtgtaacaccctactaaattaggcatgttattatgttttaaaagtactgtacactgctttgctaatcaaaggatttactaaaaaatgtgagtaattgaaattttcataatcaaacttaaacttaattacataaatacagtacatatcccaggataacgtttcaaaaaactgaagttataaaagttttacctagcaacttttaaaaaaaaaacctaattgttctaaagatctgaacactctgggtctaactgcctcgatatgtacaatcttcatctagcccgcgtttactgttgttcagcctttgctttgcctttaccttcacaagtaaataatatatgtgagtcaaaagaatcggtaggaaaagcacaaacataacataaacatataccaaataataatcaggcgcctatacacccaattacaaccctatcccgcgttctacgcgtactaagtttagaacatttgtacgacaaagactagcatatatctgttgatatcttagtgcaacttgtacatttaactaatatccagatatactaatctaatggctactaattttcctaacatttatctgttggtatctcagtgtaattctatgtacaccttatcgataccctgatatgttattctaataaaaactgacatgcatactaaacatgtattcatatatgcaattattatactaatcttacatcaactccaaattcaggtgtgctggtcaacctgagtggaaactgctgctcgacgatttaaaggtccttaagtcataacatacaaaaaatgataagtgatttgctaaatcactatttggggacttagacttacaaccaaaagttttcctgtcgataaatagcgaggcaataccctaaatatgcagtagaaaataacagaatatttttctaggtccttgcttactaaaaatggtagaccatttttggataaacaaccttctgttttctactgcatattttcataaaacctcagttcgagcacaaaactatcccaaaacttccaataagctccagaaaacctatttaagccataaaaaacatatcccaatagagaaatatgttagaaattattttaccaggatctatttactatcatgtatgttggattaacaacctaa

SEQ ID NO: 389638 - DNA, 850 bp, Cannabis indica
aaaaaaaaaaataaaatttgaaatggaaggtacaagaatactagactcagaaaccctggtcggtcgaaggcggcccagcccgtctattataactaaacaaaaccctttcaatagtctcccgcagcctcctatagccttctgctttcactcaccatcccaacccattttctccacccgaaacccatttcatggccgctgacgccaacggaaccttctcagctcattatctatctcttaccgtaatttcattcacgtctattctcaccactctcaccattcactgattttttttttaaataaaaatcccttcttgcactacaactcttcttttactttgttccagccatctgaataggagttatttccgggtcgggttactcttttgagttcggggtctatttgttcggaattggaaatggctaccttaaagagctgtagcgtttgcttgcgagactcggctctccagcttccgcgtcacaattctggcgatagctacaagaggtttgtgccgttctattttaataattgattcgagtcagctctttatatatatatatatatatatataaaatagtttaagaaattatagtcatgattcatgttattttatttatatattgaatttaatttagttctttatccatgaaaatgtaacatacatacatatatagacttttgtttgttgaggggtagcttcttgtactgtacaatactacttagaaatggtggaatttctttctgggtggatataaagtataacaccatttattttaaagttgtattgattgactaatcatgatgcccttctccctgaaagtacttagaatttataattcttcacagtgcctat

SEQ ID NO: 389639 - DNA, 1044 bp, Cannabis indica
aaaaaaaaaaaaaaagacaattttctacagtcccataataaaattaagggattatttcatatttaacaaaaaaaagtcaataatattacaataatatagctgtacaaaatcttaaacatcttttacggtttagaagtttttcttttacaaaaatacagactaatattttaatgttgtttattttgttgttgtttatcattattactattttcattatgttttttcttttttggttattttcacattgtttttataacacattgtaaaattgtaattaataacataaaaaaactgtaaaattgaagaaaaaaaattgtaaaatgtaacgagccttgcgccctcgcccaaggcaacaaatgctcaaatttattttttttaacatattattttatattttcactatttacttaaaattttaattattttttttaaaaaaaaattaattctttataaatgctataatttatattttaataaaaaaaaattcctaaataccatattttaaattttaacctatatataaagaagcgataattacataaaacattattttttgtaaaatttttatattttaaataattttattttttttacatttttacagtgttctatcaaaaaaaaaaacaagaaaactacataaaaataacgcagaaaaacatccaaatagcatcaaaacaacaacaaaaaattaacaagagtacaatataaaaatatattaaaagaccgtatttttgtaaataaaatcattcaaatatttagaatttcatacaacagtatttttgtaatcttaattgccttgggttggccctcaatataatatattcttaagaaatgacgttgtaaggtatcgaaatcttattgccttaaataagaaaaaataacattgtatacctactttatcttatatgttttaatttttacttttatttctatattctttaagattatatgatgtttccattatacccattaggtcaatgtaaattgtgctagatttaagtatagggtgaaggtatattgggcaaccactcataaaagtgggta

SEQ ID NO: 389640 - DNA, 799 bp, Cannabis indica
gctgtgaatctatatataatcatggctatactgtcttcatccacctttcaccattgccaaaaaaaattcaaaaataaggtgttaaaatctgtagctaataggtccaaaggaaaacgaccagttggagaagatgatgactccgactttactcatcctgtattgaaacacgaccgtggacctgtgaagaaaaaagctaaagtttctgctcctcagaaaatttccccaacttctgacaataagaaggagcaggttgagatgatcatgggttggaggtttgttttcttattttttttatttttcccctaactttgaatattttttcgtagttatttttgtgggttttgtgtttattgttttaattttttagggtttagattttctaagttatttttttttgtttttatgcttttttttttttttttggttttaatcatttcatttcttaatttgatttatgtttagtttattatattcttcctttttgtttttccacttttaaattttgttataatgtgaggacaaagtatatatgagtggatggaagtaaggaatgctatgattgaatatgtattagaagtgaacatttatctcgtcaataaattaattcactacatcaacaactagtaagattacattagcttagaagattctataggaagaatagaaagacataattatggattatatactgtggtatcttattaatggaccgagtaataacagttagatatactgagttatcatgcagtctactagtgtagatgatttgtataaagagcaaggatattgatttatacat

SEQ ID NO: 389641 - DNA, 1323 bp, Cannabis indica
cggcataaatacttaagtttttatattgtatagcagataagtacctaagtcatatttttggcggtaaaaatacattccgttacaccctaggaacttccgtaggtacctccccgttttcttccaagtaagtgtccatgtgtcaccattatattagtccacatcattaatttttattttacatttaaaaattcattaaaattatgttaaaatcaaaaatatatatttaaaaaattcaaaaaaaaattgaaaaagaaaaatctgaaacctaaaattttattttttttcttgagattaatatatttttcttagaataaaaaataaaacttaccattttaattagtaaaacaacaaattagaacaaaaagaaaacaaacttaaacctaaataattagaaacttgatctaaaacacctaatttgttttttacaaggtatctgaactaaaatacctaatttgaaatatcttttcttcttcttcttctccctaaagaagatttctggaaatagacttttggattaagaggggattgctctctcctccagtagccattcttccatctgtaacgtgctccacattcatggaggtggagatgtcacagatctgggctatagattgagtgaggcttcaatttgaggtggggctaggtgatgttggcgattcaaatagaggcgagggtgggttgcggtggttcgtgcactctcaaagggtatgtgtcaatttagagtttaaatgaatttttgagtttggagtttcagatgatatgatagggatgaagatgaacatgattctgggttggcttttttttttttttccttttctctttgtttagatctatagtcgatctggtatgatagagatgaagatgaacatatgattctgggtttattttttttccttccttctctctttgtttggatctgatcttgtatgatagggatgaagatgcacatgattctaggtttgttttttttttcgtccttctctctttgtttggatctgttctagttgtctatccacaccccattctctcttacatatatatacttacacatatgtataaatatactagcaaaaaactacgtgcgaggcacgtatactaaattttatgctaagttttttctatgttatttgaaagtgagattattattgaatactgaatgcaatatattagtgtttaagaaaacttaatgatttaaatatgttcttaagttaatccaaaaataaactaaaaattgatgttccaatcttaaagaaacattacttaaatgtgggtaagataaaaagaaaattaaaaatcaatctctaaattgttgataattgaaga

SEQ ID NO: 389642 - DNA, 3042 bp, Cannabis indica
catcattagacatgttttgctttgaccccaacaccaagagtagctttttttttcttctctagcacaatgtccattggtacctatatacttgcatgttaaattcatcatcaatgtcaacaaatttaagttgtattatttcatagattactttcgtaattaagtaataattattagttattattatcttatatatttaaatttttaaatatatcttttgtaaatattatatgaatctttaattgatcaataaaatatcaatcaactttcatgttatattttttattcacacaaaattattatatatatatatattatttattttttttttgatagagagcaaaccatattagagttttccttagagccatcaaaaagttgtagatcatgaacataacccagaggtgaaaccagttgtgtaaggatctttactcccgtggtaggactttttgataatttcacgagatcgtagtaacgaatatcctctactacaatatccacaatatatatattaaattatgtttgtgataattaattatttatacatatatctatgtatgtacatgttaaatttaataagataccaacatgtgtaggcataaacaatttgaatcaattaattaaaatattcttaaactagtatgggctctcagataattaaagtgaaattaattattttttgtatggaggtcaaattgaaaacttagtatttatgtttcttctcaattatttgcatcataaaatgcacaattgcacacacctaggccatcttctttacttaataatcccctatataccaaaacactaattaaaagaaagccacaaattattgaataatataactttaaatacttattaagttccataatattttctttaatttacacaaaaatgttggtaatatgtcacataatttttaacgtgagactatgccacaaaaatgtaatgaacataatgaataaacaaacctttgtcttcttcaaaagtgagtcatttctgtttgagattatcttaataatcccctatataccaacacactaattaaaataaagccacaaattattgaataatataactttaaatacttattaagttccatattatttctttaatttacacaaaaatgtatacattggtaatatgtcacattatttttaacgtgagactatgccacaaaaatgtaatgaacataatgaataaacaaacctttgtcttcttcaaaaatgagtcgtttgtgtttgagatccatgcatctagttttaactttctcgatgtagggttccaaactgtatggattttccctaaaacaccatttatatgtcatcattaattctaatgcgtacataagtagtagttaaaataagatcacttatatatagagaaatagaagaaactcaacaagtgaaaaatttatgtacaacattagtttgtcattttatattcattacttttgttctacatatttgaatatgactacagactctcttctattatatttacgtatttcattataaaaaaatataaactggtctaattctatttttaaacttataatttgactaatttctactactataaatataagtattctccttacttttttaatgaagaatattattaaggaaaccttagacaaatcaataactagaacaatctactctcaagtctcaaataaacacaataagtaatgtggattagttgatgttagaatatacgagttgtacaatatagaatttaagattacttgtacttagttagttttcttttttcccttctagtttcctatttatactttctagttttgtatgtaaatacatgttattttatttaaaatatgcgatttcttttacaattttatacatggtatcagagtaaaatttaaaatttaaaaatcaaaattagggtttatcccaaaattaaggtttacgagtttattcttcatctttcttaaggttcttttttttctttcaaaaaaacacatttagagagcacgtgagctctcaccgtcgacaccaacagacagcccaatcaccaatttgtagaattctagagtttggtggctggaatagtcacatgtgagccacacgtgctacttgaagctttggcgacaactcccacatgtcggtgggtgggcatgcgtgaggtgtcttttcccagccatttctctatcaatttccttttttattggttctaaccttttggtgcatccattttgaccattattttcttcttttgtgattgctgaggtttgttcatcatcctttggtgtgattctttgtccattatctctggggttcatcttcgtttgtggattggtttgggttctcttattttggttgtgagattttgattgcttgctcaatatctccttttgttataggcttattgtctaattatgttttctcctttattggatttgttggttggtttgttatttgagttagtttggtggaagaaacataatatttgtagcgacatctagaagactggttcttgtttttgccaatgaatatgccaaactcttacagtattaaaagtctcctaagtattcatcttcttctatcactactattgttgattcaggtaaaccaaatttgtgtcccctttccttattttcataatggattattgattctagtgatatagaccatatgataggtgattctagcttcttttctaatcttcaacctcacgcttccacttctactgttaccttagctgatgggtcaccatctcgtgttcttgggtctggtacaattactcctacttcaatgcttcctttatcgtttgtcttacatttacctaatttttcttttaatttgatctctattggtcaacttactcgtgatcttagttattgtatcttttttttcttaatcactgcttattttaggatcttatgacaaagtaaattattggtaaaggaatctggagacctatacattcttgatacataaatacctaaattagtttcttcaactagtgtacaatcccccttcgaggcacattgtaggttgggtcacccatctcttcctctgcttaaaa

SEQ ID NO: 389643 - DNA, 748 bp, Cannabis indica
gagtgaaagcaatgatgagtaggcgtgaggagagagaaggagagaagaaccatgtttgctgctctcttcttccagtagtatactactacctcatccaaactctctctctctctctgcttttcatgaaaatatatttataagtttagattctctatggattgcatgattctgttttcatgaacatcaccaataatattctgccacgtcatcatcaggaaatctaaggtgcttaacctcctatatcactcgttaaattaaattaaattgtatcagaaattatacgtgactccaaatttttatgcacaacgaaaaaggattactgtttttaatgcttgttgtattaactttgatttaatataatttgtattattctcaaaaaaaaaaaaaaaagaagattactgttttcttaaatactttatcataatttaaataaataaatataattaactaaaaatattattattattatgaaatattatttatggatgtccaaattattaaattaattatcacttgtattttcttttatcatatattaatttagtttctcattcttttagtcaatacttttgtataaataagggttcacctcatttgaataaataatttaaaaattcttattcactttttctctatgttcattttcttctaatctattttatattagtttataatcacaatacactcagtggcggacccagaatttaaagtgaggggggcataaataaatttaaaaagaaaatataaa

SEQ ID NO: 389644 - DNA, 821 bp, Cannabis indica
ctctctctctctcaatcacacttttctatctccctccctcggttttccctctctatctcactcaactctctcagctcactctctcacaatctctcagctccttatctctcaatatctctcgatagtagaaaaccgaaccattcaaaaatcaagaatcattcactctaataataagaaagtatttttctaacaatgtcttaaatattaggaatagtatgtagtttgtttctgttatatgtgtgcagcgtttgtttgcactggtattattttactgatttttgtttaaaaggtcgagatttggttttctcgtggttgctaggttttttttttcaatttgtcgatggtttgttgataatatatttatatattatcgatgcaagccaaaaaccacaatgccaactatgtcataagctcggtcacatagtgcagcaatgtttctatcgttttgataagaactttactagtcctgaatcctttgaacaattcaatgggtttgccaacattgcagagatgcaagctgctttactcactaagcagaattttgaagccttgcttctatggtgtttgaaataagttggcttaagtctttactcactaagatacatctgcctgttgtctctcctcctctaatctggtgtgataatctcagcaccatcatgttggctgccaactctgtgcttcatgctcgcacaaagcacatagagattgatttctattttgttcgagacaaagtgcttcaaaagaaaatttgtgtgcaacatgttgttgctatattttataaacgatacgcaagtatacgcaatcaagtagtaaatctcaca

SEQ ID NO: 389645 - DNA, 591 bp, Cannabis indica
tatagttaaaatatgtatgtactttgttggtatgtatgtataacccctctttctcctcttattttctgctttataatcttggtaaaagtgaagggagtttttttggaagtaaagagtccaactaaagggatttccctttggttatgattgaagaggtgtaaatatataaaatgtacttattgttttaaactatttcgatgcaggttctttttaagttctccaagcaaaaacagttgctctactggtaagtttgcgttgggctcaagacatgggactaccagctgaatgggtcttctcatattcaccatctttggtctcaactttggagggtcagacagtgtatatgagcgaatgtgggagttatttttctgatattaaaattttattgtctagctttttctaaggtcatgcatctctctaagtgtatttattaaataatgttaggatcattagtaattttaatgtgtatttattatttctaagtgtattatatataatgattaatttaacttttaatcagggatttttatttttacacttcaaaataggttttttttttttttgtcacttttacagaattctacatagaaa

SEQ ID NO: 389646 - DNA, 943 bp, Cannabis indica
gtttagttgggctggcttaggctgagagtaaaaactgactgggcttatttattaattttttttttgaagatgatgaagagtttatatggttgtttttcggccctgcgatggggtgggctttaggtacgggcctagcccgtctatgtccaggaccgaccctgtgtggatgtgtatgtaaaaaaaagagttataactctacttaaaatcgtcgaaaggtttacatgcaattgttgtcttattagacaaacaattaatattggaaatgattgtcttattggacaaacaatattaaaaatggttatttattaaggatcaaccttgaaatgattattttataataatatatgattgtcttattagataaatatttaatattaatgtctgtttgcaatgtttacagtgacttcttgcatatggattgaagtatatatgtgcttattaatattatgtttgtacaattatatatgatattatttttgttgctgaatttttgtgactcacgagtgttgtgcatgtaagagaataaacaaactagatcaatcatgagttggaccttcgtcaacaaaattgtacatatatatataagcttaactactagccggcaaggtcgagttgtcaggtaaaggtttatgttgcttttgagaataaatatggttgtattttgaacgtaatattaccttgttaagtttcaaaaacggatccttagagtttaaaagttgtaatgttatgttttaaattattttatttaactagtaaagttttaattaaactatatttttttaataaattgtagtttattattataaactaattcgtaaaagtacacatataacacactacaagaaatgtcatttttgccagcacatttttgtgctggcaaaagttagtattacgctggtaaaataaaatttacttgtgctgtgttggcaaatcaatgttggta

SEQ ID NO: 389647 - DNA, 1193 bp, Cannabis indica
tctgacttgcttactctttttatcattatataatatattgatattttcccattaatgaacttccacttttcttgttaatatgcaattgtcgatataaattcatgtttgatgtcgtttaacatgattaaaaattattgactttggggcgtttaccatactccagtcgagtccacctgcacttttcaaatgttgaatagggtctttgtaaaattggtgtcgtttgaataagaacattgtcgtttttgctggatagattattgcagttgtaaagtttgatttctgtcgtttttaggagtacccaagtaaagttaactacgatattttgattaaaaaaaaacaaaaaaaaaaattagctacgatattattgactgcctagactaggacaagttagtccattcgattcttgaaaattcaaatgtttagtattaagattgggaaaatggcaagaagattaggcagggatattacgtatacttactctttttggtttgattttgtttaattttaacacttgtaaaaaatctggcatcactccatgatgatcacttagtagaaaaaaattgaaaaatggtagtttttcattgaccctggtatacatatacatttatttgataatgtggatacatatatataatatattctacaaaatcacttatagtggtggaacaagaaaatgaagctcatcaacaattagttataaaaataaagaaaaagaaaatgaagctcaagagaaagattgaaaatatgtacgaaaagggtggacttcggtcttctctacattaaactcttcgtacgttagcatgatgatattcttaaatcatcataaattgctaccaaaacatttttttttttttgggatgtgaatgaggtagatttagaatgtctctaatcatatctataaacatattttttaattacaatagggagaattttaaaaaaattagctccaaaaacaatgaataaataggaaggctctttaaatatggagagttttcaactattttgctaattttttttaatattattttaatcaatagcactattattttttttcattatgtcattaaattaagacatttttacatcaaaaattcaatttactcaatttattacaaaaaaatactctacaagcttacatcatcatttttacctttcctttttcttttatttacaattataccacttacacatca

SEQ ID NO: 389648 - DNA, 594 bp, Cannabis indica
taattattataaaaatataaaatcttaaaataatcatttaccatctataagactttattattatgttaattattagtaattattctttttaattaattttataaataatagaattattacttactaattaattatatactagtaattttttatgtcattgaacataatttattgattttttattattgattttcataaaatttattagaataagattacgtgtgggtacactatacctgttagggtaacactcgtaccttatggaaaaaaataatagtgtaagggaaatttgaatttgtatgcttgcatttaattaaaatttatcctcaaaactcataataccccatatttaaaatatatgaccatttttctattatgcccaaaataccctctttatttccttcaccccccctatcacttcttctctctttccctctctcttcttttctctaacctgcccgaagctacacaaagggaaggtcaaatttttgctcctctattctcatccttttcagctcactaactgcacaaggctcaccacaaggctcaccacataatttctctcattttttggacgagcatcatacactaact

SEQ ID NO: 389649 - DNA, 567 bp, Cannabis indica
cttttgaggtgaatgatcttaggacccccttttaacagcattacaagtgataacaacttttggttttgcaatctatgattctctcagaaagagattctgcagaaaattcagcaaaaacaacttgaaagaaaagtaattaaattaattaatggtgctaaaaaagggagctttagtgaataatggtgctggtgagtgagggagcgaaaaagaataccgaatgaacagcaccaatgcgagcacacacgagcattgtgatgggaagttcatgaagaggatggtgaagatgaagatgcaactacagaggaatgaatctctggcgcagttgaagaattgggattgtgctgcattggcttaacctttgattttgagaaaaatttgcagcacataatattgatgtagttgcattgtaccccaaatctaatattattcttgtacagtcaagtgccgattttgtcataataccttgcatgaaacaattattgtttttcccaataaaatagatttggagtgggaaaaagtagctttattgttctaatataattacatgaacacatttatatacataat

SEQ ID NO: 389650 - DNA, 885 bp, Cannabis indica
atatgtgtgaggtatgtaacatacatagctatttttcatgaccttaaagagtcatttcaagaggaaaatatacaaaagtaatattttatgtacactttatgctagaaatgtgcagtgagccacaaatttaatcaaagtgtgttgagacattattgattagtttatttgattttgaatttaaattctaaatcaagtttggttatgtgcatatgtgaaaatattgacaacctcgtgcaatgctgtttagatttgatagtgatgaaaagggcattgaaccatgggatcgagaagctcattccaaggagaatatggatctgaagcatatttttcaacatcaggttcaaaagcaactagatcagagtcgaatatctcgaaactccacaaattttggtgaacttcaatagccaagtcagactatcttaacgcctaaacttttgaggagttttgttctattagagcttttgagctccaccatactgctccatgtccaaaatagtggtgaaataagggagatgatgaaactcagcatttgagagaataagatctgagactttgacttcaccgtctcctctttggcagatcgtgtcaggcaaggctcgtgagggtggaggtgtcatctgagtttggcttgagaagagacgagagaaaggtcattggcgttaaaagatatgagaaggagagaggtcatgtggtgagattagagtattaaagagatagagagatatatcttactattataaaagtgttgtaatgaggtgatagtttgaagaccattttaccctttaagaaattcaatattaacaatttgtcttaattgacaactcatctcaaaaagtgtaatagtcaattgacagctaatgttttggttaatgtaatgcttttaat

SEQ ID NO: 389651 - DNA, 2802 bp, Cannabis indica
gtatttccttttgaaaattttggagtattatttttattgcccatctttttcatatatttctgaaaaattcttagttaataaagcaatttcatcttcgcattcattatcagtaactttccttttcagtaactcttatagcaatacttttacctttatcatcaatggactttgggtttgtccttttgtttcatttgttaattcaattcaaaagtacgcaaagaacccattagctcttccaccttcattgtgctaaaatctttagcttcctccatagccaaaaatttagtgtcgaacctgtgtggaagaactctaataatttttctgacaataatagattcatcaagcttttgaccaagagcaaaatattcaatagctaatcagacagtctttcataaaactaagttagggttctattttctgacatcctaagatcatcacatttgttctgaagcataataatcctagaacgattaacatcaaatgttccttcaaactgaggttgaaggatctgccaagcatcctcaggagattcacaagaagatataagcttaatgtaaccttcacctactccattaaatatagcatgtaaagctttactattataagaagacaatttatcatcttcagtagactattcatgttcagattttaatttagatttaccttcagaatctaccacaacaggacgagaccatcctaaaagcctcattctaccacaaaagcctcattctaactttgcaataaggataactagaatcattgagcagcggtggacgagtaatggaacttccttctacaaaaaaagacataatgcacaaaaacacaaaaatattgaaggaccacactaagagtttactgttccgctttaatactaagtgaaaaattgtgtttttgaaaaaccaataaatttttacaaaaaaaatagtaaaaatacaattgtaacagtctgtaatagcagaatgtaattctatcactgcaaaacacacttttgcagaaacaaaccagaatcagaaataaaataacagcataaaataaaattacttgacacaagacaatgatacgtggtatcagtgttcttttgaacactcctagtccacgggaccacgcttaaagaaaaaaatcaattagtaaagtctcaaataattacaaagacaagtgacttaaacaggtttagactccgtctaaatttttgtcataatcctttgtaattcacttcacgaatctgattcctaaaccaccatcaaatagcaaactctcttcatctttgatgtgtgagtgcttacttcctcccaaagtaaggcttgaataagtcttctctcgaagacctttctcttatttaatcaagttgttcaaactgatcctaagaccagtataaggtataagaacaaatacacaagcactcaaacctagctgaacaacagtattctcacataaagaactctctcctcccatataaaaaaatatgcaaaaatgaaagctaaaagaggtaagtcgattgactgctctctaggttctatttatagaacatagcaaccctagtgacagtcccaaaattgaattcaaagctgtacaacactttcttaaaaaattcttaatgtgtagcatcacaatcggactctacagtagtagatcaggaccaaaaaagaaactttcaaaatggagcacaattatgaatatggacttcaaacctgccaaatacattgcgtttgatctgatcttatcaagacacactcaaaatcatcaatgagaaagaggaaagtcaaagattccaaataaagacaattttccataagagaaattattttctcacaagaagtttcctaaacaagaaaaggtcagctgaaaaagactctttccttagaagaaaataagtataaagacacgaaatcaagatgaataaattagtttaatttcacaaggaaatcacataatataaataaaaaatattttgacacctaaattgctaaaaaataactttatagtatataaaaaaaattcggtcaaatactttttggaaatatatatgtaaaattagaagcttcatttgtttggaaaaaaattatattcatcttttaggaaaaatctctagcttctaaaaatatggttttggtatacatactatatgtttcggcatctaacagaacttattggtctaattttttattataatcatgtacattgtagttatttaaagctacttgtaaatttttagaaaattttaaaaaatttacagtgacgaaaataaaattaaaacaattatttaccatgctaagaagcaaatcaagtatggaacaaaatatttgaaccttatattaagtatctgttgtagctatttaggaccatatgtaaatttttagaaattttcaaatagttacagtgactaaaataaagtttaaacatttacttaccacgcatatatataaaccagtcacgtatgtaacaaaatattgtaacgccctaatgttaaggcacgttacagtgatttttcaattacaatgctatctttgctaatcaaagaatatacttgaaaatagtgtcaaattaaaaattttatattaaatatgaaactttataactttataaaatcatttacaagtaccgggatcccctttttgaacttctatacaaaatactcaaaatacataaccaggtcgcgcagcgactacaaaataataaccccagatgtcgcgagaccgaacactctaggttgcgccaccatgacatatacaaccccatcgcagcttagactctgtcttattcagctttcgccttttctttacctacacatggaagcaaaactgt

SEQ ID NO: 389652 - DNA, 1049 bp, Cannabis indica
ctctctctctctctctctctctctctctctctctctctctctctctcttattttcttctctctttcttttatcaaaaacattacagtaaaaaattattaaaaagaaaaacaaaatataaactgaataaaagttaaaatatatgcttatcagatttttgtaaataaaaaatataatttaatataattttgtaaaaaattcttaaaatatatataaatcgattatttattataaacggtctagtccagtttaaccgttaattgtttattacaaatcacaacttaacctttacgtagtaaacggtctatattaaccaaaccacaaaaaaacaatactcccgattatggtctacggtagttcaaattatcacggttcgaacttaaaccacaattttccaatttcgatgaaaagccctaatagagattgaaaataatattttatttttatatttaagtaattttttttaatgtaataaatatattttatttaaattatatatatctaaatattaaaaactaactatccatattaatcatccaatttagatttttttttttaataatggttaaatttcattaaactaaatcatccaaaaccaaggatgcaaaaacaaaaggtaaagagtctctactaaaagtacggtcagcctcagaaagagaagatcgcgccaaagcatgcgcaaccttattagcagaccgtttagcaaaaataaaagaaacaatatcaaaatcagcaaccaaagtcatacaatcataaagaatatggccataaggagaagccatatttttgaacttttgcaaatcactaatgacccttaaacaatccgactcaacgacaacatgtgaccatccatttgctttactccaagagagagcttccttgattccaatggcttcaacaatatgaggttgcaaagcaccttctctagataagcttctggcccccaaaacccaacccgcagcagaccttgcaatcaaacccagaccataccgcccttggtcggcaaaaagtgcaccatccacattaactttgacaaaagggaaatcaggtg

SEQ ID NO: 389653 - DNA, 1740 bp, Cannabis indica
tgtccattttagaagagctcactgctctaattgactggtgatatctttgactctcgcttaccggaatactgtatatcatttagttgtaaaccttataaaatttgaaatatgtttatttttagtattttttccatatcttccttttttgattatgtgtttacaattttccgaatatatgtgattataatttatattgaatataacattgaactctgttattgattataaagtatcaatttcaaatcttcattgttgatctaacttaattgattatcttcaatgggacctcgaaacgctagatatcgttccctaacaggtggtcatctattgaataatctaatagtgttagatcttgaaagataggtatcttgtaaatgtgaaatctacttgattcatcctgaatagatgacaacatagactagtgtttacaataccgaaacaatgaaaaaatttacaaaagaagaaaattttgactctcacttgttgggacatcactagattcttattttaatcaaaattattctttagatttcctccaaagcgttttcataatgaaatagctataatcatacatcattggactacatggattatgatcatctactatgatgttgctttttttttcttccaagaaaatgagtaaggctgatgaacatattccaaatattctatctaaaaaatgatgattatcctcaatttttagggattgaatctccttcttacagttctgctaaatatcgattgaacataaacttaaggttatagttctaaaatctatattaagcttttgctcgataaacttagagttataatagtgtcttagtggtggtccaagctaaaataataactcagtttctagattactaaacactaagtttaactttcacaattcttaatttcaatattagtggataaaactatgtgctaatgtataaaaatcaagttaatatcctgagactaaatacccacttacactatttagcaaactctttgttgtaactagacttagtaatcatatacatcaaagtatagtaatgactattgataatctatgggactctatcttttcatagtttttttttttgacaagattattctctgcaaagagaatatgagccatataatcacttggatagtatattcatgtgttattttgacatagggatatacaaacaagtggtggctatgagtaactcattaaattcttacacgattactatagatatttaacttatgccaaaaatttgaaatgtttgaaagctttcatgagtttctagcaaagatagttaaaaaattcattaaaaatcttgtgaactgataggggtggaaaattatttaatatgcagttcaaagatcatttaaatgaacttggaattgtaatctaacttacctcagaattttggagtcatattttaatgaaatgatcaggtttatgattagttactagcagctaccaaagtccttctaggtctattccttagagacaacaaacaatattttaaaatgtcttcccatctaagactagatcccaagacaaccttataatgataaattgtcatgtacttagtacacaccattgttaaacctagggatgtgctgatcatgtccttaaaaaaatctaaaactactaactgtggtttatatgtctattagctattctaaagtgattagggtggactacactatggtcatcaagactagtaagtgtttgttttcacaaatactatttttctagaagtt

SEQ ID NO: 389654 - DNA, 713 bp, Cannabis indica
aaataaatatatttttttaaagacaattaaattataatttaggggtttatattcaataattcttgttgcatatgcattacataaaactttcacaattatattacaaaattcattcatagttattgggtatcttgtatttttagcaaagtatcacttttataccctttttatttccaatttattttatttgataccctcaattttgataatcatttaaaatggtaccttccactaaattttggtcaacttatttttcataatgaccaaattactcgcagttaattggttttatttgatttttattttctaaaattaaaaaatattaaaggaaataaaaataacttcactaattagtcgttttttttggtacactttgcaagaatactttcaacgttgattgtcttttttgttcacatagccccttcgtgcggtagttattatatctcatgtaaaacaaaaaattattcttgcggtatttcatgattactacatttaaaaccattatcattaccatatctcatttataatgatcattacattgaaagttattgtcatcaaatgtagtagagataagggatttgatgcttggaatggcaataagtgagaaggaaaatcaaggatctcgatggatctagtcgggttgtcgtcttctgttgggattttatgccctaaataaaactcatttcaatttaatctcatttgttatcaataga

SEQ ID NO: 389655 - DNA, 2962 bp, Cannabis indica
gtgctaattttgggataacaatttgtttatgagattttcattgatgaatgtaatctttttgaatgtaattctcttttgtaattttccttttttacatactttttattttacatggtaatgcatataagtgaattactatttcaaaacttgatgcagatatgactcgtcttccattggttacaaagaaaaaaaaattatagtaattttacttcaatatatggagatgttaaataagatgacacttcctttcatactccaaataattattatttgttgtaagaggcgtataagtagaaatatgtttcttgaaagttcttttcgtaggcacaaattacgtcaactaaatctttttagaatgatacatgctagtgacttagcttgtatagaaaatactggcatggataagaaaacatttggtattttgtgtcaccaacttagaactatcgggggtttgaaaggaacaaagaatcgaatatggatgttgaagaaatggttgctatatttttacatattatatctcatggcaataagaatagaattgtgagacaacaatttgcacgtttgggttaaacggtgagtagacaatttaatattattttgaatgctttgttgcatcttcacgtgctattattaaaaaatcctgaaccaattcttaatagttcaactgatgagaggtaaaattagttcaagaattgtttgggagcactagatggcacacatattaaagtcaatgtgcctgttgtagataagcctaggtatcggactagaaagggtgaaattgctactaatgtattaggtgtagtctctcaagatatgcaatttatttatgtcttacccagatgggaaggatcagccgcagactctagagtgttgtgagatgctatatctatgccaaatggattgaaagttccacaaggtatactttttcttccatgtgtaatatcatacatatacaagttaatttcataatagatttacaattttgtcaatccatatacaggatattattacttatgtgatgttggatattccaatggtgaatgcttcttagtaccatataaaagacaacgatatcatttaaacagttggaatgtcccacctaatactcatgttgaatttttcaatatgaaacattcttctgctcggaatgtagtagagagagcatttggactattaaagtgacgatggacaatccttagaggtcgatcatactatatgtcgaattattttggcttgttgccttcttcacaacctaattataagataaatgtctgtagatcctctagaacaagtcgtagaggaaagtaaggatgattattctgacgaaggtgaaagtttaggcaataatcattatacacatatcgaaatatctaacgtttggacttcttggaaggacaacatagctagagagatgtttgacctatggcgagaaaggaggcatacttagaatgtattttttttatatatatatattatttgtgtttgatttgcttaaatttgtatggatttttatattgttggatattttatttctttgcattatttgtgtttgactttgtatgaatttttatattattggatatcagttttagacttatgtgttggacatcaaatttatatatttatgtttttaatttaattttatatcttaatatatttattgctacactattgttacaagtagatgtgagatatacatatcttaggaaaatggatgctttggagcaagaaacttcaattgaggattcaaaactggttgagtgtttgttggagttggtaaatagtggaagatgaaaagtagacaatgggactttcaaacctggctatctacaacaattggaaagatggatgaatgaaaaagttcccattacggattgaaaggacagccccacattgagtctcgtatcaagatactaaagaaacaattcaatgcaatttcagacatgttaagacaagcaagtggttttcgttggaatgagaacctaaagtgtgtggttgctgaaaagagtgtttttaatgattgggtaaaagtaaatgttactttatttaatttatttataatttgatcatatcttaattcttttaatatgttttttattcattgcagagtcatccaaatgtaaggggcttaaggaataaagcatttcctcattatgatgactttgttactatatttgggaagcatcgtgcaaatggacaaggtgttatgagattttctgaaacaatggatgagattgatagagaagcagaaaatgatcaacaatctgagttcgatccatttgccccaatagatgagcttgttggtaatgcaaccgatagtcacacaagtacgagaacaacttcagcacaatcaagaaggagaagtagaaagaggtctaggaatgaagatttattagttgaggtattgactaccacagtgaacaaatttggtgaaatacaaactgctgctggtgttagtattagaagaattgttgattgtttccaattcgagacagaaggtgcaagtagaagactgaaagtgttcgatgaactgaaaaaaaaaatcgatggactgtaatttgaacaacgaattgaagctgaaaaacttcttgtccaaaatcaagcttatacagatcttttattcactttggatgatgaatacaagttggcattcgttcttgatttgtataagtaatgtgagatttaatagttgatggtatttcgaaaaatactattggagtgactttatgaaatataagtgttttacttttagaaaaacttttggccggttattatcatcttttggatgaaacttttagcaataaaatagtatgtcatattttggattataaactagataatatgcaaacttttggaatttaaaattttaatcaatattttttttttgagtgattttaactcatatttttaaaatatactattatgtgttaaagagcttttattgttgtttaaattattgatt

SEQ ID NO: 389656 - DNA, 1709 bp, Cannabis indica
tatgagtaatgagagatgtcactttgaatcactgttgttgttgttgctgctgggtctgggatttttgtctcgggctgtattttcttcatttacttatatatgtttgggactctctacatcataacaagttaagttttctttgcagtctgggaatcaatctggtatgccacaatctcaacaaggtccaccccctcatggccaaccccctcctcaatagtgttttcaactcttttcccctttttctttatatcatatggaatgatagggggggttcacatccaagtgtcagaatggacttaaagtatccttctagattcaattcatgtacattttgacatttttcccccattgttgtagtttgtaggatgtagcctctttgacaaaatatatggatattttgtactttaattttttaaattattattattattattattattattatttatttctggctgaacctggagatataatgctgttgttactgtgatagttgaaggaatattttgtgatttttacacagaatacctaaattagcactttgtatgcatttttactattgggtggagaatttaatatttatacggttgtttcttttttttttttttttttttatataggtttatttgtcctgctgtaggttcttaaactatatgagttttaataagttggtcttcaaactttatattttggcaaattggtttttaaattatttaagtttagcaaattggtcttcaaattttattttttggtagattggttcttaaatttttactttttcagcaacattaagtctctatcattagatattaacatttttttatttattttatatactttaatttatttattttttttgttaaatttaaatatatattttttaattttaatactttgataaaaatattatattaatatttctttaagtactcatgtaatatatattggataattataatatttaatttttttttaaaaaatatttaaattatactttattcattcgcatatattattagtagtttcatataatgattagagagaattttagtctcacatttctatattttagcatttataatatattttattgtttatttatgaatatatagtattataattttaataatttttataattatatatatatttattgattatttaaattttgctttaataatggtaaaatttcatgagtttgttgcggagcataagttaaaagtaaattttaagatataatttactttcggtagtttataagaaaataataatattattatttaagccttttcaatatttcttttatgcttttttttgacatatttgaaaaaaataaatataatgtaaaaaaatatattatgtagcttagggactaacttgtaaatatttatatagtttaaaaatttgtggtacaaataagtcaattatatttactaatataaaaataagaagaaaaactttaaaaaaaatagagcaaataaaattggaaaataaaaaatacaagagaaaaaagaatgataaaaagtagcacaaaaacttaaaaataatttttaaaaagagaatgatgtaagaaaatgagattttttaagaaaaagtaaaaagggttttttacgtattttactacttcaaaattagtttttttgttcatcttacgtaaattctacatagaaatccctattgcaacttacggaacaacctaaatcgtaacc

SEQ ID NO: 389657 - DNA, 976 bp, Cannabis indica
tttttttttttgaagaaaaccctcatgacaccatccttttggttgtagttttgctcaataattttggtgaggaataaggaagagttctgtttatgtgtccaatcaaaatctgttttgttagtacaacaagagtatatatatatatatagcatagtataaatgagtggattaatactcaatagtcttggaattggaacaagtgaactatatagctatttggaagtccacttacatgttcacatatggctcacttatttgtcatttttgtaaaaattacacaaaaagacaaaacccatctcggcacttattccaagtttcattattgaacaaataccaaagagagagatgagataacactctttttattattattatataaataaataaaaaattaaaatatatatttactcttttcgataaataattgtcacattattttaaaatgataccctgaaacttagtatcacatcattggttgaatttttgtcaaatctctggttttaaatacttctatacgttaaagtgtgttaactacatattcttgtttttatacatatactaacgaagctcaatttttgccttgttcgaagttgaatctcacaaaaataacaccattgttgattatacattacaatttagcacacaaagtcacgtaatatacatactagttctttgtttctttttttttttttaataataaagtaacttcattaaatcaactcaaccataactatggatgggagatgcgaggtaaaaagattttgctaaaaacacaatcggcctcgataaaagaagcttgcgccaaagaatgtgcgactttacaaatttatattacaaattagtacccttaacaagattaaatatatatatatatatattacagtaaggagtgctaactatatcttcttagtcaacctccactttcgaaatttcatgccaaaatattttttatagcggtattcgttatagttatagt

SEQ ID NO: 389658 - DNA, 1302 bp, Cannabis indica
aaaatgtgatatgattggtatacatgataatcatatcactccctacacctacatagctgcaaccaatcatatcacataaaatgtcaaactgactaagcaaaatgatggcttaaaatagagtgagtgagcagactataaaattggcacaaattcctctttatgctaaattttctcagaaaccattcatatcacataagaatttcccgtgacgaaaaaaacaagctaccctaccttgtggaacgccactggaacccttctctgaatcatcacaaagcctggtaagcaactctttcttcgacccagttgaggaaatgccacgaagagcggcttgttcccgtaattgcttaacactcattcccctaaactcctcaatggccgtaattttctcaggttcatttgagtttccttcttcttccgagtccctctccctcttatttccaattgaatcaccatttccgtcttgtaatggcagcttgctctcttggcgaatggccgcttcaagttttcgaacctacaatggcacgacataaacttagaatccgagaaatacatgcatataaatatatatggagtacgaaagaaagaaagaaagagtgaaaccagggtgggcttaattccggtggtgctgagaccacgtttggccagttcagtacgtagttcttctactttgagcttgttcgccattgtcaacggagagtgagagtgagaggagggagggaactgtgaaagccgtttaaaatgaaatgaagtgaaaaggacagaagccgatttctctatacgtcgacgtttttgtaataagccttaaagcgtacccggcactctatttgggttagcttcgctttgaatgagaaatttttgttaaaattgatttgagtgtattttttataatatattttttttgtaataataagtcttaaagcgttcggggcactcttcgcttggaaggagatatttttgtcaaaattgcaagaatactgtattatgtattatgtaattattttaatttttaatttgaggattattttagaattatacgaaaataacaaaaaaaattataaaaatattgttatatgaaattttaaataattttacgatttttataaggttaattagcaatttttttccctcgaattttgacatacaccaacttatactccctgaacttttttggccgttaaaaattcccttgaactattgagattgttagatttaaggacttttgtctaatttcattcaattttattgtttcaatgattgtttatgtactataacatgcttcccaaactttgatatctagcaaat

SEQ ID NO: 389659 - DNA, 1077 bp, Cannabis indica
aaaaaaaagtggatgatcataaacttacgtactatttttacttaatgttaattacatagtgaatagtgattagcttatcctctttgaattaaagatgattgaggtctagttactaaaaaatttaaaaataaggaaaattttgtagttatcatacattcattaatatgagtagtttgttcagttatgtgtcaatgttacagtacaagaaagatacattttcttctgtgatgtttttacaatttgttcatattttagaccacttgtgttcaagtttgactcaagctacttgggatggagcaaaatagttggtggagaacacatatgtaaaatgttagtaagatcttgatgtgcgtttcttattttcttcttgttgtgagactcaaattatagattgtgtcaatcatattgtgcatgttaatttggagccatcagtatgtaagatctctccaaggtaatgtttgtaattcgtaattattaataaattttggaaagaaagaatgaaaaaagcaagaaaaaatgggaacaagagctttatttattttatcaatataaaggaatggtgacaattcttctcctcatataagagtaataatttacaaaaacaactccacttcatcaccaaatctgagttccataacttttgaaatctttaacattatcaacttataaattcacccagtttctaatcgtgtacctggtacaaaacgcatatattctttcttatcattatacttttgttgctttcgagctcaaacaattgctaaagatattgaattctaaagatggtttgttttatccatttctatagggttgtgaactcttatgaattagattataacatcacatatgaaacacacaatgaaccttgaatttgtccagtaatttataccttagtcttcttgtgaagtgactgtgtaacaaagtcttcttgaattaatttgttcttttccttagtcttctgtctatttccttgtatctacttgtccgatctcaaatagctgagcaattttgaatatatgagacttgggtatctaataaaaaaaacttacatgagaaaagcaaatacctcattaatag

SEQ ID NO: 389660 - DNA, 812 bp, Cannabis indica
tttcttttttttttttgcaatttttggattgccaatcaatttaaaatatgaaaaataatattttattttcattagaaaaataataggtattccctcaattaatattctgattgatctctatcacaaattttcctattttgttatgtgaacagctcatataagttggtgcatagccccactggcatattgaagtttttaaccttaaagagaaagagagaaaaaagagatgttgaaagtagttgcttcagaaaataaaagcaacgaatttaaattgggttgagcggcgaattaaattgctctttttaagatgttcgcgatattggcgagaactgtgtaacaaatttaaatttaggttgagtcgcggattaggtcgctccctttaagatatttgcgacattggccaaaactgtgtaagtagactatcaactttaaaaacactgtattgaagctctattgcatgataaaaaacagtcgaaataccacacccaataattgtactactactcataatacatatgtaatttaaaattataatgaagtattcttatcccatgtgggactcaatacactcacatttcacttcttcttatgtaaaattttgctaagttccaaagtgaatgctcatacgccaaaatgcgtaaagaacggcaagcaaaaacaatatagcactaagagcaaccctttcctttctcactctggattaaaatttttattgtgaatacatatgtataatgtatatctttatatattaaaagtgtctatctaacggcaattcttagtttaacagaatatacttaaaaataaaagaatat

SEQ ID NO: 389661 - DNA, 1143 bp, Cannabis indica
taaatggtcgacctgtggacatgcctaaagtcacaaagcttgtgaatgagttatatagaggtgccaactcccagcaacatcccattgcaattttaaattttactattccatctggagcatgtgacgtcaatgttactccggataaaaggaaagtattcttttctgacgagggttccatattgcatgccctaagggagggtttacggcagatttattcctctaaccatgctcgtttcgtagttaataaagttgaagagcctgccaaggctgtaaattctccgtcatgttcttctcagcaaaaatcttacacatctttgaaaccattatctcaggatgagagtggtccagaaggtgaaaatatggacagtgtttcagaggatgataatcaagtcaaaactttggaaaacgaagttcaagacattcatgatgtagaaagattcaattgcaatattaaaatgaaggactttactcttagaggacacaaaattaaagaatcagaagacagtaaacaattcactattcacgatgatagtatcacaactgatcaaaaagtgcttcctcttccgaaaactgttgatggtggcattgctacaaataaggattcatatcgttcaagctctgttcaaacattacttaacaaatttgtcactgtaaataaaaggaagcatgaaaatatcagtacagtactatctgagatgcctgtcttgagaaatcagactcatcatgggctttccagaaatagcaattctgatgtgaaatttgcagttccaagatcctcagtaagccccaccctggttgatcattacttggaggcaggtgagatagaatcgtccaagtatttaagagaagacagggccaccaataaagtcgcaaatccactttcttctgaaggcagtacaaatggcagagaatctcaagaggtatgtgggttataatttgttttccttccagcttggtcaatactattattagcatattattatgtggttatcagagctttttaatatgcagaagtaagtctgttggtgttaagtgatctaatggttttgctcccacaagttctgaggttcgactgttgagtccctcctacatatcaattgctttagttttttgatccgcaaatattgtagggttaggcgggga

SEQ ID NO: 389662 - DNA, 1116 bp, Cannabis indica
aaaaaaattattttatattatttgtttaattaataaagtttttgtttttaaattgtataatatttgatacaatactctcttttcttagtttccaaataattataacaaatttaaagacttatttttttaaaaaaaaaaaaaagatgaagctcgatttggtcggtttaaaccaaccaaatcatagattaaaattgtcagtcggtcggtcggtcgattagagattacatttatataatagttggccggtcggttttcgaattataatcatgaaaactgaaaattaaattttgaaattttcttttgggtaaaaaatcgatcaaaccaaaaatacgaaatttcaatctttcattcacttaactcacaattgccacaattgattcaccaagttctccatatgagtcttaccaatatcataatttcagaatttaattgccgatgttgatgagaattttttcattgaatcataacaagtcattttttgtgcgattttgttttcgcttgaccctctaacgccccctgagcctaatgctaacaagtataatgacacgtacagcaacactgctacaccacctttcacaccactacctatttctggccgcaaatggtctgtgcctgcttgaatcgtcataagcatcaaaacctgcacatatttatatttaaccccaaagtatcatcactactaagttttatcaaattgtgcctcttaaattttagatagagaagcacgggttaatctttattctcaccccattccccattgagacaaaaaattaaagattgaaatatggtaattttgttttcgcttcttgacggcccaacaattacagcttcctgttactcatattgaaaccgatgctctgaaagttactacagttctaaactctacatttatgaatttatctagttttagtaatttaataatagatgttcgttgttttttatccttttcttcggagttattgtttctcatgtaaagagaaatgcaaactatattgcgcatggtctaacaaaatttgccttagaagtggatgaagatatttgtttgttgaatctattagccataccagaaaacaaagaagaaagaagaaaagagagaaaggcagagaaagacagaga

SEQ ID NO: 389663 - DNA, 525 bp, Cannabis indica
aaaaaaaaaaaaacaataataagagatgaatgaatgtgtaggtcaccacttttctaaacccaactgctgtaactataaacattgttcttttcactctttaataaatcaattgttgacaaataggtatttgtacattgttctctgtacctacatatttctttatgttttgtgtcaaagtttttatttttattgtattaattaatcctcattctaccccaaaacaatgaatcaatgacagtgattttggttatcttatcactagaataattatagttgttcaacaaatgaagctccatattcacttagtccaaaaataaagaaaaatattgttagttatcatttcggtttcataaatgttgtaaccattaattttaactttgtttttcatttatcaactgatataaaacaaagaatatttgattgttactacaaatttcgggtaaataccattttggaccctctgttttacaaaagttaccaattggaccttgtgttttgttaaatgataaaatggaccctgtattt

SEQ ID NO: 389664 - DNA, 522 bp, Cannabis indica
gtgtcatctgagtagccacataaggggcaatttgaacaaggactaacaatccttttatacagacctgccaaagtgggcaaagcttcatgaaatcctttctaagcaaaatgtagtactttagcgggtaaaatgtaatttctaatatttcttccaccattcaaaaaagacagcactagagggcctggggtcagcagtaatctcacttatggccaaattgtatccacttttgactgaataaactccatctcttgtgcaatgccaaaaccaactatcattcttattgatcttactaattggtattgagaaaatacaattcatatttattaatttataaattaaccatcattattgttgcctaataagaaaatttaagtgccctcacttggcacccaaatattacattgcctaatatggcaagtcagtgccctaacctgccacctatatataacattgtctaatcaggcaagtcagtgccctaactcggcacccatatattatatttcctaatcaggcaagtcgatg

SEQ ID NO: 389665 - DNA, 670 bp, Cannabis indica
aaaaagtaaccagtttaaaataatgcgaattggaacggatgaacaacatagtgacaagagaaccatgaatttaagccaaattttttttttttaaaaaaaaagttggttaagacattggtatgaatgtacattattctccaatataaggaaattgtcatgtatactgtgtttttatttttatgttttttttttagatttttttcatttaaaaaaaaaagggttatgttatttttatacaaataaataaaaatttaattataaaagtataaatgtaaaaactcaaaaaataatatatgtatatagataaatgataaaataaagagctaaaaaaataatccagttttctttcacagtgacagaaaaaaaaaaagacttgtcagttgtcaccaaagtataaataagagaagtatgagagatatttcgactaaagctcacttcccaaatggtctatttcgccaaaagaacccatataaatatgagaatatttatataatataaggtacaatttttttgtaaaatatttatatttttacgttcaaagactatttttttttatatttttacgattttttaaaatataacacgaaaacaacataaaatcaacaaaaaaacaatataaaagtaatatgaaaataacatcaaaataacaacaaaaaaacaacaaaaaata

SEQ ID NO: 389666 - DNA, 941 bp, Cannabis indica
ctttcaagctttttctttcttttgagcggtttatcaatgtttattgtcacacgtactctgaggtaatctctccaaacaccaatgaaattgttcggatccgatttcacaaaagtgcctaagtaattaccaaggtcacgagccactctatccgacataaaacccgcagtcaaattatgaatttggacccagaagtccaacttgttgagaatgattgatcttgggttctcgccttgttttagtctctcaaaaatcaaaggtactctgtcaaaagtccaagggctcccttccatgactcttcctatatccacttcatggtagaattggaacaaatacaaattatgttccagttctttgacatacattccacgcccggttgccacaaaactgccatcttgttctgcatagcttggaaatcaattggtcttttcgtaagaaaacggccaactaagcaccatctatcgtcaatatccgatagatcatcttcaccctcaccataaaggaggccaacatcctcctcctcttccaaattaaaacctttacatactgttctaccaatgtaggaccatcacgattcacattatccatagtaaccgacaaaaagggcaaaaaacaacaaaaagacccagcacagaatcaacaccaagaaagacaaaccttcaagaacaccaactctggacaaaccttaccatgtcaaaagacaagacattataagtagtatttttagtgagacttgagatagaactatccaattcttactcacaattgttaaagaaaaatcttatttaattgggcataataattgacatatatacttaaaaaattaaatgattagataataatcaattttatattcattcataataatgtcgtctctccaataaatatatatttatatatatatttatatatataacatctatctatactctataataagaata

SEQ ID NO: 389667 - DNA, 636 bp, Cannabis indica
ttaacacaaatttaaaatctaactgaaccaatggctggtcgaacttaatgataaatctattgtgaaccattaattgtgatataaattacaaaatataaatttaatataatattaattaatgataataagaatattaacaacttcagaatgtcctaaataatatttaacaaccttttaattatgttattaatacttgacattaattttttaagtgttattaataatgtctaatgtcattttttcaaatgtcatctaacctaattttttacaacattaaaatgaaaatgtcataaatattgtgtcgtaaaaaatattttttgatgtagtgaaataattatgctatagggaagaaaaaaaaatacactaataattttaaaccaacttacatttatttataaacttatataacagtagtactaagcaaacataaatctacaattaggacacttcttaagcctacagtttaatatattttgcatacactctgggtgaaacacatgaccgcaagggaattttcttacggtatctccctcttcgtattcacctaggcatattggacattcttctacttcagttgttgcattttctccatacgaatacttgtcttcaggaaatgcatctattgtaagcacgggt

SEQ ID NO: 389668 - DNA, 1747 bp, Cannabis indica
tctttcatagcttcaacttctttctttgttttggggcattattctttggatagagtatactggcttgttatatattgcttaacaacctttgcatccttcataaagaacttgtctatgattttctcaatgtaatcaatgtcgaaagggctacgtgactcgagagcgaacatgaaaaaggcatggaggagaatattgaaaaatatggagagaaagaagcgactaggagatcacgtacagatgtggtcacaccgaaagtgtgggcagaggttatcacacactcgaaagacccaaaacaataggtataaaatgaaagtagtaaaactaaatatccattaacttataattttttgctctttttgctaacaataaatttactttgaattacaggcaagagctgaacaatatgcaaaaaaccgtggatagatgaagattcaaggtggatagagtctaataccatagtcggtcacatcttcagcggggtatgatgttgtcagttgatttgtttaaaaattaatattttttcaataatatacttttaatttttttattgtataaaaataggctcatcttgagacgagggaacttcccaatgtcgtggacagttttaaaaagttccacgacaagaacaacaaattgcgcgatgagcacacacaataactgcatgcatgtgagtaattttatatctttattacactcgttctatatttaattactattcaactctaatagcttgttcaaattatttgtaggtcaaaatagttgagattccagaaattcaaccaacgccgaccaatgtccctcaacaatacaatatcgacccccacccaattcccgcagacatgcctattatgacacaggtgatgggtgagaggtcacgccacttgaggggactaggccagttaccgaggctttgggcaggggccaagagggcaactcccaatttaggttcctttggccaggttaggtcaggtaagggcggggccaagagggaaactcccaagtcaggtccctctggccaatctactgttactcaggaggaatatgaggccctgaagcgaagggtgaaagagcaagaagcaggaaatgagtgtcagaaataaatgatacagactcagaatgaaatcctaaacacgtttcagcaaaaatgatgcatctagctagcacagttctaggattcaacattcccccgatggctccaattccaccatttcggtctcctaacgctaggtcttctttacaggctgtcccttatgggtgtgcagaaagtcattcaatctaattacaaccgacatatccaatcccaaccaatctaatagaattggatatctaatcataattggatcgaatcgaatgtaaattttaaaaatctaatcgaatcggatcggttgttggatcggacatccgatctaatggataaccgaccaaaccgatccaattatcatccaatggtgatcatccaattatatttatatatttttaaagtacatttataattttatatatttaatatattttattttaaaatatatattaattgatttaatatacatttaacacatgagattaaagaaaaaaaacttaaatttaaaatattaattctcatcttcctaaacgccaataaaattgtcaatacgtattgaataaattttattttttgacagttttattgtgagatcatgagaattaggttggactaaactattatatatatatatatatatatgttagattattaagttttaaatta

SEQ ID NO: 389669 - DNA, 1237 bp, Cannabis indica
agctagatatgagtaaggctttcaatcatgttgaatgggcatatattgcagctatgatggaaaaaatggggtttgaagaacgatggatatcactcattatgaaatgcctttcttcaacaagtttttctttttctttaaatggtgaaattgttgggaatgtcattccagggagaggactgagatagggcagtccattatcactctacttatttttgatatgttatgaaggattatctagcttattgaatcatgaggaagctattggtaatcttgaagtacttcgtctcacaagacatgccccattgatatcacaccttttatttgcatatgacaacctcttgttttgtcatgctacaaacaaatcagccttggctatacagagagttcttcaaacttatcactgaacatcaggtcaacttctcaacactcaaaaatttgtcattgaacatcaggtcaacttctcaacactcaaaaatttgtcatgtccttctcacccaatattgaagaagctatttaaatgtttttccatcaaacattgaacatgtctataagtgattgtcatgaaagatatcttagacttcctgcatactcttctagagaaaatacataaatgttcagtaacatcaaagaaaaaatttggaaattgctcaatgtttgaaaggaaaaattattctccattggaggagaagaagtgctcttgaaagtcgttgtccaatcgatacttacatatgctatgagttgtttcacaatttcaaaaaaattctgtaactaacttgatgttgggttttgtaccctaaataaaaccaatttcaatatatcagatttactaattaataaaatatcagaaatcattttatgttgcatggttcacatgattgctttcatggttatatgtttaatgtataaattctattaaatcaaaaacatatagttattcatgattatagtgatgtcaacacaatagaatataatcatcattatatatttcaaagtttatgacccatggtttgttagtacactgaactgacatgataatcagcgatagattatgtccttttcagggtattggcaaagtatgctaggattagatgtatggagtatacatcggactggaccaatattaaacttagataatatatcataaacttaccgttgtatctatctaagtcaatataagttagttgatcttaggtcaataaatcttaatcttgatatggttaggttcgatctcaattgt

SEQ ID NO: 389670 - DNA, 836 bp, Cannabis indica
ctggattcttggagcttgatggtaacacactctcagaggagggtttatatctccttgctatatgggaatgaccaattgtccttgagccagcgttggtcttgcgtaaatgattggaatcctcacccactcatgcaggagcccattttgatgaggttttccatctcatctttcaggtatccacactcgttggtggtatgtccaatatcgttgtgggattcacatctcttacaaggatatttcttatgcatgccccccctgtacaatggtgagagcttccggtagtgaactgagttgcacataaccttgcagatattctttcttgagttaataaaattagtatacttagtatactggggctcgtatccttttcttacttttttcaaagcctcgctccgggcttgactttttccattcatcttattcaatgactggattaatcctgcctctaaaacttccatttgtttgtttgcctgcgtctatttaggagcatcactgtattcagtctgtgctattttaaaattggaaaactcatttgcggaagtgcataccctggggtagcgggtttgtaaatggttgaagttttgtattgggttccaaaagggactataaacaaaaccagtagttatggcgcgggcatgtaatttctaacattgagcgacgacactagagccactccaaaaactctagtacatggttcctctaaactaatgaagccttgggcccttgtcaagaaatctgacagtgtgtcgaacctttgtgtttgcaatttattccagaataaagaccctgctgcaatccctaactgtagggccacaaactattgggttttatgccct

SEQ ID NO: 389671 - DNA, 2483 bp, Cannabis indica
aaattaaataattaattaactaattgtatttagtttgttatataaatgtatatggctaaagttttttataaaattaaaaataaatcagtaaccattattttaatattagatttatcatgaatataaacatacaaaataattaactatcacatatgttacttaaagaaaattgataatatttttttttttttgacaaaatgttattaaatggagatatttttattgttattttacttttttagtattttatttttatttttactaattaattatggagaaaaattaaaaaaaaaagtaaagaacaacacaatttagagaatgctatatcaattaccttaataaaattattgtcaacgtggattttcgttaataatgaactttttttgtaataaattaagcactgatatgtataggaaagttgataagtataataattataataatgacactaagaattttacgtggttttgcagttaaaatctgcatattccacgagtttattttattcaagataattctgagtgttcgctacaatattacaattaatgatctccttctctcaaagtttttccgtccctttctctgtagaatctgttcctatttataggaatataggttggcagttattcacatttaaatttgaattatataactgtttcatgaaacgtgggcttgatcacgtttcatttaaacacgtgtagataacaattgataaacgcacaaccacttatcattcctatctttaaggcggttaacgctgacgtgggtagaggcatctcgctttgcatatagatgaccaataataacttggtttaatcatatgccttccaacaatggcatgagctctagtgtactgagcaaacttaagaatcgctctttgaccataaggcctcacagactggacaatcgtgtcctacatgtttccaagttgttacgcttattattataatgtggaaaatatgctaactgttaaacaaccaattcgcctcgtcaatattctctgatgtatagcgagatagacgtctcactatagactgtccgagtttgattcgaataactttacttataaacgagtcttattcttgggattgtgtattccaaagtaggttggtgcctcgtcaatataggaattagtagtttgagtatccttgtctctcctaagactatacagtcagcgagctatgaataaactctattaattctatatttaatgagttatttcatttttcattaaatgatataatcattattatatctcagtcagggaggctgcaaactcccacatctgcgcgcgcatcatgctgcgtgcagccttcctgggctgcacgtacagccacccaccaaacccgatttttgtgggatttatttcagtagaccattctagttaagatttcaatttagaattaccttcagaatctaccacaacaggaggagaccatcttgaaagaaccatcctccatgctttctcatcttgagacttgataaaagccctcattctaactttccaatatggataattagaatcattgagcaacggtggacaagaaatggaacttccttctacaaaaaatgacatattgcacaaaaacgcacaaaaatgttaaaggaccacactaagagtttggtgtcctgctttgatatcaattgaaaaaccgggtttttacaaaagataataaatttttaaacaataacagtaaaacacaactacaacagtctgcagcagcagaatgtaattctgccactgcagaacacagctttgcagaaataaaccagattcagaaataaaataccagaattaaaataccagcagaaaataaaatcacttgacacaagagaattgtacatggtattagtgttctttcgaacactcccagtccatggggccacacctagagaaataaattaattagtaaagtctcaaataattacaaagacaattgacttaaacaagtttagactccccctaaacctttgccgcaatcctttgtaattcacttcacgactaatttctaaaccatcatcaaacaacgaactcccttcatctttgatgtgtgaatgcatacttcctcctgaagtaaggctcgtataagtcttctcccgaagacctttctcttgttcaatcaagttgttcaaaccgaccctaagaccagtataagaaaaaaatacataagtactaaaatctacctgaaccactaggtttttacaaaaagaactctctcgtcacaaaagaaaaatatgcaaaaaaaaaataaaaaataaaagctagaagagttgaaccgatgggttgctctctaggttctatttatagaacataggaaccctagagacagccacaaaatcgattccacaactgtacaaactttcctaaacaaaacctgatttgcaacatcagaatcagatttctgcagcagcaaaccagaccaggaagaaaacttgccaaataggtgctcgatcatgaacatggaatttatacctgccaaaaa

SEQ ID NO: 389672 - DNA, 1641 bp, Cannabis indica
taatgttttttgaatgggaagttctatttgcatggtatgaaataataagtacattataataatttaaaaaaataaacttaaattaatttataaaattcactcttaatattttcttacaaatttttctcacattattttgtgttaatgtcaatatttatgtaatttttttattttctaatatttaatatttatttttttattggtatattttttaagaatatgagttgaaatataaaaattaagaaaaaaactaatataattaaagatatatattttatataaaatataaattattaaaatgaggtgtatttataaattttttgggtacaaataaaattttccttttagaatagaagggtggtcattttgtgtgatgcgaataaggtagcatatgcattggcaaaatctgttactagtttcattaaagttagtatttggacagatacttatcctagatttttgaatactttagtagatttgagtaatttataaaaatagttccttcttttagaaaaagaattgaagggtagttttctaattttatacattttaaaaattatatattttttccaaagtattggatcttatggtgttggaatggtagctcgggatagtaatggtcagttgattgaagcttttactgctctacgggtagggaatgttcaaccggctactgttgaagcttttgggattaaggaagctttgagttggatcaagggtaaaaattggtctaatgttattgttgaaaccgattcccttgtgtcagtccaagcactttcaagtttagtttttatgccttcagtttttggtttgttaatttctgattgtaaacgtttgttaaattgtttgtgtgatgtgtctgtttcttttgtgtcgcgatctgctaacaaaaccgctcattgtcttactcgcggttcttgttattggtctgattgcatctttaatgtcagcaatgtccctagtgctgtacattcctctataatagctgatttggctattataagttaatgaagttcaccttctattcaaaaaaaaaaattatatattttcggataaatagaaaagaataattgatatttgatataatgtactatctgttacattttactaaatgaatgtgtatatatacatataatatattatatattcatatttgaaattataatttttggaatgcatacataagtataaaagcttcgaaagactttctgcaaagcaaaatattgtactatcttctgagtgaaagtgtggctttaataaagtatgcccaccacaaccacaactactacctagcaatttattttttcttcttcttaatttttattttattattaaaatcttcttcttcttcttaattctaaatcaacaatctagctagctaattctatataaaaaaaagtatatttctataagagatatggagatttgtgggcatgtccttggccattgctataatataacatctaactattgtaataatttatctgtttataaattaaaaaaaagaaaataataaaagaagtagggcctagtaaatagttacaattaaaataaattagatgatggtcactgtgtcaactataaactaccatatatacatatactgccagcacaaactatggacttaaaaccagctttaac

SEQ ID NO: 389673 - DNA, 1328 bp, Cannabis indica
agagagagagagatgggatttgattcaattcttttcttttgaagacttttgtttgttctctcttgttagcagatttttttttttcatttggtttgcaagcatcaggattattttctttttattgttgctttcttgtagatttgagtttagtggttatcattatcaagatgtaaaataattgtaggaagatgagattattcaaaagaacaccaacaaagatgatattcaacaaaatctctttatcgcccacaaagcaaattatctcaattctttttactttgttttttattgaaaatccttcatgtttttttactgagaaataatgatccatatttattgggcacactagtgtacctactagaatcctttgcaacatttctataataaaatctagccccaagtttttaatattctgccaataaacatactctaaaatggatctattactaagtctggacatgaaagagtcgctccgaaaaggagtaaaaaacacaaatagagacagaactagatatttctttttaattatagttttaattacgtgaaccaatcatataataatttaggggtttcatggatacaccccattttaacaaagttctcatccactacattagggcccataataacccaccgttcatttgttacctgctccaattataatcttaaatattagttgtactgatgcacccgttttaagggtgtctattacagaatttttcaaagtactttattattattatttaatacttaaataaataaatattttatttaattaaatatttaatattcttttattggttataattattataccggtacaaaaataaaaagcctaaaaaaatgaataattattacaaccttccgaaccaacactcaaatcctcttgtttaattatattctccggcataatattatcaattctatatttaacttttctttgcacactctgtacaattgaatcctccatagccactttttgatccgaaagagcttcattacaagtatgtcatagagcataaatcaaacccaccattgttgctgcccacacttgtcttcgaaacttgctcgttcttgacttctcaatctttctaaaaagcataagaaaatcgatacattgtaccctccaatccaaccactacacttcaaatcatgaagacaattgacacttgggcaacaatcaaagaacaagtgatgaattgtgtctgttgtggacattgtcccacatagaataaatggtaaagaattgagagtcatatataagaattgagtcattaaaaaaaatattgggcattaaaaaaaaactatattgggccctttattttttt

SEQ ID NO: 389674 - DNA, 937 bp, Cannabis indica
aacttattgtgtttattcattatgacattgctaattatactattttttttttcatatatatagacacagccacccaccaagaaactttagaagcaacccgtgaagagaagcagaaaaatctctgaagatttacttgctcctccaacacagcctccaaaacaccttgaaggccgagtaagccaacaggccatggtcgttatgtccaaccacgacaaactagctcaatcattatattctagaactctgtcaaaaggtggtcaaagtcgtccataatctaattttaggttgcttatgatctatttgggatcgaagatgactatatttggcttgttaaaaacgacattcatgaattgtgcaccatttaatacttgggagcccaaccaataagagttttgtgcaagtatgatttctaactcttaataataaacttgataatgttcttttgacagtgacgattattaattatgaatatttattgggcacatgaaacaaagactattggacattaatgggctgaattgagtatatgaatttctagattcgggtgcgattgccaccgatgcaagggttgatagtaaccgttatcaagcactagtcactcgtatgactagaatgactaactcaaataaatggcttattgccccatataataatcagtatatgtagatttaaaatgaataatttcagtatttataactcttcatatttatctattattatgtatatattaacaattttacacatatttattcatacaggaaaatatttcactgaatgcttgtactcatccaaccaagtacgcggatggtggcatacttgaattcaggcaatgacgacataccagatgatttaaaattcattatattcacgtaagttctatatccaacatctcaatatgtaagtgtgtcctatacttataaatttatatatgctaact

SEQ ID NO: 389675 - DNA, 591 bp, Cannabis indica
aaaagaaaagaaaaaatggaagaactatggagaataatcctctacattagatatgctttataataaaactataatttataaaagttttagtacacattctttctccacatatgcctttatttcatccttcttttttctctcaatttttttaataactaaacaaacaatattattaaattttttttgaggaaaaagttggtttctttagtatcaaaagacaattgaacaaaagaataagagaataagttggagtaggagcattctttccctgaatctgtttagaaccattggtcttcagtggtggcctattgggagtttgagaagttgtcttctcaactttggaggcaatggcctggctttgacttttgtttgtagcttctcctgtgtctttttgcagctctttctttcagtcctcaagctgaaaagagtggatgaaaatggagatcttgttttgtttctgctacgtaccattcaaaaactttgaacaatctgtagggagcatgtttgaagttcttggaagaagtggcacccattctagaattctcaatctttctaaggatgactgatgaggttattctattaagctctcta

SEQ ID NO: 389676 - DNA, 925 bp, Cannabis indica
actatttagttttttttttttaggaaaaaggtgctctatgcacttaagattatataaatgttgtgtgtcttgctatttcaaattttagccatttttaatttttttaaaaaaaaaagttcaaattctttgagttctaaatccatgattattaaaaggtcatatctgcaggcattaaatatatgtatcgatcatcaatagatatggggatggtaccctataatattttataaaatatttctcaagtttttttttttttaatggttacaaataataatagatcgatatgggaggacaaaagaaaccccacaaagttatgtacttttaggaagctttcataaatgttataatcaattaataaaagtcgaaaaacctttcaataaattattagtagctatatatatctgcaatactaaaatgtatacatatatatgaatgaattgaagtagagcataaatagtaaaaataattggaacttgatcatattattattattattattatatagtagtggtagtattattatttgtatttttttcatagcattatttatgatgtcttggttttatctcaataataattggatcctaggtcagaaaccacatggcaattgattaatatgaataatattcttgtaaaaaagattattaggattctcttctctcttattaggaccacttagatcatatgaagctgacagtctaaccaagaacaattccatcatataaatacatatatatacacctttctataacacaaatttattaattaaaattgatatagtaatatttaacaagagcccaaagcaaaaaaaagaatatattagtaattagataaatgttatatttagtctaatttaatataaaaataatagaaaacatatatttttgtagatagaaagagattttttaaaatatgtgcaataaat

SEQ ID NO: 389677 - DNA, 740 bp, Cannabis indica
cttaatttttttaacgttttttttttttaatttactagttttgtagcgctaattgcaattacgagtttttatacgattttttgttacaatttaagttgcagcgctaattgcaatagaaatttctatgtaaaatttataaaatgcacaaacaaaactattttaaagtagtaaaaaataaaaaaaaacctaaaaaaaaaaacaattcgttttttttgtttttttggctattaacaaaatatataccatgttttaatttcataattttcctaaaataaaatagtgtatttcttgtcttttttagtttcaaattagagagagattggaaatcaaaactatttggaagtgttatttaatatattatttgacactcaaagtcaataatgatgagaattttaaattgtgatttgttaaaaatatgatgttgtttaagaaaaattatatcaactccttaagacacggatgaacatgggcaagtggggacttgagtctctaataaaataatacttatatttattttaagactatgataaatacacactcattttacatactattaatttacacaattgacaatatataccatgtgatatgcatcttagactaattaatttttttagggtaaaactataacacatggtaatgtgtaatttgagtgtatataattgttgaccgaggttttcggcaactaatgaaatatgaatatgataatgagctgtaagaaagcgagatgaagacttttt

SEQ ID NO: 389678 - DNA, 694 bp, Cannabis indica
ttttttttttttttgtaaagttgagaatgagtcctcttcttctacggctttgtttcttcttttacgccctaaatagaatactgcaatgtataatttatgattatttaatgatattttttttaaggtaatatttatctaccgagatttaaatagaatagaattgaaattttttattttagttatatattttcattcattctaattaaatactatttaatgaagtatttgttatgtgagtttgagtttgaaagagtacacttagaaagaatataaaactcatgtgcatgaggagattaaggttatcattgtgttaatttgaaaaataagaacttacttggaaatataaatttcttgtcatttaaatttaattttaattttatatattatacttacttaaactaataataatattgttcagagagttgaataatgccatttaccatttctattgtatatactgtcactcgcttccaaactaattgtactctcttttctctaatggcacgtttgatttagtgtaataagaattataatggaatcattattactattacattgtttgcttttatttttaaacttatgtaatggctttacattataatggtcattacactatgcattttaattcccattacatcataaaactaatgtaataatgattacattgttagaaaatatctcttttgcccctttt

SEQ ID NO: 389679 - DNA, 2871 bp, Cannabis indica
tagtcccccgaaaaagaaaccccagactagaattcaacagctttatcatcaattgggaacacaataaaaaccaaaccccagaagtcccaaaaatacagtaaaaatccactaaacctacaagtttaccccataaaaaataggtaataagaaaaaacaaatccaaaaattacacaaactgaacgagtagatacgaaaataaaacatgatttctgacccattttcctgagtttttgcacaccttgaaagaagcgactggattgccgagaggatcaaggggttgtgagaggccaagctcttgggcgcagaaatgggaccaagaatgtcatcggaggtggatgtcctcaatttcttgctgacacaagaagttctagcggtgtcttcagctcctaagttgcttaggattatgtttaagctcgagatcacccaacgtgtcgaaccccatgatttctttctccctgattttctggtaagaaatctgctatgctatgtaatcgtcccaaagaaagattattaatctcctatcctatgtatgactctttctcgtgtgacacttttcatccctggtaaagcatattttccaaactattgacacttttctggtgtagcacagtcggtgttactagacaagggaaatttgatataccttgcttaaatatggtacaagatcttttaatgcaccacctattgaacacattaatccaattatacccctttattagtttttttttttttttgtagaaaatacctctctatagttaaaaaccaatttttcattttgtttcaacaatctgtctctcttctctctctcggaagaccacatcacacccacacatgcaccaccctttgtttgagctcccctcgtcacccacacacaccgaccttgcaccaagtgaaccattgaaactgctatttaggacctaaatccttgcaaaaaataatagatatgcaatctttttgctaattattgttaggtttagttgtatttagtttgatatgtatagatctacataaataatgaatttatagagtacctgctttgaggttttaaatacctcgaagcaaccatcatgttgagcgagaaagaagacctcctagtaaaaatctccaaataccaggcactggtagtagtcagcaagtttcttctcgtagtattgtaccatcagattttgaagtttatacaaaattcaaatctcttatgtagattaaggaaaacatagaagaaaataatatttattcaacttctcttagtggtacgccttcaggaaaaatacaaactgacaagttgtacacaaacaaggctgaattgaaacaagtagtggaaaggtttgcattgaaattgaattttaagttcatagtgaggatgtttggcacagatgtgttttacgcaacttgtaaggatccaaattgcaaatggagattgaggaagaggaagaaggcacgttgtaacatgtttgaggttactgtgttccacaacgagcacacatgtaacctagattctagacatgctaataaccgtcaaacaacatcttgggttgttggccaccttatttagggaaagtacacattagatggaactaattacaaggtaaaagacatacagaggcaaaaggtttctaatgatgataaatcgtatccatggcatctacgtttaggccatattggcctagacagaataaaccaattaataaaggatagtcttttgagagaactaaaaattaggactcttccggtatatgaatcttgtctagaaggcaagatggttaaaagaccttcatttgtgaaagcaatagagccaaagaacaacttttgcttattcacactgatgtttatggagcatttaatattcaagctcgaggtggttatgaatactttgtcacttttattgatgattattctagtgactacttacattttaaatatagtaccatcgaaaagcataagcaacactccaatagaattatggaatgggacaaaacccattttaaaatatttttatatttggggttatcctgctcatgttcttaaatccaagaatgggaaacttgatcccagaactgaagtgtgtatgtttgtaagatatccagaggaaactcaaggtgcatacttctataatcatcaagacaacaaagtatttgtatcaacaaatgctatttttattgaacataactatatgaaaagtcacaaaccccgcaaccaagtggttatcgaggaaatcagaaataagcatatttctgaaccatcaacttcagtaccattagttgaatgaccaataaagtcaccactattccaaaaaaagaaaccccagtacatcatcacaatgggagggttatgagacaacatgtccgctatgaatatgaagcacatgttcttgtctctaacacaaacaatgacgatatattgacttataaagaagtaatggaagaccttgacttagacaaatggaacaatgtcatggatcaagaattggattctgtgcgcaccaacaaagtctaggaatataaaatttcacccgaggatgttacactcataaagtgtaagtggatttttaagaagaagagaaatattgaagggaaggtagagacctttaaagttaggattgaatccaaaggctacacacagggagaaggggtcgacagtgacaaaaccttctctcatgtggaaagacttaaatccatttggattctttttttaatagctaccgcttatgattataagtaggagtgtcgatggagcgggtcggatctaatccagctatgatccgaatcatgtaatgttctgtcccgtcccgctccgatagactagttacttagattggattagatcagacccgccttatacggatcgaattcgatccgacccaactcttttttt

SEQ ID NO: 389680 - DNA, 2071 bp, Cannabis indica
catgcgagtacgggtagcttttagatataactgtttcattgaagcgtaggatgacgctgggacgcaccacaaggggtggaaaggttttctggggccatattcaaatatgagtttctctacattttgctttatatgggggattcacggccactttgagaaattttgtccaagacggtatgatacaccccaaaatcaaatcgttcagccttatgggacatggatgagagcccaaccacgccgtagaaataatctcatcggagcctagtggttgagaaatggggatgaagatgaattgctgcaatctaatcagctaaccagcagtgtgaacagaccaattattatcaattagctcactgagattgaggagttaagtggaggaaatcgtggtgcatcaaatttacaactggctaataatagtaagtcaaagggatttatgggaactgaggaaattatgggaaatattggcggcaagtatttcaactcagaggaaactattcacgtggatgctttggaggaggaattagaggagaatttgattgttgattctaaaccgtgacgtactaaacctaggactgctattgggcctcatgttgtggctcaatctaatttaagcccatctatttcttgtgggcttaattttgaaattatggaagaagatggtagtatttttgttgtgcatggaaataactatttggtgggcccacaaccatgagtactaagctagaattagcgtgggcttgggaacccatgggtttttaagtccttgtgaatcttgtgatctaaaagaaacccaatttttaattctttgtgaaacttttaagtcatggtgatgttttggaaaggctacgtgtgaagttcagcttttaaggcctctaatttgtggatgcaaggggtcatagtgggggtattaccatgctttagaagaatagtgttgaagcccatttgctaaacttttcagttaatttctttgacattcaaattactgaatcttgttcaatcccatggagactaacaggcctttatggtgagcccaaacgagctttacgccaccaaacatggaaccttattcgaaactctagaaataaacatcaacactcccttggtgtattatagggaatttgaataacgtttactagtcaggcggataagtgaggtgataaccactacccttaagcgttagtcaatagctttaactaaatgttcattgattgcaatcttgtggatctcaatcttcttggctatccgtttacatgggagagaggtcgaggtacatcaaaatgagaagtccatcttgactgagccttggtaagccattattggtcctgctcagttaactaatctcaaaatttctacctcagaccactgctcgttattgcttcagcctactgtccagaatttctttgttccagtttgtcaatttaggttcaaaaatacctagctgcgtgagcctttagtcttccaggtggtatgggatagttgggtgctccatgctgactataatatcatggcaaaaaatgttattgtggcgagaatctaacagcttggggtcgtgattatacgggtaatttcaaggaacgaatttctaaatgtaaaaaagaaataagacagtgaaagaaaggtcgtgatctatattcaattcaaaagtttcgtgagcagagaataagttaagtgaaattttgaatcaacgtgaagtcttttggcatcaaaggtctaaacaactttggcttcgcgtgggtgaccaaaatagcaagttctttcatgccaaggcgactgcatgtaagaaacataacacaatacaaagccttcaagataactcagatacttgggttgattgggactcgggtctactgtcattgtgaattaatatttccagaatttgttttcttctttgaactctaattgtaatgaggttgttatgggaattgaaccttcaactactgatgctgaaatgaatctcttctttacccaattaccgatgaagaagttaagaaagcttttttttggatgcatccagacaagtctccgggaccagacggaatgacaccgagtttctgttagaattattttacca

SEQ ID NO: 389681 - DNA, 517 bp, Cannabis indica
aatataatttatgtaatatatattataaattttggtaaaaatatattatttgggtaggttagaatgatattcaacccacttaatatattcattaggtagtttaaatttttttgttgggttagtcaggttgtattttttgctgtttattcagtttagtttggaggatttatttgggtcgggtggtttgtaaatttttttgaatactcctaaattttagcgatgtattttaaaggtaggatagagaaactaatatgagtggtgttacccattgcacctgtggcatctcatattaactctcatgcatatgttaatattaactcatattagaccatctccaatgggagatgtaaaaattgtgctataattagcacaaaaagtagttttgtcataaatttacatcaaattttagctttgtgctccaatgcacaattacaaaatttttatgtaaaatttaatatctaattaatgttttattaaaaaaaaatctaataactttataatcaattttattattatt

SEQ ID NO: 389682 - DNA, 1247 bp, Cannabis indica
ctttttttttttatgattttggatgtgggtttggtttggggtttcacgatttggatgtgggtttgggatttcacaatatgtgatctggtttcacgatattgtcttcggtggggtttcgcaatttcgcgatggttctggtctgggtttcgtgttttgtcggaggtggtggttttgttgggctagccgggtttcgttgatgggtccggtggggtttcgttggcagtgggtttggggagttagagaaagagagagaaacgggagagttagagggagagtaggggtttgaaatggggagggtattgttgggaataaagatttatggagtgtaaaatttttacattattttcagatgtatataaaaacaccttatgctttttttagcatataatgtcaaatttgtataaaatatctaggcattttaaatgtatttttaaagtttaatgtatctaatcagtaaaaaataataatatatctttaaaaatatttattttatcatttttcttcactcataatttaaaaaataaaaataataattacaaatgtcaatttagaaattgaataattatggttatgatatctataaaatgtctagactaatttaaaattttataattatttaaatttcttataagataattatcatattatatttaaaataaatatatgtaatatgataatatataatcttataaattaaagaataagtaaaattaataaataattaaatttaaaaaaaaactataataagaaatttgtaaataataattttttaaatttaaagtttcctaacatgtaaaattaatttaaattaataataaagttaataaaaattaattttaatttgataatatgatttatatttcaaaattaagattctaaataaaaatctaccaaaatttaaattttatttcattaaaaaataatttttaaaacttaaaataatgaaaaataatagaaaattgggcacatatttggcgaaactctaattctaattttttttaaatttcaaaaaaacatatgttttttaattttaatctatattaggttccgtataagaggataatttgcttaagttttcaccaactttttaaataaaatcattcagaacaaaaatcaaattattttttgtaaaaaatttcataatattacaataaataatcaaacatcacataaactgacatgaacacatccaactcaatcaaatatcattttaaatctatattttatgaaaataaattattaccatg

SEQ ID NO: 389683 - DNA, 1299 bp, Cannabis indica
ctctctctctctctctattattagtttcttgaattttgtttaaagtgggtgttagaatagcattgtttatgcctatctattatccatgcttctgtggatttctcaagtattcattcatccattccttattgctggtcatttagaaatcacaaggtgcattttaatgataaatggcttgtaaattatatcaactgtccttaatccctattatagtccatgaaaacgacatctatacataaacttatttgtacttttttatatatttctttcttgcatgttttgataaaattacagcctagaagtcttctgcttgtcacttacctcagctaataattttgtatatgtgatacaggaattacttgttatccgcaagattcatccgtgtctcccatctttcaaggcagaatttactgcttctgtgccactaacacgcataagagatattgctcaccggaatgatattcctcatgatctcaaggttgttctttgcacagggcttggtgcttttaattgtaatgcagtggatagcttgctaatttcgagctcttatattgcagcaagagattaagcatacaatacaaaacaaacttcaccgcaatgctggtcctgaagatttggtttctacagaagcaatgcttgcaagaataacaaaaaatcagggagaatacaatgaagcatttgtagaacaattcaagatattccatcatgaactaaaagattttttcaatgctggaaggtttgcttcaatacacaaacacttaaatttgctttggttctggtttaatgtttgcagaatatattatcatctttcctgctttttggtaattgttttgttaataattatttggttaattataattttcttaatgataatgagaagaaataaaagttctaatgaaatttgttttacacaaaatgaaaagttagccacttgaatgaggtgatgattaaatgcatttcttgtgatagttcaccagtattgtctctgctattaccccgggcataagtttggtcctgccaccgtgctcttcttttgttgccttcagtgtctatctgatactacttgttgcgatctttactaattcaatgtttctgtaatcatttattgtattatttcctatacaaaactccagataacggaaataatttttattgggcaagccttgaaacatgttattcatgatttcgacggaagatgttttgtacaaataactgtagttcctgtaaaaaattaaatcaccctctttacgtttggttttgtagaaatagtgattcgaattgtgtgttgatttcatagaa

SEQ ID NO: 389684 - DNA, 1376 bp, Cannabis indica
tatactattaagacaaatcatgtggttttttctactgtaatattttgttggactagtcttcttgcacatattttaataattaatgtaaataattgaagcttaagaggtatattaaaaagtttgttattaattgacatgtaaagctctgtttatatatgtgttttgttgtattaggtctctcacattattattttggaggactaaattgatctggtattaatttgtcaattgttattgggtaagttttgatttgaacacagtctactcaattttgtttgttctttctgaattaacataggtttttgaaaaaatgacgtaactaatgttaccattgtagtaaggcttctgtagaggtaacttttaattttttggaggaaaaaaatcaaagaatgctctgtagaaatgcaattccaatcatagccattccttcctcttatcgaaaatccatcctcttatttgctcccctctccttggactctattttcattgtgttttgtgttcatatacttgagtggtgtatgaagctttttaagacttattctgttcttgcttttattctatcatatatagcagttatcttttttactttactaagatgctacttgaatgaacagggcatataattaataatgatgatatgtgtatatgtatatatataggaacaggctatgtcatataagagtggtggcaacataaacttgatcatgaatgaagatgtcaatagcagcagtggttcgaatctgaaagttgaacaaaacaataatgcatacttaacaagtaacgaaagctacaacaacagtactacatattatgatgcactcgaagaagatcaagtaacattaactcctcttccttacaattataataacagtgatgactcaatcttcttttctctgttggagtcacagtcacagccacaatgaagatcaattttgtagacttgttagatcatttatcactctctattttcatctcaattttgttagtcttaatgggttgaatgggttgaatgggtcaaatgaataatagccatcaaaatttataagtgtacgatcattgacaaactattttatataatgcatttgataagtaaaatgagagccccttgaattaatgtttatcatctttttgtattaatatttatgcacttttgaaagtaaaaatgaaaatgtgatcctcatttggataaacttttgggtgcttggaacttatattgttatatttaattgtatttgtatataattaatataaattataatttataatatataaaatttgaattaaaataattaaatattatttttttagaaaaatatttaatatagtggcactttttgtgtgttattatatctctaaatatattaataaaatataaa

SEQ ID NO: 389685 - DNA, 2587 bp, Cannabis indica
gtaaaaatttcaattgtattgttgcttacctatctccaggaccattatttttttattaagcccataattatatagcgaaacgacccaacacaaaagtcccaatagcattatctcgttcttatcctctcctaaatttttcatcgaacttaatattcacacttaagctcgaaatcatataaacaataggagtgtagaagataccaatgggtgcgccaaaagcatccggtggcaatgtatcaaagtccatccccagaataggcccatcttctctcagtggctcccctaactgcgcctccacaaaggcaatagctcgaagttcggcaatagtctgctgtgattcataatacctctttgccatcacctgcatttcgctgcctccaggtctagaaccacccgcccaatgccgaggagcacctctccgaggctctgcaacatgcccgtgcctcgaacccgacccaggggcgtgttcattgcccaagccacccactgctacttcatcctccccagcacggcgagcaggtgaggactcctgtccccgcagccgcttagccggcgtggccttcttgtcctttaacctcctgtgacaaaaccacatctgcaattgccgatcagaaagccccagttttacagatagctcagctcttagcgactccgacgggtacgcctccgctaaaaaagaaagcaaaataaagtaacttaaattcactccacatttgaactctcaaatatgaaaaataaaaatacagaacctaagagcacattctcacagaatcaaacacaaaatatttcagagaaaagcaaaacctgcataagttttttctagaatctccaattgcgaagccgtcttcatctttcgcttggtcttgttctctcctccctcaggcggcttcttcttctctcctgcttccgaaccagaaacctccattgcaagtagctcaggaaaataaaaaccttcacttatctgatctcaatcgcaagaaaacaaagcttcaatccctccttcactccagaactagggttcttccgcagtagtggccccttttcttttcgtgtgtatgacgagaaaagcaaaaaaagtaataaagagacgaatgaatgaatgcaaatgaaatgaatataaattgtaaaaatccagactttctctctctaatatcaacagcaaagacttttcataaaaaaaaacaatactctttctctctctacaaagaatcaaaaaaataaataaaacattaaattgaagagagagtgtctgcgagtttgcgtgattgattgagatgtgcggtgagatttgaaataataacaaataaatttcaaagcttaaaaaataagaaaaaaaaacaaaagcaggtggtggtggtggtgagtaactgagttgggtttgagttgagttttggaaaatcggtcgtgtagattttggttttgtttttggttttgattttggaattaaaggaaaataatatctacttctagtgctacgagtactattactagtaggaacaaatgaaagaacagtctctctctcactcatttctctttcttttttaaatttagattttgaatttgtttaaaaaataatttggtgaggagtgatggtaatattaatatgttttgtttggaagagaaaagaaaattaaaaacaaaaaaggaatgaattaaaacgagttttggttttgggtattgtattgtcagatatgtagatgcctttataaattttgggattgtgtgagagatgacatagaaagagagagagagacataatggttctgattgattgattcacaaatggttttgtggtttcaattcaagtggttagtttttctttttatatttatttaatattatatttctctccttatcctattttttatttgtttaggtgaaattgggataataaatccgcttccacttcagggttttggggtaatcttattctgtttcattgttgtcaaaatcccaaatttcctttctcggagcactatttttctttttctttcttccttaaaacgaatagagctcctctgctcatataactcacgttgcatccccacttgcctttatgcgcgtgtaaacacgtaccgtgttaaggaaataaatatttttttcttttattttttaaattttattacatgttttataatttaatggaagaggtttcaatggttatatttttaggaatatgattttgtcccgtgattgtacttttacggaatgcattccgtgatgtacgacagccgtcagatgagggacttatttgatctgacggctgagattgatctaggagtaattaggattaaaaagtagaaacgtaccctgacactcatttaatgtaccctgaaactcatctaatgtaccatggaatacattccgtgaaagtacatcacgagataaaatcgtgtccctatatttttattgtaaccatcatgatttacatttttttttaagccaattgaattactattaaatggttgtgattaatttggagattaaataaaaataaataataaataacttgtaacctgaaagtaacctaattatttatttccttataaaactttaattaagattaattatatttaaaattaaatta

SEQ ID NO: 389686 - DNA, 776 bp, Cannabis indica
aaaaaaattattaaattatttctaatcatgcattaaaatgttatttccttccatttcaaaatgttctcacaatgccatttgatcctgaaactccttggacacaaattttattattactgtttcttgaagaattggctgaatgtattaataccagaatgacactaatttggtattataattctcattaattgttacttgcccatggtatctaatgcctagacttatttatgtgtctgtgcatctcgtttttagggcatataatgaatctcttacaggtcttgcgacacagattgccttgttatccataggctttctgttactttttccctgtttatatttcttttttcaaataaaaataaccacaaaaaacctttttcttaccaaaaagctaatgatattaaagattgaattgaaattataacctgaatatgtttagttgcctaaatggagaagacaaggcccttgtagttatttgcattggctaaaaagaaaattaagcagtggaagtaatgaaatgaacattccaacacaaatgggttttattatgaagtgttattctaattactccttcgtggacaactgcaaaatatttttgcctccctcttacggtctgtcaaggaagctatgttttagtggacgtaggctaaaaattagtatacttttccaatcaatgagaagcaaatgataaacatacaaattcttgtaaaattgagaataagataagattttcattcggtatacatgccagtatcatatttatttctattttttttttt

SEQ ID NO: 389687 - DNA, 1245 bp, Cannabis indica
atctttgattattgagattagagtgatggttaaatgcttacagtgtatctatatcgtggaacatgtagagcgttctatatgactgagagtgcaattccaagttctttggttcaccttatcaattgcttgtctatgtgatttataaattcatctgaaacccttttcacatatacaaaatgtgttagaaacttgtatatggacaccaattatacaagtttctaacacattttgtcttactgctgaccttcgttcaccttggaactcagaaagagagctcaagaaattgtccaacttccctcaaacaagcagaacatctctctcctggctactgaagccaattttatcaagtacaagctatatctgtctgatcatgggcaaaggatcgagcaggcagtaggagagcctatgttagcctgggagggagaggttgtatctgaacaagaggttcagaggaagaagaagaagaggaaggctccccaaagtgaccaagtacctattgagtgagccattaggatcagggacggtctcgagaatgttgcttaatcttctgcccaagtggtaggaaagggaaaggccattgtggtcgagtaggaggagaagactcttccaatgaagatgccccttctttacttgtttgagatggtgcccctgtccacatgtagggtactttattttgttcttaaccttgttcgcacttgtttggttcatgcttgttctgacatcattgtttgtctcatgtgcagttatgtcttagaggatgctatatgcattaaagaagaggttgttggaatatattttaccaggatctagatttactaccatgtatgttatttaacatcctaaatatgaatatctaaaacaatgtaaataaacacatataaagtttaggaaaccttacattgggtgcagcggaatattaatggctcattccactcagatctctaacccttgtatccagtttgtagcagagtatcaccaagatctgagcccgaatgtccttctcttgattttggattcttcacagccttacaatgtgtgtgggaactcactctatcactcaaggcatgaaattatgaagaaggaaagagaagtggctggtttcgaaaatagaagggaagatggctcaggaaaaaaatttaactgaaggtgaaatttcatcatctttaagtgtgagccatcactatctatttataggcaaccatataggtttaggttaggatttattaggcattaaaataatgtaga

SEQ ID NO: 389688 - DNA, 516 bp, Cannabis indica
gttgttacagacggggcaaaccagagacacatccacacgcttcaatctcagctgactcatggttggaagacaaccttggcaggccttccacaccatgtttttcatcttccgaggtgatttcatcgcccagaattttttccaaaaagtagtagcagcagcaccatcttgatcgtcttccccattaatttcttgagcaagtctataggcacttttaactgtgtaccacccagaaatctcacccttccaagtaatattatctcggccatgaccatgctgaagaggaatggacagaatcagatgttgatcacgctcaagaaacaaatctgcaactatttcttcttcccaacccaagccatccatagccattaagttacaaactttggcacctataagagcaggatgtgaagaggaaacaaatgggttttgagtgtcagggagccacggttcaccaagaaccgaaatagaagtgccattaccaatggaccaacaaacgccatgagtcaaaagttgacgagc

SEQ ID NO: 389689 - DNA, 749 bp, Cannabis indica
atatatatatatggttgaaacaaaagcactaatgataatgggatgatgaaatctattccttgcttggagaacctagtcaaaagcaaaagacaaatacggttaaacaaaagtgaatgccaatttggattaatgtttttaggttttattttttactatttcatttacttaatttatttattttgtgtcctttcatgcaataatagtaactctaaaatatatagtcaaataggaaaaaaacaaacaactttttatgaagattctaccctatatatccaactttgatggagacaattttaatattgttaattaatttttattttgaactaattaattgctctatatatataatataaattttattagtgtagtgaaaaaaattgttggagccctccaaattgacctaacttttaaataatgacctcacactcaagcatcaatatctgagtgctttttcagttggtgcttatttttctcagttgctagagttccccaaacttttttcatttcttaaacatgttattcatattttcatgctctatatgatggtataatttattgttattgattattattttataaatttcaatcacacaatagcatttatttaattaataaagtttagtagctatgtgtaatataaaattctataaattattcacttctgggataaaacacaattttttttgaaaattactttatatattatttttttaaacttttttttaaaaaaaatttacgatttgagtttc

SEQ ID NO: 389690 - DNA, 1056 bp, Cannabis indica
tatatatgttgattcaaggtaaaatcttaatttggaagattttgtattgataattctcttcaacgggtttcacctaagattgaaagagagagagagagagagttcaatctagttttcctctgcttttccaatgataaccaataaatatcatttaattttaatgtttaaagttctcaacacataggctgcttattcacaacacaaataaattaaaaaaagttgtttattttatgatcaaagaccatatgtgtgagcaattgataggctttctcagagggatggtaactgtcccaaaataggtatgtggaagcatcattgcaactctgtttagtgaaagggttgcatagaatgctcacctctatattccctgtcccacaacaccccttattcgccacttcaagtcctgaaattaattaaacactttaagtaattaataatgtcataattactgttaatattctaacaatacatacattaatattagcaaagggcgtaccataagtagcagggttttggatgagagtaagcaatggattataaatatcaaggtagagaagtgttgcttgtggaagtttgttattgagtgaagtcaataaggaagagagcttggagttgaagagaattgctgcttggttgccttgctcattacatcctcttgatatgtctccactcagtgttctctgggatggcacacacccgattggaggtatactcactactcctattcttcttgctccttccttgtacagatcctatacatatgattaaagtcttactttcaatattgttatttattttttttaaaaaaaaaacaaacaaaattaactctataatctgtattagtacttaattatagatagttgttgctgttataatatttttttaaaaaataatgcaatagcgaatttgtagcaaaatctacaattgtatccctttaaaaaggatacacggatgcactctttaactgttttaacatctagaagaattttttaatctaatttcttttatattcgtgtacgttatagttattgttattgttgaatttaagaatttttg

SEQ ID NO: 389691 - DNA, 1762 bp, Cannabis indica
tattttctatggactagtatatactatttatgcatataaatgtatagatattacgtgtgtataggaaaattcagatattttaaggatgagtttgaaaaatatcttcaaaatgaaaatgtcgacttttatttatatattatccactcatgaaaattaatttgtacctaaaatttgatatatattagattatgatggtaatgtgactgagacagatcccatataaaattaaaaaaagcctataaaacgattcctttaatttcttcttcttctttattaattttctttttcttcaagatatatatatcccatatatgaaattaaaatttataaacatcaaaatcagctgagaagctttagagaaaaagaaaaaaaaaaaaggaggaattggtactttaataaagcaaactgaataatgtttattgttagattggttatcaaaaatatatatagtaaaggaataaataaaggattccaaacatgaccaatgatgaacatatagaataataattgtataattaaaagtattggaaattatatgttaaataaaagtaaaataaaaagacaaaaaaggattagtagtgccccatatattcggactattatatagctttgaacaactttatttatttctgttgataactttatatatatccaataaataaattgatgatcttctacgtggtcaagctacacttgccttcgtcactttatattaatttctttctttctttttaaaagattaaataataataataataataataataataataatatatcttgaagttgccagctgcatataatgcatagtgatacagataggatatttttttttcctttaaaataatgactcttattattatctaaattaaatgtcactacatgaaaattatcttcaagctaccaaattataccaaagtttattggtcgtaaataaatagcattttgctaccaaaatatagtagcaaattctaaactattaaaaccaaatatttttactaccaaaatatatttagtataggcaaaattttattaactacttattataataattttgtttagctatatatatataccaatttaactactaatttttttctctatagcaaaatatcttttattttaactacaaatgttatttggctagagtcttatttgatttttatggttgaatgctaattgagattgcagtctacttcataaggttgttgtagctatttgtgcagcaacaatttattttatttggttgaatcagaatacttatatctttgagtaaaagattttttttagtttcttatgtgtgaataatttcattagagttatggtaaagcaagattactacttgttaatagaagaaatttttctagagagaccaacaaatctttgattttatttgtaacatgtaagtaagtttgttttttatttttttgggatcgatgctaatttttataacatttgctctgttttgattaataaaattttgctcctttaatttttttttaaaacaaactattgtgtgtaatattttaacgtatcattactacactatgtcttacaggtatgcatttttcaatgaaataaataaaagagattatctcacaaatacacaaaaaataataaaaaaattaaaaaaaataaaattttacggaattttaaatatttttatgattttatttatagaaaatacagtctttttatgttgtactcttgttaatttatcgttgaatttttttgttatctgtatgttatttagatgttattt

SEQ ID NO: 389692 - DNA, 526 bp, Cannabis indica
aaaattatatgtattatttttttaatttgataaatcaaaatattgaagaaaaaaaatccgttacaatatattttttaaaataattaattaagagccctcaaaattaaataaatttactaaaaatgattaaaaattttatttaatggcataattttataatagtgcataataaccattgtaatttttatggttgctccatagtatataatttttcattccaattaagtgttcactaagcaaaaaaaagagaattgaattttgaagagatgaatataattaaaaaaaataaaaagaaatagaaaaagggatttatgttgagtatacatatatgtataatgcaaacaaataaatgaatgtatatatatagagagacaagtagtagtaaattaagagttatatatagtactaaataaatatttatggtaattttagcaaaaaataaatagttattgtataggaatgatagttaggttaggtgtaggaccaaataaaaaatgagatataaaaataaatagttattgtatag

SEQ ID NO: 389693 - DNA, 1288 bp, Cannabis indica
taaatttacaaaatagtggtaaataaataaaaatcattgataaactatcaataaagtttcaacatcctatcaataaataccaaattgacaaaataattgaggcaaaccagaaaccatcaataactcatagatattatgtcgataacctatcgataaatacgttttggctagaaaacaccataaccacctccatctaaggtctcaaacaaagacataatccaaaaaaactaaaaatctcacaaaaacgatcacaaatccacatccaaaatcacaagtaatcaaaaggaagttgttcattgttcgttaaaatcattgaagaaaatggtacctttctatttgggctttcggtggtggtgacgctcaaagacgaaggatttgggtcctttggggttttagggcttctgtggtttcttcaccactgagattgaagggaagggggcttccgttagtggcttcgagcaaacagtgagaaagagagggaaaagcgagggagatagagagttctgatttttaatttaaagaggtagaatagggaggggaaataaaattaggcatatattggtataaaattattaggagtctaaagtttgatattgggtaaagttttaagcatcatttatgaaatttccctttgcaaactgatctaatcaaatcgaattgagtcaaccgatccgatctgattcggtggatgcattggattagatcggttccaaccattgaatgccttaactggatttcgatgcgatttgattggatccatccaatcttttttaattttacaattatttaagctgactttcattaatatatatttatattaaacataatttaaaaattctcaaagtaataaaatacaaatctaacatacataataaatattaattaatttagtctaacctaatttttatgatgtcataattcaacaatcgattagatccaactgaatttttaaaattttcatcttatctgatccaattataattggatattggatcggtcggttgtaattagatcagatgactttttgcacactcctactgaatgagtatccagttagttaaataataataataattgttaaagttagcaaaataaaatcttgaacaaagaatctgttttgcaattctgctttctttagggtaaatactattttcgaccctctgttttattaaatgataaaatagaccctgtatttttcaaaattgtacaaataagaccatgaactaattttttatcaaaataaaacttaataataatctgataacgagatgttatgacaaaattagtt

SEQ ID NO: 389694 - DNA, 1390 bp, Cannabis indica
aattagaacaaatataaaatttgattgcatgaccaaactcttttttcaatccaaaaatttaatgctagtcaaaaatattattcatttggaatagcttaatttttcttatgttattaaattatgtgggcaaatggcaaaagagagtttgcttgattagtaagcattataagcaataagccacccactaactaataaagcccagtactttattattattattattatttatttgaatttttaaatatattaattccaaagagagaggagaggagaggagacactatgaaagctgtcatggtcaataatatagtcttaggagaactgttttaagaaagagttgtttggttttgaccctataaatgaatattccacgtaaaccaaagctaagaaaaatgaccatttgaaaagaaagtcaaagaaatacgtgtggacaacaactgagatctgagactgagaaatctatatgttacctcttcttaaaactcaaaagtactcttatttttaattaactaaggaaaacaaaactgacccatctgacaattgacactaagtgttattgcgtttttactttactttattatatggtagaaaatattatgctttataattagttagtggtattttttaaaaattatttttattgggtttcgtttttctaccttgttagatcgctatctcatcttaattctcacattagtataataatatctgctttggagctaagccctcacaattttgattttaggtaccttttcaaaagacctcatactaatggagaaagcgtaacacttatattcaaaacaactcttgcctattcttctaatgtggaacttgggttgataccccaacaatcctcccctcaaaccaatgaccacatacttgcggctcccctccagcgaagccaccttatgctgctgctatcaccaacagaacttgccgcttgaccatcacctttgttaagaagactttcgacacaggttctaacaccgatctctatcttgtaccatcgtaattattaacgggacacacaccacatgactacctcaatatcaggtagactttcgatacaagacacaatataggtcttcaatcgcgatgtcatcacattgagggtttctcccacacatcgcaaatccaacctactatatcctagcgctcctaaacttttggttctgatactacttattgggttccgttcttccactttgtcgggtcgctaccttaccttgactctcgcattagtatgatattgttcgctttgagcctaataagccctcacggttttgattttggacactttctgaaaaggtctcatactaatggacactacaagaaaataggttttctgcgactagagtttttgtgactaaatcaatttagtcactaatag

SEQ ID NO: 389695 - DNA, 996 bp, Cannabis indica
ttttttttttgaaaaaaaagttacattaacaaacttaatcggcaaatcttcattaacatgagatagaaccattcgaggaactccccatccaaaaaaccaaaattcttatacaaaatttataaattgatgtcacattttttattctattttaaaaaataatattataacttacaaaataaaacaaaaagaacttatatatgatcaacatatgtatgaagctaggttgattttttttttttcattattctttttcttcgtatattcttaattgattttttttttaaaaaaaaaaagaaatatatctttattaattaaacgtccttcaaaattaaggacaataaattagcaggaatagaattcttactaatagtataaccaactttagaataagagtcccttgcaaagaaatatgcaattttattcgcggatcgtttaacaaaaataacagacacattattaagaacggacaacaaaagttttgactcgttaataatggtgccatatggagagatcatatgaaccttgcttcgcagagaatggacaatattaatgcagtttgtttcaactagaacattttgccaaccttttcttttgatccagctgaggtcttctttgactcctattgtttcagcaatctcagctccaacagctccaagttcgcaaccttgaaaggcttcaatgagggagtcatcatgatctcttgctacaaatccatagccaaagtgattttgattcacgaaggttaccccgtctacattaaccttgatttgagagtgaattagtttagaccattgctcaactccttcaccatttattggaaaagacgaagaatgaataagtgacaaagattgagcagatttccattaatcaagagtgagtttagctataacgccctaactaattaggcacgctacccaagatacataagaaaccctaatcccctaaacgggattactaatagaattagcgcagaaattaaacttcaattacaaatgg

SEQ ID NO: 389696 - DNA, 1122 bp, Cannabis indica
atagagtgtaatttcctctgtaattagggcccactcaaattaaggacccaaaaattaatgaaaaatgataatttcgtaaatttttatgaataaaactatagactaaaaaaaatcaatattgttttggtacaaaagttcaaaatataaatatcaaatgaaaacaactcaccataactatcacaaatagtcccataactatcacaaagtccttagtactcatctaattttctttcttaactcttatcaaaatttgacacattataatactctacaaaacatccaatattgtaggtccaatattacaagaccttccattttttgagtttgaaagagaattcattcaagatctttatgcaactaactactaccacaaaaaacacttaaaaacataacctaccacaaatgaaggaatatttagtcaaaataataatagagcttatgaaaattggccatgtgtgtcttatgatccattacaaattttttctactatgtctcctcttttgccacctgcatgtgttacccctctaatttctcctataattaatttgcccacaaacaacaccaacatcaatcattaatgcaaatctcatattaattatctcattcatcaaaaaagaaaaaaaaaaaaacggtctcttggtttgattattgtgttccaaaagttgatcttcatcaacaacattagttagagaccaatcctcataagccttttgtctctataggtaaggaaaactcactatacttactcattgccctttctttaaagaaatatttatgaattgattattcatttattaattcaattattttgtttcagttttctttttatttgctctttaaacatttatgagtgtcggcaaatatttttttttttctggaatttaatgtcctaattatcacttattactagctagtttcaacaaaagtatattgttcattgagaccttgtaaatttacatgattaatataagaagaatttcaatttttatagtttttatagtaaaagtttgcaaaattattaaagttattttattggaaaaattgaataaagaaagagaaatacttagaaagtaacaggttatcttaagaagtaattggttaccctaaatttgccaacactta

SEQ ID NO: 389697 - DNA, 531 bp, Cannabis indica
gaaagcataaatgtcgaatagacgaactaataccattttaaaaagaaaaatagataagtatagaggtataagaaaaataatgaaatttaattttgtttatgaagcatttaattttaaattattagcattttccgaaacaaaaagatttcctttttcttttaaagttctacaccaaatcaatccttttgttttagttttggaaaaagaaaaaaaagctaaattaaataataattttatttatctaaaaaaaattatcattacgcgttttttttttttattttttttattttttttattttttacactttaaaacatgttttttttctttttttaattttattttttacggaattctacatagaaacccctggttgataatatataattaatttcactaaaaaaaataggagctttttatcaattatcttttgagaaaattacactccatactatttttatattgtcctcttttatttttgtcctcttttttaaagtctatcatttttactttttttttttaaatattgtacc

SEQ ID NO: 389698 - DNA, 782 bp, Cannabis indica
tataattaatctatgaagtgttaaaaaaaaaaaagagcatttttattagtttcttaatactatactcatatattttataattaattaaaaaaaatttatatcatttatttaaataaaaatatgtaaagatttaaatattaaaaatatctttaaaggtgcccttagaatttttgaatgaaaaatgaccctaaaataggagaatgcagctacctagctacctacttgtagtggttgatcatgtttttgctacatattttctttaccacgtacggtcaattaagtagtggcatacagctactttagtcgttgatcatcatttattgacacgaactgtcctaatactatgcccacactgaaacctataataagaagaagactgaccaattggccacgtattcaatatttgcatgaaaatggaatcagtcggtgataatatgcctttttccttttcaaaatgacatgttaaatttttttttttttttggttataattatataccatttgcttaaatgttggactttcactagaaacttttgatgtatgcaaattaagaaatatttaagataatgcaaatatgattaaattaatgtttggagaagggatctatatatttatatagttggatattgatatgtatgtgacggtggattttgactacattaatttttcttaatccttttgacagtaagtatttggaattattcaattaagtcaacacgacggcactacgaattaattaaaaaggatacgagacccttcattctaattaaatttatatttat

SEQ ID NO: 389699 - DNA, 2013 bp, Cannabis indica
aatcatctaatgtaatggtagtaaataattgtaggataaatatgaaattgtggctctcattcaattcaaaacacaattcttacgattcaaagagaatagaggttgctagtttcccgctcctctaatgagcagcaaatatatcccaaaaatggaaaggaaaaaatatttgaatttttaaaagaagtcaaacactacaaattacataacgttcgaaatccctcaatttaggaggtgataagaaaattctaattaattcattaattagccatgcctaacaaatatatatttatatatgtagtatccaatcagatgatggaggagttaattttgtgtttgtacaaagcaataaaatggtaaaattagagaagaaagaagaagaggataataataagggtgatcatatagctttgtcaatgccatggtggtggtgctctcgtgacaccagctatagtaatcgccattcatctctttggcttcacacaactctaacaggttttttatttttatactttactcattccatatggtcattatcatcaacaaccaaccaaagggttaataactcaatatatacttttcttgtacatgcagaattggatgagaatataaaaacaatggtaagtataattgaccaagatggagactctttcccaaagaaaaggcctcagcttataaaagtattgaatgagttgcataactcttaccgttggctggctgaaaggtacgactcacttattattagatctcatcaatctcatgattatcattacaattttcaacgtccaagatcaatgattaagtccttgagacaaatccatcatgatgatatgggaaagactataagtcatgaagagaatttttacgatttagaaataataaatggtggtggtgatgataaaatgtggagagggaaagaggtatgtgaaatgatagaggaacatttgcgtcagcaagatgagttaatcagaagaaatgagaagaaaagagagagaataaaggagcttagttcacaggtaaagaggttaatggaagagaatagggctcttaaggcttgtttggcaacacaaaaccacttacaatctcatcatcatcattcacattgttccaagtcctttttctttggaaagcttatcggatgcactcgttaattataatctcattttcttatgagatctatatacataaaacaattttagtattcatatgtaatggtggttggttttgttggcaataataaatggtgttaataatcactattcttattatgttttaaagatgctagcctaatagtaagtagtagttggactatattgatcttttatcacgtaaaatgataccgcattgaaagaaatttaaattgcaaacaagtcccataagtctaaaagttatcaaaattgatcaaactttttttttcttttcaagtattaactaaatatttttctttttaacaattattatatttttttacaaatttataataatatacattttttgcatctaatttagaataataacgttactactattattgacacgccacatcagccaaatctaacatttttgacgttttgtaatattttttggtcttttttttcctgcatttttaaagtaacttttttgttactaatagtgttgataaaaaattaattagttacttctatataaaaagatttatttttatatcatatatatattttggttattctctaaaaatttattagtatgcttcttagtaactaattaattagttatttttaagttatattatggttggttataatttaaaatatatttaggtaaccttaaaatatgttttcaaaattaatgagttgcaatataatataacatgttactacttttatataccgattattttatatactgattattttatacacatttttattattttgaaaaccaattagttatcgtataatgtaaaataatttaattaataaaattttaaaataaatttttactatgattaaaaaaaattataaaacagtaattaat

SEQ ID NO: 389700 - DNA, 1043 bp, Cannabis indica
tagaacaacatcgacccaagtcacgtattactagaaaacagagaatacaggacagcatgccttaggaaagtgagagtaaactttacataacagatacctaatagacttgtaattctaacaagcccttagaagttaaattttggtagaaaagaaaaaaaaaaaaaaaagaacaaaaagtgaaaaatataaaacaataaattctcatgtttggtatttaaagaaaaattgtatagaaaaagttttgattcaaatgaaaaattatttttttttattatccacgtttttttccctacattttccttttttttttttctttttcttcaaacatagcctaaatttcctaagattgaagaaaaaaggcttaccatgattaagatgaactagctaatcaggccaaaagtgaagaactaattcgaaaagaactttatgagcaaatcacaacgctggctgctatatacaacacctggcaacctgctatagtactgattattcaaccgtagcattagctaccatagtaatacaatccatctaatggttgcatttttcacaactccaacaagcttaatggatccatccaataattttctcatattcaaccacaaccgccaatcttcttaagactctaaattacaaatttctaagacaatggcaaaagctcaacttcaatctattcgggcactttacaacctttcctttgtgctaacatgttcgtacgtgtacacaacaatgataaatgaaacctaaatgaccgagatagtaatcacaacaataaatttcaaagttgtataggggagaaattatagctctgagtgattgggacttaacatcatttgatgaaatgaaattaatcccatccaagtcaagagatacaatggcaacagcaagaatgaaacatgcatgatcagggacggagggactttagcccatatgtgggctaaagccctcactcaaatatatacattaaattttttatatgtagatatatacatatattaattcactttgctcaatttattaaagtccaattcacaaaagccctcact

SEQ ID NO: 389701 - DNA, 1235 bp, Cannabis indica
tttattaaataaaaataatatttcccaaacttaagacccattacatcaattaatgaatcaacatccacagttaaaaattgctcttttaatttaaattgtacaagttaactaattttttatttattaaaaatgaattcacgtgtcaaatttaaattatacacaatatgagagattattttttagagtaatttgcggcataaatacttaaatttaactttcaattgtaaataaatactaagtttaatttatggcattaataatacttcaattatatttttagaaatataattacctgaccgttaaatattaaatcattattcgcgtgttattttcttatttgtacatttaaattaatttttttttaaaaaataaaaatttaatcactttgaccaatcaagaattaccacgtggcaatttatttaacacataatattcaaatacctaccaaaattctggaattataacttagatattaataattattcaattttttaattggagattttgatttatcaattaatagggaaccaagatttaaattgaaggaagtaatttttctttttcttttttgttaaggagacgtattttattttctagttggaatttgaatcttattttcagctgagaaattaaagtaaagtttacattttgtgaataagtattaactttaattataaatatattttggtttgatggttataaatatatattcttactaattaaaatacatacaaaaaagacaattgttctcttttctctctatttaggtccgcccatattataagtattaagtatatgttaaatttgtgtataatttatgcatatatcattgtacttattttaatagttgtaattaattttttttcattgttattttatactaaaacaattttttattttaggatatactaaaccaaaatcaagatttgcagttgcaccaacttgattgtttctacaatattgtatgatgtaaaagatatattaaatttgacataaaaaattaataaatatttagtacattgtttacaattgtgctgatacaaacggacataaaagtaataattagtaagaatatatatttcttatatattaataagaatataataattaataattaaaagtaataattattaagaataattaataaattaaataatggcaattttgttcttcaaaaataggtactgaagtcattcattaataccaaataataatattataatattaataaaaaa

SEQ ID NO: 389702 - DNA, 2075 bp, Cannabis indica
atttttatcccacattatttttatatatactacaaaatttatgtttttcgcttttattgccatctacttcttatttttaacatcacaaaatttgtacatttccaataaaaatatatttttcattattactacaaaaagaattgtttttcctctgcactaatagtaatagtaataatatagtagaaacaaaggtaaaactcctcttttaatccacacccttacaatttatgtgacgctttagtagttcaatccttctaagagaggatgagtgtgaagaagaagattaaggaaagattgttaactcataaactttttctggtgacttaaacattaatgtttgacacgtggcaagatggatgatgtcacggagttgagtagacccgagtcatagcagtcgacttgggaggagaccctagctccgtgcctaagttgacttcgggagctccgtgatggaagttcgaacttaaataacttgaacccaactcactatctttcagtattctgtaccatgaagacatggagcaatctaatacaagccccaagagctgaaattacacaaacctgtaaattagaggtcaacctggcacctagggtttcactcggcacccaagttgacattctcaactagggttttagtttcagagaccgtcttagtgaaaattggtcaaaacttatattgagaattcaactagacataccacaaacatatttgaggcatcggaataagaatcagagcaagttcattttgagcacctggggccctgagcaccccagcactctggttgacaatttgtcaatttgggcaccttccaagtattagatcgacgatttaacttttgcatcttctttgtcttcatcaaaaacggagaaataggtccgttggggaagaaacgacacttcctaggtgctagaaacaagacccaatgcctagattgacacccggggctggccaagggcccaagttgatatttcgttaacctggggcgatttagatgatgctttccaagaactgttctaagcatcttctccgttaaaaaaaaattgagatttaactatttttagggatcaaataaatttttgaggggccataaatgggaccgagcccccaaatttatacttggtgctgggcctagtgctcaggttgacatcaacctgggatgtttctaatcaagttcaccaaaaagtattctaggtatttttttggtcatcggaagattcaagcaaactcatggagaaaatcacaaaacttagcccctggatatagggcctagtgcccaggttgacctagtgtttggtccagcgcccaagttgacaatcaacctgggactctaccttcaattactcaaatgcaaaatttaatttgagtaatgaatcttgaatggtcaaaaatagggtaggagacctcgtcctcaagttcaagaatctttgaaatatcaaaacgagatctcaggagcttgggaatagggtacccatcgcccagtttacaaatggcctggtgcgctgggttctgcttatccaattctgattctattttgactgcctgtctaggatttcacaataactaaaccatgaagtcagagaagtcaaaatcacaactttgcatttctcatttctaacatgggaaactcacttagaaatgaagagttttgagtctctcatttttgcagaacagcaacatctccgagaactggtgaccagtttctccaaaacacaaaatcagactaagtaatgtcaaaatatcacttaggcatcttaaggtacatcatttggatatttttacacttacctagtgtccaagttgacgtcatatgtcaacatgggcgctagatgttaacctaagcgttgggtcatgaactgccttcagtaaaatagttataactcattcaatattgattcaattgacgcgattcaatttgctttgcacgtatgtcaagccttttataattttattaatttttcaaatgtatagttaaaattaaagaaaccctaaaataaattaaaattaaaggagaattaaaaattcattttgaaaaacaaaaagtaaaatttagcatgcatttcttatttaattattt

SEQ ID NO: 389703 - DNA, 1780 bp, Cannabis indica
acaattttttttttgtaaactgttcaagctaaaccgataaaaaataccaaaaaaaaaatgactaaattataaaacgtcaaatctattaattgaacgggttaaaaataggtctaaccaagtaaccaacccaattaacagaagataacccgcccaacccaaatgggtattatttgtttttacttttagcttttattgtaacataaatataaattataaaatataaaataaaaataattaaaaaaaaaaagagagaaaccctatcagacctaaagatcatttcgcactctctcctcctctctctatcgtatccaaaacccttcttcttcttcttatcgccgtcagcaatcagcacatctccggtgtagcagcggggagcgggaggaggcagccttctttctcggcgaaggcccgacgacgttgacggctccacccacccaagaagacccaacgtcgacggctccactgtgactgactggtattcttcttttctcattacttcttaagctttattttgcatttggggtaatgggttttcacttttatttccttataattattttttacttttgctctttttttttcccgatccataatgtgcaaaagtaaaaaaatagctggtttttgctctggttttgtattgtaattggaactgtgaaattatagatcaagatttatggcacataatcgagttaaaacttgaggagggtggcattgctagttagtcctactcttatatatatattttgctgagatatatataatatatatttgtgattgtatttgtgtatatatatatgtatatatttatagattgtcgggtggggtgtgcaatatctgtccagtatgcaatctcaaattatggagatggattgttctatgtccataaaagattagaagaaaaggcataaatttatacttaaatgaaaacgaattgtgaaagaaaaactatccaattaacatactgtatacgtaatacgtctatatagatataaactaagttcattcttatgtttcaatttttatctccaaaaaggaaaaacaccatttttttctctctatataattaacaatccttagattgtggattgttgcagtaggaatatggaattgttggttcgttttaaattcccccaagtttctgatggtaaactcttgatataaaggtttgagttagttgatttagttatagttagtttttacagttaatagttctagccacttgtattgtcctcagcctagagttctctgcgtgtaaattgcttgtaccctatttcattaatcaatataattttcttgttataatagcttttactgaatgtaatatgcatagttttcttgtacttttaaaaaaagtatgtctgccttaaaaatatttcaagagactctgtgttatatttaattttaggtactttggctttgtctttctatactttcaaatggggaaagagggcctgtgagtgaggcataaatgttctcaaatggtgatttaggtggtgatgatttcaattcattcgttgaagttgaaatatgttatataattgtgtttttgaatctgtgtttgggttttgatctacaatccatatatgttatattattgttcactttatctattttctgggttatttcttcaattataggaatcattatatgctaaagcactgcatacgtttattgatcatgatcacagagttttcgctcttattatagttcaattcatttaattgattataatttgatctcactttgtgttttgctatttttatcatatacatttagatta

SEQ ID NO: 389704 - DNA, 1368 bp, Cannabis indica
atgttatgttacgatggaaaactcacctgaagctgaactataatttctttcaatttctattaacaggattgttattataggacaccaatacttaatactacgaggtaatactttataattagttaataattttttataatttttaataaaataaaatgagttgggttttatattgaattacatcagcaacatattatacctcacaaaattacaagtagcatatgccctttaacatttctcttaaatacaaatagtattagtacagtgtacagggaacttacactgcaccaccaacagcagggccaactgccttaaacagagacattgcagtcatagaaaggccattggcagcacctctttgttcttggtcctgtttgttaatatataatcaacttaattaaattgagactgtcactaataagaacaaaatttaatcaacaacaaaacttaccacagctctgttttgcagtatgaacaagccagttataagagaagcctgtacactcatgtgtcccaccaaaaccgaaaacaagattttgttaatatcagaaaatttaacacaagacaaatcattgaaaataataagctaataatttatgagacattctaattaaggtataaatgaatttatgatgctgaggttgattaaacatggtttagtaatatattgccttaagttcttctattgtgtaacttggttccctagctatgaaactaataatattggaagtatatattcacttacggccaagaaactctttagcatatttgcaatgtttaacaccacaaaaagagcaacccctgataatagagctatatatggaaaactagtcaatagaggtattgttaatgcctgcacatgaaaaaaaaaaaacagaattaattgcacataccaacatcaatttcaaagtattaatgaatttgtctctgtgcattttattgcctcaaatatctatatatttttgtattatttttgaaatgtatattaaaattaaaaaatattttttctaatacgctggctattcttctatactttttcttttactcttttatctctctcctacttagtagctaaaaccatttttttattgtgggtgaatagaggtggcagcacacatatatatattttgggacacgattttattttgttattgtactttcatggaatgtattccgtgatgtacgacagccgttagatgggagagttatttgatctgagggctgggcttgatctagaagtaattagagttaaaaaattgtaactgtaacgtcccgcttcaagcctccattgggcccttacacccacggaataatggcgtctatacacgagtacgccgacacgtctggctgcttcatggactgatgact

SEQ ID NO: 389705 - DNA, 787 bp, Cannabis indica
ttgacaatgacaacaggtgttgtgcgtcgttgctgggaaagagaatgtctgagtagtgttgcgttccacgaaaaggtagccacctttttgtcatgagcctttttaaaatctggcagagaggataggttgccagatttctcaagatcgtgtcagagaggcgccacataagcatcattaggactatatgttgtattggaagctttttcgacttccattctgggatgacccttggtggtgtctctgtatactttgagaaatttttgtacacttcattggtcaatagtgtggcataaatattgtctccgaaaagctcgtgaatctagagtattatgtggaattcatatacgagatctggacttatttttataaagaaaaaagaatacttggaggattttcttaggcagattgacaggcccaaaactcattaaactttagctaagtgtcacgtgtcttccatttgaaaatgaaaataacaaaacttatttagtaaaaaaaaattaaattgtacaaatctaaccttaccaaaccacgatccccaaaacactcaaaaaaaaaccacattttcacatagccaagtccaaataaatatgcaaacatctaaagaactaaactttcactactgttaataacaaacctaaagtacaaaaacttagaaattgtacaaacctaaagttagagcactaactttcctatttggcttgaattaattgttcttggctctagatacgatcatcttgctatttggaccactagagtcaaaaattgtgactcaaaattatgaatagtg

SEQ ID NO: 389706 - DNA, 661 bp, Cannabis indica
cctattacaatccgaacccgcccacgcagagttcgatgtacctgacccgaaacctgccaaacccgaccacccaaaaattgggttcggttatacattttaaacactcgacatctaaaaacctgaacccgaccacccaaaaacccgacccgtgtgcagtcctaaaagagaagactaaagctaataactaatcctaatagtttctgcataagctgagattgttggagaggtgtttgcaagaaaaaaaaaaggccttgttcgggtgtgcactttagatactgtgataacctattagtggcttgaagatgtggtactcgaggtgcttgtaaaaattggcttagatggttcatagcatatgagatatatggtctcattatggtgagatatattaatttaccaacatgtagttggatcggggagaggatcccctttgtttttgctgagtttaagattgcattccattggtgatgatgttggtttggctcctaagtattttgtgtctttcaacagttgaagtgtgaaaagtcgttgggacactaagattcccttacttgtgcgaccaattacaaggccaaagaaaaagacgaagggaactatatcctgagtttaaactggtgtcaagtgaagttttaaactgggatatggcatgatcattgttgctagc

SEQ ID NO: 389707 - DNA, 785 bp, Cannabis indica
gctctcaccctcaaccgaattcgcttttggttttcgaaaaatcgaaaaccaaaatgatctcttcttactctccatatggtacgcaaacataccagacaaaacaattgtctggtatgctactgcaacaaccaatacaaccttctcggctgcagtgccgagaggatcccgggtcagcccggggactagtattgcttgatcctcaaggaaaagaggtatggagttcggagatagtaagcggagaagcttcacacgcggttatggaggacaaagggaactttgtgatctatgaagggaatagtgaatctgaaaagctttgggagagctttgatcacccgagtgatacgcttttgcccggtcagagtttgaaccgcggagaaggggtttcgagtcgttggagggagaatgtgttttcgaaagggagatttgagttgaggttgcagcaagatgggaatttggtgttggtttctgtgaatttgcctactgatgatgctaataatccttattatgctagtggtactgatgaaaggagtaattcttctactgctggaactcagttggtattcaatgagacaggtaataatatacttttctctcttaattttaagataggatatacacacaatgttacaaatattatactctaagctataaaatactagttagacaacttattttacactaattaaccaaattctcctagatattcatatagtattgtattatatagtattatattaaattatattttatacaatatttttatgtaaaattatatgtagtattaa

SEQ ID NO: 389708 - DNA, 1051 bp, Cannabis indica
agttatccagactcaaaggagctgtaggccaggccagcctaactgaagaaccacacactactaattgcgatgtattcgctcagcaaagatgcaaattcttgaggtggatggatgaccaggattacatcctttgatctcaccaagcagaattagattgccacaattgaaaggtcagcgatctaataaggcagtttaactagagaacaagaggtcaggatctcatcaaagatccacttcaaggaagactcgttgatagattagggagggtctattgacatgctgaccaacctggttcttcgagaactaggacagatcttctcttgccaaaggaaggacagaactttcctcaaaggtctaacagcgagaatagccagatcctggcaactagcgacatggggggccagccagggatctttaactcagcagcaccccccattgttcagcctatggctggccagccaccagcaggagcacccttagccggccaaaagacagcactccctcctcgaggggagcgaggcacccaaatgtcaatcttcaaccaacaaggatcgggagcaggtggaaacacccaaaacggtaattcgagaagtgaaattgatcactttagacacctagattcactaaactctagcaattgatgtgatctacctcctgtcaacacacaaccaacatcagtcgaccaaggagtcgtgtgtggccagaccctgctctctacaggtttggccagccatgggagcattgcaggtggtcagaccctgccctttgcaggtttggccagccaaggacagcacccaagtgtaggtctggccaaccaaagccaacacccatacacgagaatggttggccagggtctgcaatttaacacaagtttggccgaccttcaccatacactctcctagagtatggccggctagcccctatctctctagaatctacaacccctctaaggaggttcattcagtcaagttcccacagtaacagatccttatgtgcaagcacagctggaccaactcagggacatgattcaaggcatagctggtccgaagcc

SEQ ID NO: 389709 - DNA, 858 bp, Cannabis indica
aacctggacccagactgggactgtgactcgaactcaaacacgaacccaaacgaggacctggactcagactcagacctgagactcaaacccaaacttggacccaaactgggacccagaatccaaacatagatgggggaaccagacccaagaattgagcccccaaaccgagacaaaaacttggggctctaaacttggatcgggatcaaggacccgacccgagacccaaacctggacctaggaccaaccttgagacttgggatccaagacactatgcttggacttaacccgtaccccatgactagaaatttgaaccgaaaccagatgcggatcgggacctaggaacagggccaggaccaggacctacacctagaaccaaaactgtaatcggaccaggacccggactaggacacaaacccacactcagatttcgtgtctgggttcgggcttgggtccgagtttgggttggggtctgagtccttgttctagtctgggtcaaggtttgggaccaagtctggatcctggtctaggtctaggttttggtccaggtccgagtttagctcccttgtgcgggtcaaggtttgggtcttggttaggatctcggtccaaatttagatctcaggttttgatcctagtctgggtttgggttcgagtctatgttagtatttagatccttatctaggtccgagtctttgtctgtgattgggttctagatttaggttcgggtctaggtctgggtcttggtctcgatctcggtctaggtacacaaccgtgttcagcccaaattccaatctcgatttgggtctgggctaggtccaagttcggttctaggtcttggtctgggtcctggtcaaggtccta

SEQ ID NO: 389710 - DNA, 1899 bp, Cannabis indica
aacttctaaaaccaagtcgcaccatgtacaccagagaagcactctcttgaatacttgttcccaataatgcctacacaccaattctcaaaactgaacaataacttcttatcaacggctcgaagcgtgtcaacattcaaatgtgcaactgatggcttcaacttcttttttatttcagtgtactcatcaatccacctcaacctcttttttagtctcttctccattggtgatggagctgtgtctaaaacttggacctcagactcttgagtatctccaatggatgtgatctgcatgttctcaggtgtatagagaacataatctgcatcatcgagtttgtaatcattcaggagaatgaaatcatcaccaggagactcagggtgtggttacaactttgcccctacatttggccttctgtgatcttccatgagtgccattagggtcttcaagtaacttataatcttcatctaccctttcaaaatagcaatctggccttgcttcaaagtaattttttccctctcaacactctctaaccttgctaaaatcacagagtatactagttcttgagcctctgaggtgatgggaatagatgttggagtgggaacagaatgggcctttggtggtggagattgtggtgtagcctttttaatgatttgggtttcgtttgcccgctcttccaacaatttgtcaagcttctcgacctggctacgcaaactatcctgagtaggttttccatcactacccaactttagttcttccaaatccacaaatagaggtgcctcaactccaatgacattcctaaaaaactcttcttcatttggtcagagaaattaaaaggagtacactgttaactgtaaataaaaacaaaaatatcattagactaaaattaaaatgaaataagcaaataaatacgaccaaatacaaaggattaaaaaacatacattttttccaaacaaactaataacttcctccttgttgagtgtcacatccttactctcctaggcgaccattctgggaaagtgatgcaacttttttgatcacaaatttgtcacctagcttcaagatggactcgtaagcccaatactacaatgttgcagtatagccataggatatgtactttgactctttctaagacgtccctttttcattcttcctgactaaattcttcttcttttctacaaagtctctactccaagtttctttcaccatgttgaacgaaatcttccccacatgtgcttgtagaagaagtcaaggtcgttagccattctataaaaaatggtagaacgacagtcttctcttctttcccaatgagtgcacccatcatcaacagggcaaccccaacttgtacacatcatctttttccatgcaactttcaaagactctacgcagttgacctaaggtgatggatgggtccccattaaagtactcgactatcagacggtttgaacttgatttctcttaaatttcggacacagtaggtctaggtaacaagtttagtccagtcaccagagcgaagtcaactcagttggatcttcatcttttctttgcaatataaaagtgcactttgtgttttttatccgacttgatcttgtgcatgaataattgatggataagtacatttgaaaactataattgctctctctcaaagaattgttcgaaaggggattccttcaccctttccaataatttgatttccttatattttaattttatcttcgggtaaaaaaaactaccatcacgccaagtgacatgcccggtgtaatggtttaacactggaagtagaatacatggagctcttgaaggttgtaaaataaatacaacaaaaatggaagttaggcatactgtgtaaaggcattgaacatatatcacacaatttcaacatcaaaatattgttggaaattattt

SEQ ID NO: 389711 - DNA, 670 bp, Cannabis indica
gttttttttaaaaaaaaataaaaccaaaacttttacatatatatttaaactaattacttttaactaaaaatgagaccaataactataataattttgataatgattatgtactaaggttaacctacttctaacacatttgccgattcatatatcatcatcatcttatgtgggctcccgcaagacccccacaattggatttttctttgtaatttttgtttttataagtttgttttacagtacaattaatttatgccatactattattcttaattaagtttgtttttccatataaacaaaaagtaagttggacatgagtaagacttttgaccgtgttgagtggtcttacattgcggctgttatgaccaaaatggggttcaacattaagtggatttcacttattatgaattgtttgcatactaacaccttctcttttctgattaatagttcggttactggtacggtcataccataacgagggcttcgtcaaggtgatccactctctccgtatttcttccttatatgatctgaaggtctatctcgtcttcttcaatatgaagagtctgtatggcgccttaaaggattggcaatatctagaagagcaccttccattacgcatctcttctttgctaatgacaacctattgttttgtcaagctaatgatagatgttgt

SEQ ID NO: 389712 - DNA, 1287 bp, Cannabis indica
ctgcatagctctactccaagagacataattgtccttgcccagtaagaagctgagaaacaagaacattacctgggttatcaccgtgatgtagatagtacgggttcgttggatcttcgagggggtttttcgaactgacgaactgcagatcgtgatttccatgtccgattgaagcagaaggactttgtatggttctttgtgtttgatcttcaccttcttcttgagtttctgcttgattttcgcttgacatggtaacggatcgaaaggcagaggacgaaaacgcagtgaacagaatatacggaaaaaaaaaagcagagaacacgatatcgtcaccggagaagggagctaggatcgatcagggaaagttggtctttcccgctctgataccataatgcggaaagagagaatgaaagaaagtgaattatgtttttattaattcagtcaaaagaacaagagaacagaggtatatatatatataccacacaacctaaccgactaaaccagaaaaatagctgaacaatctaactaacttaaccaacaaaagaagcttacagtagtaacaaacaaaactaacaaaaaggaaatacaaattaattcttgatatgcatcttctctataatgttctaattttgtcggatgtcataaagggacaatttgatagtggacagttctttatataaagaactacattgtttatattaattgtggatgtgagactagctctataacagatttggacagcaagcttcaccactaactactatacagaaatgctttattgtaattgcattggtattgtaaatgagcaccacgaattgcttccctgcatcatgaaaaccccatccttagttctcgttttttgtccgccacagacgagaatcgacacttctgcaaggtcgacgattccaccttcttcctctttaacgaaggctgttgggactggggctagggatggggttgacatctcaggtcggcgcttgacatttcaattagggactgggtttgcttgctctgctgctagtgtgaacaaatcataataaatttttatttggtctgtgttagagagtcccacattaataatgtgttgaaattaaataccatatataagatgcatggactacccatcttattgccaattggttttgagatagaacctcatgcaccttaccatacactcacctattctactaccttaaccatacactttcgtattttaacatggtatcagagccaaactaaactctaatgagtaaccgatccaaatctaaaaaaccggtccaaaaagacgag

SEQ ID NO: 389713 - DNA, 1543 bp, Cannabis indica
atatatatatgtatatatacagagagctaagtaaatcttttttgtgttgcggtgagatagttgtgtttgcaatcttcttaattatgtctgaatgacttattttaatatagtctaaagtggattgatataagttttgttattgtagattttggttaatcaatcttgatggagcaccccacaccagaaacacctctactgtcttcatcacctcctcagcctaaatctaaagctgaggtaacttattttctctttttcacactaatataatagttataatagatataaattgtaatacataaatattattttttgtggaagttgatcctctaaacaaacgtataaacctactcacctacaccaactaacttaactaactttctgttatgttagttagttagttggtaccggttttgcaccttgttttatggtgtgagttaccactatatataggctactcttttcacttttgagtgatagaataagagagtgaattcaaagatgttcttgaaggggtcaagaacaaagggtgtactcggataggattagagaaactgtgattgtttcttaggggggttttctcgagtgttgtagagctgatattgctcttgaattggtgtttgtattgcttctctcttattccacatgttaatgaagaattggtgatgatttctcagttggagtatggccagagatcaaattgatctctaggaccggaaccaagataaaatcgtgtgttgttcttcttgtataatttctggtttggttcattgtgttgctgactggtttgtgtgtgttattgctgttctaattgttgattaattgcaggttttaggattgatttcttggtgttattgttgctgaaattacaacatttttgccacgtgaatgagatgaggatgacatatttgaaagtaaagaatgagttagaggcagtaaactcacaatttacataggctttgctcataataagggagaggaaattacattggaacaacagacgttttggggaggctggaaagttgtagtggtcttcttagggtattatctggtgcttgcttatattttacatcagcttcataaagcttgtaatgcatttgatgatgtggtcaagaaggtgagacttcacatttctgttgacaataatgatttcaagtctcaaatctcagcctacctatgttttatgatcatcaactactgctacttcatgttcttcaagtaacacagcaggaacttcatttattactggtttctcaatttacatttgaaactttacatttcccacagtcaaccctttacattttacatttgacacagtcaactcttgattgcttttcttctgattttgtagacatttacatcgttttttttatgtgagatgagtaagtaaatgatagatatttgtttcattatttcaaaattgtatgtatgtattgaaattaatgcacataagtagcaaaatgccatataaatgtgatgggctaattttgttagttacgtgttgtcaagtaaaagacattgattttcaattacaaaaattagaaaa

SEQ ID NO: 389714 - DNA, 1006 bp, Cannabis indica
aaaaaaaaaaaaagtaaaaaaccctttaggtaaaaatgtattttttttttaataaacttagcttattttttctcctaaaagtttttctgttgattaaggtaaatgtatttcctaatcaatcaaggtttttcttaataaaaaagtataaaagattctttgataataaaaggaaatttaggttaaaagaaatatcgtttaaaaatcttaaaatctaatctgattagaaatataacaaattttattattaaataagacaacaaatttcgaaactttccaaaagccacaattcttcttcttcttcttcttcttcctctgctccgatttctcattctttgatttcttctgcgaattggggctgaatcctttcgctgctcatgccagagctggacgaactggttcaacgagcttctgtgttagagaggagtagaggtattactaacacatctcaaattgattttgcttatttgaagaatctgagtttggttttgttgaatttgatttcgtaatttttggctgtgctattgaaatgttagaatttttctatgatttgaaagtatagatctttaatataggattgtatgaatttggtatttgcttgccctaaatttctgagttcaataggtttgaacatgaacaatcaatactctttttttatgtatgaattttattaatatggaaaattagatttttttttttcaatttttgaaataaaattttgtttaatattatatgcttggcactgatgtggcacgtccacgtcagcactcactgtgccaaatcagctttctgtttgccacattgaatgaaaattaacataaagtgcaaaactttagtgcatagttagagtgaattgctagaattgaaagtggtaacaattttagggggaaaaaagatcctatttttattttatagggtgtttttgtgcaggttgaattatttgagctcatacataaggatcactataagaaggctttttcttggtttgtatgatgaagttcattgctat

SEQ ID NO: 389715 - DNA, 1884 bp, Cannabis indica
caatgtcatatcatttttcaaactacaatagatctcttcgttgtggtgttactgtatatatatatgtatataatacatataagtattattttggatttactatctttttgttaaaaaaaaaattatcaatttaaattttttattttgttaaacgagaagtttggattctatatttttaaaatttgtataaaataatatattgaattgatttcttttagttaaaaataaaacttaatgataatctgacataaatgtgatgatcagactttagttataataaaaaaaaaaaacaaattgatcatgaaaatttgagctattagtgtattattttggctagacaattagtttattaatagaaagtttttttttttgctagacgattattatagtgtgattcaaattagtttttttttttttaaaaaaaaaaacgagttttgattataattactttttacaaaatacaaaaaactgatccaaaacaatatcaaccactgataaatatatctgatttatttattatattttgttgttgttgttgcatttttatagaatttttttttaaacaatgaacaaatatttcatggaaaaataaaataatgagagtaatacgaaatgatggagaaactatctaaaattagttcaccattcaccttaatgtacatgcggtgctaaaaattaggaacgccttaagcaaattagtaagtaaactaataatattttctaacaaaaatcttaaaaattcaatataaataaaagatctcgtaaagaatatacaaaaacaaaaccaagcagtcagtcttgaaaaaaaacaaaaaaaaactcatgcatcaaagatgaattcaacaccatcatcatagaaaacttgagtaaatgtgagtgtcccaacaaaacatgcatcatagaaagcttgagtaaatgtgagtaacccaacaaaacatagttgtccaattctattaacacaaccacatattttgctcgaccgattataagagtataaaaatattatcgcgaataattagaatgcaaataaaataacaatctaaaatatacagtaaatgaactaataaatctaaaaaaattaatttgattaaaaaataactgacaatacttatcttgttatcaagtgaaattctaaatctttatcaacctttttgtgaaagtctacaatcttttaaacgatttttttaattctctaacttccattaactcacaaatatagaacttaatataaaaaaaaaacaactttagtattattaatgctataacttctgcatgaattattataaactttctttgatgaacaagtaatcaacctacacaaaataaataaataaataaataaattagaaaattaattgaattgaaaaaggaaaagtagaatgtaataattaaaagaaaaagaaaaacttatctgttagattcattattcctccaataatgttttaaattcctcaaatttctataaactcacataaatatttcttaacatatataacacaacatcatatgaacataacttaatacaataaaataaacgataacattggcgagttgagatactcaaaataactatacttttgttaattagtaaaaacttaaatatataaatatatataaaaagaaaatgtataccagttaaatatataataaaaatcggcagttaaggagatataaatttaaaaaaataaaagtaaattgcggcataaatactcatgtttcagattttatacacttaaatatctaatgtttatttttagaggcaaaaaatacttaatgttacaattctcttacatcgttactaccactttcgttaacttatcataaatataaacacgtggagggctcaaaatgtattacatttattattttattttaaaatttaat

SEQ ID NO: 389716 - DNA, 931 bp, Cannabis indica
ttgagtgagccctaaacgcgggtctaacccgctttaacccaaacttgaccatgcttggacctagatatgattttgagtatgttagctccatatccacattaatataagttagttaattacatacttatgaagctaaattttgattttataagtttcttaagatttccattttattgttattattattagtaatttgtgttataaatatttaagtttaattttcacttgtaaataaatatttaagtttaattttagatggtagtaatacttaagttatatttccaaaacttccatagtacttggtcgttaagtgtcaagtcaattattacgtacattctctaattaatcaaagtcattaattttttattattatttaaaaattaattttgacagtaaataataactttactcttaataggtagacaatttcgcaagttttaaaaatataatttaagtattattactattaaaaaattaaacatagatacttatctgcaaccgacaattaaacttaagtatctacattgtgaattattctattattattttaattttaaaccaatttaagttgtttgtaattaaaatattcttcttcacgtgtaaagacacatgtatatatattattaatttgaatgaatataatcatatatttcatgtgaaaccattacaaactatagctagcgttcaaatcaatgtctcttataaacaaatgtgcacacaaaaacacacttcttcttcaaaagaatcaataaattaaatagttttcaataaacgtggacggtgctctattccttattcaatcaatcttcttccaccactcatttcaaaatactatttgctactaacaatcataatggatatgcagttcatcgatcaagctcgagtcttccaaattatggcgcttttgaattagtttagaagactacaaaaa

SEQ ID NO: 389717 - DNA, 2650 bp, Cannabis indica
aatggatcaactgagctctacctacaatcgacagattcctactagtccagttatgcaagtgcttatggactttatctataatgattccacaatctgaaaaccgccatttagtaggtctaagatacactccaaggtatttgaggggaaagcttccctcatccatttgaaggatgttcaggagattttgtttgccttcattttgaatccccccgaaatacactgtggatttggatttgttgggcaaaagacttgttgcttcactaaactgttggaaagcctcactaactagctggacagatttctcattacccttgtaaaagatgattagatcgtccataaaacacaggttgactaggccaagagactgaacaaagagggtgaaaatcaaaactcttctcctttgacttctgaataagcgaccttgtcagatactccataatgagaacaaagaggagcggagacatgggatctccttgacgaagacccttctcgcctttaaaagagccttggattcttccatttaacataggagagtatggggctccatggatatagctttgaatccataaaatgaatttggatggaaaatagaggccttttaatagatcagcaacaaaggactagtccaccatgtcatacgctttggttaagtcaatcttcatgatgcatcttgaagatatattctttcgggtataccatttcagcaagtcctgcaagattagaatattgtgcgctaacaacctgctcttaacaaaggctcctttctcatgtatgagatcggggagcacttctgagaaccttgtacaaatcatcttagagatgaatttgatcctaagcaactgttggtataagcttttgaggtctgcagtattcctctttctgcaagcatttagcacattctccttgtagccatcttttgacatccagtggttgtagaactggaaaggcttgaaacctctgttgctgattgctaagtgtttaatgagacaaaaactatgatccgaaatcgctccccatctaaaactggctttggtgtttggaaaagcatcaagcctttttcattggcaaaaattctatccagctttgagtggactatgctcccctcctcatgtttgttggaccaagtgaagaacgagcctaaagttttgagctcttcaacctgcccctgagcaagctagttttggttatcttgaatctctacatccttgattttcctcccaccacatttatctttgtagttaaaaatggcattgaaatccctaataataatccacgactctttcaagtgaccaattccctccagtttattccaaaggtccttcctttcattcaccaaatttttcccatacaccgctgtaaggtagaactcctccttgaatcctaccattttgagcttacaatgaaccaattgcttatcctccaataagatgttcactttcaccaacttatctttccaaaataataagattctatacgagatttcctgactagaataaaacttccaatccggattattaaccaaactttcaactttgtcatgatgaattttggtctcaaagagagccccaaaatccactttatttatcttgcaacaatcaaacaactcacgctgcttctcaactttattcagccctctcacgttccaaccaataatattgtagtgatccattaactggaattgaaaccatatccccatgtactttcttcaatacatcatagccattgctgattctagcattctgctgaatgtgatttaccactttagagcccttcctcttgggtgtaacccaatttgtagtatcactactcccctgtgatttcgagttctatttcgcttggttttccccctaatattttgagttctgtatagcctggttctcattttcaacttcatctttacccgatttaacaaacgagacagcatcttccatagcagctgttgtgctaacttttttatctccctgtggcagctccataccagctgcaacctctacatttccattcctctccttgtcccgctgctgctttttcttccagcttacgtgtttgcctttgttacagtttgaaacattatgacccaacatacaactggctggacattttgttggcagccactcgtattcaattggttgctctacaagctgatttttctcattaacaaaagctatggatctcaggggttcatctttaatctcaacatccaccaaaactctagcaaactttatcatggatctttctgaggtgaccttgtcagccataatgggtttcccaattgtgctaacaagtgcacttagattcttcttttgccaatattggagacctaatcccttcaacctaatccataccgggactaatctaatcatctgagaagtatccatgtcttcgctcgaatgcctaagaacaacaagcttcttatcaaattgtattacccccgtttctagaattatgtctcttgtaacttcatctttgaaactaaccaatgtaaaccagagtgcattctcactattctttccactcccaaattcccccaaattctcttgatgaaaccttcaaacaccttgaatggaggattggcccccaatacaatacaaactattgatgatctccaaaatgacgcctcaacttcaacttcctctaaatcaagtttagc

SEQ ID NO: 389718 - DNA, 1293 bp, Cannabis indica
gagccaaaagatagagattcaagcttatggagaagaatttaggatgtgagaagactcataaaagatgaaagtgtctctatggcaagcaatggagagcttattgatatgtggaactagccatggatcccttggttgaatttgcaagaattttaagacctcatgaacagagttagaccaagtacacaggggttgaagactatagttgacctatccatttaagggaatcaatggaattctaaattaattttgcaaatcttcatattggtaacaaaatccttggtatagaaaggattcttggaaataagcatgattgcgtgatttggaaagatgataatgtgggagagtttaaagttaaatctacttacttatgtgatcagtctcataggttcagagcacctagagatctttgaaaatgtatttgggaatccaacattcatccttggataagtatgatgctataaaaagctttgggagattccttacctactaaagtgcgactacccttccttaatgataaagaatatgccctcttccatcaagtggttgaatcaagtattcatctcttcaaggaatgtccttacacaagagcaatctgatttacaagtatatattcaatcttttctatgaatgttgagagagatagtgtctttgatttcttagataatcttttgagtaataattctggttggtaaagattcaaactgttggtctatgtggggtttctttttgaatctattaactaccaaaataattccatgcttcactatggaaagaagttaaaagttcaagaaatggttagaacaattcaggatagagctcttgagctttatgttaaggaggaatcagtgaaaataaccacgaaccatagtatgcgaacaaatccttttccattgaccaatgggaagaatcgagttctatgtattgatgcttcttggatgaatggagaaaccaggctggttgtagtaatggttcaagccataaatgacatttaggtaagcaaaactgaggtctgccactctaattctgtagctaaaagtgactatttgatattattttgactttagagtgggcaagaaagaatgactagaataattttgctttataatttgatgctcaggtcaggtcattgtccaggccctgataatcataagagttttctcccatcttggcattatagcagtaatttttttaggctaattaagatttttgccccctgaactttgacatgtactaaatcatgccccctaaacttttaaggtcgttaaaaatgcccccagaactattgagattgtt

SEQ ID NO: 389719 - DNA, 813 bp, Cannabis indica
atcttgcatacttgcatatctcctttggagaacagctaagttatcggttattgttggagatacgacccttaaggaatatttcttgacttgcaattttatttttctatcttgtcgatttaaagctgacagttgatgatgcaagtaagaaaattgaattggtatatttattgattcactaaattctttgatagttgcagaaatcaattccatcgaatctgtagaataatataaaatagtaaattatattatctattttaattaaaattgtatttatttatagggttaaacatgaaatgataattccaaaataattattaatttaatataagttaagtggtaacataactgtaaaaataaaataaaaaatatattgtaataattttaacaaatattatgtagttatattattagtcatttgtatttagattttaatgtttaaagtttaaattctctcacaaaataataaaattgaaggagaaaaaatatgtacatctttttgaaggatgaaaataaaacatttgaacatacatatatatatatataaaaaaatttaataagatataaataaaatatttgaacacggttattttgtaaaatattaaaatacttaaagtgacaaaataaaattatttttttgggaaaaaaagaacaaaaaaaaaaccaatcaatataattagataaaaataaatatctaatctttatcaatgttgcggttgatcgttggttatctctgctttaatctttgtcattgggagataaaatacaagagtattttatttaaaaaaaaaagagagagagttaaaagtagtaaat

SEQ ID NO: 389720 - DNA, 1783 bp, Cannabis indica
aaaaaaaaaatagatatagttatttaggcagaagaaaaatattgtctaaagataaacttattgttaatgttataattatttgataatattctgaacttatcttaactttaatattgtaatcacattatttgattgcatgataattcctctcatttcattaaaaaaaaaaaatggaaaaaattttgttgagaatgttataagaatatagtttcaaaaataattaatatcaacactctaccatgccaaaggattaaagaaacgacaaaatgattaagaaacgacaaaatgattaagaaacgaccaagataaagatatgaataaacgacaacttaaaaagttatccagattctaaaaaattatcattaaaaaaatggtaaatattattttagatcttatattttacgaaagttactaattgggctttctgttttgttaaatgacaaaatggatcctgtattttccgaaattgaccaaataggaccctaaattgattttttgtccaaataaaacttaataataattcgatttagagatgttatgataaaactggttacattttctatatctattagtattaaaattatcttaaagttagttatattaaaaaataaaattgttgaaaattgagctcaaagtatatttgtacaatttttgaaaatataaaatctattttgtcatttaataaaataaataatctaatcggtaatttttacaaaatagaaagtcgaaaataatatttactaatatgattgaaataaattactaatatattatatgtacaaattcatggaatccaattcattattatgagaaaaaaaaaatgggtagttgggctcctgaaaatgacaagagccaaattaatgaaaccaataattgatttactataaacaaataaatgtgtaaattgtgtacaaaatttgttcctttgaatattaaaaacaagaaaataaaaaaatttccacgtaaattattacttacctacataaattagcagccatcaatagtcaaagtacaatataccaaaacataataaatgtgctcaatttcattttattttatttatttttgaagaaaaatgtgttctatccacatttttatcctatatttggtagagaagaaaaataaaaggaaagaaaagaatggagagaaaagtcaagagaagaaatgaatttgatttgtttggtaagaaaaaaaaaacaatatatatatcatactaggtattagtaacatgctcatgtttgcttagaattgcattagagtcagagtcgggcttaagcttaggcaggctagacttgtacttagcgcccgggtaagtttaggggcccaaaaaaagtattttccatatcaaattatacatatttttttttttagtaattttctaaaataccacattttttaaataaagacctaataatttttcaggcctactcaatctcaaggcttagagttgctattatttaattattaatttaaataataataataaaattaaatctaatacaattcaattatattttttgaatatataaaatttaacctagttttaaatttatttataaaaaagtaatatctaactaattttattaaagaataaaataagcaaataagtctagataatttaaataagataattaataaggggattatttcacaaatacataaaaacaataaaaaaaaattataaaaatactgttgtacggaattttaaatatttttacgattttatttacagaaaatacgatctttttatgttgtattcttattaatttgctgttaatttttt

SEQ ID NO: 389721 - DNA, 928 bp, Cannabis indica
aaaaaaatattatagaaatatatgtttaaattatttgaagtgtatttatttaattttgtttataatttttttgttttgttatgattttctcctattttggagagattcattttttaggattttggaaagaaattctatcttttcaatttttttcttcttccaactttctttctagccaatttggctatccacctactccatttccttatatcatttccatccttataaaaattcatgtgatcaaacataaagtaaaatgggatttggaaaacaaaagaaaatcttctctagccaaaattattattatttttcttgttaaatttttctattgttggaaagttgaaaacatttaattaatttatagtataattatcttatttttcttaaaaaaaaataataaatgtacatggtaaacagaagacaatttttcataagagaaatgctaaaaagtactagtagtgtctagtactttcttacgtgccaatattactattgatctaactaagtatcgagtcccatatagtttaatataataacttttaaaagtattgctagccaataacaaagcgacacatctaaaaagtgctaagcaccactaataccaatatcaatgctcttttcataaatacttcaaaagataaaaatatcataaaaatacgaatttacaattttgtgattcatttttttttataacattatactatgttgtttgcacgttttttcatattgcttttatatttatactaagcagtttacatattatattttatatggctaattaggatttttgtcccctgaactttgacctgtaccaaatcatgtcccatgaacttttaaggtcgttgaaaatgccccctgaacttttgagattgttggatttaaagacttttgtctaatttcattttgttttactatttcagtaattgtt

SEQ ID NO: 389722 - DNA, 603 bp, Cannabis indica
acgtcttgccagctggcatggtttgaatgtttctctctaaaaaattttgaagtttttctgcgtacgactggttcgcgtctgggtagttctcggttccggttggtgcgacttcatcggtggagcacggcggcgtctctcttaggcttccagaaggttcacgattgaggttggtattgttttatctggggttttctgcgtgtgcaactgggttgcgactggggtgtttctggtccgtttttgtttgcgttttcactcgcaaggattggcgtcgactggtgggtgctatttttcgtatctttcatcggtttctagagtctcacggttgcagtttgggattgaattctctcgggttctgggttatttttctggttctctcaaggttggatcgtcttctacgtttggtttggtacggctgtgttatttttctttctctgtttggtgcgatttttctggtggatttcttcaaggttgatcgttcatttggtgttgtgcctggcttgtttgcgactgatttattctttctctttgtttgctgcgattttaccggtggagcatggcgtcaagcagtcatgccatggaggacatggagcagagctacgggaa

SEQ ID NO: 389723 - DNA, 1242 bp, Cannabis indica
tttatgtatgatttgatttttttatttaaatttttaactctttttttctgttatgtttgtcagttatgactttcattacttttgtaacttttaaaggaaaaacactattagaatcttattataattttatttgaaaacaaatctgtatgtataaatgttttatttaagttttaactgatattttttttgttatattttttttgtctcttatgactttgattactttttgtatttttaaaggaaatatattattaaaatctgattataacattgtatttggaaccggtttcgcataaattttatgtttgattgttttatttaagtttttaactattttttttttctattatatatattttttatctgttatgattttgattattttcttttattgttgtttattatatttgttattttttatatcctatttcattgatattatttaatatttataaccggttttctaatactgtttaatttgaagtcatatttattttaaattttatataaggttgtccatacttatttttttctcttgatttaactcgtttctttttgttattttatattgaattttttgttattttatatttgtatttgaaattgcagagtttcatttattttctacatgatatatattcttatataatatgttcatatataattattattatatataattttgattattgagtgtatatacctattttgattatgctcacaatcgttgtcaaaattgtgtttctctgtataattttgtttgattctttgttttatgctatgcaattatatatgcattaatttttcaggttcatgcagtagagaagaagatcagttccaaatgacaaattcaccggagttggagaagataatcgacgatgattgttgcgatagctgtgttgccaatcgttgatatatgttgatgaatcgatgaatattctagtttgtgagattgatttgcagtgtgaaatgcttgcgtttgagatcgaattggagactttaattgtcggagatgatggcgcgattccgagagagaaaatcggaggaaaaatagtagacaggatcggggaaattcggtttatttgtttggaaaatgtaggtttttttttttttttgtttttttttttttttttttttttaagttttaagcttatttatatactttttagtttctcatatttttgccatttttttttttcatattttgttgaattattattttttttttgctataggattttt

SEQ ID NO: 389724 - DNA, 3807 bp, Cannabis indica
ttaaaaataatattttggttactaatattgttaataaaaaaccaattagttaccttaatataaaaaaactttatttgcatatcatataatttgagatatattttagttatcctttaaaaaattatttgtatacatcttaataactaattagttacttttaaattatattatggtatattataatttaaaatacatttcgataacttaaaataataatttcaaaattaatgagttctcatgtaatataataagcactatttttatatgctgattattttatatacattttattttaaaagttaattagtcatcgtataatataatataactcaattaacaaaattttaaatgaatgttaactaagattacattaactaatcactatattagtaattaaataaattttttagaaatagcgaaaaacatatgtctctcatatcttgaaatgttcacattaaaaagtagatcacaacggtagttttttttagggtcatttgagtaacgatgtgatcagaaattattcttaaagtttgacagaagaggaaaaaatatacaatagagaaagaagaatgagagagagagagtaaggcaagttaagggagagagagagcgagaggtataaataagggtgttaaaacatacccaaataaataaaaacgttattgttgtcctgatttttgtcctcttgacgtggcatgcatacgtagataaaatcagcaccgcgtggcagtgcagctcaccaataagaaggccaagtgagcacctaagcaaatggagaccccgacactcaaatgggcatcaagtgacagaccagctccatcacaggggctggtcggccacccctaactagccttatggtcgaccaatcttggaactgtaccattgctggccagcttgcccttcataggggcctgggcagccaggaggtgttctgcatggttttctatgcacttctacacgtggacaaccattcttgggctgcgaattaggccctaaaagcccaacaaaatagctgaataatatctagattcaatggtattttggtcttttgtaattaacttataaaatatacaaatatctagagtttcaagttgtaatctaaggtttaggcctcctatataaaggtcataagtctaacctagaaaacctaagctaaaatctaatcttgaaacctgcctccatgctctaagcctaagtctgacaacttctcttcttcacttcctctctcgcatgcccatacaagcactattacttgagtttttccattcttgattcataaattgtatttctaagagtgctatagcagatcccatctatagtgacctggatagtatcaaccctagttattaatacaattaaaaggggagtaggtcattacccactaccacaagggggtcgaacctctataacaaatctgtgtgtttattacttttcattcttttttatgcaacatgtgtcaagtatcagatctatgcgaccccggtgtcggttgatcactttttgaggtcaacagttaggtgctttcattgagagcgtgaatgtcgtatatgatcaaatgccatggttaacacaagaagaacccatgtcacaccatctgcatcttctagactccctcaagacccacagtctgcagatctagatactcaagttctagtcacaactggaatccccatgaacactggagatgtggtgaatcttgtcaccacaacaggtgccacaagtctgaccactacaactgtccaaattgatacactcatcccagtggatccaagtggcaggcccctgccttcaaaagaagacccaccattggcgcctcctactaaaggaaggacccaggggtgatagccccctggaacaacaactggatctcgcctccaattttacgatggagagataggtcgaggagttggcgagcctatgattggcgagccccttctagacttaggagaagatctcaagttagcaaaactcaaaaaagttttaggccatgcactgttgatggcgatgttttcgctcacgcaaattcttgacatggatggataataaggagtacatcaatcaatatccccaaacagagttagattgccccgaccgagaggtcagaaatctgataagatggttcaactaggtaaccgatagaagaggccaggatctcctaagagatcaacttcaaagaaggcttattggtagatcaatgaggatcttttgacatgctgatcaacccagttcctcaagaactaggacaaatcttgccttaccagagcgaggacaaacctttttaaaggtcaaacgacaaaaatagccagatcccgataacaagcgagatcgaggccagctagatctctagctcaacaacacccctggttgtgcagctaatggtcagctagccacaagtggagcacccttggtcgaccaaagtacagcactcctccctaaggggagcgaggtgccgagaggtcaatcttcaaccgataaggattgggagcacgtggaaacacccaaaactttgttataagaagtgaaaccgatcacttcacacatctagatccaccaaacttcaagaattggtgtaatctaccccctatcaacacacaaccaacattagttgactatggagtcacgagcggccagaccctaccctttgtaggtctggccagccatggaggagcaatgggcggccagactctacccaatgcaggtgtggtcagccaagcacagtagacaagtgtaggcctgtccggccaaggccaactctcgtacttgggaatggccagccagggtctataattcagtataggtctggccgaccttcaccataccatcgcacagggtatagccgacctgcccttatctctctagaatctactacctccccaaggaggattagccagtcaagtacccatatcaatagatccttctgtgcaagcatagttggacttactcaagtacatgatccaatgcatagctggctcgaagcctttagacctttaacttgatcagtcaagtggatcaccattattctcgccatacattaatgccttgcccttgcctaggttcaagatgtcggtatggaagatgtataccgggttagaagacctattggctcacatcaaatactttgagatgcaactctctctccagaagattattggtgatgggtggtgctgcatattcccagccacattgtcggagacagctcaagaattgtactttaaactcaccccaggaagattcaactcttgggctgagttctcatgagaattctacacacaattctcatcattgagacttgttttatcgtagctaaaagaccttgtcgaagtcaaagaacgacaaggggaacctttgaaggattacatccagaggtttatgggcaaggctaccaaagtcaaaagccttatagaagaaggtcaatataaggccatattgggggcatagttccattgagtgacttctagaaagatatccaaagaatctctaccaacgacatgaaagagttccttgatagagttgacagctttatcaaacttgaagaagccatatcataagcctaggtggggcatgtcaacaataggcaatcacgtggcattgagcagcctcacgacccaccaagcgcataggcaaacaccaataactctcccaagacatttaatggcaaaaacacgagaaacaagtgttgcaccaacagctctggaaggaacagttgcaaaaaggggaagtttaactgtaacgccctaatctatagggacgccacgtgtgtgattttataaactaatttaatactaatagaataattaattattaaaa

SEQ ID NO: 389725 - DNA, 757 bp, Cannabis indica
tatatcatttccatgttttttgagtttgctatttaaagcatatggctaaaataaagagcattgctattaggcaccagtggtgcccagcacccttagacgtgtcgtcttgcgattggctagcgatactccctaaaagttattatattaaactatatgagactcgatacttaattagaccaataacgatattgacacgtaggagggtgtttgacaccactgataccgtttttagcatttatcaaaataaaattgtaagataaatactttcgccgttagtttttttagtaagatcatcaatttataataattactaatattaatggggttttgctcgcaattattcttaaaatgttatacaagtctaagtaaagttgtaagcaatttggtatagctagctagaacataaaaattagtattagaataatgaggtttttttttctttttcaatgaagactagtgtaattagctatactcacttcccgtattaaccaaaatatgatcgatcccttattagcgctttatataatatgcccctcattaacatttctcaaactaatgggtctagtcatgtatatatagacgcccatcgcccattctatatagtctaactatgtttaattagtttatataatcacaacattatttatatagaataatttacggcgtatatacttattattacttaagtaaaagattaagcagtaaaaatacattttattataagattctggaacttttgtaagtacctaactgttaa

SEQ ID NO: 389726 - DNA, 617 bp, Cannabis indica
aaagtgttaccaaaagccaccttaataaaaaaaaaattacagtcaaattacaaagcgctatttgaaaacttttttatataataaagtataaataaaaataaataaagtatcttagaataaatttgtgaaaataaaaaattacttaatctcatcctaaactttcaagcaccagccggtccctgacatcattttttagaaataaataaataattcctttatagctcctggattattcatttatttttttcattttatatacacataaatgtatattagttaatgtgtaaactcaaaagtcatgtatatcaaaggttagaaaatatttttatactataagaacaaaataggtgtaccaaccatagaattattctatgagtaatttgcggcataactttcttaaatggtcagatttttgcaactaatacctaattctaaaattttggtggtaaaacctcctaaactcttgttttgttagcagtttaacattttcatccatttttagctgttaactgccctggtggaatgtctacgtggacacagtgtacacgtggcacaattttattagtccacgtaaataaatattaaaaaaaaataaaattttcaaaaatatttacaaa

SEQ ID NO: 389727 - DNA, 777 bp, Cannabis indica
ctaaaaacttcaaaaactaaatagaaaaaatgaaaagaagaagaacagaacaagaaataaaataaaatatttatatgttaagggagaaagatagagagaacttgaagaagacgagagtgaaaaaaaaaaaggttatttgttatttgctcaagaaaactatatatatagaaacataaataatctcttggaataggagattgcgtcggcttgtccaaatttaaaaaaattaaatgaaaaaaaaaaaaacaaaaattttaatgaaagaaaatgaaaaaaaaaactatcagaataggagccatcacttcaatttttaaacttttgtatataaatatatataaaaaaaggtggactgttgtccaaaagtaaatatatatatatatatataaatatatatttatgtagtatcaaaaaatagtataaaaagtaaatttttagttacaataataaaattaaaaaaattaagaaaaaaaaataggatgtggaggatgttgtgcataaaggtaaattttgtgtcaaccggttatataaaagcctctgtcttggtgagcaatttgagcaccaacggtttgtctagaatcggtatgctgttcctaagcatagattcatttgttggcaggttgtgagagatagtttactcactcgagatcatctttttaaaattctaaatattgacagcaggctttgttcaatttgtggctgctgtgatgaatcttcggagcacttgttcttctcctgtatgttttctcagcaggtgttgaagagtgttaatggttggtt

SEQ ID NO: 389728 - DNA, 2054 bp, Cannabis indica
ttctttaaaataatatatgaatgaaatatattaaatttgttgaagaaaaatttatggcttttatagggataaaaaaaatgtgaagatataaacaaaaaatatacatttttataaggataaacttgaacatatgagtgaatataaaaatatataaatttataggaacaaaatactaaaaattaattttatgagggtaaaattaaaattatttaaattttttttatacaaaatacaatttattaaaatttgaatggagccatgtggatgtggctctgtcgctaaaccttacccataggtgttttttgtaagttgtgtcaggttggggattataaataaatttggggatcatcaatatgttatgaattttaaggatatacttggtacaccatattgtattgtaccagattgtattatattgacattattcaatcaaatactatgtttagtgacttgtattaataggttgtttaaaattatattatctttaccattaactcaaactcaaaccaaaatctaaccccaaccctgccccaaaccccagccctggacactagagaggggttcagaatccagatcaaggtctggggtcaagtttggagtctaggtcagagaatggagccaaactgggtccagggtcgggtctagagtcggggtccgaggtgggctagctccaagtctgaggttaatttcaacctgctcaattatttcaacaagaaacaatacagaataacacaataataaaatactaagaacttgttggacttaagttcttcacacaacaaagaacctctctctaaatttgaaagtaattttagaaatgatacaccaaaagagataatctttatacacttcaaaaactctcaaggtcgtgaaaaaagaatcaagaaataaacaggtcaataaatagaaaatctttccaaacaggaaagttagaatctatttagacacacagatagtccgttcaaacaagtacattgagcatggacaggtttttaccaaaatttccataaaaaaataagaaaactttgacaaccttttatttatacacatgtatacagtttcttgaatgaaaaataagataaaataaatataataaagattttctttaaaaaaacaaagataatatcaaagttgagaatagagaatgaagatgagcttgtgtgttaactaacacagctcttgatattcattatatatactgtaaagcaagagtacactgtaactgaaatcatttagagcagctgacaccagctgtaagaataacaaacttactacagctgttactaaattaactaactctaactaactctatatttcttcactaataccccctcaagtgtatttggagtgttccaaattcagcttgttacataaaaattgaaaccgtggagaagacaagggtttagtaaagagatctgctgtctgatcttgagtggggatatagcagatttcaagtttgttctctacaacttgctctctaatgtagtggacatcgagctctatatgcttggtccttgtgtgaaaaacagggtttaaggccaaggtttaagcactctgattatcacaccataatactggaggtgttttgtgcaacttgatgcccaattcagtaattaaagagtgcatccaaactaactcaatagctgctgaagcaagggctcgatactcagactctgtgctggatcgagccattgctttttgttttctggaactccaattaacaaggttaccccctaggaaagtgcagaatccactggtaggttttctatcatccaaactggaagcccaatcagcatccgaataggcttcaagtgtaaataatgtagagggtttgaaatgaagaccaatgtgaggagtgcctttaatgtacctaaggattcttttgcaggcattccagtgattaataattggggctttaaggtattgactaagcttgttgactgaattagcaagatcgggtctggttagagttaagtattgcagagctcctattatgcttctgtacaggtcgagtttttcaaatggtggactgtcaaaaccaattatatgagtct

SEQ ID NO: 389729 - DNA, 1346 bp, Cannabis indica
acaaccacaccacagccacaacctcagcctcagcctcgagtgtgcctcacattataagtgtagatatatataagattcatgttgacgttgtatgtatatactatcattaattagtaataataagtgtacacgttagagactgtcagttattttaggtcaacctattagtattactatctgcaattgttattttttattagttacatattttaggtcaacctatttagtttatgtttataatttaaggttttggatgatcactgtttatcatctgcttagttcttatttctttctcttgtaacgagatttttttaattgattttttttttttttctaaataactcaaaattcattaaaatgatagaattttggtgagtgcattgggactcacctcccaaaatcgcagaaaacccacctagccaaagtaatgaggtttctattctttacataaatggatagaaaaagatagattgatgcggaccaaaaattttgggggaaaaactttagatcttaagcatgtagaagatttaatgaaaaaaattaattttcatttggttgcattttaaaatagtttattatcatccaataaatgactttttttattattttggtcaagaaactactctcttaaagtggtcgaaagctaagagattcattaataaatagcatcacctaagatagagttttgaatacaggatgtgtagccaagccaccagatcttattattagtagtttttaaagtaaaattgacaagagaatcagccactacattaacatatctggaacaaaaactaaaactcacaagaataaacttagtacatcaattcctaattaatgtcgtcaagaattaacccaaagaaaaatctaaaactagagaatgattgagtttatgaaccaaactttaacaatttgattccagctgaatatggagtatatcgaactagatgcatgcttgtcaaattgctagtgcttctgcccattctagaataatatttctttctactttccaaggggctgaagcaaaaactttactgtcagagtcccttataactataccgagaccacattgagcattaagagaatcaatggcagcatcccatatttatcttgaagatcccagcaggcagacgaaatgggttgagggtgtcgttgctacttgatgaggagagccagcagcatgcttccctttggccttctccttggtaggacaagaagttggcggcccaaggtccaatgatctttggcagtatagtagtttgttcataaacttgtttgttttgaaggtacctgttggaactttgtatgaaatatgtaaaaatagaaaagtgaagtgtgtgagtaggagt

SEQ ID NO: 389730 - DNA, 563 bp, Cannabis indica
atgtatgcatcacgtaggtaatcattttttctattataaatatataattatatacctttatttaaacaaattataaatatctactttcttttaggaattgattatcttaaaatatatattctaaaccatctaagcatacgagctcactcttctcttaatttctctctcctattattattttttttttttttttccagtagtaatgtataggaagttgactattaattacttgaaataattagcaatgaaacttaaaacaatcaattcaatttttaatactatgtacccttgcattgagatatcatgttacggaatatatagcccatattctatatttttcttttctttatttctttaaattattatggatagttctttgttagaagttttgttattcaatgtcatttcaagagaatgaatttagtaactggtaaatgcacaaataaagcattttataaagtgagtagttttagtgtgtatacatatgcatatatcttatatactaggtaagagttacgtgccgaggcacgtaaatattagttttaggtaaagtttagtttttt

SEQ ID NO: 389731 - DNA, 993 bp, Cannabis indica
ctaattgaatggagattccccgtttaaatgggaaacagggcgagacgaggattactttttgtcccaatgttaaacggggcgaggacagagatcacactccctgccccgacggggacccatttaatattttatttaatatttttaataatattttataatttataatgtaattttgtatttttttagtatattggtattctttttgtgaattttatttagtatattagtattctttttgtgaattttaatttgtgtcttagataataattaatttattgaataataattaatgtttaatattttaatctttatgtagtttaatatttttatgtatttaaattttatcgtaaactttattttttaattaggggattccccgccctgatcccacccccattaagggatttcccaccctatccctaatggaaataagcggggatgggaatttaaattcttaacggggatggggaccggggaagcactctccgccaattctctacccgtgtgcatccctagtaaagaacctagaaaagagagttgacggttaggacgaacatctaacaagaatttttggaattctttgggggttcttgattggtgctgagctaattatagtgtaaagttgtatatctttggttaataacatccaaaaggtttatcgctcccaaggtgtgcagatccataatacacatagaaattattgtctgtcaaataacatcaaaagtggaggtttcaaaagatttttgaaaaaaagaatcttttggacaacttttaatgtttgtaggactattcagattcgatccatatattggatgttagattttattatatatttcatctcatccaatttgatctaattaatttcagtcatctatcgatcaaatattatattcatcggagattagattggatcgcctctattcattggatgcattttatgtatatcttttgcattgatttagatttattaaatattttagatatagtattttt

SEQ ID NO: 389732 - DNA, 1057 bp, Cannabis indica
ctaaatgaaaatttgtttcattaatgcattcatgattcatcgcttttgtttgatgagtatcaaatccaaaagtaatttaaatctttttgcagcccatgaaggaggacataaattcatctcttttttatatcatcaatctaatccaagttagatgtagagtagagtgctttgccttgctttcaatgcaaatctttttgcagcccataaaaacgacaacacaaatgtgtcgtttcagagtgggacaaaacagctggaacaagcttttttttttttaaaaaaaaaagaaagccatgaagaaaaataggctttttgagtcagagtgtcaccaccccaaaagtgatgactgattgtggtgtttaaaagcacgtggtcgtgactcgtatattacagcttgtgagagttgactaccttcagccactcagagaccacaaacgagccgcctactttgactaaggcttctccacctgccacatcatcatcaaaacacaaaattgggatttgctacgaaactctagcttctgtgaacactctgatttcctatgcttatttataattattggctcattccagtgcttttcatttgtaggagtatttttctatgttgattattttgtagtggtaaattacactcactacagtattttgttatttacttaaatattggatttttaaatttgatcaatttatatcatattctttatttttaggtatttttatatatttaatgtttttatttatttaagcagtattatttgttactgatgtcaaaaagtcgtcgaaatagctgtcggtgttagaaaagttactaaaattgtcgtcaacattagaaaagtcgtcaaaattaacattgttactggaaaaatcacccgaaaaaagtaaacatataatagattatattttcttagtttttagctgattaaatttgttgaattttttaaaattttataatatatatctataattagggtcggtcctgggcataggcgggctaagcctgtgcctagggcccacttagtccaggagcccaaattttttttttccttttaaaattacacaa

SEQ ID NO: 389733 - DNA, 1276 bp, Cannabis indica
aaaacaataatagactcactacgtacacaaggttaagtgtattatttttttaggatacgacttacagaaaataacaagaatacttaatcatatatcaaaaggtaactttcctgtttatctttttattttttgatttaatatttaaacatacgaaggatcctagggtgtggtacaatgataatttatattaaatattttcgctgcatacttaatttaatattataaaaccaataaatggtattaaagttggttctattatgtatatattaaatgatgtgtgggttttcttacattatatatatgtgtgatatgtatatgaatggatgatcatgtatattgggaatgtaaatggttaaatgatgaatcgttaattttatggtaatattatgtataggaactacttttatttttcttagaaaaaattgtaagccattattgaggcataagaattttaagtaatttattctttttgaaaataattacgttgtaatgctatacgcacggagctcaaattttttgagaatgctggttgtctattctacttgcatagagcttggattacctttcgaattcgtctgtgtttttcggtgtccactgcacggagaactgtggtcctcatgagtttcatgcccaactgataattgcacgatgccatgcatgcttgcatacaaatcagaagtaagggacgttaatgtccagacgaaaccaaacgagccttttggctcttgtccctctcggtctgattggactaggttgcttctgactgaggtcgactggacctcatggtcctatccctcgggcctcttgtagtgtcacaactcctcactaagctattcggtgattcctgtcccttaccgccttggtgccatgcgactgaaacgaagacctaactaggtctcaaggtcctttgatccgtgtgtgagccttgttataaaatcgttcaaattctcagatccctgacccgggtcgtttatctcgtctaatggccaccatagtggctcgtccgggagctgccgactacaatagtattttatggtggccaccttgtaaacttcatttttctctcttgcgcaaattatatacatatgatattatgctcaaaagatcaaacaacatccaatccgcactaagtgcggattttatattttagatccaatccgatccgcataagagtttaaatccaatccaatccaatccgcaatagtgcggattggatcggttattttttaataataaattatttaatatttcatagaaaaaaattaaaaaaagacta

SEQ ID NO: 389734 - DNA, 1019 bp, Cannabis indica
caataaagtttttgggaattaatacatgtgagagcaagtatttggaaggtagtaataaaataggtgcttttatataaacatacatcaatatcagatatagatttttgtcattatattttcatatatattaatttaaatttgatacccaactaatgttcattttcgaaaatgccaaaaatctagaaactgtagttttcttaaaccaaattattatgagagctttttgtaaataaaggtgaaggaataatatatatgtctgcaaattgtctattgatcaaagcctttattttcatgtttggagtacataagtgcaaagcacaatggctacatataagatcccaaaatccaattatgtccaaatcatatgctaattgtggctatcattttttctcttttgtattttacatgaccaaaaaaaaaaaacaccatttcactactactttatatgattaaacattattatatgatcacttaattatatacaaggagtaattaattgttgcgttttatggtgtttactttttaattaagaaatactataagttatcataatttatagtaattataaatatgaccacaattcttaaagaaaagcatcacgactaatctataatttgtgaagaaatgagccttagtcaacattattcacttgctgggattgttgtggtcctgcttggacaggtggttctcttttaccatagtgtttaagagtgtgcataaatcgatcaaatctaataaaaattgaccgatccaattataaccgactgtcaaacattggattttcaactgtgatcaggtcagattagatgttatttttaaatatccaattgagtcggatcagatggtaaatggggtgtctaaaaatctaatacatccaacatataatcgtactacttaatattttcatttagtttggatgagtaattacaccttatattattatacgtaaaatctatatgtatatatatgaaaattaacattaaaaatttactctttttttcttagattggatggatcca

SEQ ID NO: 389735 - DNA, 1545 bp, Cannabis indica
agagagatgaagtcagagattctgagaaaaggttttgtaaaataaataagcaatggaaatcctcataagatttggagctacctaatcaggaaagttactgtaaaagcaaaagttttgtaataaggaaaatcatcaaaatttaaagctaattaaatgataagaataaaattaaaaactcatataagctaaaaaaaaaaatattaagaaaaatgagattaattaaccccaaaaaaaaaaaaagaacatcctctctgcccacttgagagtttcttcatcatcatctttttctactctttaatttagcaaagaaatccattttctttccattttccaaaaaaattgaaattaggaacaaaccacaagtttatatagctatatgtaaaagagaaatgctaaagtcatcggtggttcttagcactctcttacgtatcaatattactattggtataattaaataacaattcatgtaataaattttgaagagtatcaccaatcaatcgtaaaacgatacattttaaaaaaaaatgttaaacaccaagcatcttactgaaatttttatatacaagatacaactagccatacccataaataaaaacaaaaataatagcttaatttttccattaaaaaacaaaagtcatggataaaaatgtcaatattatatatatatatatatatatatatatattcttccactaattatttttgcaatttggttcataatccactcaaaaaaatcatagtcaaaagaaacaagactaacaattgaaagcttgttgaggatgatggatcaagcccctgccttattcaacatccacactcaattctaaccttttttttaacaatgttgtggcaaagccaaaattaaaaattacacataatttaaataatttttattttatatcaaatatacatctttaattatattaattatttttttatatttttttctctaaatatacatattaaataaaaataaattatattttaaatattataacaaaaaattatataaaattttatttaaaaaaattataaataaaaaattaaaacaaatattaaaattaacacaaaataatattaaaagaaatattaaaactattttttaaaaaatattttaaaatcttaaatagatatctctaaatttttttcatttgattttttattaagtaaaacctagtgatcacacgaaacaaagaagaagacgactgaaactcgacttaacttgagataaattgcagtcatcaaatgattggcagtggttcttcgaaggtttggcagaacagagaaccggtaatttggtgcaaacatttggtgcgattttgtgaactattaaccaatgtaccaaatcttcttctacataacaatggcagatactatataaatgataatattaaaactaatcttaattaacgataatatactaaataataccattttagtatatactaaatagagtggattttcgttataaatgataatatttgatttaacattttattattttaatattgttatgaaataatataaaataatataaagtagatg

SEQ ID NO: 389736 - DNA, 725 bp, Cannabis indica
agtatagagtctaatttcctcataattttattgatacgaaaaacaacaattaggaggaaatgacaacataaatgaaatcaaacatccatctccatatggagtaaaaatgccaattttaattgggattatttcacaaatacacaaaataacaaaagattataaagacgattatacgaaattttaaatatttttataatgtttgtgattttatttacagaaaatataatttttatatattttatgttgtactcttgttaatttactgtttatttttgttatttgtatattatttttgttgttgttttgatgttatttttttattatttttatgaagtattcttattatttttataaaacaccttaaaaatatatataaaaaaatatatatatttctataatcttctataacttaaataaagaccacaatattttgagtttcttcttattaaattacatctataccctttttaaagatacatataacaatacaaacaaattacaaaatattttggttttttctctcattgaactacacatatattatattgaagttatagatgcaagtttatattccaatattttttttccattatatttaatgttgaccgagattttcggcaactactaaaatatgattataatattgagctgtaagaaagcgagagaagggtttttacgtggttggggcgttaatgagccttagtccacgagtctttgttattaat

SEQ ID NO: 389737 - DNA, 1398 bp, Cannabis indica
ctcgttacatagatttttaaatgcaatggagattctcttatataatgtaatcatcattatattgtaactccattacatcactttttaaaacaaaccaaatattgtaatggtaaattctcatttcattacgattactattaaaataaaccaaatattatatattatgaccttagagactaatttgctttaaaacaaagttcatggaggaacttgctcaaatttatatatttttaggaaccaattcaaaaaaaaaaaaacaacttaccaaaatcaatatagtttagggtgcacaaatacaaataagtcatttatgtttatcaaagtataaacaaaaagaccagaaccaacttgacaaagctacataaaatgttagttaccccaacaataaagatcatctatggagtacctaccaaccattgctttgaatagtatcccaacaaatcaatagtaaaaccctctcctataacaccattttaatgtctccaaaaagactagtcctcaggtgagatgaaggaagcggccgccttaggtctcctaccgcgcaagccttattttaaaaaaaaaattaatatagtacgtagaggacacgtagtaagtatgattcctacaacttatataactggttgaaacggctgcatataaagtccattttgagaagacaacaacgcgctcgtgtatccacgttccacactatgatttttatatattatattttatatgatgagataagaattaccttacaaagcaattctatgctatttctgatccgccacatcagctacgactattttggtatttttcttttgtttctgatcatactcaaatatttctaaaaaatttactatctaacaatctcatttcaaaattatagttttgaaaatgtgaattgagaatgggaaatttacaaaaatattgaaatttaagttaattttacaaaaatactgttactcagaattttttctcaaaaatactgtgtttttataaaacaccagtaaaacacaaagcagaacaactcaaaacaacactagaacactagtaaaataccagtagaacaccagtgaaaacttaacacagtatactgcagtatgaaacttataaaaaaatacagtaaaaaaataaaaaataccgcctgacagtatgtttgtaaaaaaatgacaaaagttaatatatcatgtaaatttcacttaagaatttggaaccaattccatccacctatcaatgatctagtccggacatccttctcactagtcacttcatcgtttttcttatccttcgactctaaagttatatctactagagtaattatcattattttttaaaattaatgttggttattgtagctatcattttttccgtaattttttttgaaaatattgtaaaataaataaataaatagat

SEQ ID NO: 389738 - DNA, 1465 bp, Cannabis indica
taaagtgccaccgatccaaaaagacgaaccataaaagagctatttgtgatctgttgtaagcccaaagtgccatcggtccaaaaagacgagccaaactaaacacttttgttgtcctcctttagcctctatttaagacatttcgactaatgtgtgcatgtttccagtattggggtctttgacctgtttcaaaatctacaaatttctcaatgtgtacacccacaaatttcccaatttcaccttgcagagttctttcaaatgtcacgttcgatcctgtgggtgtattaacattagtcccacatcactaatatgtgaaaataaaataccatacataaaatgaatgaattactaatcctattatttttagatagaaccctatacattttatcataaattcaaacagaagacacgacacatttgtgaagcaagcaaaaattttgtatcacgaaattatatataagaaaaacatttttaaaattaggtgactactcaatgggtatatttttattgtaaccataatgattatatttttttttacctgtaatagcaggttaccaataggtaaaaatttcttttttagaattaaattaatcaaaattaagaattttcttaaaataattaattttaatttaaatatttaataagaccccttttagcaattaatatttataaataattttatttttatatttaagtccctattataatatttttaacatttaatttatttaactataatatttacaataaaattctattttttttacaaaatttagacttccacccttctgaaataaatttttgaataattaattaatttttaaaaattacatctaattattattttgcaacaaccgcttgacccacctttctcctttatataaaaaaatttagaaattagagtttcaattgtcccaacctaactttatgtgaattttcatttcgatataatctcctacatctatgccacaaatctatttctctattcaactagctacagttaaatttttcattagtttttaataagggtaaatactattttggaccctgtgttttgtaaaagttaccgattggattctctattttgttaaatgacaagatggaccttgtattttccaatatggtaaaaataggaccctaagcttaattttcgacaattttttttaatataattaacttgaaaaaaattcctaacacaaatagatacagaaaatgtaaacagttttgtcataacacctttagatcggattattaaattttattttgataaaaatcagttcaatgtcctatttgtactattttggaaaatacatggtctattttatcattttacaaaacagatggtccaattggtaacttttacaaaatacaaggtccaaaatgatatttatccttttaataatttgcttgctattcactactacaatgttagcctttagaggtcagttttttcaaccccatttataaa

SEQ ID NO: 389739 - DNA, 868 bp, Cannabis indica
tttttttttaatattggtcattaatatatatatatacgcagggttaagctatgtctagtcttttgacttgtttttgaaagtattgttgctgttgattgattcgtttctgggcttttgttttgtatctgtctggctgtaatcgtttggtattggatatggcttccagtagtcatataggttttgatttaaacaaggaatatgcacaaataaacttggaggaggaggaggaagggatcttgattggtgatgataatgagggagaggaggtgacgttcgatgatcgttggtgccttgtgggtagattcttgacgggtagattgtttgatttcgatgcgatgaggcacatgatggcatctctttggcaaccggggaagggagtctatatcagagaattagatacgaataggtatctttttcaatttttttttcatgaaattgatattcaagcggtcattgatggcagcccatggacttttaataggattccattgatattccaccgtctgaagagaggagaagatccgaagatggttcgactacactgcttggatctttgggttcagattcacgatctgaaaacggggtatatgctggagaaggtggttcgtaaggcaggtgactatgtgggcaagtttgtgaagattgatgcgaagaactttaatagaatttggagggaataccttcgggtgcgggccacaattgacatcgacaaacctttgaagcgtcgaatgaagctatgcaaagacaatggcgagtggagatgggcgaactttaagtatgaacacattccaaccttttgctttgtgtgtggaataatcggtcactccgaacgattttgtcctcgaagatttgacgaagattataatcc

SEQ ID NO: 389740 - DNA, 984 bp, Cannabis indica
cacttcaaccaacagggagtctcggtactgaaacgggatgacgagtgacagaccaaccacttcaaggaagcttgccgaacaccccttgccggccctatggccagccagcttctatacaacacaaggccagccagcctgcatcctgtagatgcatggccggccagaacttggcctaacaggactttggtgcacgacattacacgtggacagaaaggtagactacgaatcgggccttaacagcccacaaaagtataggaaaaatctatatttttaaggggcattttagtcatttatattttacaaatttaatatgtaaatatctacttattttacctaataaagggggtttaagctctcctgtaaaaagagccttaaccaaaccctaaaaccctaagtcaaaactaagttcaaaaccctaagccttaagctctaagtctgataactcttctcatctctctctcacgcccattgcttctctctaaacttgagattttccatctttaattcccacattgtaaccttaagagagctctctcagatcccacctatagtaatttgaatagtattatctcttagtatcaatacaactaaaagaggagtaggtcattacccgctaactaagtggaccaaacctctataaaatccttgtgtttattcttattgtgtaacacgtggcaagcatcagaattaatatgactctgttgtcggttggccaaatctgaggtcaacagtttggtgctttcattgagagcgagttgatatcatatctaatcaaacaccataatattcttctgttgttaaactaaatttcgcaataactgactgccttttcaatgattccattcaagcgttataccacaagctcaacaaagccaaggcaatcaaaacaaagatgtcgcacatacatgctgctcacccaatagcgcattatatacgaggtttgcgaatttcgtgttctaagccttggtatgaagccgatcatgt

SEQ ID NO: 389741 - DNA, 840 bp, Cannabis indica
agttatgtaccttgtcattgcgacatttccaaatcatgtccacagtgatcgaagcataaagaaacagcttttccgcatcatccccatttatctttaagttccaaaggaatttaacccaatcccagaccctaccaccaaagccatgtaccgggtatactccccagggggaggatctccagatgtggtaagcgaaattacaatagaggaaaaggtggtcaacggactccgcctctgccccacacaacgggcaagtctcgtcatcaatatggattctcctagccaggttatcccggaccgccagagcattagagaggatactccaccaaaggattttgtgtctctcgaaaactttcgaattccaaagtttgttccataaggccggagccaccacacaggccggggctctctcatacgcctgtgtcagataagcagacttggtagtaaatttcccacaaccctctttagtccaaatccacttatctcttccctggccgctaggtctacccccttttaggatgctcgtaatcgtggcagagtcaaacatagtccttaacaaggaaatgtcccagtcccattctccaacagcagctctgagaccttctcgatgttcctagggtaggaggggatgggtttcgggtagaaatccgtcccatgaaccaaccaggggtccgaccaaatgttcgtttcctccccattagaaatgagtttgcaagcgccttttctgaggatagctttagtcttgaccacatttttccaaaaccaagaatcagcattattatacgtagcctccaaaaaaggtttactcttcagatatttggctctcaacactctgcagcaaag

SEQ ID NO: 389742 - DNA, 952 bp, Cannabis indica
tgttgcctttgggtcaaagaccccagtgcgttgaccaaatcgttgaccaccgatcctgagtatctgaagaacaaagccaccgagtcaaagcaagtcgttgactacaaagattggcagttagctctcagcagaagattccgttccctgaaactgtggatggttctccgatcttacggtgtggaaaagctacgtgggtttctccgaagccacgtgaaaatggcgaagatgttcgaagccaatgttgtctccgacgacaggtttgagattgtcgttcctagatactttgctaacgtttgtttcagaatatctcccaaggctataactacaaagtccgtactttccgagattaacggaacgacggcgaggaggaacagcggcgctgaaaaagcgttgaccatcaacgagattaatacgaagctgatggattctattaacgggtcgggtcggatctatttgacccattcggttgtagatggtatatacttgatccggttcgcagttggtgctagtctgacggaggagtgccacgtggcaacggcttggaaagtggttaaagaacatgcagatgctatattgagtaggtatacaacgaatgaatttggacttggtcaataattatcgatattctactctgttaattaacggagctatgaaacgatcattgattataagggtggaatatttatggaatttgatcggtaaaaaaaaaaataataaataataataaggacagtatataatatctatatgttattattattagtccgtgcaagagtaattaatgttatttttttatttttacatataaatatttaaattattattattattcgtaagagttttgtattatcatcatcatctttttcttttttctttttatttatttattttgtaatttgtaagtgtacctcaaccgataattgtaattgttatgtctatcgtgtacaattgg

SEQ ID NO: 389743 - DNA, 1790 bp, Cannabis indica
ctttgatgttttcagatcctcttagtgtccaggccttggctcaatttcattacccaaaaattttggcagacttgatatacttggtaaataaccttaattaaagttcatacatatccatttactatctgagtctctgactatatatataatatgtttgattttgtgttatattatttaatttatttttattttttatgtaatggtgaggtagatttaaagaatcatctacttttagtggattttaatatttgttgatcacaggttaataatgctggagtctctggaagtgtagttgatgatgaagccttgagggcaatgaacatagatcctgtagattgggtaaattataatttgcatgatcaaactcattacatctatatataattatatatgttagggtctttttcagctttttatttattaatggtgtgcttgtttatgacattaggtagtcagtatcattacttttatttactccccacaactattattcctatttatttttaattatatattgtcaattttattatcatcaattttatataaaaattagatcaaattggagtcaacaaatgaatttagttatttattcctagactaaattattgtcaactcagaaaatattttaaatattacatacaaaataatggtggtgcagctatcagggaaggtggccaacttggttcaaagtgtgattaaacaaccatatgagaaggcagaagaatgtttaaatatcaattactatggtgtgaagagagtcacagaagctctactccctctcttgaagctttctccttcaggagcaaggatagtcaacgtgtcctctctaagaagtgagctaaaggtaactccactatttcttaattatactaaacttagaaaactaataacaaatgatccaatattacttcagtattttatatattaaactagtttaatgaaaccattacagagagtgccaagtgagaacataaggaaagaacttggggatttggagaatttaagtgaagagaaagtggatgaaattttgaaaaagtttctgcatgatgcaaaagaaaatgggcttgaagcaaatggttggccagtgatgttgccagcttatagtatttctaaggttacagtaaatgcttacacaagagtattggccagaaagtaccctgacatgtacatcaactgtgtgcaccctggctttgttaatacagatattaattggcacacaggaacattaactgttgaggaaggaagcaaaggtccagtcatgttggcccttttaccagatggaggtcctactggttgctattttgaccaaacccaagtggcaatgttctgattgttatttctattttggccaaaatgggtaagaacatttagattggatttgttaaaactgagatttctcttttggtaataatggcttttggtttttgtggccgatttatggagtgttttgtgaagttggactttatgaaaagatttattaggaaactaaaatctttcaaaacaatttatttacaattagactgtggaaccttaatacgacattcaaggtagttatgtgactctaaatttacaccgtgtaaccatgattatcagtgtagatttaacttggttaaaacataatacttccacttagaactaattttaatcctataataattattatactcttaaattacacttttttcacatgtatataatatataggctaattaagacttttgtcccttaaactttgacatgtaccaaatcatgtccctaaactactttttaggtcgttaaaaatgcccctt

SEQ ID NO: 389744 - DNA, 798 bp, Cannabis indica
gatgcaaataataaaccaacaatataatcagtgaaacctaccggcaaaatcgtttatcaaaagtagaagggcgagacactatccaatgcctaaatatgtatactaacctattttataatttgtggtgtaatgttacaatgtaaaaattttatgtcacgtttacaacacagtattaagaatcgaaataaaataatgaaaaaaatataacagaataaataaaaaataatcgaaatcaatatgtgtaatatgttatttactaaaaattcttggaaatagagtgattgtgatttatcttgtttactttattacaaaaagtaattagagtgcttaaattgattaaattacctttttgagttaaactatattatatggtagttattttgtaagacatattttaaaggataaaattttcattataaatttaatattgaaaaataaaataaaaataaataaaatccattactctcaatgacattttttagaaaattgttaagggaagttctcgctttcttttctctcttgttaaatcaagttattcttttcttaaatttaataaattaaataaacaaatgtaaggaaataactcttttaccattgattcccattgtttattaataaacatgccgtttctgaaaacattcacaacgaccctctctctcacacacatatgtatatgttcgatgatattgatttattttggaaaatttagataatgtactaacttttgctattttattacaaaaatattgtcaggcagaattttttacttttttactatgttttttataagtttcatac

SEQ ID NO: 389745 - DNA, 1037 bp, Cannabis indica
agagagagagagaagaaaaacactgtggaatcgagccatttctgaggcgagctcgaaagaggaagtacccaacaacaatttttggggaacctctataactctggtgctatctctctattgtttttctttactttgattactttgcatgtttttatgtgtgggtttagggttatggtttgatctgtgaaggaacaaggcttgatcttgtgagataacagtcttagagtttcttgagaagaaactcgaagctctggtagggtttctttttacgttttgtgcgatgtagaaatgaactaggtctagattgttctaaggggttaaggttgtgaccaaaatgacattgagttttggtttgagtcgattgtcgtttaactcagggttaagtagagtaaagtgtagttttgactcaggaaaaaaggtcatttttgatcttgattaaaacttgataatattttgttaggtgtaggttaaagtggtaaattcctacattgtagttgacgactgtctcattttaggaagttcataaaatttgaatttggatcctacaagggaaggtcctcagcttaccttggaccaacaactacttcttttaagactgttttaggttacagatgccaaatttgccttattttctatccctaaccttaaaagcccaaggctggatggatatggttcaaagtttttaaggtcatgtggagtgagttgggaggggaaatttctgcagctctcttgaaattcttcaaacaaggtcgacttcctaatgagatgaatgccacactcttaactcttattgtgatagtcagtagtcccatcatccgcacggagaaatactaggtaagcgttgcaatcccacatcgcctggagaaggtcatgtgtgatgattctgagaatgtgtaggtatgagactacatagttgaagagagtttaaatggattgattggtattacctatatcaacgaggtgcatcttgttttgtggtagcccatcacgaaagaactccacaattaagcgtgcttggcctggggtaatttcaggat

SEQ ID NO: 389746 - DNA, 548 bp, Cannabis indica
tttttttttggttgtcgtgttatggtgtattgatattgaaaactctttttcatttcttgaaatggtgttaaaaatattcaaatgatttgggtgcgtttagggttttctggttaagtggagatggaaaatttggagacgaaggccgtagattcatcacagtgcgttcgagtagcggttaacatccgtccattgattacttcggaggttttgtttggctgtacggattgcatttccgttgttccgggtgaaccacaggtacagctttttttgaatcagtattatttattttttaataataactgagctgcttgattaagttggtatggagctaaatatatcagtttttttgacaacataaaattctacaacattattgggtattaattgcttggagttctaaacaggtgcaaattggttcacattcattcacgtatgattatgtttatggtggcacgggatctccttctaccatttacgaagattgtgttgctccattggtagatgcactcttccatggctacaatgctaccgtccttgcttatgggcag

SEQ ID NO: 389747 - DNA, 1106 bp, Cannabis indica
tgataccagagataatactactttgagaacaagtgttattgaatctacagtagctctcttaagattacaatataggaatcaagtaagcaaatctcaagtaagagagagagagagccctagggcatgtagaagagagggagagagagagttagggttccagacattaagttgagagctttagtgaggcttggagacttaagacttagagagttagggtttgactaatgctctttatatagtagagcttacatccctattattcattacaaataggaaagaaagctatatttatataattaattgataaagtttaaatgacttaattatcccttgaaaatagggatgttgctgatattttcgtgggctatcaaggcacagtttgtagtttagcttgttgtccacagatgaaggttgcacaccaaaggcttgccaagtaaaggctggctgaccatgcacctaccaagtgtaggctggctggccacacaatgtctacagactaggctttggctggccatgctcctgctagggtctggtcggtcattttcctaccagagtctggcaagttatgttcctaccagctttggcaagtgttggctagtcttagtataacatttcattgcagaggtcagacttcctttctcaaagaagaacctccttactctaaaagtcacctttggccggccagcttgtgcccaaaccctggtcggccatatttgctcatcttgacaagcctatatactccctttggtcagccaggcatagttgtccagctttttgatggcctgcttaactcctcttgcttgtttcttgatgattctaccatgccttgtaaggagacttcgtcctgctattgacaaggctatattctacgtgtcctcagtcttggcttacgtggacatgccacgttaggtggaaaaaatttgagataacaattgcaattcatgaggaaagtcgagaatgtgtatggttaatatcaatgatacaacatatttgagtaacatgtggattgagatctaataaagaactaccaataatttttaagagaatggtgatatcgatgttcaacaaattcgatgaagtgataatcttgtagacttattcacaaa

SEQ ID NO: 389748 - DNA, 652 bp, Cannabis indica
aaaaaaaaaagaaaagtaaagttgcaactcgtttcacatatcaaatatcaagcaaagcaaagcaaatactccaaaagaaaatagaaatccccagttgggacaggagtaaatcaaagaatttaagacatagaaatgaagctagaaaggttattgaacctgtaatcatggttgacgatgttgggtggtacaagtatcgatgagaaaggaggaaagggaattgggttttgcggagcttggcttggagagagggcaagtatctcaacgaagtgtcctggccttactggatattttgatttatatatagatagcgagtccgaatccaaatccaaaaccgactccgactccgactccggaaccgaacacgtgcttttcactttgtaacaatatagtaatttacttaattattatgtcgtttcaacgttaaacgacaatcttttgaattgatttaaaatttgatcgtctttttagggctgcatatttagagaaattagattgtatacctattttattttatttattttaatttttacttttatttttatattctttaagatatacagtatctacttttatagatgatatttctattagactctgttataaactagttgatgcagaaaataaaaggaacgaagttaccgaaatagaatct

SEQ ID NO: 389749 - DNA, 590 bp, Cannabis indica
agccaatttgtattttatcgtaattacatcaaatattatagaatagaataggggagaaaaaataaaaacccttaacatataaatcgatgaaaacaataaaaaagttgtatatataattagtacgtagtaggtatatacattattgctaattaataataattttaatagttaccaagccataacccatgatataaagttttaataatgttataaatgtgagattttatgtataaaaaataataattttaataattaccaagcctaatttgtcttgtataatatctatatatctatatttgtttatttatttgaaaggtctttgtcgaccttgttccctctcacacgttttcggggtggaattttgttcttaattatcaactcatttttgtttgttttcagtcttctttattattttttattattacttgttgcttttttaatttatagctccgatcacaaagatatatttggtaattggtattgaactcagtgatgagtgatgcatatcgtattttttttttttactttcttttttcttcttttcaatttttaaagctcaaacaatgaaagtataatttattaaaaaaatt

SEQ ID NO: 389750 - DNA, 702 bp, Cannabis indica
atataaactttatatagtataattacataatcactgtcataaaattattctatatatatatataaaaatatatcttgctttaactaataggcatggtgagacttcacgactaataatatgcaaatggttctgtttcacatgcatctgttctgattttctattgggaggggattagttcttagtattcgtattctggttgtagatttaaaagtttgtgcggacttgggttgtatgcaaatagttgtgtttttttggtaagatgaatctgttcagttttatgttgaaataggtaagttattcacattcaattagtcggaaatcgagtatatttggtacatatatagatatgctaaaagacattagtagtgtttagcacgtgtcaatattgttattaactaagtattaagtttcctataatttaatataataatttttaaaaagtattgctaaagcaacttgtccaaaagtgctaaatactactggtgtctaataacatctaaaatataaagctacactttgtgcaaaggtgtctatttatgagtgccttattttttgtgggagggatgcaatagactctgtgcaaatggtgtgaatccattaaaaattggtgccttctttatttgttaaatttaactattaatttagtatattcagtcaaaaaaacataaacaattctgttaagacacaaaaaaaaaaaaaaaa

SEQ ID NO: 389751 - DNA, 1622 bp, Cannabis indica
ttttaatatataaagatacaaaagtttgtgtatcaatttctattaaaaatttaattattgacattaaatatataaatattaattttaaaaatacaaatacatattctcacactttatcatcgatttgttatttatgaatttatttattatctactcttaaattagattaaattaatattacattaatactatatcaataaattattaagcataatataatttgaagggttatttgcaaaaaaataaaaaattataattcaagaataaaaaaattgcatcaacaagagttatagttcaagggaaaaatcttacttattcaaacaattatttccattttatgaaatgcagagcaaatatataaagtttgctagaatatgaaattgtagattttgataagaataggtaatatggtaagaagtggtgagcagagaagtttgtattcttaaaatagtaaagaaaattgcggcataaatacctaatgtttcagattttatacatttaaatattctatctttatttttggaggcaaaatacctaatgttacaattctcttacattcgttactaccactttcgttaactaataaatatggacaagtggagggtccagatgcattacatttatttattttattttaatatttaatattcttaatattaaaaactaaatgctacttgtttcaaaaaaaaaaaataataataataagagagatgcaaaattaaattaccataaataagtgaacgaatgcagtatatatgaaaattattatgagaaccaaatcaaaatgcatctaccagaccaagaacatacaagcttcttgacagatgtaggcctgtactactataaagtcatgcccttcgaactaaaaaatacatgggctacctatcaaaggcttgtaaacaaaatttttaaaaacctaatttgttagaacatggaagtctatgtagacgacatgcttatcaagtccaaaaaggttgggggcatgtagaggatataaatgaatgtttcaagatcctctgagagtacaacatggaacttaaccccatcaagtgttctttcagagtaggctcaggcaagttccttggcttcatagtgaatgtccaaggaatagaggcaaacccagagaagatcgaagccattttggacatgaagtctttcacagagataaaataagtgcaaagtttaactggccgcatagtagctctaagcatatttgtgtcaaaggccacagacagtgtgtccttttcttcaacatacttaggggaaacaaaaaaattgaatagatagaggagtgtgaagcgaccttccaagagctaaagcaacaattagctcaacatcttatcttatccaaacctttgaataatgaagaatttgacatatacttggcagtcacaaaatttattgtaagtgttgttctcattagagaagaaaatagcattcaacacctagtatattatgttagcaagagactcattgatgctaaaagttgatacccactcatcaaaaagttgacatactacttgttcctaactgattagtggttaaaaatacacttttatttattttaaatgataaaataaattgagttttaattaatattttcatgaaattattgtaatata

SEQ ID NO: 389752 - DNA, 1204 bp, Cannabis indica
tagtagttataataataataataataataataataataataataataataataataataataattaattaattaatttacttctctacatttctttttcaaaataaagttgaaaaaaataattaaaaactattatacttgtagattcttttttattttaattatattgtgacattgtcgactgattttttagctaatgtacacgaaatcgtaattaatgggaataaaaaaacgagtaatcaatgtaaataatgataacaaaatttaaagaaatccccaaatgtctataataacctacttactttctattttattattctgagttacaagtcaaaagtagaatcttaaatgcaaaaagtaaaaatggtagaatttctatttatgaatatgattttgactcccttctaaggtcaagtttgacctttaatatatgagaagggttggtgagtctcgcttcaagaggcacgacctagagcacggttgaatcccagatgcatgagggaatatctcaaccatccccatgattctcgaaatgggttgagacccaattcttttgtaatattccactattcttgtggatttgtaaccacttttgagttttgagcaggattagaatgttatgtacatgcttgcttatcatgtataaggcagaacaatcctttgggtatgcgtccctatggatctcggcctgggctgacccttaggagaactctcggtctgatgacatatccacgagatggatacctttgcctcttacgttgatcccatgttgggacttcatggttttggttgtttacaattcttcgttatgccttacttttatacttgtagttatatggagattgacccatgaacatggacgagtgttgagtacgtgggacatacctcgaaaccctgagcaaataaactatcacccatctccaagtggagacaaggtatggaactaaggttgtatgaggatgagggccaacacccccttgttgagggagaaattggcttgggcatacctgcactcagcttgagccgacccctagggggatattcggcataggccaacccctaaagggtgcataaggcctagttcatttttgaaggcctttcatactgaaggttcaccctttgtctataggggttgttgttgggaatattttaccaagatctagatttactaacaagtatgttaaattaacatcctaaatatgaat

SEQ ID NO: 389753 - DNA, 1307 bp, Cannabis indica
gtgccaaatttagcaacaaatttacatcactttttggcacaccattagagcatactttttgttaaatgagttatattttaactttccaccacttatttgcatctccattggagatgctcttacgttgaagattaaggaaaagaaaagaaaaaattgcatcataatccccaaaatatctactttgatgcacataactctgcaacctggaaatattacaaaaatagtctctaagctcgaaatttttataagcttgttagttttcattttaacagatacgtagttgcttcaaaaaatgttacgtgttgatattaaattgcgacaaaagctttcataaagtttaccttaatgcacataaggctctaatctcgaaaaattgcagtaacagtcctcaagtttgaaattatcgttagtccgtaagtgccaaatttaatagctcgacttgttgctcccaagattgtcaaatgctgatattttattggtctaaattataattttaattaaaaataatttaaaataaataaataaattattttaaaaactaaattattaacttatttttttatcttttctaatttattttcttctcgttcactctcagtctaatctacccggtcccaatctgctttactagccacaatccacaacccaccacaacccacatctccctttctcaactgtatactcccttagaataaatctattagtttctcctaaaaagtcacatgttgatattaaattgtgacataagttctcaaaaaagttcactttgatgtagataaatacctcaaccttcgaaaaattaacagtaagaatctccaaactcgagttagggacgtattatagtaatttttaaaggttagggacttatctgcatcatacaagtgaacttttttggagacttatattataattttcccaaaagaaaatttcaatattatacatcacgacatgaacccaacccaccctgaccctagtacagactttagacgtcggcctcagtcacggatctcggcctcagcccgaacatcagactttgacccaaccccagccccggaccccatatccaaactctggaatgtgagagagaaaatgtaagaaaatatgcttttgaaatagaaaataactttttgatgttatataattttttgtttttattaacttagttcttagaaaactgttttcaaaatatttggccaaacaacatgttgactctgttttaggtcaataacgcatagtcaatgttacgacaatgaaagtgtttgaatatgagataaataaataaacgatacaaaattttatagaggttc

SEQ ID NO: 389754 - DNA, 1306 bp, Cannabis indica
ggagaacctcaccaaagttagcccatattacaatacattatgatttgataaaaaaaaatcaagatagcccaataaagtaatctagaactacaggagtatcaagaaaggcctgaagttgggccagtaggggaatttcagttttagcagatgaattattacgatataaggacaaggtttgtataccaacttgcaaaggtgttagatagaaggttctaaacgagtctcatattataccatatttcatacatccagaaacaaacaagatgtatcacgatgtaaagccctatattggtggtcagatatgaaaggtcgcgttgtggagtatgtgtcaaatgtccaacttgtcagcaagtcaaggcagagcgtcagaaactagaaggaatatttcaatctctaaaaatacttgagtggaaatggtcagaagtaaccatagacattgtggttggattaccaagaacagtagggttctatgattctatctgggtgattggggatagatatacaaagttagcacagtttctttatcagtatggactacgtatatggtggattaatgtgctaatctatatgtcaagactatagttcaactctgtggtgctccaaagttaattgtctcagattgagatctaaagtttacatccaaatgctgggagagtctgcaatgagtaaagggtaccaagttagatttcagtatagtttttcaccctaagactgatggtaagactgagagaattattcagatatctgaggatatgctacgggtgtgtgtaatagaatttgagggttcctgaaataagcatctccctatgattaagttttcatacaataatagttatcaaagtactattagtgtggtaccgtacaaatgctttacgaaaagaaatgtcgttcacccattcattggagaagtcggtgaataaaggaaccttggacctgatgcgatctaaggaacgagtgaggtcataggaaagattcgaattcgtatgtttgccttataaagtggatagaagagctatgttgatctaaagtgtagagacatcaaatacaaagttgggatttttatctttcttcaggtgtttccaatgaagggaacttagaaattgggaagaagggaaagttaagtcccaggtttatctgtccatttgagtttctggaaaggggaggtcaggtagcttatcagctagccatactccctgccttatttggagttcacaacttgtatttcaatgtttcagaagtataaggcagatacgatccatataccaagttacaaaagtattgaacttcaaatagacttgtcatatga

SEQ ID NO: 389755 - DNA, 841 bp, Cannabis indica
tatctaaaaaaaaagattttagctacattcttatctatttttagactattaaaaatagtttttagacttaatctttatttataacctcttgtaaattttaaagatcctaaatattaggtatcaaacaaaacagatagagtctacacttaattttatttttacactacaaaattatacaaaaagaaaaggaaatatatcaatcattttcattgcaaattttactttacttatcaaaagagaaatgttgaaggtataagttgcaatatataaacgcttaaaataaaaaaaataaaaaaattccaaaacttacaaaatttttctttccttatctttcattacctttttctttgctcattccaacttcctaaattccatttcctgtcgccggtggtatctctcttctccgcctccggtggtctctctcctcagctggtctcctctcaagtagtaagtctctgtctctctaacttagacttactagtagctagctaattttggcttcggtggcttttcatttctctaagttagaacagcaaatatgcatatacataaacatatacatatgtcttctcatccttttcattttctcttttgcaattatatattaactgggtttaaaaaattttctattaatctcttgttaaaatcttttgttgcaccctattttcaataattgtggaagatggtggccttcttcgaacactaattttgaaacccagatactcatttgaaccattagagtatgttatgtaggatagttattcaactgacaatgagtatacgaaccataatagtcaggttaatccatttaactttcttcctgaaatcaatatatatatat

SEQ ID NO: 389756 - DNA, 800 bp, Cannabis indica
tgtgtaattcatagccttgaaagttttggatcctgaaaagtcactagaagtgggatcaactttcttttcaagtgagatgggaattcctaaacgaaggaaaagatagctaagaaggaaaccaaaagtaaggatcttgacgatatggggtttatacacatcaatgataaattttaaaatgagatatcctaggttgatatgtgtagtttttgttaggatgagatgcatgagtaattggtctatggaattaatctcatcttgatgtccactcctaggtttaaggttagccacaatgaatttatgaacaattttgacctctaatgagttgatgtatttttggtttcatgataatggacccattaccacaaagattcttagaacactccacgaagttaaagttttcatcattcttaagggaaagtttgggttcaaacaagataccattattgggtgctcttaacaattcattaagagattcaacattaagttcaaaggctattcctctaagggttcctttaactcctaaaggtacaaagcaagcataaaaatcttgtacaagttttgaataaaagaggtccaacctaaaatttcaacccagaatttcggttgtctatgcagaattccgactgggttctgcaccaacctgaattctagttgtctgtgcacaaactatccggaattccagatggcacaagaaccgaaaatcaggggttgttttgtcttttctcttgcaattttttccacttctaaaaggcaagaacctccattgttctaaaagataaaatttgtgatctccctagcct

SEQ ID NO: 389757 - DNA, 2268 bp, Cannabis indica
gtttatctttattatctacctaatgtaagaatttatagaaagttttagaaacatccatatactgttggagtattgactcgaattttactatggtttctattcagggttgtttaatttttgggtaagtttactatgtatgttttgggtaaccattgatttgtatgaagttactttttttgttcatctaagttgccttgtatgccaagttttacaatttgggtgagagagtgaaattattttagtatttgtaagtgtaatattaaaatggtaaattcaataaatttgggaaacattgacattatttataataatttttaatgaatttttattttattgttccaaaaaaaaaaaaatttaatttctataatctataactaaaataaaactgtcaaaaactttagtcctctataactattggtttgaaaaatgatcataaactacaccaccaacactggaaacactcctactcattatatcgaccattgtcaataatattaatctcctcaataaacaccattttcccaagaagaccacccatcaaatagcactgtacaaattacaatacagtcaacttgacaaaaagatcatcattgtcctcaaagtacttaccattcaatgcaacttgaatagaatttttcgtgattttatctttgcccttcaaacgatgttctcctaatgtttttcgcctggctaaatcccaaaatattagactcaatctgacaatttagaccagtcaccaccgcaagcgtcaatactaaacctaagtaattgcccaacaacacttacccaaaacttgttgaacttctctcaacaacagactgaatcaattgaagatagattgaatacttggcacacacaaaaaatgaccaaaaccagatttagagaacaactttttttgatagtcagtcaaaatagttaggatatctttaataatcctattgcccaaaagaagtaactttgaaaaggtaataatcaaaatgtgtgtattaacttcaattctagaacaataacaataacaactgtaagatagctataaaataaattagaccaaacaaacaaaacaacaacaacaataacaaagaaataaaaaaaaaatacatattatacatcaacggctcttctctcaatagggaagtcaaatctagtcaattagagctctaaaaagtagcaagcagtagctcgatcgagtacgaaatctgaatatcgagcattagcattagcagttacttaacttgtgtggacaacttcattacttacagaacttggcatcactttgcacaaacaaccacctacattgtggtgtgacaatcaagtgctcaagctcttgctctcaatcttgtcttccacacaagaaccaaacatattgagttaaacattcaatacatcagaagtcaaattacaaagaagaagcttcaagtctgttatattccaactgaagatcaaattgccgatctattaaccaaacctttgtcgtcgccaatttctatgtaacaagttgtatcttgagcctaccaaatacaccttgaggggggtattagtgaatatggttagttatgttagttatgacaactgtgcatttaggatagagtttgttactcttcacaactggccaattaattagtttaacagacttttcttgccttgtatttaatctttcttctgcatataaatacaaaataatcactgagctgagaacagttaactcaaactcatttcatctcattcttgtttctcaattaagatgacgaaaactaaaaaaaaaatgagagggaaaaggaataaggagttggtgacagtgaggatgatgatgatgaggtgaaacaaagaaaaaaaaaattgagaaaaattaattgacatgacaaatatcaactcaacagtataaaagtaagttttttttaaaaaaaaatacaatatttttaaaaatagtacatactataaaagcaaattatatcttgtaccaatatacaaaaatctctaattttggtatttggtgtaaaattccctaagtttaatgattatttctaccactttattttatgccacaatcagccacaaatatattaaaactagaattatacacaatcaatttatgatatataatattatattaccataaacaaaaatttacttttcataaatagttaaaaaaaatatcaaaatcaaaatttttagatatattaatttgctgggtgtacatccaaagtcccacattggctagaaatgggaaggatcttgagtataaaaggatgaacactatctccattggaa

SEQ ID NO: 389758 - DNA, 1113 bp, Cannabis indica
gagaagaagaagaagaagaagaagaagaagaagaagagtgagctgtgaaaagagtagtgtgtgaatttaatgtgtgaaagtgagtaagaaggaaatattatattgagatttgggtgaagagattttaataatataagtttattgttataaaatgtgtaattttatttagtctttctttgataaaacaaaatcatatttttattttgctaatataatataattaatgtgaatttgtttatttatttttagaaaatatatattaaattattttaaagaaaatgtttgaattatatttttttagtaattttgctgtcattattagatttttatttcatatatagtttttttttgtcgatatgataagatcatatgattatagatttacaaaatttttaaatttatgtatttttaatgtatacatactaattatttttagaaataaatatataaaaaatataacgaaaaaataaaacaaactatatctaaattttttagatctataacaaaaaaaagtcttatctatgaataatgacaaagtattattattttttttagcattgttattaggcatcatatagtatccaatatcacactgatagcgcgttgtgattaattagcagcttcttatattatttattaattaaaattatgtgagattctatcttaatttacaccagtaataatatatgatcactataaggttgcccttagtatatatcttattttttgtttaaaaaaaaaaacaaaatacatataattgtaaatgtaagtcatataatgaatttttttaatatgaaataatatgttttaagttgtgcatgagtttttttttcaaaatgagaacaagtagggggttaagggggaccccatgatgagccaagagattcataataataaaaaaattggagattggattagggatgaaaaacgggcaggataggtgtgatgattgcttccctatcctcatacatgcttcttaaattcacttttatactcgccttaatacccgtttaaattaaagcgagagcagggcgggaattacctaatgggagaaggattcctatcaggtacccattacatatattttttaaaaaaaatgatgtctaaaagaga

SEQ ID NO: 389759 - DNA, 1341 bp, Cannabis indica
acagctatattcatttttccaaatattgttataaaacttttagcacaaccacgatttctggtgaaaatatttttaagaataattcatttaattatattgcgtaaatgaagtaatgaacgaatgaaagtatattgcattgaattgaatgatcaaaaaagtagtttcaagaagtagctagctatgtatatatatatatatatacagtatcagggttaacgttatttattatttattattttaattttctttttgaaaagtagaagtttattttttgaaaagtagaagttattagttaaggaaactatagtaacaatacaactatcaagtacacaacgataattaactgaattaatttaaattgaaaatctagataaaaacaatcctactcccccttcacatagtttggaaatgaaagttataatattgttgaaggaagagtcttagtgaacacatcaattgtgagaagtttttccttaatttttcgaccatatacgattgagccgaacgtgaactctctagattttgatgaagtgacattaatccatttctatatttttggtatgctcatgaaatgaattgtttacaaattagaatcattaaacactctattggggtagatttctcgagctcatatgagttatatataagtttttaaaaattggtctatgtggcttttgtggcagcagtagtgtattatgtttggaaggttcgaaataaaacattttagctatttaaagtgtgaagaatatatttaattgtaaataataatatttgtagtaatgtaaaaaatatagtacaatgtgttatgcaaaaatagtgctttgtgttttgaataaatcttctaatttactaaaaaaaaatatagtggatattgttacagtagatgagagaatatattgtgggtatatattgttagacatcatcaatgaggtattgtagacatttgaactcaagtttagcaaagtttcttgcttcttaaaacagcttgaaatcaagcataagttgttgattgttgatgatcttcttgggacaaaaccaaaatatattcatatatttttggtccaacctaaaatatatatatagagatattggaattctgaatatttatcaattagagtaacatttagtcacaaaatcttattaaaggaaaagacttttaacttttttttttattagagacttcaatttttatatatatatatataaatatatatatgtcaaattctatccaaaaaaagttctataacatcaaagatgtagcactattccaaagttagttcactacaaaaaattgctacttttagtgataattttttagccacaacataatttttttgtgac

SEQ ID NO: 389760 - DNA, 749 bp, Cannabis indica
tgcaaaaataagacatgacttaacatcctataccacacttttcatctccctctctctttttatttctcttcttccggtatcgatctacattgtgggataaatagagcccaagccccataactcccaaccaccccgcgcccaagccccgtaagtcccatccatctcaattttttctttctgtcatttttcattaatttttgagccacggtattgctcatttgttctcctttttatgtttttctcctcttttctaggtgttcgatttcaaatcatatttttatttttattttaatggtttggaagaactattgtgtttatatttttattattattttggtagtaatgaagaactgcatatgagatctagatctagtttttgcaaagttaaaatattttcttttatcatttgcactgacgtaaaagatgtaaaaattggtttagaaactcgttttcaacttctcaactgacgtaatattttgtcactgtcatttaagaaccgaggaaaaaaatttcttttttgcgtctgctgaatatacgttggatcattgaaccggccataaaagattatatatgttgggattttttactttaaataaacttaatgtcatttaatcttatttactttcaataaagattaaaaatcatatattgactttgtcatatgctttgttcacatatttttttacatgattataggtttaatatataagctctattaaatcctgaacatatagttatttacaattaca

SEQ ID NO: 389761 - DNA, 609 bp, Cannabis indica
atatatatatatgtatttatataggatttatatatttatggccgtaagaattattgttttgtatatatagttatacatttctatagccattgataatacatctaagtgtaataaataaataggtgtatcaaataactaatatttaaagtacattaaattatgtcttattttttctttaataatattttaaacataaacaataatttactaaattaataaaataatatatttcctcttctttgtctctaaccattgtccatttttcagtttctctcagtcctccacttatccatgtttgtaaaattttaagtaccaccacaatacttttgttatctcctttacaataatgaataaattgtgagtattgaagataaaatttgctcaattatggccccattaagccaagaattactaaaagaatcacgaatagaaatgatatgttccattacaaaattatcaaaaaaaaaaaaaacaatgggtaaattgcgacataaatacttaatattttaaattttatacacttaaatactttatctttatttttggaggcaaaaaataactacaattgttataattactcttacactgttactaccacttccgttaact

SEQ ID NO: 389762 - DNA, 534 bp, Cannabis indica
ctggtaaaataatttccaacgtggtattggcgttattaagtggttggagtgaaagaggaaattaatcaagagtcgaataagccaacaacaatttctgtagtagaaatactcgattatgcagggttataaacttcgcacaccgaattatgaagaacaaagtttttatggggaggtttggggaagaatacttacctaagcatcgattttttatgtggatggcagttttaaactgactgcaaaaaaaatttcgtttatttagatttattatagtttcagacaagcggtgtgttatttgtgttcaagcagataaaagcagtaatgatttgtttcctgattgctatttcagcaagaagtgtcttgcgaccgtcgaagattggcttgagttgcatgcaacaacttctaatcttcctagaagcttaaagctattaggcgatccaagaggtcaaaattttagcagcaggtgatagttacaggtttggctgttgtagtgtatcacatttgcagatgcatgaatcagtgttgggttttatgccc

SEQ ID NO: 389763 - DNA, 603 bp, Cannabis indica
gaggaaagtaatctcattaatgtaacgacatgtgtcacctataagtaaataaataaataaaagaaaaatgtacttattttctttttgtatttttggttaccctttgtgttatagttcttacaattgtaataattattacattcattttgggatgagattttagatagtagataaggtacaagggatccttattggtcaaaacatatagcgtaaatggatactcttactatgcgtacttgtccttcatagcaaaaaagaaaaaagaaaacattgtacttgtttttatatataaccatttctatgtccttcaagggaaatatatacattttataataaaaacaaaaaccaacatgaattattataaaaaaaagaagtcaaaattagagaaagagtagtccaaaattattgggacctccatttgtgagagatattgtatatataataattttgttatagtagatgtgtggattatctagttagagaggcaaacaatttaacaaattaaggtttattaattattgtatatatataataatgaataattatcttttttaccccctgtacttatgacactatactattatgccccttaatctattcagc

SEQ ID NO: 389764 - DNA, 1571 bp, Cannabis indica
aaatttaattataaagaaactttaccatttataaccaaacaccaaaaaactaactaatatgccgttattcaattttttatatatatataaaaataaaaaatattaaaagtaaacattttctaatactgaataaccgactcaaatttgaaaaaaaaaaagttagcaaaaaataggcgcatgaacagttcgactctacgtgtagaaggagacgtgatcgacgtgatggggtgacatcagcaacaacaagacacgtctcaaaagcctttttcaatttttttttcaaaaaataataaaattaaaaatggtatataaaatggtatagttttgaataaaacacaatccatcacatttatgtaaatatagtgaaaataaagtactcatatgtaaattttctaatatattttgggttttatatttgggatactggtatgagattattttagttttgcggcaaagacgttgatgtgtcacgttaatacaagggcattaaattaatcaatgtcaattatgttatgagaatgtctattaaaaattttcccaaaaaatattacataaatattaaattacaacaagctaaactaaataagtattaatgccaaacatttttcttaagtaaacatctttaatgaagatacaaataaataatgcaaagttaaaatataacgtatttaataaaattgttctctaatagtgtgtcaaaaggtgattcagaatatctctaatatagagtactaaaaatatgatgtattactataatttagtgcatttgaaaaaaaaaaaaaagctattctagtattttaaaaaatttatcaaatttagcatatgttaaaaattatagtaaatcaatatatataaaggagaataatgagtcgatgacatgtcactctaaaatcactccaaaactatttttcttttttctttttaattctctaatttttaatattttattagagcataaatttacaaattgatatttttatttaaaaattttttataaaaatatttaccttaaattttttttttaaaaaaatacacaataataaatataaactaaattaataatattaaattaaataattattaaattatttatatatacgtattcgtaactatatatctgtgtggagtttttttttactttgcagaatataggaagagtgtttttttttttatatagaaggaatttattatgaatcaaacattatgaattaatgaataacaaaagaagcaggtgtgagattatgtaaaagaaacatgtatgagattgtgaatcaaacttttttataatgcgttacttttatatctcgatcatataaagttgatgtcatcattgtagttcctactgatatcctaaaatttataaacttaacactcaatttaacgttgtattagctgatcaataaaatgccacatgtaaatatagtattagccaaactaataattcttttagaaaaaataattttaaaaaacaaaaattaattaaaataaattcatattattcaaaaaagaaaaaaaaaaactaatatacatattaaatgaaataaaaatcatatttccatcttcttctagcc

SEQ ID NO: 389765 - DNA, 1052 bp, Cannabis indica
tatataaaattgaataataaattatgtcaaagaaagaaatacttaataaatagatgtaaattttttgcaaatagtttcatctaaatttgatagtgtatgacaactttagataattatgaggtgcttcaaatgtactaaacgattgaattactactcttgtaaggatatcatttattttattttgtttatttttaatttaacttttaaattaatttaataatttgattttttaaaaaaacaataatatatatggaacaatttttatattataaaaatttaaagtttaaaattatcgtggtgggaaatcttacatttttcactgttaatatatatatattaatggttgtattacataaagtataatagtgaataacaaaataacacatgcattaataaataatatccaaatgaaaagttttgctctagaaaatatctgaataatctcgattaccgttgatctcatctaaatttgatttcaacctaagggcgagttatcatctggtcggtaggagacaacaacctgatagagaaacttgttggatacttatattgaaggattggtataggctttactagtatatatatttaacaaggtaaatggttaaacaaacagttgtttctttggttcctacaaccctgacgatgacatgcttgatccaggcccactaaattagtttaggatctcacaagacttgatcggtctttttaatttatttttaatttgagattaattttacttaattaaacaattttaaatctgtatgatagtatgttattgatcttgttattatgggaaaattcatatatgaagtattttttctcaaaatttgtaattattatgaacagtacaataagatgtgagataaggcattaatatatcatccaaatataataatttataaaaaatttaaaaataagacatttttcaatcatattcaataatcaaattatcaccctaggtatctcaaaagatcaataattgcattataattaagattatttgtgttgagttaaactataaaaatgatccaatcggtttagaaatcgttgtc

SEQ ID NO: 389766 - DNA, 1072 bp, Cannabis indica
gcgaggaaaggttctatataggccaatgtttgctcgatttagggttgtgtaatatactttgagagtgctctagatctaagcagttgtttcacaccccaccattcttgttaagatcttctttgacaatgatgacaaaagccatgagaccaagattctatcttgctgatcccaatctttgtactctacattgacacgatttactactttgtcttcctcagtgagaaattgagaaggagtgcaatctgcttcaagaaatctttgcaacctgcttcctttactggcggcaaagactaggtgcttccatggaagatagttgtgttcatctaaataaattgagaattttggctagtaacaacttactagcactccaataattcaaaactgctaaaaattaatatccaacaaattatataaaaattaaacttatcgataaagtctctataatcctaggccctccacaaaaccaacctacaagataataataaataaaactttattacaacataatttaatgataactaaataatgtgaaagaacgatggtaaaaaattcatattataatataaaaaattcatattaaatagaaagatttaaaaaagtttgaaatatttatttgtcaaaactgaaaagtcgttgaagttgaagttatgagcacaaaatagatcatttctcttgcctattgaccatactacaaaattaccctaaaaattagggacaatccataataaatagtacaaagctgtaaaagacatcaaaaccatcaaatcatggtgcaaaaatcaacttggtcttattagcatatctactttaaaaatatactaatactctttaattagctaataagaataaacaaatcaaacatattcttaaaataaaaatatatatgagtataaatttgcaacattaaatgaattacaataatatgacatcttagtgatatcttttctgatagttctcttgatttatatatatgtggtcaattaataaaatttgaggctgccatgctataacgtccccgcttcaagccttcattgggtccttacactcacggaatgaatgactcttatacacg

SEQ ID NO: 389767 - DNA, 1282 bp, Cannabis indica
cctcaaaacaataaatgaatatgctttctacaatagaaataataattaagattctccacgatacaacttactggtaaccgtaaggacgtaattaaatgttgatttacgtgaatcaatataaccaatgaattcataacttaagtggttaactaaatttctaaaatatcagttcatctcaatgaaatatgtatgaagataatctttagtatattaaagatacctcatcacttcgtacgaaaaaaaaataaagtggtcttaactttagttatcctgatactacttaataatcctaaaacaaatgcaatgtaaaacttattcatactcttacacatacattaagcttctaaaaataaaagcaaatgaatgttcttaatttattcacattccagatcattttacagatgctggtttgagttaagtttatcccacttaaacataagagtaacatgagatgaataatacataaattaatttaattagagatgatgtagctactctttaattaaattaaaattatatatgttgtttatattatttatctcaaataataatttggtatatgaattatttcaccttacataggaaacttttatcatcactatgaagtaacatattgtctatatataaagcaaatattcatcccactaaccttatgttaaagatgaaatatcaattgtgagaaatatgttttaatctataggttgactctttaagcttgtatatgttcaccaccatcagaaaaaaatctttatggttgtctgtagagttgtacataaacttttgtagactgcataactcgaataacctgcccaaactaaaccgagatatctcgacaaaaaatgtgaactgaaaaactcgatgaaaatgtaacctgcttaatttttgtattggacgagttgaaaataatatcaacttgcccaatcaacctgaactaactcgaccaatccgattgatagggtttatatatacacacgtttgtgttgatcttgaaagtggccaaccgacagtggagtcatatgaatctaatgttttccacgtgttacccaataagaacttgaaagtaaacaacacaaagaattttataaagcttcggccctcttagttagcgggtaatgacctacttcccttttagttgtattgataccgagagataatactattcaatcactataggtgggatctgatatagctcccttaaggatacaaagtaggaatcaagaatggtaaatctcaagtgttgagaatgttatatgggcgtgtagatgagagagagagagagaga

SEQ ID NO: 389768 - DNA, 1203 bp, Cannabis indica
attatttttatatttatctatttgtgatcataggcataatatagtagtttttttacactcttcttcacaaatctcacaaaaaagagatggaagaataactcagcacagagcaagaaaaaaggaaatttctctcaaatcatcttctcactcttttttctatccaattatattttaaattgtacaaggaaaaattttgaaacttaaagagaaactcgagctcaatagtttcgacatcatcttttttagaagttcacataatttaaggaggattgtgttattcataagtttggaataattcagagttcaaccgatcaaaaacttaattttttatatagataatgaatttatgtatagaattaactatttaaggtatttttgtttaaactatttctcattctgaatgtaacattttctgaaccatattcaaacaatattctaattgctaaccaagttctaacttctaacgtggttggcatatggttaaaaaattgaaaatagttataatttgcttagaaaaaagtgttagggtatcaacccaagtcctacatcgaaagaataggcaagagttgccttggatataactattctacctactccattagtaggaggccttttgggaaggtgcccaaaaataaaaccgtgagggcttaggcccaaaacagacaatattatactaatatgagagtcaaggtgaggtagccacctggcaaggtggaagaacgagactcaataagttgtattagagccaaaagtttaggagcacttggatagtgggctggatttgcaacgtgtgggagaagccctcaatgtaatgacctcacgattgaagatctatatggtgtcttgtatcgaaagtctacctgatattgtagtggttaggcagtgtgtcccagtgatgattacggcagtacaaaggtcggtgttaagacctgtgtcgaaagtcctcctgacaaaggtgatgacggtcacgcggtgagttctattagtgatagtggcggcataaggtggtttcgctggaggagaggccacgagtatgtggtccttgattttaggggaggattgttagggtatcaatccaagtcccacatcagaagaatagacaatagttgccttggatataagtgttccacctactccattagtatgaggtcttttgggaaggtacccaaaaataaaaccgtgagggcttaggcccaaaacgga

SEQ ID NO: 389769 - DNA, 3098 bp, Cannabis indica
agagagagagagagataactaggtttgtagctgagctaaattgttcaaagaagagtatattctttgaactagagtattggagggacctgtctctcaaacataatcttgatgtaatgcatattaagaaaaatatgtgagacagtgtacttggaactcttttaagtattgaggacaagtctaaggataccaacaaagcaagagtacttaatttggaatacctcaaaatacgttgtgaaatgtggttgtatgaagatagcaatgagaattggaagaaactgcttgctagttacacgtttagtcttcctaaacgacatgaattttgtagatttatcaggtctgtgcagttcccaaatggattttctttaaaattagagaagaatgtgaatgagaatgaagacaaaatttctatagcttgaagtctcacgactgccatgtgttacaatgcttgatgccggcgggcattcaaaaaaatttgaagaatgaagtccacgatacaataattaaactgtgtgtaaatattgtgctcaaagacattgaatgttgaagacataaagagcatgcaaaaaagtattatggacattctttacaaattaggaaccattctcccactgacattttttgacataatggttcacatggtgatgcatttacataaagaagcgatacttcggggacctgtgcactacaggtggatgtacccaattgaacgaaccatgtccgtgtataaataatatgtaaaaaattgttctcggctggaaggatatatttgtgaagcttttgcagttaacgaggcattaagattttgttccatgtacttttggaaatttcaaactcaatttagtcccatatcgaaatagtgatatcctcccaaataagcctgaaagagcatattgggtgacccattggtaagaggaccatcgtgtctttacctatgcaagaaaagcaggcagagtggtacattctgaacaattatactgaagtggataagtatatcaagtaagatactttttgcattcttactttacttttcttcactcacgaccttgtcttacaaaaatatatttatgtgtagtgagcatgtgaacgagctaaaacttaggggtgataaaaatcttcacccagttcaagagaatgagtttccaaatgttcaagtctcgagtaagtattgttttctactaatttttatcattcaaatatggtttcttgtactagtattgattacattttttcattcaatgatagatcaatcaactctgagcaaataattctggaaaagtattagatgagttgtatgtcattgcaaatatctctaatccaacatgttattgttatcctgatgtattattaacggtgttaaattcctacttgaggatcaagatggcaatcataatacccaaaacagttgtttttaaagtctggataaggtggtaaaaatttttatggcgtactcaaacaagtctacgagttgacttacttgaaggattgtagtgttatcatttttaggtgcaagtgatgggacacaaacggtaacatgatataaagtgattactagtgtctgcgtcgcccgtcaatagtactaaaaccattcatacttttatcctaagaaaatttgatatattacattcccaacgtaaaagaatggagttgattgaaaacttattaatatttaccgtagtgtctggaatttcccagatgaggatgatgatcagaccacaactatagaagaaaaaatctcttcaaaaatctagttggtcgtacaactttcacaattaaacgatgtaaaatatgtctgtgatgatgtcgacccaattgaagtgaccaacatgtaccgtgagcagcctgaccgtcaagattcagatgatttcattatttatagtgataatgaagacagtagtgatattgataatgaaaataatgtaactgttaatgatgatgatgattatgatagcttgtagattttaaagtattgtaatattcaaacccaccgttaatcaaataaaatacatgctccttttgttaataggttgattaattaattatttctagcttgtatgtgtagaatgattaatgcaggtgtaagcaacaataagaaaaaaagagttaggagaaagtataagggaaaaaatattgaagaagaactggccaagcagcctgctggatagaagttgaaatttaaatttcataaggggactagggccccgattgacgactatggcaacaagtttaaaaatcatatcaagttggttgttcgcaataccatttctatgaataagttcaattttgaggatgttgacaagccgatcatgcagactatctgggatagactagcggtaactttcaaatttttattgtaatagatcaaacaaaactattctacaaaataattacatatgactataattttactttttttagaccaaatttgagttcccaactgacaattctgtgtttgaggactgcgttcttaaatcaaaataaaaaatgaccacgtgactggagagcagacacgaaaaggcatggaaggaaaattgagaaatatggagaggatgaagcaactaggagatcacgtccagatgtggtcacatcagaggagtgggtagaggttaaatcgcacactggaaagatcgaaaacaacatatataaaatgaaagttgtaaaattgaatctccaactgcttttttgttcattttgttcacaataaatttactttaaattacaggtaagagccgaataaaatgcaaaaactgagggcaaatgaagattcaaggtgggtgtgggtctaagaccatatagtcggctacattgtcatcgaggtatgatgttgtcagcagatttgtctaaaaattattattttttgaataatatatttctaattttttatgttgtataaaaataggctcattccgagacagggaaacttctcagtgctatggacacttttcaaaagtttcactacaagaataataaatggcgcgatgaacacacacaataactacatgtaagtaattttatatctttaataaacccattctatatttaatttctattcaactctaacaatttgtttaaattttttgtaggccaaaatagttgagatt

SEQ ID NO: 389770 - DNA, 824 bp, Cannabis indica
atattttatttataattttacaaattaaagtttttgtttacaaatatatgcttttaaagttttaaaactataaaaaaaactctttgtcatcaaaaaataagaaagtaataaaaacaacgaaaaattaatctcgcgacaattataaataaactataaaacaacaaaaaatattcaaaaaaaaaaagcatcagaacaattacaatacaattataaataaaatataaaaacaactaaaaaactgtttactattattactagagagatattgtaaaaaaaaaataaaaaaaaaattagtattgatgtatttttgtggtctatcatgtaaatttttcaagataatttttatatttcgatatcagaagaaattatagtctagtatattttttaacgttcccgtttcaagtctttattgggccttacccaacagatttatgacttatacatgagtacaccattctgtctattttataggtaaattttttaggaggtcaccagtcttggaattacctcaggtcaagtacacttaactgtaaaaaaatttcgtgatgaactactaaaaaacaagatacaccttgttgatataggtaatatgaattaatctattaaagtcatctttaattgtgtagtctcatatctagtctcagaattatcatacttctccaagcaattagagattcaacaacttattcaatatttctttttacggattacgggactgctgactattataaatttatatatatatgtcaatgaatatattattgttacgaaaattatgatcactacgcaagtatacgcaatcaagtagtaaactcacacaggtg

SEQ ID NO: 389771 - DNA, 574 bp, Cannabis indica
aaaaaaaactaaattatataaagaaattgttcgaattattctcctattttatacatttaagtaatttcgaggtctaacattaacattattattgttgttatcttcactacttaagtagggtattttaactccattcttctccaattcgatccgaatcattatagctgaaacccataacacaatccatgcgattattacgagcatagaataatattttacatcagttatctctactccaatcctccacaatgcttcacatattattgttaataaaaatactgaacaacaataatacatggtgaaataccgaaaaaatcttaaccaataattatccagacgagtattggaattgttcctttctccaataaatactttggtgatgaaattcctcaacttatcgaaattggatctttggaataaatcaaacataattcctaaattagagataaaacaaataattagaatatgtgaaaaaagaatggtataaaataaagattaaaataaaatttttattttacctgttagtgtattcaacttattgaaaaaacttctaactaaaatcttcatatctaat

SEQ ID NO: 389772 - DNA, 2508 bp, Cannabis indica
tggtatcttttcataagacttttatggtcttattgaaagcagtttttgttgtagtgcgctcacttgaagaagtttaacactatcatgtgagtctcgaataatttgcactgcattttattcccaacctccttaactggagctgcgagtagctggtttgataaatttacccatcactccataacctcctcgaaacagctgtccgaggacttcaaaaatcaatttagagacgctagagaccgacgacctgaagcattgtccttaaccaacataaaatagcaaccaggcgagtcacttaaggcttatttaagtcattttagcacgaccgctgcaaacatcagaaacctaaatgaaaatattcaacttattgcacttcaggcggggatcacagttgacctatccacggctgcaggtgaattatgggatgatgtacagggtcgcccattgaggaacattaatgaattcaatgaaagagcataagaatttgtgcataaagaagaagcaagaaatgaaatgaagctgttgaaatctggctcggagataaacctagcacaagtaaggcaacaacaagtacaatctcgactaaagtggacaatcctagtggctcaaacacaaaaagaaatgatgactcgagagattcaactatgataaaaagaaacaaaaaaagcacgacaagtatgtttcgatttatttagtatacaccgagttaaatgagacttgcgagaatatattcctcgcttatgaaaacagggttgcatttcgcaagcttgaacccatgaggcatgcgagacataagcgagattcaacaaaatactatcgattcaacaaagacgtagggcatacaactgaagaatgtcgacaattgaaagatgagatagagagcctgatctcacgaggatatttcagacagtatgtaagacatcaaggaaacgagcctaaccagcctaaccagcataacaaccctaataacccgaataactagagaatgcatcctcctcctgttgagggcgaggatatactagtcattttaggggagtcacacctcactaaaaatagtaataatgtgcagaaaaggtttattaatgaaataaagaatggacagtcgagtttgctccagaaccactgaaaaaggcaaaatccaatgaaccttcgattatctttttggaggaagatacaaaacatgtacaatacccgtatgttgatcctctcgttgtaacagtctagctcaccaataaaaggatgaaaatggtggtggtagacaatgggtgttcagtcaacatcctctacaaggatacactaaaagagatgggattagagaatgcgaagttgaaaccttgtatggttagcttgtgtggatttatgggtgatagtgtcgccaggcaaggcatcattgaacttccattgactgtaggagagccacccttatcaacgacgcttatgcaagaatttttagttgttgatctttcatcagtatacaatgtattgatgggttgcctaacactaattggactgggggcagtaagctcaatcaaacacttgttcgtaaagtttccaacacaggtaggagtaagagtagtctgaggtgaccaattattggctcgggagtgttatcgaatagaacttcagaataggatagccaatcatcaattgatggtaatcttaatagaagaaggtgagaggaaagaagaagatctggatcctagaatccaagacgaaaatagtcagctcaaacctattaaagagttggaagaagttattttagatccaaataatcccacaaaatttgtatacattgggaaaacattagaagaaaaactaaaatagcaattaattgattttttaaaggaaaacaaaggttaatttgcatggagccactcagatttgatagggataaaccctagtgtaatttgtcatcatttaaacatcgaccccagctatccagtaaaaagacaaaactgtcgaccattagactccgagagacaaagggcacttaaagaagaggttgacaaactgctgacaatgacttcatacgtgaggccttctatccctcgtgaatttcaaacctagttcttgtcccaaaacaaaacgacacttggagaacttgtatagatatttcaaacttgaataaagaatgtcctaaagattgtttcccactgcccaggatcgaccagttagaggatgcgatagcaggacacgagctgatgacttttatggatgcatattctggacataactaaataaaaatgcacgtccctgatcaagagcatacaagctttgtaacaaatatgcgactttactgttataaagtcatgccatttggattaaaaaaacactggagcgacgtaccaacaactggtgaattgcatgtttaagaaccaaatcagacaaaatatggaagtctacgttgatgacatgctagtaaaatcgataaaaagtaaatatcacacaaaggatctcagggaatgttttgatatactcagaaagtataagaaagtataatatgaagcttaa

SEQ ID NO: 389773 - DNA, 953 bp, Cannabis indica
tattgataggagaaaagccaggagtagttaatatttttctatagaatagaagaagaatatataaatatatatatatgcttagcacaagtatatgtttaggactgtcatgggcttagcactgtcatgcgtttagcactgtcatgcagttggagagtcatcaatcatgagtgtcttttcaataagcttcttggcctttgcttcttatctatactctcatgcatgctttcacgcgtttcattcttatcataaggtttcttcgccatcttcagagatcttatcttcaaagtcaccacaagcctttccaaccccaacatcaccactttcacctatttttactgatatgagaatgaaaagagtatgcatgtaagctcaaagtgggagagcagcgctatatagctagctataatattattggtggccatctatataattaatataaataactatggaatgaaaataatggtaataaataagagagatcgtatggatggttgaacatcctatccaatcatttttttttttataaattctatccaatctaattaaatttgaataattattatccatttaatgtaattatacctcaaaatctatttcaattactaatttgactaaattaatttttcaattagatatccaattaaacgcgcttgattgttattattaactaaaaaacatgaaacttaaaacatataaattaaatatcaccatccattttagtttaaactccataaatacaaatttattaaaattaaaaatttgaaataagtaatataacatcataaaaaaagaaatacataaaataaataaataagcataaaaaatactaaatcatgttccgtgaatttttttttattaaaattagacaaaagtctttaaatttaacaatttctatagttgccaaaaaaaatcagaaggcataatctggtacatgtcaaagttcagaaaaaaaa

SEQ ID NO: 389774 - DNA, 832 bp, Cannabis indica
ccttaaccaagaaatattagcaattattcaatgtactttcttgttaattttttataatattgctactgactttttcatcacctgatttgtttcaaaaagatgttgtgtatatgctgctgatttcaccaaccccaccattttttttgggggtaactacttgctctaacaagtttatatatatacatcaactcaactcatatgtttttatccattccaaacttttaagagttggaaaatcaaagcctccaaagctaatatctcaaattgaatgtacccatatcagaactttattatatcttttaattttatgggtcatcatattcatatgatgacacttaaataaatatatataaaaatgtactcaaccttatcgccgctaatgactgtatgaccatctttgctttcggctcagaactttagtcacataataatgtgcttttgattcactcttttgaatttcacatgggttgtctatactcatattaatattgtattgtatatattctatatggtcagctgatagacaaaaatataaggctcagttcagctttttatttatttttactgctacttatcattgatattaacttgcttgaatttaacacacctacctagactagaatatgataaaactgttttatatataataaataaaagtcccaccaaggatattgtgcttgatttatacaatcaggcaaagaaacaaaaagaaaaagaaaacatttttatttttctttttcttttagaataagtaattttgcatggttttgttgaatggatatatatgggtgtggtacgtttgtttattgatcatgggaccatgatgatgcag

SEQ ID NO: 389775 - DNA, 1173 bp, Cannabis indica
cataggtgtaggacttggcttcacattgattagttcagacttttgcagcagttcagttatgtatttccctgtgacaaataaatacccgtactgtctctgaatacttcaatcccaaggaaatagttgagtgagccgaggtctttgagagaaaaaatcttgtttaatttggtgatgaactggttcaattccttggtgttgttacctgttataattatgtcatcgacataaattaacaatatgataacaaactgtggcctcttcagaataaagaatgaagtatcagccttcgagttttcaaattgccactgcagcagggtatttttaaagcgatcaaaccaggccctcggagcttgcttgaggccgtaaattgccttgttcagtttgcacacatgagtaggatgttgaggtgattcgaaaccagggggttgcatcatgtagacatcctcctcaagagtgccattgaggaatgcattatttatatccagctgtcgaatttcccaatcctttgtaacagcaagtgtaagcactactctaactgttggggctttcacaactgggctaaaggtttcactaaaatcaacacctggcctttggtgaaaacctttagcaaccaaccttgatttcagtctttgaagagacccatcagcattaagtttgatcttgtgcacccatttgcatcccacaatgttgtaggatgatgagtaagggactagaacccatgtcttattcttcttaagggcccagatttcatcttgcattgctttattccatccttgatgttgaagggctgcttcaatggttgctggttcacagatggacagatcaaattttgcttgtccaacatacaccttgggttaaaaatcccagctttggctcttgtcaccattggatgagtgatttggggtacaggttgatctgcctgaaagggtacagcaggctgaggagaagtacttcctgaactcacagactcatcaataagttgagcatcagttggtatatcaaattgaaaatcattactgacctggttgtgtgcagaaaactgagatggtgattctgaatgaacttcctctgtattctcttcagcttgggaattgaaagtggtgtttcgagccattgaagggagtgtaaaccaggaatgaggagtgtttagtgttactgtgtcttctggtttat

SEQ ID NO: 389776 - DNA, 2426 bp, Cannabis indica
ctctctctctctctctctctctctctctctctctctctctctctctctcccccttaggaaaaaccagcacaaaagccagggttttcaactctattcttcgtgtcttagcaagatttcagtgattccaatctaaggtaaaattcccaaactcttttctcttagttttcttaggttgtaagttaagcttgtggcttgttttcttgaattagaatactgtgcaaattgtttaaatatgttagagtttttttatgtttatattggatgaatttagcgagtttaagctcaaacttttctctctcatggtattttgtgtttttgagactaatgttgagttcttttacatgtattatgttctttttgatatgtataggtggtatggagagttatacacaatttggggttaaattgaggtgtttttggggttttttgtggtacctgcactgaattggtcgaccggttaagtttggtactatagaaccggtcttcccgttcctccctaggtagaccccaaaaaaaccaattttccagttgggaactggtctactggttggggaaatttagggtaccctagattttcatgtttttgcgatatttaaggtattgccatgttatccttcgatagggaaacttttagttttgaaagtaatttaacatgtcactcatcagtttcacaaatattgtgacatagaggcctgtcaatcgtcgaggagttgttccactcaggttgaccagcacacctaaattcaaaaataaggttagatcagtgtaattagatgcatatgtgagtacatgtttaatgtgcatgtttatgaatgccagttagattacaatgaaatagtgatatcaatatacgtagagttgtattggataccaataaatgtatgtttggctcatgtactaattgatgctatcacattggtacgactagagtaccaagtataagctcatattatggtcaatagtactatcgtacaaacgttctagactcagtaccgcgtaggacgcgaggtaggattacaattgagtgtatgggtgcctaattgtaattcggtttatatctatgttatgattatgcttttcttgctgagtctgtcgactcgcaattattgtttgcatgcgtaggtaagggtaaagctaaggctgaacaacagtgagtgcaagcgaatgaagattgtacatgttggggcagttagaccgagagcgtatgatctttaagacaacaggctgtatgttgtatagttgctaggcaataacttttgtaccgaatattttgtaactcagttgtaaatattttaaacatggaatcacggttatatataagttatttacttagaaatttaagagtaattaagtaatgttttatttactcacgattttcaataaacatgttgattcgcaacggattacacaattaatataaaatcatgataacacgcctaaactattaggttcttacaattttgtattagagccaccacgttgtcttctaaagattatcacgacatgtacaatcatcgtcatagataagctcaattcacagttcagtaagcctttacaacttcagtagtttattttattagtatgttataaggaaagcttgataggtagcatgttattagcctgatagctgcataggcgcctgttttaatttctataataagtggtaattagcaaattattcttgatctcgatcagaccaggctagttcttggtttttcaagctgttcaattagaatggaccccaagagaaacacaaaaagccagagaaatttggtcagatccagttgcagtcacggagttcagtttcccccaaatattcatggccaaagcaaaggcccaagaggcaggacatgcggtcggggagatgttaacccactacaagctgcctaggaatgggagaacatgtttgtagccatgaaagtcagaatcaatgaacaagacaaagagatcagacgtctcaggcagcagggtggtcctacaatgcctgctctgtggtgcaggtggctcctgcccctgtcatgcaggtatggctggttgatgtggtgaatcggatggagccactatatgaaaggttctgcaagcaggcacctctagtctttctgggaggtccagatgttttgaaagtcaaaaagtggatgacgattgttactcaaattctaaactttattggtgtcagcgacaacgacagagtggcttgtgccacattccaattctaggaggatgccctagtttgatgggatatggcggctcttaacgccctagtttggtgggatatggcggctcttactcgggatgtcactactattacctgggaagagttttagaagctgtttaacgtaaagtactacaacgaggcagtttgtagtgcaaaaagtgttgggctttgtgccctaaataaaactctatttcaatgtaatcttttctat

SEQ ID NO: 389777 - DNA, 493 bp, Cannabis indica
gattgattgtcatataatattgtaaattatatatgtgaatcttgcaaattaagtaaatattatattcttatttatttaagtaaacattgatttaaaaactctcgtgattcattggatcttgttgaaataaaaccacatattaaccagaacatttatcaaaaagtacacagttaaaaatactaggtggcctttggcctctaaatacctaagacagatcagcaagttagttataaagtctgttaaactttgtaactaactcttttctctgtattccactacaatagatataaaaagccagataatctcaatcacagagcataacagaacacatacaacataaatccgaatatatctctagaccagaaatcacacagatcagatccaaaaatttgaaggttgaaggagatgtacattgtgtgagttttggagccgtagggttagggctcggatgttcaacaccaaaccagggcgatcgattcatgcaaaacaagga

SEQ ID NO: 389778 - DNA, 1348 bp, Cannabis indica
atttatgacaattaccatttccttcctcatccacaaatcttgtggtctcacccagatcaactatttttccaatcccaattgtctcttctacttctaattaaagccaatgtggtttacatgatcaaattcaccatgttgttgaagatgaagtgtatgaagatcaggaccaaccgctagagcctagaggtggatatcttgtgaagctaggttactcaagtgcatgctctcacaaccaactagattatggctcatgtaactctctaagtggctcactaattaatgcttatgtgaaatgtgcaagtatagagaatgatccaaacctatacacgataattttagaaaatgattttatacctcgtactgcactcataagtgaatatgcttgtttatatgtcgttttcttttaaatccatatacttggtgggattaagtttgacagttatttttttcttattcaccactcatttatccgatttaggtgggtggtgtaatgatataaagtcatgttttggagggagctaacacccgcatagcttgctactctattcctttagtgctcccgtcattttgttcctcttaaagtacctatgttagaaggaagaatatggattagatattgtactaagggttattatgtgtaagcctattttgtagacactatcttctaataacttgagaaatatcttttttttgtattcataataaattaaaaatactctcatattatattttattaaaatatacccactttcatgagtaagttgtccaatatactctctatttatatctagcatttttatttacattaacctatagggtttaatatgggcatcatgtatagaagtagaagtagatatattttaaagaatatgaaaatgaagataattaaaacaagtaaaataaaatggatatacaatgtaatttgcttgtacttactatctttaccttttatttgatgtcttacattgtatgaaatagtatgaaatttgtaggagaattattgggcctagcatgccatctgctgagttatttttaattttaaaaattttgtacattattttctttaaattatcaaaactcaaaacatattttttaaaaaaataaatacataaataaataaaatatcaacacttgattaactatttactttcaatttaataaattaaatattatgtttgtattatatatattttactagtattttgagtgtaatttttattttttaaaattttacacaatatattttttttttttcaaaatacaattatgttatttacaattattatttgtattgaacattatttattttaaaatcacatataacaatttaaaagaaacaaaaactaac

SEQ ID NO: 389779 - DNA, 1403 bp, Cannabis indica
ggcttcaatttagcaaataaccgtatgaaagaaaccattaaaataaataaatgaagaacacaataaaaaaagaggggggggcagtcactcacttgaatttcctttttagctgctggtttgaaaggacaagcggcaggagccctctccggccttctgtactcccacccaagaagcctataaacctttccctacaaagtacacaaccaaaattcaaccccaccaccaaaaaaaaatccagtctttgtaaacgattagagatacataccaaaatcaaattatgaatttccccatgatcagtttaaccccaattattaattttatttttctttcaagcagaaaagaaaattgacccagatgaattgaaaagaatagatggatttggagcaacataccataatgtaatagaagagaagaggcagtacgttgacgatgggaacaaggaaaatgggtatgagacatgccaagcaaacctgaaaaaaattgcaatcataattaaaaggcgaaaatttgatcatatattgagaagaagaaagcataactagggttaaggattaccatttttacaaaatgaagaatatgaccgagaaggacgaccgatccgcaatggaggttttggtatttgcgttgagacgagaaagagaagtcttcttgcgttggtggttggtaccaaaaaagaaatttataaatacaaaataaataaataaatacaaaatataaaaaatataaaaatggcctatgcaggtctcgaacctgcgaccttcgcgttattagcacgacgctctaaccaactgagctaataggcctgttgttgagtgttacaagtatttcaaaatacttaacagtaatataaggcttatattgcaaccataaaaggttagtatagcataattccaaaattacttatacaaatcttaattgctatgctttgctctatcatattaaaaaaaaataacttgaattctaaactaatatacttgcaatgaaataattctgaatttattctatttttttagatgtactcaatgttgatcacttttaatgaaattatgaaagtttattcattgttcaaaaaaaaaaagataatttttagtaggggtgtctattaatattcaatccaatccataaagtgtgaatgtccgcacttgtgtgaattggattggattgtgttaattccatttttagcatatttaattgacaaaaatattttattatttattgtgtatttcggctggcatgtgtttaatatggtttcctattttgtgtattcaaacttgaaaggaaagttgtctagctttcctatttttggaaaaaaggtaaaaatggtaagttgtggttacccatttcttttttatctaaccagctgtataatctgatcctttgttgagtttcccattttcttagat

SEQ ID NO: 389780 - DNA, 617 bp, Cannabis indica
taatttgaacatcaaattttaatacaccatacgtttttaacatacttttgctaaattaatcaattacgtttatgtggaattagttctgagcaccatattgtgtttgcaaggtatagagtgagagcttaaaagtgaagccttgtagaataaaagctatggctatttttggttcagtcaagacaaagttttaattagtggatgcaaatccaaggtccaactgaagagaaattataataagatcagtaaagattttgatttattttttctgtttgactattataataataaaaattaataaaaaattctttttaaagtttacttattattaaaaaattgtgaagaaattagaaattgttaaaattatcaaaatttaaaataacttttgaaaaattattttttatccaaacatctccgtatcatgacattttttttaataccatagctaaacaaaagaaacttataaattaagccaagattaatatcttagggtgattctacaatacactcccttaaaagggatgtactgatacacccttggtttgtttcggcatccaaaaaaaaatttagtgtattttttttttatattcatgtacgttatgttatattattttataata

SEQ ID NO: 389781 - DNA, 2440 bp, Cannabis indica
tttttatttgggccctagatgcaggtttagcttgccttagcttaagattggcccggtattattctcatgtctcatttcttatttatttttacttaccgtattgttaacatataatattaaattgttgatatatataatatgtaatattgtaataaattaataatatgtaacatatgataatatacattagttgtcatttgtaatatttgggggagttacttgttactatgagtaatctctaccattatcactaatattaagagtgtaaaaagatgctacacatcttaatttgaaattcttaatgttatatgagttatggtgtgtgcacgagttacatttgagtccataacttagggcttgcgagtttgaatttcaaatagtgatatcctaaatactatataaagaggtctaaggtgctcatattaggaagagaagttttctatcaaaaaaatgcattgcaagaaaatcttaaggcttgattagggctgcacatttgggcccgaacacccgccccgacccgctgccaaaaaaaccgaccataggaaaacccgtatgaccgggtcgggtttaacccgaaaaaacttaaaacgggcttcgggttcgggtgtggatatgtaattttcttttggttgggttgtaacccggaacccgaatcccatttttttttaaaaaaaatattaatattaatactttattacttattattaataatcacattttactaaaatgctgagtattggtcatggtcagcttaattaatagtattcattaattaagtttgtcaatttaatcatttttttaatcagatttaaaatgaaaagacttttcagtttcatatcaaattatcaaaatatagtaatatactgttcatattcgtaggtagtatacaacacagaccagccaagtcttttcagttcacttctctctcagtccaaaacttcatcttctccaagggcggcgactggttttcttctccggcgggatcgcatccaagaacggtgggctctgttcggtgtcccgtgtccacccaccacctatgcgaccgtgcggctgactgttcgtcggtctgccagtgaccgccgagattcgaggtggtgactactgacagtgactgtggcgagtagcgcgcgactggcgactgtggcgaggcgagcgtcgagcgaggtcgaactaaatttactgatattattatatatatatatatatatgttattattatatcttatataaaataattacaacaactatattattttgcaattataaatatatggtttgttatatttcattcacagtttatattggtttgtttgacttttgtatttttaaaggtccaaccaatgttaaaaataaaaaaaatggtatttttaaaaattaaattgtatttcggcccatataaaaatttgggctcagcccaatagggcccgaacccgatcacaccaacccgaacataaccgacccgaacccgactatacccatacacccgaacaccgggttcggttgtacatttcccatacccgaaacccgaatacccgaacccgaaaccccgaaaatttgaaaacccgacccgtgtgcacccctaagcttgataattctaaaagctacttcttagagagttcccttagtacttagagataggggaaataagcttttagacaaatgtgtaatacattgttcaagtcatggtgattcctactgatctacactcaaggtcgtgagtgagtgtatatacatatattcttctcttgttatatatatatatatgtgtgtattatattacatgtgttgtaatcttcttttttttacctttcatatatatatgtgcaatatatatagtgtatatacgtgtgttgtaagatatatttaatcaatctcttattttagcctttgtattatttttacaattgagttgtatatatcttaatttatcttttattgtaataaaatctctaacaaatatatatatatatatacattatataatttttagagaatattaaatataatgagttaattagtgtatatattatgacgttgaaagtttaatattttttttttagtattgttacaactttattaaattattttttttttaatttttattataatatttaatatgacgataatataaattgcctaaatcgcactgcactgtatttttgcggtagatttcatgattttaagatcttgcagtgcgattgcagtttgaaaaattacaaaaacagttttaagatcttaagtctagcacatataatagagatatcatctataaaagtggatatatcttaaagaatatgaaacaaagttaaaaattaaaacatataaaataaagtgagtataattatatatatatatatatattcctgcaaaaatttaaaaatttacaaaaatactggaatttagtttaattttacaaaaatactgtcacacggaaatcttt

SEQ ID NO: 389782 - DNA, 3032 bp, Cannabis indica
ccatagaagacaaaagaaattttttagtactaaccaaaaaaatttaacaaaaaaaattaaagtagacaacaaaataaattatatataaagaattttagtcaccaaaaatttatacaaggacaaactctagtataattatttatatattatatatatatatatataatatatggagtttattaaattcaaacacatcaaaatgaaactactactctttaatgaaattgcaatcaattataaaagaaaataaaataaaaggatgattagggatgcacacgggatggataattaacagagagtgctcttttgtccctgttccatccccgtctcatcctcccatatttcccatcggggatggagtgagaacaggacagcaagggaatcttctaatgtaaaaataaaatttatgttaaaaatttaaatatataaaatatatattttttttgaataaattatgcatttttattaatagcactcaattaaaataataacatataatccaatcaaaatatatctcccatttgagacatgaccatgattagaattaaaaaggagtcaaataattagccgcttaattcttagatcatttgataaaaaactaaaaataaaaccatatgaaaaagattgcagcatcacacttgttaaccttaagaacacctatattcagtttcatctaccgctcagaagacacaacagttgcagcaagttcattcaacattgtagcttgagcactcaactattgtgtaaggtacgtaattgcactactaataatcccttcagtcagagagaacttattattcccaactactaacagtgatttaatggcaagccatcaaatcgctgaaccaacaacaaaacaaaaccatttcatataaacaagaataaaacactcaaaaccatgtcatagacaagaataaaacactcaaaactatgtcaaaaagacaagattaattgcagtagtaagaatcgaattgtaatagcaaatacacaacctcgacaaagctgcacctatacccaaggtctacgggcctcgccaaagaaataagacaatcgcttgtagctataaatttagaaacgagcaattctaattttttaatttagttagatgtatacattaaaatatgaaactatataaaattaaaatattacacattgtttattatttaatatacttattattatccaaaacacaagttgaaaatttataaaaagaatactaatatactaaaaaaatacaaacataaattataaattatatattataaaatattattaaaaataatattaaactagtacccgtaagtgtgaggagtgtcatattatatttggggataaaaaatgattcttatcctcgccccattacccatttaggcaggaacagaaaatgatcccgtcccctcgaagcccatcccaatgaggataatatgcataaagatgatcattaaattccaacaatcgaacaaatttgaaaaactcttgaatcgaacaaatttgaaaagctctaaaatgttaacaaagtttattaggaaatatatattaacgggtgcttttataatgcacctcttaaaaagaatgtactgatacatctttttatttgtttaggtatctaagaaaaaatttagtttaatattttcttatagtcatgtacgttatagttatttaagatatcatgtaaaattttaaaaaattctaaataatttacaatatacaaaacatgttcaaatagtctatttcacatgtgtataaaataaaaaagtcacgcatgcaacagattgtttgaaccttatttttagcgtgttaaaattttttaaagttcttaaaattgtgcaggatgttttaaataactgcaacgtacaccaccataaaaaatctagactaaaaaattcttttagataccgaaatggttagagatacatcgatgcactctttaaaataaaatcttcctatattaatatagttcaaaaagttgcatagtaaagtgatatttaactattgtaaatttctctagtacaccttgtaaatgaatgttttggtagaatcttttggtatttagaaaatttttttagtttattttttttataatcacgtgtatattgtagctatttaagaccgtttgtaaatttttaaataattatgaatagttttcagtgtcaaaaataaaaatttaaacagttacataccatttatataagaaaaaataatcttgtgtagaacaaaatatttaaactttattttcggcatagtaaaatattcagattttttaaaaatttacaaattatcttaaataactatgatatatcatcataaaaaaactataaagtctcctaaatactaaaacaaataagaattctaacaaaggggtatactatattgacttagtcacaaatatttaactattaatagaaagagagactagtatgtgttaacttctactgttactatcatgtacgtacgttaaactcttataattatgttgttagagtattagtctaagttttaagtaagagctctctacaatataatataagtgttccatttaatttattaattagtataaaattttttaagaaggagctaaaaaataaaacagtgaatacttaagcccaaaacaatgttaatgtataagaaattgtaccttgtccatagggacaaaatgagtgtctgtatagtagaaatttttatatttcatatatatcaactagagaattaagccgtgcttcgcgcggtgttctcaaatttttgtaatctttatatataaatatatattatacttataatgagtgatataatctaaaatataatattttcatgtggtactattattaattattattaaagaattgattatagatttatcaatttaattatataattagattctattttattattatttataatttattgtattatgtaatttttttagataagtatattaaatatcagagagaaataaataaaaaagatggaaaagaaaaaaaaataataatataaatatataaatttgatttgatgacttaaaataataataa

SEQ ID NO: 389783 - DNA, 652 bp, Cannabis indica
aaaaagaaaagaaattcatgttatgtgtatggtgtggattaatgcaggctttttagactgaatgaaaaataaaaattcatgttatatatgcctttcaaaagacaaaaagacaaaaaaaaaatggtcataaaattaattataaaataataaaataacacaaaatgaaattgtgaagaaaggcacataaaaaaatagtaattttttattagaaattagctaaattaataacaattaactgtctaatatttcttagatggcggttgataaaaaaactaaagtaaaatcaattaaaaaagattataacattacagttaatcttaaaaacacttatattcagattcatctagctaccgctcaaaacacaaaacagtaaaaagtgttgtgtacaacagattcattcaacctcgtagcttgagcattcaactattttgcaaggtacgtaactgcactactaattactctttaagtcacaaaaaacttgttattcctaaccactaacattaatgatttgatggcgagctattgaagaataaagaagaactgctcaaagtacataacagtagaaagtgttgcacacaacatgttcattcaacctcgtagtttgagcactcaactattttgcaaggtacgtaactgcactactaactctttc

SEQ ID NO: 389784 - DNA, 898 bp, Cannabis indica
ctaatataacgtaacaaacgagtcataaaaattttaatttatcatttaacaaaataaatgatccatcctataactttaagtccaaaataatattctttgttttttccacaaggtgccaatgttccttctaagtgtatttagttcgtactgtactaattaggttaattagttcccttcagaaaaacaatttgttagttgaaagaatttccaccaaatatatatggttaccattgtacatggtgattcctgtcactgtggtcttcccttcaatacaaaatgttttcgttttatattttgtaaataaaaaaataataatattattttatgtacttgaattattattatattgtgaaaccttttataaaaataatgttgaatatattatttaatttcgttttttagatctaaatttgatttaaattgttttaaatataaattattttaaagaaaaaacaatattaaatcaattttattcattttctctaataattttaattcaaatttatctcgaaaggattttttttaatattagagcacttttataaaaaaaattattttacctttttatagaaatatatacatattaacaattattttttaatattattcaaatggcttattactcaaacaattattcctttctaattcaatcttagaattttgagatttttacacaaaatagctaaaatgatacttttctttttatagttttacttggataataatttattgggtcgttctataataaactccttaaaagatatctattgatgcacttcttattgacatttgggagaattttttagtttaatttttttaatagtcgtctgtattatagttatttaagatattctctataattttgagagattcaaaaaaaaattaacatgccgaaaat

SEQ ID NO: 389785 - DNA, 992 bp, Cannabis indica
tctgtccctgtgaagggcttagttttacacaataatttttcttaagagaaagcattttcgaaaatcaacttaatttaagctggaaatcttcaatattagtcgtctaacaatttgcctgatttactaacaaagaggaaagcttaaaaaagttggataagaaatgaaagttatcttattaataataaatattgttgtcaatgggaaacaactacaaaaatattcctgtcgtctaacaatttgcctggtttactaacagatggaagcttcaaaaaattggataggaaatgaaagctatctttttaataataaatattgttatcaatgagaaacagctaaaaaaaatacgcctgtcgtctaacaatttgcctggttactggtttactaataaaggggaaagcttagaaaaaattggataagaaatgaaagctatcttattaataataagtattgttatcaagggaaacaactaaaaaaatatgcctaaaggcagacgcacgcagccacagcttacaaactgactcttgatcagaaagtgaaacaaaaacaaactttaatacaacataaacattcctaatccctacattttaaatgtcataatcaagcaaacaataaacttttgccacaattgaaaatagtgaagagaaaaatatatcaaagctgaacatcaatatcactcacattgattatcatgtcatcccaagtctcttgatacatgggatcctgctttagatcttcagtgtcactgacataagccttcatctttggaatctagagcttaccaaagaaaaaaatgaataagctacaatcttatgttacttgtaaccaataaacaaaggatcaaactgaaaatacaatatttgctgaagcatgatgagagttgtattatagatgataaattgcatcagacctaatgtaccctttctcactaaatgtatctttaatttttgtaagctattcatgaattgatagagaaatgaaaagcttaagtatcg

SEQ ID NO: 389786 - DNA, 773 bp, Cannabis indica
agattcaaagtgtggagctataaagaaggagaacggccaatatatcacatgggcccaatgaataacatctatgctattgagggacagttcatggaagaaatagagagtgaagagagccctttcagggctaaacatccagagcaggcacacacattttttatgcccataagtgtggctaacatcattaagtttatttatagccctgttatttacccagatgactacaaacgagatcgcctctgtcgagttatgaatgattatgttggtgttgtggctaataagtacccattttggaatacaagccacggtgctgaccattttatgctttcctgccatgattgggtaagttactcattattaagtttctctctctctatatatatatgcccatatgtaagcatgtcttcaccagaaattgatttatttatacttaaagagtgattggatttttgtacgtaaaattcattttagggtccacaagtatcatatgaaaaacaacctcggctctttaaacacttcatgagagttctatgcaatgccaacatttctgaaggattcgaacccaaaagagatgtctcgttgcctgaaatctatttaagtcatggaactttaggtccaccaaatttaggccaagcccctcacagacgcacaaacttggcctttttcgctggtggactccatggatacattagagagatcttgttccaacaatggaaagacaaggacagtgatatccaggtctttgaaaaggtaccaaaagagctaaactacac

SEQ ID NO: 389787 - DNA, 1991 bp, Cannabis indica
ttaaaaaatattattttcccatgtaattactaactattttgccaaacaagatactaggaattcgtatgtaattaccacctcatatccaaatacaccttacattttaaaatatggtataattactaaactgtgtaattattaacctagtaattaccctacctagtaattacacagttacttccaaacacaaccctaaaaataattcatcacttcaatctctctcccttttttatttttatttgttatctcaataattggtattaatacggaaaaatctgactaattttgccaagatattttagaaaaaaaaaagcaaagaagagtaagggagtgaagtgaaagataatagttaataaaagaaaaaatcaaagatgccatgatttttcccaaatactaaaaccctaaattaattgacttgaagtgatctgacaaaagaaagctcctcctttccttataatacttcgagtgactctctctattgttctttctcaaattagttttacagtgagttgagtaccagcccactctatttaaggtggtatacttagatttttgtggataactgtgtaatttatacattttcgtatcacgactcgagccttaagctgtcacagatatgtaatatccatagtttgagtagtcaaaggccacactttgacccgtgtagaaagataatgcttataaattatccttttatttatatcacaaatacttatttaaaaataatagatagctcctatatcgataagaaaatattagtaacaaaatcaagatcactcatcaatataaaagaacaataatatccccacagttttgtagtcaccgaatagataaatttaataagtcaataaaatacaaaaataatgtctagcatacatcattcctcatttctaactagtacatagttaatttaagtcatccaggccatattttcaagcttaaatacaaaatcagtttcattataaaatttgataaatagaattagactaaagtaataacgactttcttcctcaacagtacaatcctcatccactagcgtcaaacttagttcctagaatgggagaaaataaggggtgaccttataaaccccagtaggaaaataactaatatctaagaacccttggtttaataaaaattcctacatcgttagcttttaaaaataaaacatcttatcaccattgtcaagatgtataaacaaaatagaaagaccacaaataatcacaaagtcaagcttcaaatgcatatcacaccgtctactagactcctaactctcaataccaatcatataaaataacatccaaaaatcaggtagttacacctgataaccaccaaaatactaggactcagattcaattcatttcctgtacctattctaggtcttacacctataggtgagtgcacacctgatctacctataatgacacagagactaagtcgtgaaacaacaatatgcataaatcatgatcaacatgactcttatcagtataaccaaaagcagacaaaaaataagaataacaaaagaacatattccattttattttctagaaaatctggcagcataacgactgtattttgaataaacccaaaaaatcataacctgcataaatatttgtacaaaaatatatttgacactcagtgccccataatagtccaataaaatatgcagattaagttttcaattttcaaaaaaattgacaatcatacaaattagaatatgtttaatgttattccacacatataaaattaattccaataatcaagttgagtccctacctctcctaagtagttaaactttgtccaaaaatatgattctaagctctcaagtctcgagctctaattatttagtccaatcatagatatcgctctcatctataccatcaaatggttcaatcattatcatcattatattctacattcaaaactgagtccaacgacatataatatgattacatttatagtttggagttccaaaacctcacctaagcggtgca

SEQ ID NO: 389788 - DNA, 689 bp, Cannabis indica
ggggggggggggaagagcaatagaggcttgaagtaggggcgttacatttgaaaacaaaacagacagagaataagactatgaataatagtctcatcatcacacaaacaaagagaaatgtctttgaactgatacatgtttcaaactaaactgatacatcatgggaagacactaagtgcaagcacaccatataagatcttttttggatcaacatcctgataaccgttaaactattataataactgataagcactcttcactatttaaaaaccggagacctccttactcaagtaataactatcattcatggcctcttacatattcttatttctcacatgttcaaccattacaatttgttagttttattataatcaaccatcaatcatttttaaatattatctaccatcaaagaatcgatgtgcattacttggaactatttgttttagacaatgaaataatattaaaatcttctagttaataaatgtgagtattgaatcgattactcttaatcattagattatttgattcagatatttgactttgatttgtaaaaatatttacaaaattttaaattaaatctagaaaaattacattggatcacccatgattatagttaacaccacccataaaagaatgttcatggccaaaatccataaaccttgtcatcaaacactactacaatattaggcttt

SEQ ID NO: 389789 - DNA, 2431 bp, Cannabis indica
caggttgatcctgagatgcacgattcctccgatgggccttctcttcctaccaggggatctgatgagttccgtcctttcgtccgtcgactcccggagttcaagttctggtaattgtaaatctttcatttgttctagttctttatcttttctttaattttgctacattttttgttctttcaattttactgcttatataagattaggatcctttagggctatgatttaggtttctttgaaatatacatgagcattattaccttatcgaacatagtattttacattgctgaaaatctgaatagtatcaatcattttttatatcaattattgtgtcttggaattatcaaatggtatttaaaattgtttttaagttccaatttttatttctttgtggaaattaattttcagtatatttgtaggtttctgcattttctgttctgatttcaagaccagtctgagctcattcattcgtaaagtcatattagtttacatggctgaaaatctgaatagtttctatcatttcatatcaagtaaaagaatttattatcatggtcgataccttatggattcgttgatgagtaattagtgtggtgaaattaatctggtattaaagatttgtttttatgttccaatatttctttgtcaaaattcatattcatgtttatttataggtttctacattttctgttatcatttcaagaccagtctgttttcttcgctgattcatactcatgtagtcaaattaatttcattttgtaatttggatgattataataaccgaagttttgtttctgtttaggtactctattacaaaggcgttttgcattgcttttgtgatgacattcttcagtgcctttgatgtacctgtattctggcccatacttcttttctactggattgtgttatttattatgactatgagaagacagatttctcacatgatcaaatacaaatacgttccgttctctattgggaaacaggtatggagggtgctttatactttgatgcttataaatggtgtgtcattactattaaagactgatttttttcctttgcccttttttcgtttagcgatacgatggaagaaaaagaagatcatcttcaactgatgggacatcagactgagcaattttcaggtagattgcatcaaaaaatttaatattttttcttaaaagtcacaaatccaggtgcttgcaattaggaagattacgatgtttagtgctttgattaggcacaatggttgtttatttaccctggaaaatggagctttgacaggatgatgaagtggttggctcaagtacttttcttctcttacttttggtattatgggaaagtccatttgtataggagggaaaatgcccactgttttttccttaatagttaaatccagtagtagtgacattacatatcatatctacttttttataagtctttgcagtgtgaaaataccaatcatattgcgtatttttttaatcaccttagtagttgtattgtactcttaattccttttcaaactgaatctgagcttagtgctatgtttcttatgcatatttctgttctctcattctatattttatcttttgatgaaccctgttttttagagtcattatctccactttctctgatttgctctgaaaattggcatcttttgattggaacttgtattttgaccttttaggttatgtttggttggggggtaagaacaagaagtgggaatgaaatttaatcattttcatgcaagtaaaacaaaaataaattaccaattcaatatagttttctgtcaaagtagtataagttttaaatgagcaagtttcaaaaatgcaattcatgtaacatttttgtgttaagcatagagatgaattataaaaccatattaataacaataattagttcggtaaaatgctctttttcttttaattcattttctaacttaccctagttttgataattattttcgaaataaagaattttttcattagggaacacttaaaaatgacaacaagtttccactgttatcagaatcataaataaaatctaaaaataaaaactaacagactctcttcatacaaaaaaagtattgtctactaaaacgagagatcaatattaattgactacgaatagcaacaactgtcaataaacactaaagaatccgttttaaagtacttttaaaaaaatctataacatgtcaataaaacagtacaataaaattaagtgaatttttaattttataatttttaaagtataaatttgtaaaaatataattactctcaaaaaaattattttataggaaaatttaaaaaaaaaaaaagttaaaaaataatagaaaaaaaaacaagataggataattgttacttcctagagagaaaggtttagctagagagaaagtccttaaaacatctaaaggaatgggtttgttgcccttagattgatgaat

SEQ ID NO: 389790 - DNA, 1457 bp, Cannabis indica
gcatgagagcccatgagaggcttgcatgcgagcgggtgagtgtgtgcaagtgcaatgcaacacagctatgagacaggggctcacatggaagcatgcatgtgtgcaaatttctgcgagcgtccatgcatgtacgtatgtgcatgcaagcctattagtgtgaaaacgttacgaagtgctgagtatgttgtttgtgtgaagagaagtgatggtggaatttgaattcacatcaaagaggataccgttagaggggaatcgaaggacaaggcgtgcaatggagaaacgtacaaccacaccttctacaaactctgaaagcaaggaggtatgagtagtggaggcaacacacctgcaaggtatgagaacccgactgagggtacactgcagttacactcttgcaactagggaccacacacctgcaaccagggaccacacacctgcaactggggaccacactcctacagccaaggaccacactcctgcaactggggaccacctaacaccagacaaaggcacggagcgcaaggctacctcctgcacctacgacgtgaagcttgaaagcgacacattgtccccttaggtccgccttgtacttcagcccattagaacctataaatacccctttttagatgtgagatgtggttggaaaattattcttgtaacttgaccttgagagaaatagaaagtttatcattttctctccatcttttgatagaaattggaattcatattttatatttctttttgtcttagatctgttcttgaagcatagttttattttttggccaacaagttagttgacaagttttcactatcaacagtatacatgaacccctatttgtgttcattgtgttctttgattcactcgttaaattttttttagagaagatgattcttaaaaaatccattttaggagctcaattacataagtggctgggaacatgtcatactgtaatatcccgataaacctaacggtgaatgattagggtttaatatatattatgggattattcagataatgagtgagattatgatcctactaatctattttagcataaattataaattttatgataagtggataaataagtgtaatttattaattacagagatttatatagcatgtgtaaatataatatgagctgtttgtggaatataaataatttttaagtttggcaaccttagagacttgatcggaggtcaaaatgtcataatagttaaattagtggttttgatgggaatattaaagtaagttaatattaaattataggggtaatgagaggtacatgaggtttgacctaatgctcaagattacagatttcttagtggctaagaaataataaaataatttttattagggatattggcggctaaaccaccttaactttaccgtttgtaacacttaaccacaaaaattaaatttttggcggctaaactacttaaaccctggttctgttttgctc

SEQ ID NO: 389791 - DNA, 2614 bp, Cannabis indica
tcctgaaaggatcttgaaatcaatcattgtgatatgtagatccgaacttgtgcagcagggtcaatcttttggtactaatgcaggaaatattacatggaaatcagtgtgcaaaacaaaaaaggcaggtgatcttggattccaaaacattgtagcttggaacaaagctaccatgggaaaatatgtttgggccagaacttccaaaaaagatgatctatggatagaatgagttcataatgtttatataaaggaggaaaattagtgggattactttgcttcaacagagtagctggtattggaggaagatcgtggtggttaaggatgtcttttgtgatttaatggcaaagcagcaactccaaatagaacattatcacattcgagaaggctatcagttattatgtccagaaaattatcgagttcgatggagcaatgaggtattggtgggtttattttggagttgggatgcagctatttttcaaattatgagtgggttttagaaggcaggaggttgttttggtctgatggaggcagagagggtaggagaaataagaagaagaaatgcgaagatgaagaacaatttagggtttttaaaagggagaacattggcacaacattttcgtgcctcttgaactgcaaaatcgtgcctagtatcttcaactggcacagagtttcagggccgacgtggttgtgcccatctgtaatggagggaaatttctcgcttgcattaacgtccacttttcagaacttttggggtatgacatttttgtgcccactgatcatagtgtcgcgcccaactgccaccaaatttaaaaaaaaaaagtggcacgacaggaagagtgttggtccaaaaatactgtgtgattggcaccactttaggtcataccccacttaggcgtgcctatatgctattattgttgtagggataaccataacaaacccaattctctttgaaaaaaaaaattatacatttggtgactcttttactgacactggaaacactaggtccggcatgggccaactggctttaaccatggctctaatcctccatatggaattaccttctttcaccatccaaggaatcggtactcagatggacgattggtgattgacttcatggcacaatcactgtcgttaccttacttgcccccttgtaaaagtgttaagggaaattcacctaatagggtcaattatgctgtggctggttccactgctatagaccatgagttatttgctaagaacaaccttactctcaatgtcactcttgagtctatatgaaactcaatttctttggttcgatgagtatttggaggaaaatgttgggtgtaaaactcaagataggaattgcaggggtgctaattttgatgatactttgttttgggtcggtgagattagtgtcaatatatgtgctaaaagaaaaaatgggaatggcgtagattagatagaaggatcgagcgccccagacgtagctgaaaggtgaaccgggttacaagtcacaagtaattagtgaaattaagtagatctattgaattatattactttgcaaacttgtgtacataaaatttagaatgtcattttgcatagaaccatcaaaaccatatagtgatggatacaatcaatatctcttaaatttctagagctagtgaattgatattcatttcccatttgaatgtgaagtaatagtgattcattatggtaattctataatcggtcattctcacaagattcaagatccttaagctagtcgtaataactttagtgtgaaccacttcaatactgtctgctgcctatgtattcaaaactactcttaccgaatgtattactaattgatttctgcattcactcttaaataaaggtgcaaaatatgttgtggttcaaggctttccaatgttaggatgtttgcctttagctatgacattagcttcccaagatgatagggataacataggttgtgtgaagagtgtgaataaccaaagttacactcacagcctagccatcctaaacttggtaaaatctgtcagaagacagttcccccaagctctcaaagcctgttgtggcgtcggtgaaccctataactttgacgtattttctgtttgtgggataagattgtccaaaaccgtctcaatatgtcaattgggataaagttcacctcactgaaaccatgtataaggcggtatttgatatgttccttaaaggatcacttatggaccctcattttagttacttgttaggtagaaaactacaccaaggataaaattatagcaattatattgtattagcactatggggtactactctcattacaaatcagttttcaaatagaaccttatttttttaaccaaacctccactctatactatgcaacattttcttctattgtctaaactattcttgtaaatactctttaacttattttcctttttttacattagctttcaaaagattccttaattttttttatttttttttaatttgaatttgaattgagttttcattcatattatcatttgtcaaagtgactaataatgttatttcctttacacgtacagcttgtctagaaatcacagttgaatttaaacatgacttcatttccttgaaataaagtattctttgggttaat

SEQ ID NO: 389792 - DNA, 1677 bp, Cannabis indica
gcatgtgacagagttgacactgaacgtttctgtaccacaattttggcgtttgaaccacggccaaagccagggggaccgacttcctcgaccaacaggaccacctctgcaggagcaggggcgccatttccacgagatagggactgatgtgggggaccaccatatacatgttagtaggaccagtagcactcctattgatacaaagactgttttgagaactagagaaactaggtctgatgaaaggattgtacccccactgctttgtgtgtgaaaggttagcctcacctttgttgatatcaagattctttcttgtcaatacacaccaattgatccattagaagagcttcaatctcagccacagtataggcctcttttcttattgtcacagatgtaacaaagacatcatactctgaaggaagaccattgaaaatggcttcaatatgatcttgagcagattgagagtgactgatcatggcaagttagtcaactatccctttgattttaaggaggtagccattcagtcaaccagtcatcttggtgttttgaagttgagttttgaagagacaaacgtcgacagcattcaaggcagtatagtattcattcagggaggaccaaatttgagttgtaatctcacaaccgatcattttgattggttgtcttctccaacatggaagacaagagccaagaaaccaagagattatcttgttgttcccaatcttcaaagtcaagattgatgttgttggttctttcatcttcagcactcaagaactttgccagaacattagcagaatctaaaaactttaagagacaattgcccttgattgaagcaaggacttgatgcttccatggaaggaagttatgttcatcgagtttaatggacaaagaatgattaaaggagataggataggatataggtaaaggtacctgttgattgttttgaacctgagcattgttcaatcttgatgctcttctggtttgtgctgaagatgcttccattgttgaatgatcaatggagctctgataccatcttaagttcagtcttagagagagaaaacagagagagtgagaaagaagatgaagtagttattgtattgattaagtcggaaaagattacagagtagtatttatatagagatattagttacaagaattaactaaaactagctacaagaagtagctttaatagacactgtaacaaacacaataactactaactaacacctaacggctgttagtataggtgtccttgacaattagttagcttgctcttcatatttttctcgtgatggtattttctttgaggggaatgtccctttgagttgaaagtaattttattggttgattgttaatgaaattaattgagttatttttcaaacaaaaaattatgtgtatttcatgtattaatacttggttccttatcaattttggtagagtatggacaaaaacgtgaaaacataacgtattaaaaatagtttgggttcatttgacagtaatatatataaatataattaccattgtagaaatttgaatattgactttctagctcaatctaaataaaaggactaatacatacgttacatttttaatttaattttgttcgtggcaaaaataaaaaatgaaaagaaatttgaagaaattacactctataccatttttttattatcctcttttatttttatc

SEQ ID NO: 389793 - DNA, 1096 bp, Cannabis indica
tttttttttgaaaaaaaagaggaactgccatgaatgtaacaagtgacaacacattaataattttttttattttttaattgaaaaaatataaaagatgacataaaataatacaagtgtcaatatgaggataaatagaagtttttgaaaaaagacactataaaagtgtacggtaaaactataaaaaataccatatagcagtatgaaagtaacaaaatgtaaaaaaaaaaaatataccaggcaaaaaccccaaaaattaattacacaataggaaacaatctctttgtattaacactcaaaaaaaaaaaaaaaatctctttgcattaaattattaattgtgtaagcattgtgtaatataatgcgcttttaatgatttagccattaaaaagatttagaaaaagtttgagcttacgtaattaaccatataaaattcaagttgcatattagacaataaattagggtaatgagaaacgaatagaataaatttgaatacttcccattgccatagttaatatatattattaaagggttgccctccgttaatatatgtgtttatatatgtacctttcccaattagttaatttatataggaacttttccaatttttacgcggcaaattacaagtaatgtgaagtgtgaacatatagacatacatgactaaatttaaaataattaagtaaaccattcttttaatagtgtttctctagagtcttaacggcttaatgattagagataagtactaatcgtcactcataatgacttcttaaattgggcacgattacatataagcgactgttcttataattaattaaatattagtgaagttgttaagaacctgctaacattcccttaaaaaaatatagtaaataaagtctcagctccacatcataatacacatccaattgaggtcttattgatttgaaacttaggatcacaaacccaaatgcggaaatagatttgaaatcttctacacaccaaaacaagaatattgaattatattagtacaccaaaaaaaaaaaaaaaataagaatcaaataattataattaaatataatgaattacacatttagagcaacccaaacagctctaattaattaat

SEQ ID NO: 389794 - DNA, 1214 bp, Cannabis indica
gacgaattagtcatttactaccaaaacacaaacaccacattcatcccttctaatctaataaataaacaaatggggaacaaagaaaatctaatccacgtcaccccaaagtcgtgtttatccatatctctttccaataataaaactatgcaaaatatttaatttaatgccattgtagatatattgtcatttatttatttatttattttttcttcttgggagtgggtatagcaaatacacacaatccatcacattgaaaaaaaaaaaacaaaaaaaaaacttttaatatttataattatgattctttgtgttcttgcagatctgcaagagagaaacaactccttatcttgaaactgttaagtcttctatcatgaagcttcgataacctcccatggcgaaaaccacatgattgaccatcgtcgtcttcgtctcgtcatcatcgtcgtattcatcgtgactatcatcatgttctttatgcttgttgttctccatggatgatgattgtcctttgaactggtgatgttcttcatcatcttcttcatcttcgtttagagtcaaaagaggcatagattttgggttagaccaactgtagaatgacttccttgaccacttggatgctattaatattctcctccttttgtttaatggattctctttcttcttaagatccgttactgcactcacctctgataaattcgtaaacgattttgattttccagaaaagtggttcgataatcctctcctgcaataatattaattcaattaatttcttaaaatctgcatcaaaacactcgtccctttccatggatctaactgtactcattacgaataagaaaaaataaataaagaaattacttgatcggaagagcctcttcaatcgagtccaaagtactaagcgatccgcctctaaacttgctctggacttcgtcggcgtcgccttgagatgaggcgtcatcatcgctgtcgtccggagctccgatcgaagaggaacaattagaggaatcatcctcatcctccgcagtctgatgagtcttgttcgggaggcagatctctgaaccagcgccgtacaagcaggaggcgaccgacgcgtgcttgtcctgcgccgactccataacgtacgccggtggtgaagagacatcgataccgaaggtgggtccaacaaagacctccatggacgccgtagtaatttttaagagagggagatatagagagagaga

SEQ ID NO: 389795 - DNA, 905 bp, Cannabis indica
ctttaagaattgtaaagcccatgtgttccctagcccctggcaattccaagataataaactcataatgaaacgtgggcctagagaccagcacccaccatattggagttttttgaattgttgctcaattgggctgaactagactcatcattgtgttcaaccatcagtaaggcccatttcagtccttcttctttttgaatctaatactaagagacaaccttcatcaattatagcatcatcagacattttcttatttagaatagtcaacttcccatcacccttcaatcttggaacatcattactgccattagaagctgctatcttaccagattattgacccatgaaagtctccaccatcataagagaattaacatctctagctgggatcgtccctctctctccaaaaccatctgatcggaatctgcttaccgcaaccgatgcagggtgaacgctggcaacttggtgttcctccaaagggccataaattgtttcaaccatttggttctaatcaactgatttttacgttggagtttgactctcaaccattccccatatggctttaatagctttccatcttgaacatcaaaccgctatggacaaaacctctccgaatgtcccacaattccacatacaaaacagaacgtggggatatgtttatatttgaaattagtccaaaattcaaccccatccgtattacgtagcttcattctgcgtttaagtggctttgtgatatctatcgagacccgaacccgaagataatccctccataatcccagaaagttcttttcatctgaagccacaagctttccaatgtaattagctatgtccctagctactgtttcagttttaaaccctgcacgaagatcatgcaatcgtatccaaaaatcagcctcttttagttgaacttc

SEQ ID NO: 389796 - DNA, 1194 bp, Cannabis indica
aaagtagtagttttttgtagtgacggtctggcagtttatgttttcaagtaccacaataaggtgacatatattgctattagtgtaaattaatattggttcgaatacatattttgatttaataataaatagagcattgctattaggcaccactggtgcctagcaccttctcgatatgtcgcgttgcgattagttagcgatactccctaaaagctattatattaaatatatgagacccaatacttaattagaccaataacgatattgacacataagaaggtactaggcaccactggtgctctttaaccttttttatataaataatataaaaaaccgtaaactacgtgttatatggatatggtattgggcacaataagatatttaattatagcattgctgattagacaattatgaaaactacctgacaactataaagctttatacctcattaattccttaattaggtaataggtaatgtgaatgtgagagtataataaaaatattacatacagtattggagataatattatactaatgcatgcttttcttaagaaaaaatcagaattagtatattcacaacaaaaatatgtacaacttaaaaaaaagcctaacaaaattacttacaaactgttaagagctcccttacccaatctatatctttcctatgtattgaatttactcaagctcatgaacatgtaatcatgttaccaatattttttacaagaacaataatcaaatgaaacttttgttcccataaaattaagtttaaactatgccaaattttgtaaacagctactgaaattaatgatactgatcataaacatcctccttcttccttttgaaattcctctttttctaccgccaatgaatttacttcttaatctctgttcctttataagaaagactacagcaaatgacaatttcctccaaaaatttcctgctatatatagcagcagttaattaaagaagaagtgattgtgcctattcattatctaaaccacacaaaagacaagtgtaattaatcttgaattctaccaaacatcccttgtagggagcctttctgaatggactaatcacccacttaatcaccctatgtttaggcacaataaacctgtcccaaatcagattatattacttctccatattagtttgttgcattttgtcacataaacaggaaattaaacttttgaaactcat

SEQ ID NO: 389797 - DNA, 1236 bp, Cannabis indica
taatttatttaaataataaatttcaaacaaataatttattacaaaataaataattactattttttaattcaaaatacatttttctgaatattattatttaacattatcgatttccttgacagtgttgcaaggtggcgatcccaggaccatggacctataatattaagctccaataaattagattatttattaaatctcataaaccaaaatattttatttattaattccatgattactccactataaatacagaattgaattcttagtaattatagaattgtatttactgggtttattgcagtgtccattgatatgatcaattccaatgattaacattccctgtgttggtttgtaatttgttttggtcaaactaccgatttacccttctaattacttcttcatcttttagtaccgttaattcactagtgaaagtataatttagatccaatctaaatttgtaaacaacttttcaattccataattaacacttaaagagaaccaatcttctgtctgttaagaaagtcaggattccataattgtaagttcccaaccatccatattattatcttctcaaaatagaagttgtaagaatcatcttctctgataaacttgaacgagtgaatcaaagaaactaataacatgaacaagagttcatgattactcagaattatggtcgatctactattgatcataattgtgatatgaattatgtctttatggtgaacaacatgtttgataaagctagcttaattacatctcggtccatgtcatatattatctctattatatacaacaccttcacttagatatcatactacatcaacaattcaaatcgagattgcttgtaccgaataacggcatcaatgaaccgtactagcaaccattgattaaagattccataactttaatatgttgctgactattttattcatgtctacgtgatcttaattctcagtacatacaagtcacaacctcatatatgaataaggaattttttgatatttatacataaattattcaatataaaatattaataaatgttcaacttatatatataatcaataatatctctatagcctttttagggcatatattctaataatattaatgtcctatttataggtagccatgcactttgggctgggatgatccagaccaataacagaatttagattcttattttgctcactaagggtgtttacataagtatatttagataaggctaattagtaattt

SEQ ID NO: 389798 - DNA, 1260 bp, Cannabis indica
aaacaaaaataaaaggaaggagggtgattttcgaaggcttgcatacagagatgagaaccccaaataatgaaagacctatgtcattggttatttaggaatagcctaagacataggtgctttataatgtcttctgtggcctttcctcttcactttctctcttctccccttcactctctcaattaaaaattttaaaaaccctaaagaaaaccatcttgaccagaccaattttcacaactttagattgttttctaccattttttttcacatcttcaattcttcaagcaataattcaatctagagtagcaaaattaaattattttaggatttaatggcaaaacttgaaggtttacgtgacagttttaggtgagtgatggtgattagaaaatgctattctaagttatttgacattagctaatgtaaatgtgtatttatttaatttttttaatttaatttttatttatacttgttatatataatttatatttaatttaaatatattaataataaaataatatatgtggaaaaaataaaattagattttaataataaaattataatttacacaaaattaattttaaagttgaaaaaaaaaacatagaaagctcttatgccgtcagttattgtgtaataactgacggcataggaacactatgttgtcaagtatttaataataacttacgccataggatccttatatcgtcagttatatttctcccatacagcgtcgcttgaaacaatgtcgatagtgaattttgctaaaattaacgttgtaagccccaaaaaatggcctctaaagcctattttctggtagtgtcaaacatggcccaataatggcacttttcgattattcgtttaattgttgtgtttaagttttggaatatgttaattatgttctatattgatgttctagaaagtttcgtagcatttgagattgattggaccaagttgtggtggtttgaatattggaaatcttgtgtttcttgctgcccaggaaactaaaatacttgatggtacagggctgtaccaactggaaatctgtttgggcaatatttgggaaacattgatttttatattttggccataatttttcactcggctattcgttttggacgttctatatatcattattaagcttatgatgagctctacagtaaggtatatattttagagctaaagtataagttttattttaaggtattttttgttgggttttatgtcctaaataaaactccatttcaatgtaatccattttattcaaca

SEQ ID NO: 389799 - DNA, 695 bp, Cannabis indica
caaacaagattcaggtttgagaagttgtggttacaagaggaggaagctacaaacatcattcagcaacactggcagcatgctaatgacaaaaatgttgttataatattcacagaaaacattaaaaactatgctgattcgctccagctgtggcatcgacaaaagtttggcaactttaaaaagaagatttctaaagtgcagaaacaagtttcagacttgaacaatacgactaaccgaacccctgctgtgatggatgatctgaagcttcaagaaaatgtcttggatgacttgctagctcaagaagagatgtattggcatcaacgttcgcgagttgactggctacaaaacggggaccaaaatactaaatttttccatgcctatgcctcttcccataaacaacataacaccattaaatctttggttgataataatggaaatgttgtaagttcaaaacctggtatgacagatatcattacatcttattttggggagcttttttctgcaacaacagttaacttggaagctttgagtcacattcttgcaacaattccaacaactattacatctaatatgaatgagtctcttattcagccattcacaagtagtgaagtctacaacgctcttaagacaattaatccagataagagccccgggagtgatggaatgtcagcaatgtttttactgttggaaattatttt

SEQ ID NO: 389800 - DNA, 636 bp, Cannabis indica
aaaagtaacagattgcttaataaatacaatttttttatttaattaactgattttggaaatatataactggtaaattaggtttagtatgtggtaattaatgtgagaatattttgtctaattgtatagcattttgtaaggggataattacaccatatactgaaatttttaatttttttacatttataccgtggggcggaatttttttcaaaaatactgtgtaagttttatactgtgtactgtgttaagttttcactgttgttctacggttatttttttagttattccacgattgtttttagttgttctgttttgtgttctactgttgttttataaaaatacggtatttttgaaaagattttcgtgtgacagtatttttgtaaaagtgaaccaaaattctagtatttttgtaagtttcctttttgtaattaagtttttttctagactctagatttagatggaccctagcttgctttaacccagactgggatcgatatggactacaatattgggataatttcacaaatatacaaaaacaacaaaaaaaaattataaaaatatggtttcacagaattttaaatatttttacgaattttttgattttatttacaaaaaatacggtctttttatgttgcattc

SEQ ID NO: 389801 - DNA, 762 bp, Cannabis indica
gacgatgactttgaaatggaaactggttcaggctcatctggtggtaataagaagggtggaaagaaaggaggagctgcagcagcagccaaagcaaaaccgaaagcagcagccaaggcaccagcaaagaggagaggtggtggtgcagcagcagccagcaaacagagtagtcagttgctgggacaaaagttgttgactgatatgttgaagccagctgatgagagttcaggaatttcaccagagaagaaagtgaggaaaatgagggaatccccatttaacaagaagagtggttccttgttgggaaggactactattggtaatattggtattgttgaagaggatggtgatgatgagtatgaggatgcatccaatgggagtggtgagaagccatcttcttcttcttcttctgaggctgcttctgctgaagttgtattcccagctgcaaaagctagacctttgagggctaacaggaagcagatgagatatgtgctgagtgactctgaaagtgagaagccttctggggattctgaatttgatgagtctgaaagtgaaagtgatgtagactttgatgaggagtgaaaagtttgtttttttttccttctgttatataactagatgttgttgactttgactgagagaactactagttttcttttgtgtgtgtttgtatgtatgtaaccagtaaaatttgacatgaacactattttagttagctattcaaacatgtcattaagttttcctaccttctaatttccgatttttgaa

SEQ ID NO: 389802 - DNA, 2306 bp, Cannabis indica
attggtcaaagtttaaagggtaacaatactaatttttaacggttaaactaatggaatttaacaaaaagaacataattatgtaacagttatactttaagtagaattttaacaaaccgtgtattttagaggacagaatcaaatagtaccaaatactaatttttttttaaattagtttagttagaaaagaatctaatcttaatcttatcaatctgaaatgtaagtcttagcatagtaattggtttggtttaaggtacaaatacccaaaaatcattttctctaactaaatgaggaacccactttaaattatgtttttttgtttaggaaagttaagcttattgattgattatgattcttcattaactgtccaccaatgataataataataataaatggcaattagtcagagaatgaggcagtcctaagccaatttgcatgggaaaacagaaaatagatttaatcaaagaaaacatacatggattggagttaggtgaaatagatgaatcgcagtcacactcagtctcacaccataatcatttattaataaaaatcaactgcttcatttgagagtttcaaagttgttatgagatgattttaaataataataataataataataaagcaggtggctaagatgtaatggaaaatgggtgttggtgtattttctaaggcaatgaaacaatattgtttagttattatttgcttattattttttttatatatatatttttaaattactctaaagataacatttatccaattacatgcaaccttaagttaatcccacaaaacaaaatattaatagtgtgtattagggtgtttattggaccacatttaatgtttttagatctatccagatctgatctaattatatattggtaactagattttaccatcagattcgatccgattcatttcagccatctaatagatccaatacctattgtatgttggattagatcggttttattcattagatgtatttcatgtatatctattggttcaattcgagtttatctaatattttaaacctgttattttttgaatcgcattggacccatctaatattttagatccaatatttattggattggaatagatccatccaattaaaaaaaaaaattagtgttaatttttatagatacatatattttttaacgtataacaattaacaaacataaaattaaattactcatccaaattaaatgaaaatattaattggttcgattgaatgttgaatgtattggatttttggacacatcattcaacattcaatctgatacaattggatattcaaaaattaacatctaacccgatccaatcacaattggacattcaatgtttcgcgttcgttataattataacgtgtaagtgtagtattattattttatatgtttttttaaataaattattattttatatattattaatattagtttattattttgtgcacaaaaataaatttttattttatacattaataatattagcgtgcacaactcctccctgtatttcagtaagaaaaacaaaacattttctttgccttcttttttagaaagagaaagagacagatgacttttaatatatatatttttttttatattagattaatataagagaagtgtagccaccaaaaatcaaaacggccaaggcaagcaaacatgattgacattgttaataataataataataaataataataataataaaatgacaaattagtagaagataaaaaaatcattcattataaagctttactatatcttatcatgaattattatgttatcatataaacctaattgtatctcatttgaataacaaaacaaattagcatgaatttttgtgattataataaataaactctgctaagacctatatatatgttgcctaaccaaagacaacaaatagcatatccattaggataaattggcaatgaaagtgtggagaaaagtaaagtgaagaaaagagaaagatactttctctctctctctctcaaaaaaaagagagaaatattatctaaacaataatatttttatatagtagaagaggataagattgttctgataagagttttttttaaccaaatggaagaagatggcagaataatataatacagtttgagtaactataaatataatgagtggcctgacatagtcaataagtaattatggtgtggatctctagtggcaacacacatgctctctcctggagaagagccttctgattattttgaaatgctgaagaagcctgatactaccatggaagatctcctacgacaagcatcgaatcttactgtgcttgatgaggat

SEQ ID NO: 389803 - DNA, 2927 bp, Cannabis indica
tctttttggctctctactctcaaaaatcaaaaagggagcaaattgaaaagtgcctctacttgaattactgatcaagaatgagaatggatctcaaaatttgaaagcagaatgcaaataggctttcagcttaaaatcttcacaattgtatgtgttggtttcctctttgaaagcaggagtgagtgagtgagtgaagagtgatgactacttttttcttgtgcaaggggaaaaatgatgtgttgatatccaaaattgacattgaaaagcacaaaagaaagaaaaaaacagaggctttacaggtctcaaaagggtgtgaatggttggttgtattggctagaagctatttgttactttttatggtgtttgattaggggtgtttcctgcccaaaacctttggtctttaaagcaggttctgattcttcatcaccactgtcaatgttactcggggtaaacctgttctgaagtgctctaagacgcaaaagataaacattgtagtagtagctcactaaatctgcctttctcctacttggaaaggtcttacaaatttcaatccagaaacacttactgaagagagggaggatttgagctcactattttcttaaacttcttctcttcagcctctgtacaaaacacaattagttcctctgccatgttatggaatctccacaggtgataagctgtgcccaattctcgtttaactctcaatttgttctcagccatatgaaatctgacacattctgtagaacacagcacttgacatccacaattctccagccttccctttcaacaagaaaccttttcttcgacacaatggtaaaatatactggaaaggactatccaagtataaaaagcataaaaccaccatggaaaattaaataatttgcttattatttgagatttcgacacaatgtttgttgtttgttcttatatccgttttctttaagaaagatatatttgattgtttagatggtagaattattatgtatctggttatttttctttacatgttgtagtgaaattctcactcttttgtgtacccctgttgcgttagccacctacctcatagtcagtctctaacaccacatatccgataactacaaattcagctgtcaaatcagagcatagagagtcagttctcgccactggttcagttaatttcgttcttcttagtattcaatttaattagttgatctgaaaatatgtgcttatctgattcatgggagcccaatattgattgatggaagttccactgataaatgcctatatcttactcaatattttagatgtttactagtaactttccgcatatccagatactgctaataccaactgcttttgcaattttttaattggtatttgtatatatttataataatccgtgtctagtatttgtgatttcgaatcagttgggcatgtctatcaattcatattacactgatataagcttcgcctttagtgttgagacaccaattgagaagttgtggaaacattaggatcagctgtttctgctgtgaacttgtgtttacagcagaaacaccggatcggttcatgtttcttaggtgtaattatattttctcacaatcattactttgcttgtcaattgtcacagtattattgagcttattcttatgttggtcatttggttttgaaacaaaaattaacagtgatttagcatatgagttaatattgatcaataaatctgttttaaaaaatgtaactctaatatcatttggtttctggttttgttctttcttacaagtcggcatgtgtaccatttgatgcaggaagctagagtggccttcaaaatatcagtataatagtgtgattcatctatcaagaaatctccgacacacccttgaattgtatttgaaacaatccaggtcggtactggactatgggaaatgaagtagagggaaagtctgctaaatccgagaaaacttctccgcctgcaaccccggtaagttgagggcagaaattttcccttctgatatacaaaaagcatcagtcttgtttgttatgagtttaattgtctcaacatatctgaaacattaaagagctgtaggctggtggtttgcttaattattatctaggtttcttttattctgggtgcatgattaattgagactttttcttactattggtatatctttttgtatctccaggatcagactactcctactaatcaggccaatattcacgtataccctgattggactgctatgcaggttatctatctatctgcctttcatgtatctgcttaatcaaattattagtagattttatgtgcattggtcctagtgatcattttaataatatttattgcattttcaggcatattatggcccaagagttgctctcccccaatactacaacgcagctgtagcttctggccatgctcctcatccctatctatggggtccaccacaggtatttttcaaagcattttatcagtttttcttggtgttgtgattatcatctgacttcttgaagttctctccttgaatgttttgtttatcattttttcttcttgttgtgattatcatccaacttcaattaattttcccagcctataatgcccccttttgggacaccttatgcggcactctacccacatggcaatgtctatccacatcctggagtccctcttgtaagtgtttattttctaataattgttacatggaagtgatatagggactaattagtaaattgttagtattgctagctagtataaatatgtaatgctatttctcaaatggattatcaatgaaatgaatgagaattaagagttattctgttggagtttggtattgactcgaagagtgcatcccgatacttgtaatgcttccatgtaatactctttattagatgtttgcgtataatatagcaatataagggctcgtttggtacgctgtattgtaatgtattgtatt

SEQ ID NO: 389804 - DNA, 536 bp, Cannabis indica
attattattattattattacatcttataatatacacttatatattcacaaactttcctagtgattttactttaaatttaaaagacaacactaattaaataaaaataagggggagaagaagatatttgtaccactagtgcaatttatatatctttcttttcttttattatctttttgagtgactttgtggatgttataaaacgacattatgtgtagtaaagtataattgtaataataaaatcacataaattataaaactaatatgtctatttattacttttaaatcataaagttgagcctcatgaataaatgatttttttgtcatctgtgtataagactacatgatttggtgttcgaagggccagaattaggttcaataagagtccaatgtcccattccataacttgaccctcttcatggcctttggaattttcataacataaagttggtcctacaatgtcaaacattattatatttactaagtataataatggggtagcactcactcactcactactcaataaaaatatttcacct

SEQ ID NO: 389805 - DNA, 1513 bp, Cannabis indica
aaatgtaccaagtaaatctaaagttttaaaaccccaatactcaattagtacccaatactcaaacaaaattgcaccaaacgtaatcatatcaaaccaacttaaaaattaaatagtaatgataactaacacttacagagagtatataagacagatcttatgaaaataacacagacatatataaaattgaagatttttaggcaattcagttaaaaagtgaaaggaaaatataagaacaagggtgtagagttataaattattttatttttatttgggccgggcaggattgagttataaattcctcagcccatttccttccctatttaaataaaaaaactgtatttttttacaaaattaacatttatatttgtagttttattttcaccttaaaattttataaatacaccttattttaatgatttttattttacataaaaatatatatctttaattatattaccttttttttcaaaagctatagaaaaaaaagatggaaaaagtgccctaatgagtctattacagttatggttttttaacaaactttctcttcgtaactaactccttttttcaaattttctcgtccccctccctttctccttacagttctttctcttcttgtctctctggtttatggtatattcctagaattttttagttttttcttggtttaagcctgtgttccactccttttactattgtcgatttgattatggatcctctcatgacttccttgaacacaacactatcactaactgaggaagttagcatggtctttgctcttctagaagatgtagtgccaaccctaataccacattccaatcatgttatctgaccagagtactcacggacaactatgttcataagtcggctttcattgatcaaatgaccgaccactagaaaggtcattaccctgctgtgatttccgactatggtgatgatttgttcaaaatctctttcagttgttcaggggataaactcagggtgatgaataaggaaccttggcacttccaaaatcatcttattgtgatgtacactccagatgttctacagaatgtctcaatcaatagtttgatctctactccattttgggtctagatttatcgcttgccttttcaaagcaaattcaaggctttggcaaaagtgttgggtaatcttattggtgaattcatggaggtacacaaagattcgctcgatgaaggatggggtccttttctttgtattagagttaaactctctattgtcaagccacttcctcgaggtcgaatgataaatctcccaaagattagagatgaattttggattgacttcctttatgagtgtcttctggaattttgttttgaatgtggtttacttggtcaccgctttgataagggtgcgtttggaaagccacaatgtaattagatttgtgtgtaattggaggtaattacacaatttgtcatgtttgtctgaccatataattacactgtaactgtgtaattggaagtaattgaagggttccaattacactctccaattc

SEQ ID NO: 389806 - DNA, 1414 bp, Cannabis indica
gaggataataccttactttataaaccttactaaccagagaataaccattcaacatcaaccgccagccttacttccctaataaagcaaggttataatcatgaagactgtgaaaacccagaccaccagtactcttattatcacaaagacacttccaactcacctaggtaaccccacgggagctggaagacttagagttctaccagtatttagccatcaaaatttccaactcaccacaagtttctaaaggaagaagaaaaactgacatagcatagctaggaggagcttgtgccaccgtcttgagaagcaccactttacctgcttgagacaaaaaatcttccttcccaattgagtatctatttctgaattttctcttgtaagaaactcaaaatagtagttttcttttggcccatgatacaaggaagaccaagatagaaactattactgtttgcctcagccatacaaagcaaactacaaaactctttgacgagaaacaataggtgtattagagctgaaagaaagtagaaaacttactataattgactctttgactagaagcagcctcaaaaagccccaataaatgaataacattcgatgcctcacgctcattagcccaaaaataaatataattatcatcgacaaaaagcatgtgggggattattagagccccattagccaccttacaacctctaaggtcaccattcaactcaaatctcataattaaaaaagtgaaaccttcaggacaaagcaaaaataaataaggggacagtgtgtctccttgcctaataccttgttgaggaataatcggacccaactcttgcccatcatgaaccaccaaatgttggacagagcaaaccgtagcaaggatgagattaaccaaatccctaacaaaacccatctttaacatcatagcatggaggaaacccccactcaacccgatcataggcctttctaagatccagtgtaagagtcataaagctctctttaccttggtgcttccgcttgagataatgcataacctcgaaggacaccatgctattatcggtaatcaactttcttgggataaaagcattttggttgtcagaaataacacggggaaggacaaccttcagtttgttagctaagaccttcgaaatgaccttataaaagacattacatagtaaaatcggtgtcaaatctcccgaattgactggacattttttctttgggattaacacaacatttgtgttattcaaacccctaggcaaactccttaactaaattaataatatcttcgccaataatatcctaatattttttataaaactccggagccatcccatccaagccagatgatttattggggtacatttgaaaaagagctctcctaacttcatcatgaaattaggggcaagtaatgttagaaattattttacca

SEQ ID NO: 389807 - DNA, 820 bp, Cannabis indica
aaaagaatcaaggtgagatcgatattaatcaatgtaaacacccattcttaatttaattcaatcattcagaatggattagaatctatcattgaaataataaattaataataatgagtaaaacccagagactaactttttgacatccttaatagcagtctcatcagatgttaataatttctgtacaaccttgactattgataattttgtaaccaaactaattaaaaatgatagaaaaggttgataattttgaagtgaataaatatatatgggtaataaattaaagatatatgagggaattgaatgagagtttaattaagtgatcgagtaaaatatagtttttaatttggtaggtagttgtactcttcatcctcatatcggtgcaacttaagaaacaaaacaaatgaagtctcctctaatctatattaatagctagctagttggttttcggcagttttacagttgagaagttcaaattacttgtggacccagaaaccttccatcccaaattaggtgacctagtgtcaaatcgccttatatattattattattacactttcacttcaataattaattaattaacattatttatttggtccaaactcactaaataacggccttactaacactatttgtccacacttcaagcacaaacaatatttttatattctactacacattcacacgaatatgcatgttttttcttcccttctttcaaagcccattgcgctattatattgggattattttataaatacacaaaaacaacaaaaaaagttcaaaaaatacggtttcacggaattttaaatatttttactatttt

SEQ ID NO: 389808 - DNA, 2936 bp, Cannabis indica
aatcatggaaaagagatatcaattctatttgaggaaaaaaaaatgaatatgctaaaatgggatgaaagggtcatccttatacacatacggaacctagctaatcaactcagctgagttagttataactaactaattaacttcccaaagaacagcctaaaattagaaactggtttttactacgccccctcaagatgatattcaagatgatatgttttacatttactttgtattataattgtaatgaacacatatttagacattaaaattagtatctcattagcaggagcgcatgtacatgattgtttatagtggccatggccccctagcatatacgtaattacgtatatgtaattttaagtcttaaactttagtatattgtaattagcccttcgatatatgtaattatgtatacataattataagtcttaaactttagtatattgtaattaaacttttttaataattattacatggtggctcttttaaaaaagtcaaagtaaaatttgaagaaaataaaatgtattttgtctacagtaatactaacaaaatcatataaatttactttcctttataaaaagaataataagtgtcattttccttttaataagtacttatttatattctttaataatatttatttggtttatttgctagttagaccactaccacttcacaatatttttcaaaaaattggtttaaaaaaaagtagaaaacttcttaattttattattttagcaatcatttctgatttgtttatgtcagtagttagtaaaaattaaaaaagtaaaaaaaaaattaatttgtgtataaagtagtaactcttattttacactttcagtttctatagttattacagatcaatctttttttgctatgaatatagtaaaaattacacttcgcaacaaaataaaagatatatagaaaaaaaattgctaaaaaaattagtataaattcacttatatatgacttttatgatatctaagagagacatattgtattttaatttttattataatcttaataatatattttgaattatctgtcacttaatttataatatagtttggcccccattgaatttcgactctagctctgcccctgctcattagtgatataattactatttatgttatatatgtacattagttcaaattaagacctgttgtctgaaataggtatttgtgatataatttctcaaatatagaaattttattatattttaggtgtgtcatgcatcttaattatgaattttaacttttttatattttatgctcgatgatagtggaatttgacaaatttgtcattagagtcacatagatacggttgagtattttggaattagcagagcaagttattttgacatttagaatgtcgcgattgagcagagctatagattttgatcattttaccctaggttctaaggctacttcttggtgaagaaaggactttttagtattttttgcctaagattaattttagttatttgagttggatttctagaattcttttaagtgtataagcataatattaagacaaaaacaaaccattaaaggataatcgcaaagttagaaggaaatcaaaaatcaaaacctcattcttttttctctttctctttctcttggctaccttagaccgcaaagaacctaggctttttcagacccaaaatcaacatttatgtaaggaattgcagcaagattttcaaggttattcattagcaagagctaggtaagccctagctattctcttttctttgattttctaagtttaagcatggtttgggtacaggattttgtgatttcgttctgttagggtttaaagagtttgagattagctttgggggtgtaatttctgattgtttgaggtattttcttgtgggttttgatggttgtagtaaggttgagctgagtttgagtttatgaactcaaactcagctcaacaattgaaattttttgtttcaaaagcttgatattatgcttattgcttgaattatattcttaatggcgtttttaggtgctctggaatgtttagtgaagtttgggttagaattgaattagaaaactcgagttttggtttttctgcagtgaaacggtccaccatttcctgtagaaatgatgaattgtttccccaggaagaaccccaagaaacggtggaccgtttaaggatccaattcatcgaatggattattttttggatgcctaggtttttatgttttattgatatttagggtattgtcatgatatttattaataggaaaacttctagttataagtttaagtctctaaaagtgagttactgggtcgcctgcctgttttgcataattgtgacctagggcctcaaaatttttgtgtagtaatttcactcgggttggttggcacacttgattacaaaagtgaggtaagattaatataaatgatgcacatatatatatatatacatattgtatgcatgcattatgaaatataagctagttctaccaacactagtacgttagaggtattgagtgcatgtggtatagagactaagctagttctaccaacactagtatgttactgatgctgagtgcatgtggtatagtgactcgaactaatcctaccgacatcagaacgttagaggttcgaactaaacctaccaagactagtacgttgaggtactaagtgcatgtggtaaagaagttagtagagcttcaacggggtacaagctatttgtactcttgttaagaatgtttgagacttgtacacgttggatgcgtgataattactctatattggtgttggggataattttatcaggatctagatttactaccatgtatggtgtttaacatcctaaatatagatttctaaaacaatagaatttaaacacatataaagttcaagaaatcttacattggttccagcagaattaaatgactctttctattgagatctctaaccctt

SEQ ID NO: 389809 - DNA, 1836 bp, Cannabis indica
acggttaaaggttagctatttaagatggctaaattgatccttggaaggttttaatgacagtgaataccagatttcactgtcatttgtcattttatcaggtaagtgtactattgtatcttgtcacatgatgtgatcctaaatggttcaaaaatttgaacccgaacaagaataatgagtcctgaaactaattttagaagtttttggctcctaaattttcttaattattgtttcacttgcacttaactctttaagttcaaatttttgtagtaaaatctttcaactactgatctatcatcaaatttaaggtgttatccggtttatagccactatggactgtttacgtgtactcttgtacatgtgatgcgtttatattggtacacttaatattttatttcaaaatttatttaaattaaataaaattataaaaataaaaataaaaatattataaatattttttataattttgaaattaaaatattaggcgtattaatataaacgtgccatgtgttcaagagtgtacacataagcagtctatgttggcagttaactgtgaaaaataaatgacacttgaaatttgctagcagttcagtagtttagaggattttactgctaaaatttgagcttgaagggttaagtgtaagtggaataatagttgagagggtttaatcgcaatttttttgagaataaggatgccttagatcgttccaaaatcagattctataaaacaaggaccatcacccactatctattaataaataaaaaacaaaggtataagaaagatataaaatattgcactcaaaaaataaaagaaggattgagagtgataagtcaaggatttgaacgccacaagaaagatcttgataagttgtaataagttctttaaagaaccaaagagaaaacattccctaaatgtattaggatttgattggtttgtgattcaaaaattgtgttttttaaaaatgtgttttggaaacaaaaatttattgtgagtgaaaaattgtttctaaatatgtgattggttgtagtgtgatttaatgtttttgagttttaaaaaattgaatatgtgattggttgagaatctcaaaataaaaaagtaagaaaataattggaaagtttttggattccatgatttgaaaacataaaaaatatcaaaatgatattttcattttttagcctaaaactcaaaataatattcaaattttatttttgaaaacactcaaccaattaagaatttttaggtagactcccaccattttaattttcaaaaacataaaatagttttcaatttccaatctgatttgaaaacttgtatctttcccaatttatactttgaacaaccctccaaatataagaaaaaactatatttaaagtattaaattgatacatacattactaaggatccaaacccttcaattctatactattagacttctaaaaagtagctaaatgactatatacaaaaaaatctaaatgaaaccaatcaaaatataactaaatgacatttataaaaacataaaatatatgcctataactcctccaaactgaaatgccatgttttgggaagtgaccaaccattttaaattggctcaataacatggactagacattgatctccattttgggtaatttttgactttatcttcctataataagtcaatatttcttggattagctcattaaatgtttctttgaaccatctatatcctgttctcgtaattggcccaattaaaacctgtaatgactcttttagtattgctcttttattctcatcattcccttcctcttgaaaataagggattttttctattttagattaatattactttaaataaacat

SEQ ID NO: 389810 - DNA, 688 bp, Cannabis indica
taaaagggtattttggatagtttaagaaaataatgatattattttgtacaaattagtggaagatataaattttgatattgagagttttattatgtattattaataaaatttctctaaataaaaatgacatgtatttaatggaactgaagtgtaacttttgacaactaattggtatcgtgggcatgcattatacaatttgaaagaatatataatacaggaaaaatttaaaatgcaccttctttaaaaaggtatatcgatacacttattttgacatcttgaagaattttttagttcaattctttcataatcgtgtatgttgtagttattaaaatattttgtaaaattttgagacctttagagaaataaaacacgccgaaaatagggtttaaatagtctattgtacgtgtgactcttttcttttatactcgtgaaagtagactatttaaacactgctttctatattgtaaattatttcgaattttttagaattttgcatgaagtcttaaataagtataacatatacaattataaaaaaaaatagactaaattttttttcgaatgtcgaaacagataagaggtgcattgatgcaccttttttaggggtgtgcattgtatataagagcttctccaaggaagcggcattttatataaatgccgttcctttttgttccaaggaggcaccattcaa

SEQ ID NO: 389811 - DNA, 506 bp, Cannabis indica
tttattctattccattcctattataattttcattcccattttcattcttattcctatattttcattcctgccaacccaacgccacctaagtgtaattgttagtaataattatataatatgaaataactgatgagtctcaattacacttttaaattcttataatcatcatgagaattagatgtaattacactgtaattaatattattaaacagtgtaattagtaattattttatcaaacaagatgttagaaattcttatataattatcactttatatccaaacagacattgtatttaaaaataaagtgtaattaccactagtaagaataattacacggtacttccaaatgcatctttaaaatatctccaatagagtgctaaaaatatagtgtatatgcatattttagtacatctttgtaaaagtgaactctaagggctcgtttggaacgctgtattaggtcgtattgtattgtattgtattatattgaattggattatatatcatat

SEQ ID NO: 389812 - DNA, 836 bp, Cannabis indica
cagatttaattactaaatattttttttgacattgagagaggagggattcaaacttggtatttcttttttgtaaggaaaagtgtagaactactaaattatgtctatgaccacaattatcaaatattttatttacacgatttaattttctaaattaattgttaaaatattctaacaattaattgagacaaaaatacttatagattattttagctataaatatagagtgtcgatcatcaaactcactacttatttttgtgtattacagtaattctatcgaaacgagttagagagagcatggaagtctgattacccattctaacttatttttagttttcttttgttgatccaaaagtttgtagatcgaaagtttctaaatcaatgagtggaggcaagggcgaagtaaaaaaaaataaaatttaggtggggcaattatgtatttttatagtgaaatgttaagggcatttatggtgtctagcatcctactatcataagttataggtataatttaatatcgaatttcacttattttacttttaataatgattatagaaagtttataactatttataaggcgccacacatactagtattaaaaatcatgatacttaatggcaatgtttaatattcttatattatgtaggcttcagcatttaataaaaattatagaattgtttaaataaaatataaaataataaacaaatatgttaaaataaattttagtgaactgatattttaaatttattgctagtgttgactcaaaaatctggactatacttataagccacacacgctcgctagattggtgagaatgaaaagtttattgagtaattaataag

SEQ ID NO: 389813 - DNA, 1866 bp, Cannabis indica
aaaaaaaaaaaaaaacatggccacattgattttggatttgaaaaatatggtatattgctaaaaagaaaaggatttgtgaatactaaatccctttattccccttttgtagagtcttagagtcaaatgtgtaaggtccatctaggccacaaagcccatcaaaaaacaaaaattgaaaaaagaaagagacaaaataaaagtaggtaaaaaaataaaaataaaaataaacaaagactttttttttaacagaaataaagaaagactttaacctagtgtttttttaatttatttattataaaaaacaccaattaaataataaaaaaattatgttatacatttggatttttttatgtttgaaaatactttgatttgaatccactagtataagctcattttagtgcctttggtgggtctctatctacacttttattttattttgggcctcgatcttcttttaaattttataaaataataataaataaattaatggataaataaaaataaaagtagaaaaagaaaaagaaaagctaaagtgagttttatttaaccttaactatgaagaaaaaaagtatgaagtattatgagtgaatggctttcaaaattgctcaaaaaacctttaaaatatgggaataatttttttaaataattgattaaaagagttgtacgcttttatttcttgtagtttggttaaatacttttttttttcagcaatgaataacttcattgaaaaataaattatgatgtcatacaaccttaagtatcatgaattcccaccaaaataaagaatctcatcaaacgatacaagtcctctatccactcgaagagcatgctcagctaatccatgtgcagccttataagccgttcaacatacatggactaggaacactccaggaaaactacatcaaacttggttaaatactttagtcacacacacttgaaacaaaaaaatatagacttagttacacttttatattttaattaacatcaacattttacgatcttaataaggaaaagggataatttataacaaagttttcgtgttgttgattcctagcagtagtgcctcttcctctgtgcctcctattggtactaggcgagtaggtttgacctaacccataggtcttaacctttcgctcaatactctagaatcgacgattgaagcatttgaggctgcattaatcggggatacacgacagaagggcttgttttatttacaaacttcacctttaacaagcgtagatttttaaaaataatttttttctttctatcccaaataataataatgcgtctttctcctaagactaagaaaataaaatttttcgtataaaatgatacaaaattatcattgaaataatttgaaaagttagaagtcataacttttttttgttcattgtaataaaatgattataacttatattacaattttgttgcaatcgtaccctttttttgttgttaaatgtcaattaagttcgttaagtaccagctcaaaaatacatgatatatttctttaacttattgaatatataatccaataatatgtcgtcacgtgtttctgaaatgacactaatatttgtattggtactttggctagccttcacttgaattctcttactataaaaaaagaaaaaaaatactcaattttgatcaaagcatccttcaattcaattggatttggtatcaactagaacacaaatatatgtaaccatacattcaaataaatttcaaataattaaaggtatgatctaagcactttgttatttatttattcgtataaagaggagaacatgtagatctttttggttactttagttaaaacacaatatgatatagcttatggtattttgaaaaggaaaagaataagtaaatatc

SEQ ID NO: 389814 - DNA, 1221 bp, Cannabis indica
aaatacaacagtttagagaggaggtaattcctccaaccaaatacaatctgtgtccaccgaaagagcatattagctagcttatgagcataagtattagcagatctaggaacataagagatctgcactcctgaaaaattggtcacaaaattacaaatatcagataaaatataatgaaattcagaaactaaggcattagaagattgcaatccttttgttactaaaagtgaatccgtttcaatatagtgcaccgagaattgaagaacaatcagtctctctagactataaaaaatggccaaagcttctaaaatttctggtttatgcgcaagagttagtcgtatacaagcatgcatgtcatttgacttttcttttcttttttttttttttttgtttcaatattcttttttggtcttattattataagtccgtacaacacatccgtgccttttcaacagccacaaaatctaagcaaagtgatgaccatacatatactatcttcttcctccattaattaatcgccaattaataattataatttattatataattattattattattaaatggattatatgatctttaaatatactatctttcttccatcctctacttttactacacctaataataataaagcttttaatcatgcatatataatatcatcaattatataaaaaaaaaaaatatcaaatatatataggaaatatacatgaccaaatgaaaataaatatatatataattaaataagaaaatattactaattgattgatttatactgatctggccagagccaacattgtaagtcttccatcaatggtggcatctccaacaacattgtatctaaatctttaaacgacattcctttccttaaaaacctcatcctatttttcatcgaaggatcatctcctaatgatgatgaagttgttgttggtctctttcttttcttattattagttgttgttgttgttgactccgacgacaaaatggtggtagaatctttccctgtaagactctgaacgacagacttaaacgttgtcatatcggttttcacatattgagtttctatcaacacaactctcacaccttcacgattagggctacggctacccattattattaataatattatattctcaaaataaaaacaaaccctagtttggtgtatgagattatgaaaagttatatgaatattatattggatatatagaaagagagagagagaga

SEQ ID NO: 389815 - DNA, 732 bp, Cannabis indica
cctctaaaacctccccagggcaagaattattctaccatactgcaacaccagatcccctcaaccttcatgcctttactgatgctgattagggggtctgcccagattcgaggagatcaatttcagggtactgtgttttcttggggcactctcttttgtcttggaaatccaagaaacaacaaactatctccaagtcctctgctgaagccgagtacagatcaatggcccatgccacttgtgaactcacttggctcacatcaatactccaagactagtgtctccattaaacttccctcagttttatattgtgacaacaatgcggctattcacattgctgaaaatccaatctaccatgaacaacaaaacaagtaaaaatcgattgccatacagttcgagaaaagataaccaatgatacacttcaaatgaatcatgtcacttctcaaaacaacttagcagatgtcttaactaagctacttttcccccactcaattccacatcattatatccaagataggtgtcaaagatttttacacaccactttgaaggggcatattaaagttagtcttagttaattttctgttataattcagtcagttagttagttctaactacctcttttttaaaaaaaaaataagacgttgcatagataaagaaacattagacctcgcggtcattacaaaggatagaaacaggtatggagggagactccaaaactcctgaaaagttctgagtaaa

SEQ ID NO: 389816 - DNA, 785 bp, Cannabis indica
ttatgattaatgatattttttgatagtttttttttccttttaagatatttcacattaagtttactcttgaagttttaattaggctattttttttctaagaaatataaatatataataataataataatgataataataataataataagaagaagaagaattctcatattagaaagattgtgattaatgattagactataaaatataactagatatttaaagagtatcatgattaatgattttttcccataatattaaaaatttagttgtggttgaagcttgaagatcaatatgataaaatatatattgtttttgacatatcacttttatattgttaacattcgactgctagggtttctctctaaccctttgtgttgctgttatctttttcaagtccgatcaaggctcgtcgacctcctctggccttgggcgtgggtctcgtaccgggttttgatttgggtgccatggtcattgcgatatgggtgttcttctccggtgtctctttctttgggtgtggggtggcagagtggttgagggtcggaggggcaaaggttgctctggtggctgcatgggagttaaagtcctctatttgttgagccatggtttgagatctaggggtgcccaccaatgagatgggggtctgtttctaggcccgtctggctggttcaaatctcatggggttggggtggttttctgtccgggtctgggcctatggtggttgccggtgggggctcggtgtgtaattcttctagaataattcctcacccccagagtaaccaccatct

SEQ ID NO: 389817 - DNA, 1711 bp, Cannabis indica
tttcttttatttttctttttttgttttttttcgtttttttttttttttgcatatatatcatgacctaggcttatgtatgatttaaaaaaattttgttgtctcatatatattttttacatgtattacttctttaggaatattgaatactttactctttattaagtggatttgaacatgaaagatacaactatcattgactcattctatcaaaagaaacaaaaaaatagagataaaacaatcaacaacttttttcagtttgaataattttttagtaggactgaatattttgagcaggtttaactcaaacttgggcaatccactcggacccgatctgaccaacccacaaaattaaaaaaaaaaatatatattcgggcaggtcgggttcaatccgatactccatcagacaggtttgtgggttaagttttaatgattaccgattttcgggttgaacccgaacccacagttatataatatattatatatatttttattttttattacatgtcttattattttatatatattatatataataaatttttttaataaaagagatagaccggatcataaacacatactggtatttcatcatgtatatttccctcggtaaagccaagctagtagagtagtgttcttcttctggcgtcttcctcatcactgcaatcactacaattactaccactacgtcagtccacgccgaaccaaccccggtttgcttttcggctgaagataataataatgatcaagtacttcaatctacaccttcgcctaataaatattatatattcatctaataacttcattttttgcgaatctttacgccctgtaactctcaaggtatacatcctttaattctcttctttttttttcttcttaataatatattttttatctataattttttattaaaaatttatatatattatataatatattttttaaagagttgaccaggtcaacccggccaacccggatccgccaacctgccaaattgaccctattttgggttcgggtaattcggattcatttttttggacccaaaaactgcgaacctaaaacccggtgaacccgcccaatgttcaaccatactttttagtgtcttttaaaagcaactcaattatttagcttcactgatgtatctaaattattatagatggatttttacactcttccagaataatttctctaccctcagagtaatcgtcatcccaaagattaagttctgagttggtgtagatataaggattctaaatacacccatatcatctaacatataggtcacctttagagattctttcttgattgtcttcttatgttccctgtttgattacatttttgatcgctcctactcaacagtaggagtctggcttaatgcatgcttaataagtgtgcatttaacttcttactattggtacttatggacatcttgttgtgacattttatctttatctagaatgaatttcttctagactaagtcatcaacatagcattctagtattaactttaatgtaaaatacttgcttaagattaagtaatcactagataccataaaataattttataaggaccaagaattgtgctttaagtctttcaaatagatattgcaaggtttcttatcttatcctcataattctgataagttattactatccatgtgaatggttagattaatttttcttagttttattttaaagttcatttcttgaacata

SEQ ID NO: 389818 - DNA, 3942 bp, Cannabis indica
actctgtcactcgaaagggcttcccctagcgccataagcttcacttcttctccatatttttatgttgtactcacaaaatcacctgtattttggatctgtattataaatattattggaatatgtaattttttccaaataaaaactgtgtattcatgttgaataagttgtctagtttattattgttaaacatagtggtaatattaattttatcagaaacaaataaagatattttgaccaaaacaatgtaaattaaatgaattagataatattcacagccatttataaagatagatggtgatgtaacagcataggaaattcattggattggtcgaccattcacgttaaaacatcaataggaatctgttgtccatattcatagtaataacgagaacactccaattcatatactttataatctttttgaggcagaaaaagtcaattttttttagtaatgtgcaactttcattgataaagttataagattaacaataccatcgcgaatattattattttaaactacatcattatatatccacccctacaggctactttgaattttagactgattgtaagcaattacattgtgagtcctaaatatattggaaaaaataacatggacaatgaacatttgaagaaaaaaaaaaggtttttattttgagtacatgtcatcaatgcaattttttaaaactcatcatagaaagagaacaagaaaaacatgttaaaaatttatatttttgtagtattaaatatggttaaaataaagaaaaaaaaagtaacaataaaaagaaattcttttttttttgctggagaaaattctccaataaaaacaccaaaagcagaacaaaaccagttcaattggtcacaagagggaccaactcctctgttgttaaaataccagaaaaacaaagtctaaacgcccactttgagagcttatgggctacctgatttcgggaacgaggcatccaaactacctccacttcagggagatcatccaacagctccaacatgctccaaaagacacctgtgagccgccaatccggggccctgcgcgcctgtaaaccttgcaccaacagctgacaatccgagacaatcaccacctgcctccagcctcgggtttgacaccacctaatcgcatgaaacacagcccaagactcagcttccaacggctgatttgcatcaaagttcacagccaacgcctctgaaaaactaccctacgattcagacactacaatcccaatcgctgcacgcaattctttgaaggctgcatccacaaataaaaccagtttgcccaaataaatctccttatgagcatgctgaatcacctccgaattaggccgagtgtcccaagcagtcaagagacaagaggcagccccctgaactctagccaaaacgcccctccaagacggattgacacgatcatgaaaggctcgattcctagcagtccacagctcatcaatcaagcagataccgaatctattaaatttccctatatctcctacatccgcaccactcaaaaaatcaatcttattcatagaagttcaaaagaaaaaattaaaatgcgaaaaaataaatttactcttgttgggatttgaatatatatgttagataacttaatcagtttatattatgtttaatattatcacttttaattagaaatatatgtttttttttaactaacatatatatactgtcatgaaatattatatatagatatcgaaattaccaaatcaattattaccattaatgtttaattgtattttttttattatattgatttagttttatattcttttagtcaatacttttgtataaataaaggttcatcccattaaaataaacaattgagaaattatcattcagtttttctttctctcttcttcttctttttttcttatatattttatattattttataacatattgaacaatattgtcccacatatatcaaatgtaaaaatattgagtcatatataaaaactcctggtcaacggagttctgaaagagattataagtgtaagctcttattccaaagttctttgcatggattttaccaccttgataatctaacttgtttgtttctttttgcaggttaacttgaaaactgacctatacttatttctgagccaagtctacagctctcaaagctaatgcaaccactaatgacttgaagaaggctttaaaggaggtcaagaaagagactgagctgaaggactaggagctggacgaagtaaagaagcaatttgcttctgcgaacaagtctattgatgacttatagcagcaaatagaagacatgtcgtccactgccaagctcaaagcagacctcaagcgggaatccaagaaggtgcgggatctaaccgatgaaagggaaggactcaacacactccttcaaaactaggaggccaaggtcaaagaattgactgaggcttcaacaaaaagatgaaactttgctgaaggagaaaatttccttagaggaaacttttgttggtgagcgagagtcatatcaaaaggaggtcgaggactatgaatcagctgtgttggaggttttcaatgagttctggagggcgaatccaaacaccaattttggttatctaaagaaccaaatttgttctgaattcttcgattattgtgcaatgaataagcctgaagatgaagcaaggaaatctaatgagagttcttcagtcgctcagaatcaagaagacccgaccgctcaagatcaagtccatgggaccccaatgaagtaaacatttttttctttgttcgtcctacaggcctttttctaatacaatatagggctgaacatttagacccgcgaacccgaaaaacccagccacccgtcccgacccgctgccaaaaaaaccgaaaaacattaaaacccgtgtgatcgggtcgaattcaacccgaaattaccccacacgggtttcaggttcggatattaaaaagtggtttttgtagtcgggttctaacccgtgacctgaaaataatattaatttttagtttatacactttactttttactgttcattcaatacctacctagtaggtcgctacagtagatgaatagtttttcaaaacaataaaagtatgtcctgaagagcatgagtcatgtacaatgacaatagtggcatttacgaagtactctaatattccaaggcaagtgtacgcatttatactaaagaaaattaattaattaattttgtatataaaaaggtgcagtgtataattataaccacctacttttcttggaaacccaaaagctatgagataaaaataaaaagccaatgtgataaatgaaacttggttgttgagccttttcttgggaacccaaaagccaatgtggtaaaaatagaaaaatatagaatttttaaaaattaatattcatttgagctcagaaatgacattcgggctcagcccaataacatccgaacccgaccacgcccaacccgtgcatacccgaccacccaaaaaccgggttcggttatgcatttccaagactcgaaatccgaaaatccgaacccgactatccgaaaacccgaaaatccgacccgtgtgcagccctaatacaatatggccgacctagcgaattttagacttagacttatatttacatgttgcttaagacaaacagttggctaaacaacttttaagcccagacttattctccttcttatcttaatgtagatatttttctttagctttgaatttttcttttgctttttgctatagcttgttttctaccaatgcttgtgctggtataggtgtctccaagtgacttagcagacttttgactcttggtcacttgtattttacatcgtctattttgtctatttggctttttagtagttaaataactttctatagtttgaaaaaaagcataaaattgacacaatgtgaatgaggattgatatcttttgtaaagtccttttttggcaagttaggtgacaa

SEQ ID NO: 389819 - DNA, 716 bp, Cannabis indica
tgtgttatttttcagttttttctaagttgacgagatgtgttgatgtgtaattaattttcatattaaagtgcattgctctctaattgtttatttgttactatttaattgttcaattaagaaaaaaaataaacatatgcaatattttatgaatacatttattaagattatttttatattgatttttagttaagtatttgtttttgttattttttttttaaaaatatttttgttaattgttatacaggtaatttatttataaccatgcttaaatttatctctatacaatatatttgtaaataaaaaatttggacaacagtatttatataaatatgaaattgtataaatttttattttttatgccatattattattgtaatttataaattgtatatgagcatatatataaaaattcttaaaaatattaagcaggagtagtataaatataaaaatttacttatcaaatgtaaaatttagaagaagaaaaattagtatttagtgtaatttttttttaaaatatagtccaggtttttgcaaaaatgttttgtctaaattcagaagggaaatttaattttctatacttacatatatttaatattttatttctaaactaatacatatcatcattgaaaatatatgatcactttatctaaaacccaaaaatacccctctcaaattttccattacttttttttagtgcaaaaacaataaaaaaaaaa

SEQ ID NO: 389820 - DNA, 1477 bp, Cannabis indica
aattaaaaataacagtaaaacaagtaagaacaaccgtgaaaatttaccataatatatagtataaaacttacacagtatttttttaaaaaaattctaccctatcgtaaaaaagaaaaaaaattaaaactttcatgtatttttaatccttaattattttagtgggactattttgtttttgtctcttttttttgtgctaccaatattgttgatgctttcatacattaatctacgagagacctaatgcatgttgattcaaaagtataacaagtacgtgaatctacacttttcagtagtcactacaaaaataactatttttagttataattttttagtcacaaaatttttttaaaaatttatttgtaatataagatatagtatttaaatataaattatcactaatttacttttaatcacaacaagtattatgactaagaatatatgtagtcaaaataaattatgatttttgtgattaatacatttagtcacagtttaatcaaaatataaaaatgataatttataattagttacaaaatttttatttttagtcacaaatttaattaagactaaaagtaaatttttttgtagtgataatattgctaggaaaagttagtatagatgtaacatttagctttaaaatatatagagactagtagctatataatgctatataaatatatatatatgtcccttttggaacaaattcaataaagattgagaattatatattgccataaaattaatcagagttttcgatctgttggggaatatttggtattttttttttgcttttattatgatcatatattcatgagatcgtaacagaagtttggcagtgggcacatgcatgcaataagatccaccattagtgaaagttatatgtatatttatttatatatctttatatattaaaagtgcctatgtaacggtaatttttggtttaacgattcttggtttgacgattcttttttttatttagccttaacgttaaacgttaacaaataaataaacccaataattaaacccaaaaaaataaaaaaaccttttttaaattaaaaaaatatcttacccacatatctctctaacaactatttttcaaatatttttacacggctaaattcaaatttcaaaaaataaacccaataattaaaccaaaaaattaaataatatttaggattaacttacatatctctctaacaaactacaatttttgaaattttatataacttggtttatgagaaattgatgggtaacttttaatttttatttaataaaataataaaatattatttaaatataataaaataataataaaataaatcctattaacatttcaactcatattaaatattcgcttttcgcttataccatcaaaatttacattttttgtatttaaaaaatagaccaagttacgttaaaccttaaaatataaattaatattaagaagaaaaaaaattagaatccgatggtattatacgat

SEQ ID NO: 389821 - DNA, 1279 bp, Cannabis indica
aaaaaaaaaaaaaacaaattttatgctttattcaaaaaaagaatgatcttcacaatatccatttgttaatttccctaattaataagttgaaaatgaagccttgaatgaaccagcacattgtatttctactagtatgtttattattatttttatccttttttttttgttaagaatgttctactagtatgaataaattaattaataacgttcagcttactattaaaaatcgtcatgtgtttgtagatatgaattttgtatataaaaactataattgtgattaagttgttcgtttaactatacctgcttgcttgtttgttgcagtatttaaattttgcctaaattattcaaccttgtaagattaataagttaataaagatgggttttagtgaggtttgagtatacgggcattgcaatgtgtttcttccgctcggtataaagtggttcatgcactcttaaaaaaacgagatttttgccagtttattttgtgctggtaaaagttagatattgtactgataaaacaacattaaattttgccaacatatttttgcgttggcaaatccgtattagtattgaaacttttaccaacacaaaatgaaaaagcgctagcaaaaataatttttctcagcatagtaatgcgctggcaaaagtttaagttaaacttttgccagcacaaatgttcatttggaaaagtctaactttttccagcgtaaatatgcattggaaaaaatcttacttttgccagcgtaaatgtgagcttgaaaagtcttacttttgctaaagagataacttcttaaagttaatctttattttttagttccacatgcgtacaaataggtttcgccaagaaaatacacaggtaaaggtctatagtacttagtgaatcgcaagtgaccaagagaccataagtctggtcgatcacttggagggcacccacaccatacagcatcaaacaagcacaactaaacttaagtaaaatttaaagctttgataagcaaaaaaatgaaaactaagtaagtgcaaatggcatatttcatattagacataaaaagcgtaagttcgaacatctacatgtctaacaaaagaagttgaagccaggattaacgatcacctggccagtcatctgttcaaaaataaaaggccccacgatcatacgtaaacattgttcaaattaaagtaaaaggcctataagccgtacaagaataaaaaataaagtacgcaaaataaaagcataaaacaaaagacataagcctctagacatccttatgttggaaattatttt

SEQ ID NO: 389822 - DNA, 2420 bp, Cannabis indica
tgcagaacgaccaacctcaagcacaagctgcctagaacgaagaccctatgccattccttggcaggtcacttaggggttatcgttggcagacccactttgcaggaaaaactagcaaggctacggagcactatgcttggacactctgtcacgatcttaaaagtgatatcttggctgccaaaaagaagggcttcaatacacccaagcttagagagcccaccatctcttttatagaggaagacgcttcccaagtcaacttcccaaataatgaccccatggtcattactacacaaattgggaacatgacagtcacaaggtgcatggtaatcaatggggcctcctccaacattcttttcaggtcaacatataaaaatatggagcttcagctaactaacttggcaccctacacacaagtaatgtacgacttctttggccaaggcattgtgcccataggttatattcaactacccctgatggttggagagaattcaacaacaagaacattgatggcacagttcgtcataatcgacatgccatcagccttgaacaccatgataggttgtccatctaccacctttgcctaaagttcccaacaaggcacagggtaggatgtttgaggggagaccaatagtctgctcgtcactgttacaacatagccttgtctaaagccaagaaagagaagatgcctaccaagagctctgatgaatagcccagcaaagggcaataaagttcagcccaaagcgatgatgcagacttagatccttactttagggatcctgcagacaactttggacatgtaaaagaactagaaaaagtggagattcaacccactttcccaacaagaagacttattaagattaggaagggtttagtggcagaaataaaattagtattgataaaatttctaatggtaaacctggacctcttcgcatggtcacatggagatatggtcgaaatagacccctcgatgatgacccatgctctcaacattgatccaaacttttgacctatacaatagaaaatgaggttgttgaacaaagagcatgcccaagcgctcagagatgaagtcaaaaggctgagggcccatgactttatcaccgaagcattttatccactttgggtatccaaccctgtgttggtgcccaaaccaaacaaaaagtggagggtgtgcatagatttcaccaacctgaacaatgcatgtccaaagactgctttatgcttccaaggatcgactagttggtaaatgctacaactgcccatgagatcctaagcctaacggatgcttactcaggttacaacttaatcaagatgcacccaccatatcaagagcacacaagcttcatgacagacctaggcctatactgctacaaagtcatgcccttcaagctaaaaaatgtagcggccacctatcagaggcttgtgaacaaaatgttcaaagatctcatttcccgtaatatggaggtgtatgtggatgatattctagtcaagtctaaaaaggctgggggcatgtggaggatctagatgaatgcttcaagatccttcgtaattacaacatgaagctcaatccccttaaatgttctttcagagtaggctcaggcaaattccttggcttcatagtcaatgccaaaagaatataagcaaacctggataagatccaagcccttttagacatgaagtcgcccacaacagtcaaggaagtacaaagcttgacgagacgtattagtgcactaagtaaatttgtgtccaaatccatggacaaatgcgtatgcttctttaacattctcagaggaaacaaaaaattttaagtggacaagggagtgtgaaaaagcattccaagagctaaaaaacaactggctcaacctcatgtcctatcaaaacctctagacaatgaagagctagacgtgtacctggctgtcacaaaacatgttgtgagtgcagtcttaataagagaagaagacagtatacaacttccagtataccatcagcaagagactgattgacgttgaaagtcaatacccgctcatggagaagctaacctaaagcttagtcctagcatcaaaagagctgaggccatacttccaagctcacctaataagggtgtacaccgaccggccattgtgacaagttttgcaaaaacctaaagcatctggtcgagtactaagtgggccgttgaacttggctaattttatatcacatatcaatcgagagtggaaggccaagcccttgtagacttcatggaagaatgtacaagaatacctcctaaaatctctcaagatttgggagaaaagaaagagccagagaagaagcaagagtaagagcagcatcaaaaacttgaagaatcaacatggatactacatgttgatggaagctgcactgatcaattgtctattgggttttgtgccctaagtaaaatccatttcaat

SEQ ID NO: 389823 - DNA, 2064 bp, Cannabis indica
ggttcggtttttttcgggggggggggggggaagttttacgaataaggttaccagctctttatctaagccaatatattcatggcaatatgatatgtcaaggtattggcttccttactaacaaacacaagagatacattggggaaaaatgataaagagcatctaatacattggatcaaatatgaaaaagatgatgaatccgtggattgaaaattgactttgtaaccaaccataggaatttctatattcttgcactacaatagagagcgttttaaagtcattgcttgtgcaactaaaaatttataagctgttagaagcttcaaagcacacctcagaatcaccttaccattgtaatttctgagaatgcttgttggaattagagaaatttttactagaaaaattttatttgctcccaaagttattctttttaaaaaaaattcttaaaaaccgagcataattcttagctagaaagaaaagttagcaactgtaaaacattcagacaaatctgaaactttgaaattgtcctccttaaaacaaaagatactcctatctaggtttggccttttctgaatctttagttttttggcccttgtcccatctttgtagagttaactcataattctgcaaagatccaattagttcatcaaagttaagagcttcaatgtctcgactttcctgatcaaaggatgtcaccttagacataaatctttttggcaatacaccaagaaattttctgaccagttttttggtggaatagacttttccaaggacataagattcattagaaatatcacatagtttggcataaaacatagaaactaactcattttcctccatggaaaaattctcgaaaggcttggctaaagcccttagcctagcatttttaacagcctcagttcccttattctttattttaacttctcccaggcatccttagcaatctcacaatttgaataaccttcaactgatttgtggagacaacattgcaaagagcatgtaaggctttgaaattgaaatttgctctttctatctcctcagtagtccattcactagatcttttatgctttaccccatcatcatcaatgaatgtaggtggtgaccacccttcgactacagctatccacactcgtttatccacaactttcaagaaagctctcatttttatcttccaataggggtaattagatccttctaacataggtggtcgagacgtggatcctccttctatgaacatctccattttctgtcaacctaagcacaacataaacaacaactatgttgcactgcgagatgaatctcggagtggatcagttttccaggaataacacgaaataagaagaagaagtgaattatgatcggatataaacaaaaaacaaaattaagacctaatcaacaatcaaatggctataggatcacaatttctttacatgaaaagttagctttgataccaaataaaaagtcttattaatccaaaagttaattgatagattctaggtttgaaacttaagtattaaaactgaatgtaaatcaagaacacaaaatttacaagcttcccctgcattgaaaatacattttgatcgggtagtgcttgggttcccttaaaccgggtaaagtaactttcactatgaaatcaatcagaatataatctctagttctgattacaaatcgaaataagtaaactaaaatgaattcatataaaagttaccaatactcttgatttacaatcaagtacaaagatctatgtcaccttcaatagatgaagacaagatccccttgctttggctcagctaatacaattcatttttttggttttgttttgagatctttcaagtagttttttagtgttgcaagctaaagttctagctcgtctaatgtgctgtttgagaatgttatagctttattgtctaaagttctgagagcagttttgtcccatgttactcgcttactttagcagttcatagtttgacgaagcatgcctttcggttagacgatgagctatctttgtttgagaaggttcccgcgctattctggagatatctacaatatcgtaaattcatgagtgattct

SEQ ID NO: 389824 - DNA, 1442 bp, Cannabis indica
gcttttaaaagaaatcaactcaattgtattgacacttgttcctaaaattaagtatccaaatatagttagtgattatcttctcatcgcctgctccaatgttctttataaagctgctacaagtgttaatattatcgaggctcaaaacaatccttctaaatttagttgctcagaatcaaggaggatttgtgcaagaaatgttcataggccacaatataatgatatgtcaagatcttattcgacattatggaagaaaataagcaaagccaattgtatgattaaacactggatctataaaaagcatacgacaccatcgagtgagacttcatagaatatatactctatgcttttaaatttctagggaagttcattaagctgataatgccttgtgttcaaacaccaagattctatttgatgttcatgttggagactattttactaggatctagatttactatcatgtatgttgtttaacatcctaaacatgaattctaaaacaatagaatttaaacacatataaagttcaagaaaccttacattggctgcagcagaattaaatgactcattccactcagatctctaatccttgttcctttctgtcgcagagtattatcaagatttgagctcgacactcctccagttgattgaattcttcaaagtcttacacactatgattgagtaccaacttgctatgcgtgggcatgtactctatcactataaagggtccgaattttgaagaagaagagcagggagaaggattcgaaaattagagagagagaagactcaatttttgactgaaaggctcatgagagctaaagctgtcagttttgaatctatcactgtctatttatagaaatccttctaggtttaggcttgaattatttggcattaagaaattaatgacatagaaaaccttataagtggtcggtcataggatgtgggcccaccacttgcaatttttctattttttcaactatttatcattttctttcataaatgacatactttccaattcaaccacttaaatgtcaaaactatttatttaataattaaaattaatcatcaaataaaattttcatttaatatatttattaattagacttaataaagtctcttaattaacaaataaaccctaaaaaaaatttcttcacaattaagccttagcttagtgaaaattcataaataagacatagtctaattttagaattacaattgattaattaaaatcaattaactaagtcttatacaagtagtattgtctcaactagtatggggactatgggcctatataaccgagcttctaaagcagatctagaatttattaccaagtaaatttcctaactatatggatttggaattgcactctcaattatatagaacacactatatgttccacgatataaatacgctatgaaaatttaaaaccatcgctctaatctcaataa

SEQ ID NO: 389825 - DNA, 1490 bp, Cannabis indica
aatttgatgaagatgtagttgttgatttctaataattaatgagtttctactttcaatgaaccatgaaattatatttattaagtgctgaaccatcttggtgactttgagataatttatgttattttataaataaattgaataaaaaactttgtactgcttatattcacagacttatgatgtaaggtctttttttatattggataagagagttggtcacaggaaattcagttatgtgggtcattctctttgcttggtcttatgctttcatctacattgtctttccttcttcaattaacaattatcaatgaaagcatcaacacaatatgggtaatctatttgagttcgtgtcagctaaacactttttatatttttatgtttttgttttgtatatgatgaaagtgttgtagttaattgccaataataaaaaaagtatgtcatatacaatattacagagtatgaatgaatttagtcaatttactaattattagaatgttttaaactatttagcttcctttaatttttatggctttactaatattagaaatttaatccaagactactttaattattgtatgaaaaataaatacttgttggaacaccacaactttatcaataatatcatagacaaactatcaacaaaaaaatagaacgactattatactatgtaacagaattcttggtttaatattattatttatttttctgtcaaaatgttaacagcatattctaatatttgacagaatattctaattagaaaacgttaattataattgattaattttagctaaataatcctaccaaaatttaatctaacaaatttctctcgagcaaaaaccctagcctccaacataacctttaccagtttataaccttagttataatttcttaagctatattttataattttaattttcatattaaaatttgaaaaatactaatgaagacaacatgctacatgctattatacaaaagtattgcatttatatatcccacgatgtttcaaaaatacttttgaaagttcatcttgaattaattattaatatgtaataaaagatattagttattatattattacttcaaacaaaggaaagttctagcggtgcttttactttctaatcatctcttggtttcgggcagaaagtcatattcatgtgttatgtgtacgttaaatttttgttaataggacagggaagagagtatagtcttacaaaacttgaaatgtgaacctgagttgtcagtatatacataacctcaattttggcttctttaaccagctgccacacacaagttacttactctaaatttataaccatttacaattttttaacactcaaaaagttaccaagtttgttttctatagctctacttattaaggtagaaaaatattttcagattgactcctctattccgtttattaaatgaattgttttcaagttgacacattaacttaaaaatgacacaataatgacctactacaaagtatacactta

SEQ ID NO: 389826 - DNA, 913 bp, Cannabis indica
tagcaattaggaaaagtccactctcttaagagatctattttaattttataaacaacttttttctgtagcctttttcatctaagcacagtaaaacagcagcatgtagataagagaatatatatataatatatctaatgtattatgaagaagagatggtgaagtttagtgatattaacagaggtgccaccccaatcaaatcaaaatcagattttggcagatgccttagacagaaaaatagagagacaaagggattcctccatgcctgaaaccctactgcatttgccatttggaagacttgactttactttctttctctttttcttctcaagatttttaaatctttaattaacacaataaagctctgagatatatatatattttttttcaggtggggtaagatggaaagaaagacactaaagatggaaaatgttgtgataaaaaggtaaatcttttttctcttttagaaatgtccaaaggaaatcattgtattttgattaaatattaactcttttcactctaattagagatattaaaaagggataatgaccaacagcaacaaaaatccttattcagtcaaaaaatcaaaattattttatggggtgatctaagtatataaattttcaaaatctatttatataatagaataaaatccctatttaaaagaaatattaaaactcatcatgtgatatttcctattttatctcatacaattttttattttatgttgccactacataaccttaccttagccttacaaaaataaaaaaagaaaattacagggtatgaaacgaaatctataaaggtataataccacaaagtagggttgtacattagtctgcttagtcggtttatactacatattttttttaaaaaaaaaatcttaacccgaccgacggtttgggcggtttggtcg

SEQ ID NO: 389827 - DNA, 1676 bp, Cannabis indica
acacaaaaacaacaaaaaaattacaaaaatatggtttaaaattttttaaatatttttacgatttttttgattttatttatagattatacgttatttttatgttgtactcttattaatttgttgttaattttttgttcttatttagatgttattttcatgttacttttatgtagttttgttgttatttttatgttgtttctatgaaaaatcgtaaaaaagtaataaaaattttttaaacataaaaaatgtaattttttttaataaaaaaatggtgtctattgtaattattgtaattattattattatttttttttttatatacgtttggttcaaaatgttggcccaatgaagatctgggcttttccagcaacaatagtttttcttttttgctgcaaaattgcaagaaatagttaagaaggttctatcagtatcattctctcaccaatcaaatttcattaacttgaatgggagtggcagaccaaaataataaattatgattcagataattaaaaagacaaggatcacataattcactcaccacaaatatctctcattttctttgtgaaaagaagttgaaatgacaaagaaatgttaatatcaaggctcttccttaaatatgcaaattattcattacaaaatataacaaagaaaaaaaaagtaactcttataatggagtgttagccaaagaatatagctttaggagataataaatttgaaacaacaaattatatggtgtcaaatacaatatggcttgcttttatatttaatcctaaatatgacccaatataaattaagaatatgaggtatctacaaactcctctacaacatattgtctacaatgatgctagtgcaattctaatgccaaaatttaaatttagtataaaattaacactaaaatagagtattattttagcattaattttttttttttaattctaaccataatactaaaaattatattgtttattataatattattttatgaatataataaaaatatttacttgataaataaattatttaactattataaagtaaagaaaaaaaaaaagaagaatgtcgtgatctaaaataataggttttactttcaccttgagacctaaggaagtcatgttccatgacttcaatttgattgcttgtgtagataagaagcttaaagttgctcaaccaaaaatctcgtatagtttccattccagtgccgcccgaaggtcgttgagcacttcctcaaactcagcctcattatttgaggcactaaaccctacactgccttctccaatgatcatttgttggagtcaccaatacgactcgcgggcctcctatcttactttattcctttctttcttaagtaatggggagcgggctagtccccaaaaatggactagggttggcttttcgtagttctccctataattcaaacggtagaaaggaactgaactgtctcacgaagttctaaacccaactcatgtaccacttaaatcggcacaccaaaataattaccgattcttgagaatctaagatcgggaccacccactacaagaaatgtcacttttaccagcacagttcgctacggtgctggtaaaagtaacttttaccaacgcatttcgcaaactgcactggcaaagatgtcaaagttttaccagcctacatttgcagtagctaaaatctaacttttacca

SEQ ID NO: 389828 - DNA, 1096 bp, Cannabis indica
ttatactatttttattatttttaaaagaatactattttttaattgaaatattttttcaactagaccagctcaatttcgacaatgacagaaacatcactcgagatattagagctcgaaaaaatacaattagcatttaaaagtaaagctctcgtaagttgatgagaaactacattagcagatcgtttaacaaaatttaacgaaactataacataagaacttcaaaaagatatttgcaatcttccacaacacctccaaaatatagattgcatcaccttaagactacgaaatacttggagtaaaaccaagaaattggtctcgatgctactgactatcgaaaaatctcgcttcagccacgacaacacctccttcaaagctaaaacttcagcaactcaggaagtacaataccctccttcaatcctgaaataccagccaccacaaaacgatgatgatctttaatcactccattgtatccaaacttgtcttcctcttcaaatatagctgcatcgatattaatcttgaaattgtcaacatctagtttagtccacagcttagcaccttccgcaagacaccaagtattcatcgatggaaaaagacttatatcccgagctttcttccattgattaagagtggcccaacataaattaacaacaacatccataagattcttttttcccttctacaaaagttgattagcatatactaaagtgcccaacacaacataatcactctaccacactctctcctatccaatcaagcaaaaacagatccattctccaaaagaatgggcaaccataggatccaaggccaaaaacaaccacacaccaataactccaagcaaactgataagtaaccaaacaaggcataatacacttgccaagtgacactggacataatacggtacctccacatgcttcgactttaattgaactctcgttgggatgcatccattgatggccgccacacaattttttttcttttaataagaaaagatgagtataataaatgttattaattttatacatactagcaaaaaactacgtgcgaggcacgtatattaaattttatgctaatttttttctatgttatttgaaagtta

SEQ ID NO: 389829 - DNA, 1227 bp, Cannabis indica
aacccccattctttgttttatatccctccaatatgatgtaacattaccaatgataaaacattaataacaatcaaaccaatataatacccaatattcaatacacctttcttcaattgatgatcttctcacaagttctccttctttgtatctttcccagtaacaactcaccgacaactaaaacctcgaccccagacgtcgttgccctctcagggagccacaccatcagaattacccacgccagatcctttgacaactatctctacccccaagacccaatcatggaccaaatctttgccaagaatctcaaatccatacgcccaaccaaagacttcgatgccttcaccttccaagatctctaaacacctaacatcttcgacccagtcaaggacttttcacctccgatcaagctcttcaaatttttgtgtttgagcttcaaatcgaaccaatcgagcaaggccgagtttagaattgaatcaactctacataatttttaataattagaatttagctaagaaaaattcgatcaagtgatgagtttatatttgtcttacacatatgatcaatttacgtattaatgttcttaaattgattctttaaattattgattagtgtcattttacttgttttggatattttaaagactaatcatgcatttagagtcttttggagggattttagcatatttcggtggaaaataatagaagtcggggagctcggttttacaaggtggaacttaattataaattttcaagatcttagaagtagaaatagacttggagctcaacatggaagttttaaatctcgttgttaacttttcgaaacatcttgaatcgtccaattctgagttttattaaaaaagttatgacaaaaatactaatcatatgacataaattttttgacaggaagtcatggccgtggcaagcaaccttgtggccgcggcgaggaagcaaatactgggcaatctcgtaattttttattttttttagaggaagatatctttgttttagtgagatattttcaagcactgtaaataggaccttttcggctaggaatttgagaaccctagagctaccaaattgagatagaaactcagagaaaacaaggaagagacggagatcacgacttcgaagtgttcttcatcatagttcttttcttcttcttaaactcttactatttattatgtttttattatgatatctagtttcaagtagtttccttttagttaag

SEQ ID NO: 389830 - DNA, 1479 bp, Cannabis indica
agttagaattagaaataaaaagagttaagactatggataacctaggtagggccatcttaatgacaaatcacataaagaaaaaaagttgaatattataaaagcaaaaagataaattctagtcaaaaaaagacaaacaaagaaacatgtgtgttattttaaaaggataaccaatatatcaagaaagtgacatgtgttactatactttaaacatcatatttattgatatcttatggctctttctttttatcattattatttggagaattttcgttttatggattttaaggtacaattttgtaaaattatgttttttggtttattttccaaaaaaaaaaattatgggaatttttttttaaaagttggaaaatatggaacaacaaggataaggtctggttacctacctaaaggaggtagttatttatcgctatgattatcctgaaaataatatttatttttaatttcttccataaaataatttttttttcaataaatagtataaaaactcgtaaaatttatagtttttttttggagatttttatagttttttaaaaaataatcaagagaaagaagaaaataatgtaattataatttataacagctatctaccttatgcatctacgaatagaaactaagagtatctctaatgaagtgttaaagatgcggtctatatgcatatttgagctcatatttattaaattgaaattcaatagtaataaatttttctaaatttaacacatgctaaaagtgttaaaattagcacacattaaacaaggactaaattatgcaccacaataaatatcatttttgttttactattttttcacttattaatataattaataacttgttatattttatctatacatttaataggatttttatatacttttacgctatgtttgatgggagagagcaagagagtatgatggcttgagagattagagaggatggagaaaattgttgatgtcctttatggtgtttagtattaggtgtaaggtgggaaggatgaaaaaaaaaataattagtaaattcatccttgtgaacataaaaatttatcatttttaaggataattattgtatcttgcaaattgtattttgtattttacaattttctaaatttggagggattaaatttttaaagtttggagggagaatatctcccttcatctcttcctcttgctaaacaagtgatttagtctctctatccctcctaccaaacataggattaataaaaataatgtttttttttacatatttttatcaaaacaaatgctaattttatgagaaatgctataagatattagtggtgtgtcatgacccaaaatagtacttacaaatacatatattattaagcaaaatatatatagatgatgtaacatccccgcatcaagcctccattaggtccttacacccacggaatgatggctcttatacacgagtacgtcactttggctgcttcatggactgacgactgaccct

SEQ ID NO: 389831 - DNA, 717 bp, Cannabis indica
attggggtttttctagtttcaactcagatttctagcaagatcctagcatttcaattcaaggtataaacccctcaagcttttccttcttgttttcttaagttttcagataggttttatgcttgttttagggttgaggtttctattcttgtgatttgtttttattgagatattctaatgttggaattatgtttattgagctaatttgaagttaaacgatagcttgttttggttgtttgacaaagttgagtttaagaactcaaactttagtttttattggtgattttagattctgagcttgggtagttgttttattgcttggaaaatgtttattggggtataatatgtaggtctagaaggtttggaattgatttggttagggtttggtttgttttgggttttctgggtaaaaccggctaaccagttttacaatgcttgtaaaaccagttacccggattttgcagctgggattctcgacaaattcatgttgccgattcgtttaagtttcagagcctctgttggttaactccatgctacttcagggtattgccatattaagttgcagtacatagggttttggtttagaacttaagtcccagttgtgatttagcgtgtcacttatgcatgttgttatcgatgtgatttaggagcctataattttccgagcaggtgttccactcaggttggccgacacacctaaattcggaattgaggtaagat

SEQ ID NO: 389832 - DNA, 1010 bp, Cannabis indica
actgagagtttaacttatttataccgcaaattacttattttttcaaataaaactaatatattttttttggttgtgtccttttcaaaaaaaaaaaaaaaaatgtctctcctagctggctccgccactagttcactgagtggtctttcacacaatatgtggtcatataagacaaaaagaagataaaataggctcccaagtatttccagttgagtcaataattgcgatataaaaacaccttgataacgccaaattaaaccaaattcagtcaacttctcaagacttatagtacgttggtttagaaacttacaaacttttaataattatcataagtttgggtccagtccagataagtagctactattacaccactaactactacacatacgtcaatttagatattaagaagacttttaggaaaatccatacatcatcaattcttttttaatatataaggaatatttgcaagataagtacttgaattgagtttctaatcagtacacactcaataatgtcttttttaacgcgtaaactacttaatattagtaagattatgatttatactcggtttcatcgataatatttttcttttttgaaaccatcgatactttgtttgtttgtgtcttgttgtttatattatttttgtattatttgatagtacttcgtaaaattataattacaaaagtaaaaaatgataaaaagaaataataaaaaatgtaaaaattttattgacggtagaatattttttctgtataatagtgtagagtataatcatttaggagatcacactgaattttgtaaattatgttcaaattcttaaataatttacggtatccttttcaaaaattaaaaaaagaaaattaatttatggtattattgaaagctagtttgaaaactacatattttgtaattttagcataattgattatttagaatttctttaaaattttctaaattgtacattatcttataacaaaaatagattataattaaaggataatttcacaaataca

SEQ ID NO: 389833 - DNA, 1570 bp, Cannabis indica
gaaaataaaaatagagttatctcagtactagttattatcagctacacttataaaaaaccccagtcaaagaagattgcatgtaggcatagaaatttgcaaaagattcccagccacacaatatataaaattgattgtcctactctattctctcatagacaggcaatgttgactacttgatgcaaattctattttaccaaccatacaaaacatccccaactaaatatgcaaaaactagtcactgacaattagacacggcctcaattctcaatccttcaactttaaaaattaattaattgaagacactggaattacaaaagagagtaaatattttaagtcaataaaaacaataatattaaattctcagtctagcctccggtacatctacaacaatgagcacagacaaggtaagagttgattatcaacatagatagtaaaagttggacacattatctaggggtcagaaatgccaaacttgccattaacactttgaagtatgctgttgtataatatatctgtcattactgtgaaagacatattaaagccaaaactgattcagctttcagacattgcaattccaaagaccaattcaaacaatcaaattgggacaagcacggatttaggtttcaatcacaaaaagtgatttttctatcataaacaatcaaccaccctaaaaggtaattctaataaaaagacagatccatagcactaaatcaccggtatagaaaattcaaatcaagtgtataattatccaataatacaaatgtcacaggaaagtactgccaatattgtacgatcaatctcactcgagaaaaaaagactattatagttggaaattgaacaatttagaatattccatataccataacacaggtcatcaaacgttaccctaagagaaatgaaggcatcacgcagtctccactttctatactctgcaaaactattagactaggattctaaactttcagaattcaaggagcccttttcactctagacactcgtagttacctgtatattgagagtatcttaaagtagtgtatgactgtgtttctatttaacttacttttactattatttttgtttgattcgaagtaaaagcataatccgcctgaaggcttatgacttatgcctctcctcacttaagcaagacaccctccaaatcccaaccaagcttttatgaacattttctagaacgcaaatcatatcagcttattcacaatcttccaaaaaatatgattgaaaataaataaaggcctagaatccttgaaatgcaggaatatcaagcaaattgctagctatatccccgtaaaagattgaaccacataactttaccttgtgcgagaaaaccaagatcctcaacaccaaatccaaccataagcatcttgtgttttactaacaaggaaaaccaatttaacagtaccatatagcaaaaatgaaaatgaagattttataacgagaaaactcatacattaataccagattagatcctacttagaggaatgaaagggactagctgaataaagacagtgaggagtagtaactccaccacaagttctcaaagctaaaagtcaac

SEQ ID NO: 389834 - DNA, 1724 bp, Cannabis indica
gttcgagtcactattgacatagaaaaacctttgaagaggcgtaagagactgattaagccaaatggggaatggatttggaccaccttcaaatatgaacatgctccaatgttctgtttcatatgtggccttattggtcactctgaaagattttgtccaaagcgctttgaggaacactttgatgattcggtacgattgtatggggaatggatgaaagggcctacacgaaagaaaaattatttgataggagcccaatggttgcgcacagggcgggaagagaaggaatgagctgctgatggtggtgatcggaaccgaagtatgatggatgagagggtgattaatggtcctgctgtaattggggttgatggaaggaattatggaggagatcatcggatgcgaatggagacaactcagagaaatcgtcagggggagaaatttgtggaagttaatgctaatgagagtaatggccaagattctaatgaggaggcaagtttaataagtcagacagaaaaggaaacaatgctgattttagaaaacaaaaggaggcgtacagagaataaagagcagagggggtcacgtgtggtagatgacactatggtggacaatgttgatgaagtcagccataaccaaaaaaacgaagtacaggtgggccttggtgtacaggcccaccaatcatcatgagtgtcttatcctggaattgccatgggcttgggaacccatgggccatacaattcattaaggatttaattatccaagagaaacccaatctagtttttctatgtgagactttgtcaaagaaggaaacaatagaaaagcttcgcattgcaattaattttgatggtgctttctctgtcgatgctcaagggaagagtggtggagtagcgttgttatggagagttgaaggggatgttaatttgcttgggtttggtcagaattatattgatgcttcgattgtgggaggggataaaggttattggcggcttactggactatatggggagccgaataggagcttgagaagaaacacttggactctcatgaagactcttaaaaatcgttcaacacttccctgctgcattgttggggatttaaataatgttacttctcagactgataaaaggggagggcatccatatcccaactggttagtggaaggtttttgtgagactttggatgcttgtggattggttgatttggagttaaatggctatcctttcacatgggagaagggcaggggtactaatgcgtggaagtaagtcagaattgaccgtgcagtggtgtcccaaaattggttagatatgttccccattgcgaaattgctaaatctggaggtatctacatcagaccattgtcctctgttattgatgttagataatgtaataaaagttgctaccaaccgcttttttaagtttgaaaattcttggctccgtgagccaatgtgcttacaaattgtcaaagaaacttgggaaagtagtgttgactgaccaattttcacaaaagattcattactgtggggaaaagctgcaggtttggggaagagattttagtggtaattttagagatcaaattaaagaatgtaaagcggatatgagatgttggaagaaaggcagagattcagtggcaattcaaaagtacaaggatgccaaaattaagttgcaggaggtgcttttatagcgtgaaattttttggcgtcaaagatcgaagcaactttggttaagagaagggga

SEQ ID NO: 389835 - DNA, 885 bp, Cannabis indica
ggctagatttctttgatacattctcccttgttgccaagatggttacacttaaattgttacttgttatttcaactatcaaaaactggctcactttacaacttgatattaataatgcttttcttaatcgagactttaatgaagaagtttatatgtcacttccccaaggacttactctgccttcttctcttgatgcagaaactaaccaagtgtgcaaactacacaagtctatttatgggttgaagcaatctttcaggcaatggtacagaaaactttcagatgctctactttaagaaggattcaagcaatcacaggctgactacactctgttcaccagaggatccgcagacaccttcatttccctacttgtctatgtcgacgacatcatcatcatcggtcccaacatctctattctacactagttacaagactcactgcatcacaagttcaaactcaacccccttgaaaacctcaaagatttcctcagttttgagatagctcatgccaaagatggtttatttctttctcaaagaaaatacaccttacaactacttgaggattctggttacgtaggcagtaaacccagtaaaattcctaggaccctaagctcaagctcgacaataaacatggagaagtattggacaacccatctcattatcggcagcttgttggcaagcttccttatctcacattttccaagccagacataactttcactactacaaatatcgaaattcgaaacagtcctaaaaatgaattttttccgggaccgtcgccaaaagaataaagtaactattttaaacggtcaggaaaaatttagtattcgcaacggtttaaaatcgtagtgaacaaaataggcgacgttttttaataaaatgcgaattttta

SEQ ID NO: 389836 - DNA, 759 bp, Cannabis indica
attcactaggtacatctcgggggacggtgatgagtaatggagtgcctcaattggcaatagtattaaggttaatgtcgacgcggcggtgtttagtgactcctcaacatatggagttggttttgtggctagagactctggtggtatcgtcgtggaaggcgttacaaaactttttcatggttcaattactcctgaggtggccgaagctattggggttcgggaggcattgagttggatcaaagaccatctgtggactcatgtgactttggaaacgaattgtctttctgtggttcaagctatccgaagttcaatgaccatgatttcaatgtttggcaaagtgattagtgattgtaaaattttatttcatgttttgtgtaatgtttctttttattttgtaaagcgatcaacaaatgtagtaactcactctttcgctagagctgctatatcccaccttgatcgtcgtttcaacttggacaatgttcctattgagttgttaccttgtttgataagtgaattaatcatataaaaaaaaatgatgattttattttcaaaaaaagaaagagttgaaactttcatttcgatgtatgtgtaaaaagaataattaaaaaaaattggtattaatttatattaatagagtgaaaagtaattttgtaaataatttaatatacctgtattttgatgtaattttttctaaaattaaggtaatgtttcgttgggagaatgaaaatatagaaataagaatgaaaataggaatagaaatag

SEQ ID NO: 389837 - DNA, 935 bp, Cannabis indica
tttttaggcagcaagctcctaacgaatttctacttcaactctaaactccagtgttgaggcgcacctatatatatatcttggtaaaaaacgatcctctttgttaaattttggcattttaaatgctctggcatggaattgtagtgttgaaatgctactccactatttttaatttcttcgccttaagagctccaaccgcaccggaaccataagatttttttctcaaatgaattctctagtgctcttatctcgagaattgatttatttgatatttttcttatattttttttcaatatttttccatttttattcaacactaaatttgtaaaatattaactactaaaatcgtaaaattgcacaaaattagagtaaaattatttaaaaacatactaaaaataacctaaaaatagtactaatatataaacctaactggatagggctccaagagtatctaattttgtacaaatgggtgaagacacacacttgactacacacgcgataactgaaactttattttttacagaaaatttatttaataaaataattatttttttgttttattattttgttttattattttaattgtttggaaaacaatatatattgttaaaaaaattaaatacattctttcataatttttcattataattaagaatgctttatatatttttcaaatgataaaatttcatttaatataccgaataatatatatgagagcatgctaacatcacagtacgagtcattgccagttctcacactcacagtaacacaaaacaaataaacaacttcttttggctactgaaaaacaattacaaattaacaatttgttagccaatacaatactccacttttacaagtttaataaaaaataaaatatataataataataataataaataaataaataattaaataaatataaagtggggttcatatgc

SEQ ID NO: 389838 - DNA, 1121 bp, Cannabis indica
aaggattcatttagctcaaagatctgaggaccatttccttggtctaatcgattattgaggactgtccacatctcagaagcagatacatgatactatttttgatttcatgggagacagaatgtaatatccaggacattaccatttggttgcatcgtgtccaagaactgtaaagagaatcagatggaagaggttgaggtaaagtaccttcaagaaaaagggttttatttcttgcaccaatggagagtttgaagtctcttttccagggttgaaaatttcgatcagtgaggagaggggttgccaaggcaagacctggatgatcagcattgctgaggtaataaggagatcgaacgtcttcataagcaggggtttcaattgaatctgatcgagggcctggaatgggtggtgttgattgaggcagagtgccaacgaaagtattcgatggtggaggagcggtggaagcatcaaccactggattttcaagatctgtggaagtagctgatgaagtcgctcgggttctcaccattgttggaaccttgttgaagctttcgaatgatcttgaagaagcttgaactggtttcttgcaattgtttgtactgataccatattagtggaaaggcagagaagaaacagaggaaatgaaagtcatcttttattgaatgagtgaaaagtgaattgaattaattgatacaataatgttcagctggacttatatagcagtgtacatcaagtaacagaaaaaactgaataataacagaaaataacgatctaagaatctcatttgttaagcgaagtaatgctatgcttgcttccatcattttcttcatagataattcttcagaaaaaccctacttttgttgtttatacattatatttattaagaaaacatcttaccaatttgctgcacattctatatgtagtctgttttttatatcatgcatttaatatatagggtaaatactattttaaactttgtgttttacaaaacttatcaattagactatatgttttgtttaacaaaatagatcctatatttttcaaaatggtacaaataggacccttaactaatttttttgttaaaataaaatttaataataatccgagctaaatgtgttataaaaaaa

SEQ ID NO: 389839 - DNA, 1240 bp, Cannabis indica
gagccacaacatgttgtttctttgctgacgagctgattggattaccccctaagaataccaaataacctcccgtagagcgtctatcatctacacagcttgcccagtcagcatctgagtatgccttgagagtcaattcagatgtaggtgtaagatgaataccctctctaattgtgcccttaaggtaccgaagtagctttttacatgcttcccaatgtaagtgtgtaggagcttttaaaaattatcttagtttgttaataatgtaggccacatcaggccctgtgagagacaagtattgaagtgcccctaaagtacttcgatacagagtaatgtcttcaaacagttctccttcagttagcgacaactttacagcagcactagttggattcggacatggtttggcaccttccatttttaacttcaccaacagatttgtaatatacttcgtttgagataaatacataccagttttatctctataaatctctacccctagaaaataatgaacctgtcccaagtcttttaaactaaatgtcttgttaagatcagtaacaagttgagaaaaaagaaaggagttgggcccaattatcaagatgtcatcaacatagacaagtaagataatgagattcgagccagctccatacacaaacaaagaaacatcttctttagagtctttaaaactccatggcagcaaggtatttcgaagcttttcgttccaagcccgtggagccggtttaaggccataaatggccttattcaattttcatacacgtgtgggattggtagtatcctcaaagccagttggttgacacatgaaaactgtttcagacaatgtgccatgcagaaaagtgttgctaacatcgagctgaaccacactccaattgttagatatagccaaggacagaacaagtcgaactgttattggtttgactacgggactaaatgtctcatcaaaacttatgccagtcgtttgaagataacccttggcaacaagtcgtgatttaagtctgttaagagaaccatcagagttaagtttaactctattgatccatttgcaccatataacgttcatggaggaatcatagggaaccagcacctaagtattgttcttgatgttgtgaaaagtgtgtacgcaagtatacgtagtcaaacaagtaataaagtgataagtaagatcgtctccacagggattgcgaacaaagtttgatgtaaaacaagctaattacaagttaaagtaagagca

SEQ ID NO: 389840 - DNA, 1187 bp, Cannabis indica
tcaatcttctcttcctcagaatttgaaaattccaccgtatcgatctccaagatcgctcccatagatctcatctttctcaccagtcttcgacgacggtcccctctatttttaaatcgctaccttcgttccttttttcgatctttgagtcttcccgccatagcaacagaattaatttgaaaaatatccaaaaccgtagcagagcactattccgtacttagtcttttttctttttgaaaattaactcccaaatgtttagaaattttatactataaaatatatatatgtctaaacaaactcaaccgggttattgatttaattaatataaaatggtaacgtttttttaaaaaatattatccgtaaatgtaattaaatggttgaattcttgtagtgtcaactaagtctacacctttatcaagtagtatcctaacgagttctgtaccttgcaatgtttcaaacaacatccatgaattttgtaaagcgtaatttttgcggcagatacagattctctaagatattttctatgaatatctccataattgtagcataatgaaatccttatatttatgggaccggtcttgtacagccgagagtttctagggattcatcctttaatttcctaattatttctaattattttgagtaaaaatattcaataagtataccttataatagttgagtcattccattgtttagggattcaatttttaattttctaaagagccattaagctattaaaattattgtacacttttatcaggattgttgagaaactcactagggcaactccttgtaatttttttagcaatttttcaaagtaatacaaaaaaaagggagtaggctattaccactatcatcggtcgaacctctctaattttttgtgttcttattgctcattattattaatttatttgtaatcaatcattcaattttatcacttgaaagactcagtgttgttagtgttaacacaaattttcgttaactaaataaaatcctatatcgtgagggatttgcacagaaaacaataacaataaaaaatagaatgaacacaaggcttttttacatggttttgcagttaaaattctgcatagcccacgagtctatcttattagatatttttcatacagttctatggctttttctctaatgaatttttcatccctttttcagtgtaccctgcccctatttat

SEQ ID NO: 389841 - DNA, 804 bp, Cannabis indica
ctttagaaactacaaatatgtttatttttgcggcttgtagtaaaaaatatgataattaattaatttgtagttagaaattcatacatcttatacacttactctatcttacttacttcacacgtctacattcttaacacgcattttctatctagcctaccatattatatatattctttattaaaattttagaatttttatatactttgcaggaaaaaaaatagaaattttttgtttgaatatcattgagcttccaatgtttattccttgtttaaaattttagttcatcctcgttattgcctttaaaagtttttagattttatttgtaattagtgttcttcaattttttcatgtgttattttaacaatgattattcattaaaaataattagagtttaattaattatagaaaaaaaatgataaatcatccattcaaactaatttttcatcccgtttaagtttaagaacctctaattcatgtgcacgagtatattatctctgtataaatataaaggaaaacacaaagaagtttaggtgatatcttatattttttttattgtatttttaaaattttgtgacatttttatatttttagaaataaactactacaaatataaacttaaagtcccacatggtttaaaaatacataaggtgttatccatgtaggttataaatgtatttctaaaaatttattactttacgatcaaacagtgagataatacaccatccaacgatatttttagctgcagctatagcaagcaactgtaaatcataataacacattaatacacaaagaattaaaaatgtg

SEQ ID NO: 389842 - DNA, 1193 bp, Cannabis indica
ttatacccttatataatgaaaaaaatcttcctcatttccctgaacagtaccttatgtaaggatataatcagtaatggacttataaaagggatacatttcaattgaatttaaaataagactacttttaactaactgatgaaaaagtgggtatatttcaacttagcccaaagagatccatgtgcaaatacatgatataatcttggattttgctctttcaatcttctcgaataattggcccatctcactctctatctttctcgtataatttggattttggcttgcaaaactgttgtaatatacaatattggcccatttcaccatcaggcacattatgttagggaaatttacaaaaatactagaatttgggttaacttttacaaaaatactgtcacacggaatttttttcaaaaatactatatttttataaaacaccagtaaaacacaaagcagaacaactcaaaacaacagtagaatactagtataacaacagtagaacaccagtgaaaactttaacacagtatactgcagtatgaaagttataaaaaaacacagtaaaaagtaaaaaataccgcctggcagtatttttgtaaaaaaaaattgcaaaagttagtataccatgtaaatttcccttatgttatgtttgttggtgatggacctgatggcatgagtaaaactgttgtctcttacatttggacagtcaaattttttatagggataagttgaaaaataccacttttattaatcaattaatcaaatttacttttaattttagatttaattgaaacatacttctttttatatgtattgtatccaaaataccctgacataagagagttacatagagagtatcttgaagtgacaggggcaaaattggtacaatattttaaaaaaagaggtaaaaataatagattttaataaagagggtaaaaatgaaaaagaacaatataaaaaggatatagagtgtaatttcctcttttttataattgtatattgtaattataataaacatttcattaacttttaaaaaaattaaaatcatttagttataaagtataaaaagtattgttgttagggatgacaattatactcacgagtactcacccttaatgggacggagacagggtcgactttcgtgggcgggggcagatatgggtttaaatgttcatactcgagtcagaaacggggcaggggcg

SEQ ID NO: 389843 - DNA, 2148 bp, Cannabis indica
gaaaaagggagaggtcatgtgttcgaacctacgaccttgaagctattaagctattaaatgattgtaaaataccattacgctacactaaaaagaaaaaagaaagtaaaaaaaaagtttaaacatagttttgattgctaagtcaagacactaaaaaatttggaggttggtagaagaacttaactacaatttgaacttaaagaaacaacatagctttcaaggttaggtaagaacgcgtgaagctacctatgaacagctttagttgaaaatatatattttcattcaaatacatattataaagacatagttttttattttatttttgagaaatttatattaaatctctagtttgaagtaagtttacaatataaaatcaaatcattattttcattatatataaacaaatatcattgttatattagtggtgtcttgcaccatttagagatgacgttttatgattgattagtgatattttataataactattaaattaaattatgtgggatctaatacttaattttatcagtaataatattacacattaaaatgtattaaacaccactaatacacatttagcatttcttataagcaaaagagcatacactcaagcagtaacgaacttaggatataaagtgagaggacgtaatttcttttgtaaaatatggacaaaaataaatttaaaaagaaaaaaaaatatttttggtgaaattggagtttgaaccattgataatctagcttaaccagtataccaatgctaatagtatatctataaatatcatactttattataagtatatgtcgtaacaaattaaaatacatacacattttttcctgattatctttttagagagtgactgttttctctcgtttttatgtgggtccgcccatgcactcaagtctttttgttttaggaaaaatagtcacaagtactaataaagatgtggttggtcttcgttttacttaagaggaaattgaggaatatataataccaaaacaaactttgcaatttaatttaagattgttaatttaagagaaatgctaaagggcacgtgattaacacctttctatgtgtcaatattgctattagttcaattaagtatcgaatcccatataatttaatataatagcttttagggagtatcgctagtcaattgtaacgcaatatgtcgagaaggtacttagctccactgatacttaatagcaatgttcttatttaaagtaataaaatataatcactagtgctcataatgctgtatttatatatatatatatatatatatgataatttccattcaatgttgaagtgccttggagtttgagacaatgaaaaatatgtatatagtttgaagtgtattgcattgcactcataatttgtctccacgttgaattaattttctttaagtgaattcgtgattaggtttattattaattaattaagatgatatcttatctattgacatctaaattgataaaaataatgttaacaacaatctgattttatttaaagaggataagttattaaagtcaagagtaattagcttcattggtaggtataatattatattttttaaaaaaacaataaaaaacatattacttattatatatcatggtcatggatacgttggagttggatctatatgtaaacatgtacagattttcatacacattggatttgaatatatgatattattattatattgtattatgatgaattgtattgtatctaatatatttaatataatattatttttagtattgacttatattaataaattgtgtaaaattgtatatttttttttactataaactctacctaacctttctagagtgcggacaggaaccacaaaccatttcaaaatattataacataaattaatacgaattatttgctatgtattaaataatacgattcgtatagtatattaaaatttatcgtcgtaattaattaatataatatatattattactttttatttaatacaatataaacatgccctataatacaatataaacacagtattatttaatattactcattcataggtattacccattcagggctggccctgaaaatatatgggcccaagacgaattaaattttgagggcctcaaaaatacataaaaaaatatcaaccaactaagttatgaata

SEQ ID NO: 389844 - DNA, 603 bp, Cannabis indica
atattatttattatttaatacaagactactcttaagcgcgaaacaagctccaaaaatttcaaataagcctatattaaatacagtagtaactcaaatttaaaagccgcccgtgtgttaattgtggtctgattttacaaaaattaaataaaatatattctagaattatttagttatttttctgataaaagtaatgatagatagtacgctgattaatatatattttggttgatgtctaatcaaataaaacaagatataattttttaattatttttaatattaacttacttacttttgttcttttctatttgtatatttttatttttattttgtaggctcctttcaaatattattcacaataaattagatggtgctgttgattagatatttttgcttgtcttttaatgcatactgtttaatcaaattatgaagcagcagtagctttatcacgctataaaaatcttacttttagtcacaacaaaatttgtaactaaaagtaaaaaaattgtgactaattataaattaattattattcttatgttgtgagtaaaatgtccgtaattaaaagtattaatcacaaaaattacaatttgttataaatatatt

SEQ ID NO: 389845 - DNA, 1075 bp, Cannabis indica
ttattattattattattacacgggaccttatgacacagatcccaatggccaagtattagctactacgatcaacctgaacacggctattggccaccacggtccggccaactggctagtacctcgaccatagaggtctgcccaggagaccaacctgcttctggacccactattcaaccaacggctaaagttcctgatacgggtgttgggtctcgtgtttatgctggtgaaactaaacctggggttagcaaccctagtatcgacgagcctcatgttaacttgggctaaagtacatttaataatgcataatttgagttggttcatatttcaactttgatacacgtgtcaattttttattacttctcaaaatataggtataacaatagtattaatttattatttttgtcttttctttttttgaatttattcttaaattaaaaatcttcttagattatgttgatgaaaaatcgcgtcaacatactgaatttgataattatcaattcgaggtacttggggaaagacttgactattaaagaggcgtaagttataagattaaaggcaaagaaaaaaaatcatacagtcaaagtcagttacttgcacatccttcgcccctaatgaaatgtacaatactgtgataaatttgtttacgactatacgtgacacattaagaaatagtttgacacctaaacaacgtgtcaatttttataactcacagtttgataattttatccaaatgtatgttcaatcacaaactcttggtggtttgtcttctcagagttatgtcgctcctccacagcagtaacatcaaccttctccgcaacagcaacatcagtcttctctgcaacagcaacaccagtttgctctgtagtagggaaatcttttcgtatatggaaccctttcccagtctccttcgtttggttcaaattttattgattttgggatatttgggtgttctttgcaggagcaacaattttttctaccccaatactcaaccaagctcagttagggaacattcacttggtttattgtcagatcaaccatatgttctttctccggcacaaccacatcccaaccccaa

SEQ ID NO: 389846 - DNA, 1182 bp, Cannabis indica
tctgtttgaatcttggctgtacttccggagtttgtcttcaaaatcattttcaagaaatcatccaatatggcatactgttctgccatagacccttcaagtaatgcctttgctgcatttctggctctgtagaattgccatgaagtgaccttagaatactttgtgtctttggtcatttcaacgaaagctttgaattccatatcagggtgttgcctaaactgttcaaggaagtgtttggtcacccaattcacatcaataagcttgaaaacaaccatgaatgaacaatcagtatgaataaaaacacttaaaattaatgaacaatcaataacaataaaagatcaaaagtacctgttctccaagacaatgccacactggtgccctccttcagttattgtagtgatcttgaatgtcattccatctagttggacatgtgcatttatcatccatgggcacccctctacattgcagttagctctgaacttagctctatcattgtgaattagaatatactccctgtctgtatgtatgaaatgcccctttagtgcagccctcaatatttcgatactaccaaactccatgttcaactcaaacttgaaatcatctttcttggtttggggattgaactccaacctcgaggtatgatcacctccttcatcatcactgtgaacactgtgtagttcatctcctgaatctaacccatcattgccatcatcattggcagcaggaatctcacttgcctggttccaccatctgtttggatttgatggtccaacatgttccctttccacttccccctgtgtggctggattgaactcatcttttataaattcaaagtcaccatcagttatttgtgtttagggctgtgtttggggttgtgtttggggttggggatgtgtttgggactgtggttgtgtttggggttgtgtttctgtttggggttgtgtttggggttgtgtttggggttggggatgtgtttggggctgtggttgtgtttggggttgtgtttctgtttggggttgtgtttggggctgtgtttcttacaggggttgagaaagatgatccatgtcaaaatcagtgtgccaatcagactgtgtttcaggcaaagtgtcatgaatggcatttgtcacaggggggtactaggtgcttgtgtttggggctgtgtttggggctgtgtttggggttgtg

SEQ ID NO: 389847 - DNA, 592 bp, Cannabis indica
aaaaaaaaaaaaagtttgtatatatgacatttagatgttacatgaaattaaatttaaatttcaaatactaaaattgcttaccttatctttcaaaaccaatttaaagaaaagattaaaatctaaagaaaaataaaaaagaaagaaaataagatatttttatctggttaggacgataataggtgttagttcgggagttaatattgtattacaaaaaatcttttttcatgtctaacaaaaatagcggtagacatgaattatattttggagagttttcatgtttgacattgttagacattaaaaaaaaaatcatcatgtacaacaatattggacatgaaaaattataaggaatgtgataagttagaaattctaattaaaaaagtttactaagatttttggaaactgaataaacagattcaaaaataaataaaatcgtaattaaataataatagacaagtaatttttacgtagttcgagcgttaatgatccctatgttagacttttatatgtatgaaatgaaaatatgtatgtgtatataaaaatacggaataaacgaatatctgcactgtataacttaaggatcgaaatacctcca

SEQ ID NO: 389848 - DNA, 888 bp, Cannabis indica
taaataccaaacctaaaaagtcttttttgtgcaatcatacttagaaaaaaagaaaaagaaaaaaaatggatatatatatgaactaaattcacagtcataaaggaaatatatcatatattatattaatatatatatatatgcttagacaaaaaaagacactaaactaaaactccaataaacaagaaaagaagaagaaaaagaagaaaagtcaaaactgttctgaggattaacaactgctatacacaaaaagaatacccaaatgctcaaattagttaataagaaaatcattcgaaaatcccaaatcaaagttctctacttttttgatcgaagttgccacaaccaatcactgaaattagtcagttgaaaaactatgtgtttaagttcacaaaccgatcaaactccataatcgccgaatcataataaataaataaaataaaatagaaaaattaacctgaaaaaagcagacaaaccctaaaaagcgaaattatcaagagagaagatttgtcactcttattctaccatttacagagagagagacgtacggaaccgaaattacagggaagagagagagtgtgtgtgtgtatgtgtgtcactttctctctcctcttcttctgatttttgtagagagagaaaaagttgatgatgatgatgattggacgaaagaaactctcaaaagagaacagagaatgatttgagagagaaacagaaacagagtttgaagctcttccctttcttctctattatatatatctatgtatatatgtgtatatgcatagtatattatgtatatgcatgtatgtatgtatgatcacatgaagtaataatatttaattttggttataccattttgttcagttattgtactttcacggattgtaatccgtgatg

SEQ ID NO: 389849 - DNA, 1212 bp, Cannabis indica
gctcttgtattaatgtgacacatcagcatctttatcaactaaaactaaaataatctcaacaacagtatctcacacatagaaacacaaacctcgagatctcgtttgtgaccagaaaggatgctacaaaagcacgctgcaactacttgtatcctgctccatattttacaatttgcctcatcatattttcgccaataccagctaccattcaaaggagctttgtgctcccaccactccacaattttaatgtaaacactatagacccattttatccaatgattgtctttcttattggcaatggagcacacatgtttgaaaagtactgcttcattccagtctgtagtgttcacgaatcctagacctccaacagcatttttcctacacaaattgcccgaagccacactgttaggaccctcaaccaagccctacttccataaaaaattgctacaaaccttttttatttcgtatatgatcttctttggcaagaaggtatgtattgtcaccaagacagagttcattagaacaactctacctgcaaaagagatgttcctcgagctccaaactttaattctggcaaccattttctgaactaaacccgtgcattcatctactgaaattcttttggcacatattggaatgccaaggtatttgaatggagttggatgtcttgtgaagctagagatatttagaactctgagtttttctctttcttgcatcccactgcaatcgatagcagttttttggacatttgaattcaaacccaaggattgggagaatgtttttaggccctgaagcatgtaatatatactcttgtaatcaccactacaaaagagtaaaacatcgtcagcgaagctaagatgattcaacttcatatccttgcatcggtcatgaaacaaaaagtgttcttttttttcaaccttaaccagaatctgacttaagtactccatacccaatacaaaaagcaatggggacataggatctgcctgcctaagacctcttttagcttcaaaaaaattgtggagaaatccattaaagagtaaggaaaaccgaggagtggagatacaagtcataataagcttaatgaatttagtgttgtgttttgtgccctaaataaaacccatttcaaactaattaataaagatcaaaaatcattttatgttccatggttcacatgatttatttcatgattatgtttaatgtataagttctattaag

SEQ ID NO: 389850 - DNA, 1041 bp, Cannabis indica
tatttaattaaattttgaaaactgtaaaagatattaaagaaatagttcattacaggttgtatagcatgaaggataggaaagttgtgcttactgaaaaaggcttgtttttgcgccttatttagtagcggttttgttggctgtttttgtcggctgtagaggtctgttttggggttggttgttgtagccttgttgtaattggttagttttgattaatgaaatcttctctttagtgaaaaaaaaaatagttattttagaaaaacttaaattaaatatttttgcaaacatattttctttacttgttattttttgaatttgtgtatgaatttatttaaaccaagtaatttatttctgtttattgatatttgtagcgtgaaaatgaacaaccctcaccccaatcctcaactattatatgcctttgcaaatgaactctatagtgcgaagatgtcttctggtcagagcgttacttcacacttacttttgatgaacttaaagttctagaaagcaaatttgttgaaaattgttttatcaaaagagcaatgggtgcagttcattctcaataccctttcacctaagtataacaaatttgttgtatacatgatgaacaactttaagttgaggtttcatggataagctagaaagttgaaatgcgtgcttatgaacagacattgtcacttgcaaggagggctcactctagaattgctgataagggcaaaagaaaagctgaagatattgaggatgacaccgctgacaatgctgcttctttaagttcaattttaaaagctacaattcaaattgaaccagcaatagagacaatcaaagaacaactgagcagacgaactcttctatgttctcattatgcagaggagggacattttaaagcaagatatcctagacttctgaaccataagaacaaaggtaacgcttttgtttttgaatcatgtgttttagagaatgacaaatccatttggattgttgattatggatctagtaaccatgccactcggttgcctttattaaaaaaaaacaattttcaaaacatgg

SEQ ID NO: 389851 - DNA, 1451 bp, Cannabis indica
gaatcacagtgaagctgaggaacctttcacctttctgttctgcatatttccattttttttcttttactcatcaatatcttcaaaacagtttagattatcagcaaaagctctacgtgaccaccaaatgtttcaactttgcttataaagaaattaataaatgaattaaacaacttaaatggaggcaaccagaccttaacatcaatgcccacaacaacgccacctttatttacggggacccaagctctgacaagctacctgggaattgcatagttttggaagaaatgccatcataaaaatcaacaccaataaaggaaatcccttaaaatttaatcaaaataaaaatgaaatagtggcaattgaaaggggtgggtggatgaagctgaagggacctgaagccaagcaccaggagcacaaccaagatcgagaactgatgatcccgatgttatgagcttgtactgcttctgtatctgaagtaactgtatttaaaagaaccaaaggaagaacttagaaacagagcaatagaacactcaacacacaaatatacaaatatcaaatacacatacactcacacacacaaatggtaatgaaagaaagaagacggtaccttaaaagcagaacgagctacatagcccaggcgttgagcttctctgtagaaaaaatctggagctccagctccactcatctctgcaaatgttaaaaccctaaaccccggtagtcgcacagtatcataacccaaaagacataaattctattttgtaccctctattttcactaaatactcatttgaaccatgtttttgagaaataattttttttgcactgttttcataaaatcatattttttggtattaactattttttataaagcaatgactaatataattgaaaaccaaataatgtctaaataatcatacatagcaaagaaaagaataaaaaatcatctagccaaataatatgtccattcatccgaaaagcatgtacacctaatctatatatactcgcattagttgtccaatatatatgaattagcaacactcttaaaaatttaaataatatacttgctataaactataatcctagatcactaaaaaaatatcttctatcgaaagcggacacaacttctaatgagttaaaataatgaacatgtacaacaaattttgtagaaaaaattctatctaatgctactaatattgctacacattattcttaaattacaaaaaagctccattttctactcttaagtcaagagtggatgcctttttcactcccccaaatattctgcataaaatacaaagaaaattaataactaataaaaatcattaaaaactagttctaatgagcgtgaaagtactataaaaagaaaggttgaaatgtaaatgaccctaaatttaaaaactaagttagtaaatatcccttttaaaaaaattaaaaaaatggccaaatataataaat

SEQ ID NO: 389852 - DNA, 895 bp, Cannabis indica
tctctccttaatttttttttaatttttcattaacttcataaatattaattaatataaactatacttttttccccttaagtcgtctatttttttaattttatttatttattttttttaaaaaaatgataacaaaaaaaatattttagttattagcttttttttctcatcagccaccttttgacttttcttttctttttttcttttgaaattaagattttaaaaaaatgatacacaacatattcaaaaatctatatcaaggacagatataaaaaatcctaccatataaaaaaaatatattttttttaattattttattatttttgaaaattcttctactaccatataaaaatttattttttaattattttattatttcttttaaaaaatcttctaccaaactcttaaaaatattagataacaattatctatatacatacattaattcaaattcataaatcatatcacttttcctaatatatatctatataaaatgtggttatgtaacataattcttagtttaacgatttggttttaacattttctttttttcttttataaaaactaatggatgattaatggagattgacgttaccccaaaaataaaataaaataaaatttacatcgcaaatgagggaggaagcacggtgataaagcttccacgacaaaattttcaattgcaactgaacgatgaatgattgggcctgcaaaataattgaggatttttacgattgaaatcttcaatcgtagctgagtctaaggtggtgaactcaatgtaaattctaccgatttgggcctggcagaaatttaggcattctaattgactcttctccttctttcgattgatccatcgatttttgaaacaaatcgtcatacaaaatggtagcagagagcatat

SEQ ID NO: 389853 - DNA, 1492 bp, Cannabis indica
aaatacaattactactcttgcacaaaagctcacatgctaagagtaccttgaagacactcaagtcaatcctacgactttgaccaagacttataaatatcaaatgagttaagacatcattcttgagggtcccatgacacctctagagaactcgaaaatattaaccaatcatttagtgtcgagactcacacacccaagtgtgcccaaactagggttcatgggcttgcgcgagtattttcactctagagacctctatctgccaaagaaactaacaaggacttgactcatttaggcatgaaatgacttaaatttatgcataaagtcaaaatagcatcaaaccctcgaggaataaggcacatgcgcccactgccacatagaaatattggcaatgatcttcaattttggagagcaatgccataagaaaatgacaatgttcttcaattttagagagcacttccacaaggaaatggcaatactctttaaattttgaagagcactgacacaaggaaatgacagtggtcgctacatatatattatgaagggaaaattgtccaaatatgttccctcagcaccaaggagtgcaaaacaagtgaaagaaactattttctaccaaggaccaaccctagctgaccactgccatctttgtggcccaatgaatggcagtggtcgaccatgaagaggggaagtcaaattttttgccaacaatacattttcaccaatgatgtgtcaaaaccaagtgagaaaagccaccaagtggtggctgaccactgtcaccattttagcataattggtggcagtggtcgatcactacacaatgagaagagcttcattggccaagttgtatttacaactttcatgtatcaaatacaagtgagaaaagttacccaaggcttcataagccctttatgcgaccacatccacttattttggcaaaaatggtggcagtgctctcctaagaaatttgccaagaaccaatgtggccaaagtagttttttaacatccatatgactaacataagcaagaaacaccacctatggcttcccacaagccatggccgaccactgccactttctggctccaactggtggtagtggtctcccattaggattagggtttcagacatcgaaatgagattttgggattaagaaacccttaaaatatgactcaccatgaaaaaaaaagttagaacacaccccgaggggtccgagaacatgcatggccgaccactgccatttggccatgtcagtgctcgcaactggcacaagacatcataaactgccttcagtaaaatacgcataactctctcaatttttatccaaataacttggttcaactttcattggatggataatttcaagacggatctaagtgtatctcatattcatagccaaattctaaagtatcgggtctaaaattagctcacaagatagacatgtacattttactcgataattgagtagtatagttaagtgaggggtgttggaggacactgcca

SEQ ID NO: 389854 - DNA, 1607 bp, Cannabis indica
acacatggatgttgtgttgagtaattactgaagaaatataaagaataactctaaagtcacctctacagcaaataatataaagcaaaagtagaactgaaaattaagtatgagactaattttctcaaaagatggatggtgatggtgtgaagtagttttattctctccaattttacctttgtattaattttatgtcttgaaggttggaaaattacagatttgtaagatataacatataatatatatatatatatatatattaagttggtttaaatgtatctaatattttagatttaatattgtatggtttaaatgacttaatagtttttatttgcgatatgtaggagggttttggaggatgcgctttaagtctcattagtcattatgagatggtgtgttgtggggtgaggtcctcctttcctctaacactcttccttatatatacctcctcattctatttaaatatttgttcaggattactttatcatgatttcttattactcttattaatctacatctttgtatcactaagaattgttttttttttttgccccttagacagccactttgacattttcaattgcaaagtcatgtttataatagaactctaatggcttacatgtggtcgatcccctaggtgacagcctacctagtaattgcagacttgcagtgtactatatattaattagtggggcatggtgttgcaagtaggtagtaatcccactaaattaatcgctcaacttgggggacgtacgtctttgcactacaagaaatgtcacttttatcagcacagttcgttactgcgctagtaaaaaagtaacttttaccagcgcatttcgtaaactgcgctggcaaaaagatcaaagttttaccagcgtacatttgcagtggctcaaatctaacttttaccagcacatttacgcgctggaaaaagtcttttttgccagcgcttttcattttatgctggtaaaagttctaataccaacattgatttgccaaccccttttgccaacacgtcatgggtaaattctattttaccaacgcaataccaactaagtgacatttcttgtagtgttgtaattgttattactctcattgaattgaaattatacaataacacttgtactgcatcttttatttatttttcaaattaattaaaaccattttattattaattaatatatgattattttctctatacaatatattttctattactatttttattatcttccaattataataagaaaaagaggatacaaagaatgaatattcagttattaattagagtcaacaattaaacattaggaagtctctcttaacttacaataacaaaattacaaccaccaatccaagacctttacaagactgtcaggacagtccaattgaccgactcctactcctctcaaccaatcaaggccctaaggctatataataattaattagaattgttagaaagtgtacattgatcggttagattataatatatttttactaacccaataatttaggggtgttcataaaatacttcatccaatccaatatacaatcttacattgtctggggaaggttaaccgtgataattttgagactgtgtaggtatgagacta

SEQ ID NO: 389855 - DNA, 1186 bp, Cannabis indica
aaaatacaataattaactaaaaaaataaaaaaagaagaaacaaaacaagtattagaaagtcaactttccaataacatatatactttgacttaggtgtagctgttggtgcagtgaacctcaatgacctcatcattatcctaaaatttattaactatcctttcaacaaaaattactgattattattattattattattattattattattattattattatataaccaatttaattaatttattattttgtcaattttttatgataggaaagtttgttactgaatatactatcgaattttataaatggtcaaaccaaataaaagaaaaatctaataaataagcaattagttaataatattaattaggttattaatggaaagttggagtaagttataatggaaaatatagttatctatattttttatgaaagcaaatgaattatataatgtacaaaaataaattcattttgagtataattaattagaaaataaattactaatttattgatatagtaatatgtgactaataaatatattattaattttatataatggagttatttatgttattaattactaatttattaacatagtaacatttgattcacaaatctataattattttttttatgtaatgaattatattaaattgatcaaattataaaattacttttttatatataattattttcactccttttataacactaaattatattaaattgatttatcttgcgattctcactattttatattttaaaacacaaagtccataaattaagttgtcgtttggtaataattttatttttaaaatttttaatcacaaaaataaaaaaataaaaacttttatttttgataatataacatgtgttttataatcattttagtttttttaattttaaaaacaaaaaataaaaatatgttttgaaattttttttatttgttgattttatttaaattgggtctagggcaggagtctagatttgaggccaggattgcggtcaagttcaagttccaaagtgtaggttggggtcgcagtctaaaatattgatagaaaaaaatcgtttaaaataattttaaagatttttaaaattttaattctcaattaaaaaataaaaagtaaaaacagtattatagagcacgattttagaaaatatttttacttttctaatttaaaaaataactgtg

SEQ ID NO: 389856 - DNA, 1163 bp, Cannabis indica
atgtgtaaaatgacgtgaactgcctaatggcagccacatcatcactccgttactaaaatgaacggaacactatagaataccttaaattaagcattgtcaatagtttgaggcgaatttttaacgtcaaaaatagttcagggggcatgatttagcaagtgtcatagttcgggggaaaaattgcaaattagccttaaattttttaaggccttaaatgttcttctcaaattattaagattgttacatttaaaaattttggttcaattttactaacaaatatctaacgtaggtgaaaaagcttggggttacaatttggtacatattaaagtccatagagcacgatttagtacctaaacaatcgccatgttcgtaaaattaaacagaattagaaagaaatccttgaattcgacaatctcaatagttacaaaaaattaacaacttgaaaaattcaaaattcacgatttagtatataccaaaattcacgaggtaaaaattcaaattagtcttttatatataaaaaagtatttgttgtgcgggattaacacccttttgtgtgagatcgtgggattgtagattttttacaagctggagttaaatttgcagtgtaaaattttataaatgtagtttgttgatattaaaaattaacaatacaaaagattatgaatcaaagatgggttagagtcaataagacgtacgagaggtgtcgaatgggagacatcatgaagctcggggcacacacgcgcgaggtgggaggcacccccctcgctcgtgggctgcagggtgtgaggaccccctcgctcgcgagctacgggatgcgaggaaccccctcgctaatggcctacgggatgtgaggaaccccctcgctcggccacatgcgagatgcgaaggaccctcttcatttggccacacatgaggagcgagggaccccctcgctcgaccacacgcaaggagcgagggacccccttgctcggccacacatgaggtgcgaggccccccccccccccagccgttcggagctccacctcaaggccaagaatagttcgagggaagcgaggccttatcgcacaattaccatttaagcaaccccaagtccctctctcacctcattcacgtcaccaatgtatcataatccttgtgttgggttttgtgtcctaaataaaacccat

SEQ ID NO: 389857 - DNA, 1108 bp, Cannabis indica
ctagggattatttgaaaagacacggtataatttgaggtaattatacaattaaatatatttttctgaccatataattatactgtaactatgtaattagaggtaatagaagggttccattatacttttcaattctcatggcctctacgataatttagtgtaattgcactgtgtaattattgaaaacataccattttaaatattacctattgaaaaatatttttattatgtaattaatagctatttcgccaagtaagatataagaaattaatatataattactatcctgtatccaaaaaaaaaatacacttttcattttaaaatagagtgaaattaccaaaattatgtaattactaccttttctcaacaatattgagaaaatgtgaataatataaattttgcattttgtcccccattgactaaaaatagaatgtctctattcgaaaggctatataaaataactttgtgttattttaggccccacattgtttagaaatagaagtttctagtccaaaactataggttttttagtcactgtctgtctctaatcttttgtctgatagaatgtttagttttgagttcatcgaagtagtggaggttgtacgttttgtttctctatagtagttgtatcttcggaagtgattgctcgctgatcttctagcaccgttaaagtaatggggaaaatacgctttacgaaaaatgtgtttcacatgcctcgagttttcttcgcatttttttattcatttttttgtttatgtaatttctaacaatcttaaagtagaattttagataatatagaatttttgtcttgtggagaagaggaacagattgtagggcatataatattttttctttcaagtaattttctcggtgctttataaatttttttaatgcacgtattatttatactcatttcatatttgtttattaatttttgtatatattatcttgcttcatattatttttatgtattagtagtagtctgtatttttcgtcttctccattcatttaaagcattgtatacttacatgctttatatgaaattgtttatttttataaaactatttaattaattttacgaaattatttattttgaattttaataaatata

SEQ ID NO: 389858 - DNA, 791 bp, Cannabis indica
gtctcaattgggctatccaaaaccacctgccgatcatgcatattgagaccgatgctcttatggtggccaatgctttgaaagctcccttcaattcaaattctgaatttaaagatttaattcttgatgttgttagtctattatcctttttccctaatgtaaatgttacacatgttaaacgttctgcaaatgacgcggctcatggactcgctaaatttgcattagggttggatgagacttgtacttggttggagattatccctccacctatatactctgttgttgtaaacgaatctctatttgtttaataataacaagtattttccctaaaaaaaaaaaggtaatattgtggtgcatattttgtagtaaatatctaaaattaaggtgtttttgttgtccattttcccaaccaatagttgtggcatttagtgtaacttagtattaattaataattatttatattatattaatcattattcaataaatttatgatagtaagaatataattgtaactatattcattacacatctcactcattacaatataaaataagtgaatctttttaagcattcatctttgtgatattacattctacaggttcaattttcttttggtagaaaatattttgaaccctgtgttatgcaaaaataatcaattagattatcttgttttgtttagattaataaaataaaactcctaatatttttttcaaaattaataaaaactaaggatcttgagcttaattttaactaatttaattttttaattataatcaactttaagacaatttcta

SEQ ID NO: 389859 - DNA, 1418 bp, Cannabis indica
tcgaaaactaaaaatataaaaattgcgtagcctaaccccgtcacgagcagcacaactagtttttatcttataaccattcgtgtgtctatgcaaactagctagttctatcattattggattttaatcacaatacgaagctcctaacaccgacaattgctaaagtacaacactaagattcgaaggcttcaagcccatgatttgggaagtacaaatggtagataaggtgttacgacaggagggtgcgattgagtttattcaagagctccgagttactcaatttgttggtagggtcactgctccttctacttttagctcgagtaagggtgttagtgattcatccttcggtgagaaaagaaaagctccaccgatatccaatggttcaagctagaacaagaggtttcgagggaactaatgtcggggtggtcgtcagggtggttttgaaggtcgtgacacttacccagaatgctcaggttgtaagaagcattatttgggcaaatgtaaaggtaggacatgttttgaatgttgtttgacgggccactacaaaagagatggtccacaactgaagagggaagaaccaaagcaagaggcaaaatcgattctagcacgggtattttccattaccaggcggatgcagagtccaatccatcagttgtgataggccagcttctcattaacaactctttttattatgtattatttgattctagagctacacactcataagtggcagtccgagtaattaataaattgggtaggtgatttgataattacaagatagagttcagaatcgtattacctagtggacagttagttatctccaagagatgggttaggtttatgcgaatcagagtggatggtagggagttaactggtgatatcgtcgagttactttaagcagattttgacatcattcttggaatggactatgtgtctaaatatgtagccaacattgattgtaagaggaaatggtgatttttcagcctgaggatgaagagtcgtttgttttcatgagatcaattcaggtttctcaaatttcgatcatttcggtattataagccaaaaaccttttacgagatggatgtgttggattttcagcgattgtgatagacactagcagactcaaaatagttgggcctgaggacatcagggtagtaaaagagtttctggatgtttttcccaaggagttatgtggattacgaccacaacgtaagatagatttcattattgatttggcatcaagagctgagccagtttctaaggaaccttattggtaggggtgttcataaaatagccgatcaaatccaatccgcacgatccaatccaatccgcaaagtgcggatatccgcacttgtgtagattggattggattggaaaattcaaaatccgcacttgtgcggattggatattgattgacatgt

SEQ ID NO: 389860 - DNA, 571 bp, Cannabis indica
tataatttttcaacaatattttaaagacgctacataaaaaactcaatagaattattagaatttgaatacgacttaactaataatactcaaattttaaaatcacactctacaaataaattaccatatagttttagctttacattttttttaatgtttttaattttagaattataatattaagtgttatatttgagttttttttattttatttataattgaataaatatatttattgttattattattcgcaaattataaagtcttttaatgtggcatgctttcgggttaatttatttgtgcttacatatagtgccttttagatttgtcgcgtcgtgcttaagcacatatttttgtgtcttatcatgccaatttatagcatcatatcatgttgtactcaaatctacatttttcgtgtgtagtcgtcctcatacttagggttgttcacaaagtatctgatctaatttaatctgcacgatctaatccaatctaatttacaaaatgcgaatatctgtacttgcgcagattgaatttgattaaaaaatctaaaatctgcacttgtgtggattgaatt

SEQ ID NO: 389861 - DNA, 915 bp, Cannabis indica
ttttcagcacattaaacacgagtaaaagagttaaattaaacccaactacttattattattttttcaagagaccaagataacaactttaactaaatcccagaagcacgagagaaaaacaaaaattaatcgaaataagtgaagaattagctaaggttctgctaaaactcaccggcgaaggagctgtgaacatggagagacggcccaaagagagttgatggagcggcagtgtcggcgacggccgctagggcggcgctgttgctggtgctaccaaagggacgacctcttttcgccggtggtccggcagaaccacccgacgctccacccgacttgccttgctctcgcttctgcatagtgttctcgacccctcacactcgatgattgcagaaagatttgaatttgggatttagggcacatcacatttgtcacaaaatactataccaatttcacccctcctttgggaaaatttgtcaaattaaccatttaaaatattaaaatttataaaataacctcatttaatttactttatgcagtgtaaattcatagtccttttaggaccacaatactcattcatagtcattttttgaaaatgtgtaactcattttctgagaccataaaaagttattttaataaaaaaacttataaagttattttgctaataacaattttttataaaaattttcataaagcctatttttacaaaacactcttgtacatttaatttcttttttttttcgatagattcaaaaaaaggcttggttagtatgagagtaatagtaatgtggataaaatgtaggggtttttactagggccaagatgcaaaatggtcctaaatttaacaataaagttaataaatgtccctttttaaaaaaaattaacaaaataaaaatttgataatgaaattacaattataacctt

SEQ ID NO: 389862 - DNA, 1038 bp, Cannabis indica
attatccgaactttatacgtctactgatccaatatgagatatttgttttttaatcaaaccccagaattcacaatagcaaagtttagaatcaaatatcctaggcttaaaaaacaatcacaaaattgacctctagaatcacaaattaaaattaaaagaacaagaaattgaaagaaaaaaaaaatactaaactctcattgtccaattcaatggctttgaaagtggctcccaattgagttaaaagctgcttcacggtcacgcaaaacggacaatacgacttgctgcaaaccataaccacacaaaaaccatttttaatgttatttttttccagattagacataaaatttgtgtgtcataatataatataaattgaaaacagagcaggaatcctttgaaaagaaaaagaaataaaaataacgaaagaacctgaagacgacaactggattggatgaaacaagttccttagctttagccaacgccatttttctttgatcttttttttttttctttctttcttttttgatctttaggacccctatttattctacttttcttgcgtctgtaagtacttcggttggaccgagtgattgtcggctctgaagttcggaagaaacgatcagagccgtccatcatcagtagacaaatgctgtccgcaagcttttcgttttgggcctgccctttttctttatctggacccatcttaactttttggcccaaatggtgtattcggtgaatcggtgtggcaaactgtgaaaattacttttcttttggataaatgtgtgtaatttccattcaaggcgaactgctaaaagcattagaaagccataccacacactgagattgatccaaggatttggcaaaaagaaaaataggagaagttgaagaataccttcttgttttatacaataattaaatttatttttaaataaaatttaatttaaatatatctcattttatgagtattgtactcaaattatcctcacacacataatttcaaatatgatagatttgtattctttgtagatagatgtgtaggtttgt

SEQ ID NO: 389863 - DNA, 1153 bp, Cannabis indica
attcatatatatatatatatatatagtcatgtctaagaaggttgaatttgttgaaacaacaccttcttatcacctggactataagaatatgcacctcttgattttggagcatatcccacgaaaatacacattttgaaccttgaatcaagattttctaaatttaggtttaagcacataagttggacaaccttaaatacgaaaaatatcataaactcgctttacttccattttataattttagtggtattttactcacaactttgaatggaactacgttcaaaatgtaattcgcaccatgaagtgcatatccccaaaaataataaaggtaatgaagagtagcttagcatggacctgaccatgtccaactagattcgattttttctttctgaaactttattttgttatggtgttgtaggtgctgtgagttgggataggataccatgctccaacagaaaatctttaaatttagaatccaaatattcaccaccactgtcagaccgaggtgtctttagagatatacctatattgcttctcagctaaggctttaaaatttttaaacctatcaaagatttcagactttctaagcattaggtaaacgcgatcatatttatagtagttaacaatgaatgagacaaaatactcataacaacctcgagcttgaatgttaattataccacacacatcactatgtttaagctctcgtggttctttagctctatttcttttcgatgtgaaaggtcatttggtcatttttccttttaagattcacaaatcgatagggttccaattgttagttccctcaaagatccatatttggttaactggtttatcctatctacaataatatgacctaaccttaagtgcttaagatacgtatcgtcttctatagaaaccttttgtcttttcttactttgtggattagctactttaaataatttagaattattaagtgttctttttattgggtcaagcatatacagtccgttcttttattttgcatgacaaaaatattgttttcattctttgaaatagaataattttatatttaaaagaaatctaaaaattttgttcatgcaacaaagataaagaaacaatgtttctagaaaatctaagaataaataaacattattcaaactaaaaaaaaatctaaaaa

SEQ ID NO: 389864 - DNA, 577 bp, Cannabis indica
ttttttgtatatttttaaattttagtatgacaactcaatagcgatatatgttaagaaaatgtgtgcacattgataaaaattaaagaaattatcacatatattattttttttaaaaaaaaaaaaaaaaatttaacggtttgcgtttctaaagtggtttttccgacgatttctatgtgggttgctatacaatttttggttgcgatttaggttactccgttgcaataggagtttctatataaaattccgtaaaaataaaaaaaaaaaaaaaaactaattttgaagtataaaaataaaaaagctccttaaaaattatgatatatgttgtgttgtagattataaataacgtattcaattatttatttttatttgtatcaaaattattatttttatttttcctcttatatggttggctaatttaatttaatgttaccaaattagtttaatttaaaatttattagtatattttataaaatatttatgtattattctaaaatattttatcagttttttaaaattaaagatattttttcatttaaaaaataagtacatttttatttatagaaaaaattaaaaaaaa

SEQ ID NO: 389865 - DNA, 1646 bp, Cannabis indica
tgattataaaatagattttaaggaacttaaagaggacaacaggtgttaaacttgcaattagaaagtcacaaagccaaactttggtggaagggctttatgacttaatctatgcgagggagaaaaacaaggtgacacaaggtgtcacagacatgaggaccaagctattaactcttgctaagttcaaacagaacatactagggataaacaaatggtgttaacccctggggtcattcaagccctcatagcatcatcaactatccttgggtacataagagaatttgggtggaatttgttggtacagattcacttatataccctaagtgtcataacactattcacagggttctaaaatgacagatatacccttacaacttacaacaaaacaaagattaaagactaaagaagataaaatcaattataactgaaatagttacaaatatgtcactagggcttttcccgagatcagaatcatagatcagtctataaaaggatatattttttcttctcaatttagaagtgaataacatagaaaaacagagacaacaacagagaaaaatcatagccagcttgagggagatccttcaagaatgttgttggtgtgttcatgtaatagaaaacaaagagagatttgttggtatcaaaaagagagaaaataagtgagaaatcataaagttgtaaatcaaaaattgtaacatgattgttgatgcatggattcaagctttgagggattgacgtagacgtagccggtattattgggcgaacttggagatcaaattggtgtctccatctttaccatttctgtttgtattctctcatctcactcttattattatttcttgtatttgtatttgtgtgtgttttgtgttctttctattttcagttttggtgtgttgagattaaagggttgtgttttctgggtttagtattttcgggtagaacaaaataggagtaagaaaataaaacctagaaaaccctaactattttggtactgccatttagaagagaagaagaaaaatttaagaaccctaaccctagaaattatgtgtggttgtagcaagaagaagaaaagaaaataaccacataaatcctagctgccatttgtgtttagatagaagaagaagagaaagaaagaaagccaaaaccatagaatattattagtgttgccgtgagttgtgaggaagaagaagcatgtttgaaattctctgagagggaaatagtgcagctgccaaatagtgaaatattaggattttatcaagaatgaatcttttatattaggatattagggtttctttaggttgggctggtatatatttttattgggccaaaattaataataaaaggaaaaagagttgacctttgattggagagagaatattgggttgatctttattcttgttgggctgctcgtgtatgacccattttgagtggaaagagaatctttgacttgtgttgactctttgttgttgggctctttgtgtttgggcctgaaacaaatattgcaattgttatttttaataataccaattattttgtggacgcataaaataataaaattagaaaaataccattttgcatattgtattaattttgtttctttgaagtgtgttggacaaaaacaaaagctgtagattttagtttaaaaattc

SEQ ID NO: 389866 - DNA, 1874 bp, Cannabis indica
ttttttttttatatttagaaaaatggccttttgactgagacaatagtttgccccttatggcaatattttctgtaaagataaattcgcatcgttggatggccaactttgctttaaatttatttatcttttcatttattgtctcgtatctttatgtttgaacttgatatgtttgttcatttgcattttcaatcacaacttagacaattatattctgatcaatcttaaggtactttaagagagcatttccattgatctcgcttttcttttatttttctctaagtagttattaatctactatgtacgtgcgcgggcatttattttctgctatgctttctattcgcgggcagttataatctgccatttataacttaaaagcaaacttaaacatactttgaataattcactttatgaattacttcgtatatttttcgattgcctatatgaatagttgatcttctattaatattttaggttgcattatttttcaaggcattttaatatctcgtttataatacatgcctaacaaatgcgagccgttaagtattcagcttcgcatgtagcttaatgttatttttatgagttaatctcatttacaactactacttcagttttccattctaaaaaaggattaaatttttgactttatattatccatagacaattctaatcaattatcctttcgtgattttttttttaaatgggtgggtttgcattatatcatgtatatctagataaatttcagttgatcatacacacatatatgcccctcagtaattttaaagtatactttgtaattacttgatcaaactttaacttttattaatagcaagagtttacattactgaaaagaaatacatcatttacattataagtctactcgtaatatggttgcaaatgttcaacattccagtggttttctattagcgagtcgtaaagctgagccaatttataaaccctggttccaactattgcctcgataacataaggaccttcccagtttgggttaaacactccagcagatgcatctcgtgtatttgcaaacactcatctcaacaccgaatccctgacatggaagagtcttttcttaactcgtttattgaagtacctcgtcatttgatgttgatatgcagcattagttatttacgactcaatacgtctttctttaagtaggtcgaaggacaatttgaggacttcttagttttcttcttgattgtagaattcacgtctatgggtcgcaatattaacttctactggcagcatcgctttcgagctaaatgccaacgagaatggagtgtgccctgttgttgttttctctatcgttctgtcaagtacttgtggtagttcatctacccatctcccttttgcagcatccaacttcttcttgataatatcttttaaggttttattaacagtttctacttgtccatttgcttggggtcttgaaactgacaagaagctcttaatgattttattcctttcacagaacttagtgaataattcaccatcaaactgagttccattgtcttatgctattttaatgggtatttcaaatctgcaaattatcttcttgacacaaaatcaagaatttttttgcatgttattgaaactagaggctcgtcctctgtccattttgtaaagaaatcaacagctactactgcgtactttgttcctcctcgccctgtggctaatgccacaatcaggttaatgccccatattggaaatgggtacgacgaggtcatcattctcagtttcattggtggtatgcgacgtatatgtgaaaatctctagcatttatcgcacctcttgataaattcatgtgtgtctttatttattgttggccaatagtatctgtaacaccctaactaccttaggcg

SEQ ID NO: 389867 - DNA, 1052 bp, Cannabis indica
gtagaaaatttttaacggaccaaaaaaattcaaggagtataatttagtacatgtacgggaaaaaaattctaattagcataataataataataataataataataataataataataataataataataataataatataattggttacgtggtggagtttttaatactgcatgcatgggatgactttaagaaatttactgaaaaagtgaaaaaggacaatactcgtcggaaattgcatgtaagaaaggacaagctagctaggcagaggtcagaagatgtagatattgcatcatatcattatcatcatatggtaataattattgtttttggaaattatagacttctactctactccatacctatcactcatcgattccatcatatttatttaatttaattatatttttcttaattaattataattttattggtaaaaattgactcatcaagaaaaaaggtacgttgactgttcagtactttacgtaaacgtcatgcatattttagtgtattaacgttggaattattaataatatatattattttttttaaaaaaaaacaaaacgttcggaataatattaatatataataaaaggggggaaatatataaacacaataacttataaatggatgtgctcaaacgtgcataaatatagtagttaaattaattaagaaagagtaatccataattagtataggcacgtaatatatatataaataatatttacttatatatttattaattgttagagttacgtgtagaagattatcttggaataagttaaattcatgtttattaataatttaataaaacaattaattgacatgcatgatctccgaaatatctatatatctaaataaaggaaagcataagagcattgatgtggcatcttttccttccatttctctatttctctattttcttatgttttgtaattttttcctattgaataataagaaataaataatgtaacctcccccattcttaattttttataatctattagtattcttttaaactattagtattctcatctatatatatatagatattt

SEQ ID NO: 389868 - DNA, 2191 bp, Cannabis indica
caacacaatttaaatgttttcaatcctttgaatgcacctctcaagaataaaaaagcctcaagcataagaaaagaggctaataaatgtgagatacagataaaaaaatatgaaattcctgtaaaacaaaataagaacaccaaaaaacaataatcactctggaaactgagaaaaattatagccaataatatgtacattcttttattatttatctgaacatattgaaagtattttactctcgacataaataaataaagaaagaaagaaaacaatgaacttaaaatgatcacttccactaaaaaaaagcaataccatcttgataaatacatacataatctcatagatttagaagaataaaaaaaataaacgaaaatcaatcgcgagccataaaaatctagcatctttcgagaaaataataaaaatatatataaacccaatacgaaatgctctaaaaaagcaataaaaaaataacatttttttttgttgtaaagcaaacagagaacaagttcatcagaaaaatacaggtctgaaatgcaaaaaagtaaagaaaagaaaagcaaggctcaccagattgggcaggaggaagaggctttgagggaagcttggcaggcttagctggctgagcagccggaaagacaggcttcttggtgtcagcagcaacaacaggaagcttagcggcgatgagttgagaaaggtcatcgttatcatcatcacccaaaaggtcaaaagggttcgcggttgccatttcttagagtcccgaaaaagaatccgatccgaaaaaccccttgaaaagccctcaccaccaacctaaaacagcaaccacggaacccttattgcttattcgaatccatgaatctgcgattgagagggtggaaaagggtgtttgggagatgagaaaagagaaggaaagtagagagagaagagagagtgaagtgtagcaaagaaagaaaataatggtagtctcacaaaaccctagccaaagcggcagagaaataaggaagtggcttaacctaaaaaaaaaaaaaaaaaccctactcgtgggcaattttaggttacggcagggtacactttaactgccttatttttttattattattatttttatctaacgtaagtaatacaaataatggttttgtgttggtgtttcaatttgagtttttgtgttatgttcttttattatatattaattaattaatttttaataaatagatttttttttaaatgtttccatatctatgatattggtagggttttgctttgaattattgttttgtaaaaaaatataaaattaaaaaaaagtatttacaaattttctttttttggttgtatttcgtgaatattttgagaaaaatacgcgaataattaattatagtatgaggatatatttaagtaagttaatgtagctggaactaaaggcggtgcgcctaagtattctcttttttttttacctcttaacactatttttatagttttagctatagggtgctttaaatatttatttataccacaaatttcttaaaaagtagctcgaactaagtataatgatcttaaatatttaaacattaacactaaaaatacggagacacgatatcaaatttgtggttagagtaatattatttgatttttacgtaaactatcgagttacagaccattgaaattgtttataaaaatgaacaaaatgcaagccattacaacagttctggggcaagaagggaccagatggcatgttgaggggaatcggaccaaaagtttctataccagtgacaactcaatccggaggccaaagcttaggtctattttgtcaacttcagaattatgccgacgtcgcatgcttcatcactagactatgagcgttgcgtcatggtttatgctatcatgaccaagatgacattcgatatttggtgagtaattttaagaaatataaactatgtctctaaaatgaagaccacagcgggtacgactcatagtgccctgattacagcattctgcttgaagcagggtgtgctaattaggggtgttcaataaaatttacaaaccgctcaacccgaataaaccgcccaaacaaaaccgaataaaccgacaaaaaatacaacccgaaataatataatgaaaatccaacccgtccaatgaatatattgggtggtttacaaattattctaaaccgcccaattaacccgaataaaccgaattaaac

SEQ ID NO: 389869 - DNA, 571 bp, Cannabis indica
tgtagtagacatcttgagtttggcagttaagtacttgtatctgtctgtagagaggggtttggtcaaaacatcagcaatttgatcaagagcagggacatatctcacagagagttctttggccaaaatgagatctcgaacaaaatgcaagtcgatttcaatgtgttttgaccgagcgtgaaagactggattcgctgcaattgcagctgcactttggttatcaacccaaagtatggggcactgagattgttgtatgtgcaattcagagagcaaagagacaagccactttatttctgcagcaacattggcaagtgctctgaattcactctcagagctgctgcgagccaccacgttctgtttcttggcagaccaagagacaatgttgttgccaaaaaacatgacatatccaccagtacttctcctatcatcaatacacgaggcccaatccgcatctgaatatccttgaagagttaaggatgtagcaggtgtgaagtgtaacccgtgtgaaagagtcccttttaggtatctcatcaatctcttacatgcttcaaagtggattgaggtgggagcatga

SEQ ID NO: 389870 - DNA, 796 bp, Cannabis indica
attgttataattgaagtctagcgattaatttatgtttgcttgagctggttttggtagattgtttgttgttggcaaggtttgagctaggtttgagtttcgagctcaaacttagctcaacaatggtagttttttagtcagagctttgtggatgcttttatttgttgaaatatgatactggacttaagttacgtgttctggaaagtttggaaaggtttggatttgatttgaggtagttttgggattttggggaaaacctgctataaaaatggcaggtcgtttttggtaaaacggcctaccgtttttccaggcaaaaacccaaaaaaaatggcttgtcgtttgctctgaaacaacctaccatttcttgggtacttttctcgagatctcatttttagtggtttttttcggcgtagggtttagtatagggaaatctttagtttcaagtttaagttcccaaaagtgatttagcggatcacttagaagttttactaaaattatgacttagggccaaatcatcgagcagcagtttcctctcagagttaccggcatgcttgcattcggaatcaagctaagattagtataatgatatgcatatgtgattacatgtttagcatgcatatttatgaatgcctattagattacattaaaatagcggtatcaatatatatagagttatatttgatatcgatgaatgtatgtttggcataagtactgattgacactatcacatcggtacaactagagtaccaagtataagctgatattatggtcgatagtactgtcgtacgaacgttctaga

SEQ ID NO: 389871 - DNA, 575 bp, Cannabis indica
ggtgtgtatataaatatgcctagcttatttaaatttataacatgtataagttaaaattaagacaaactaattggtgctcttttttaaaaaataaaattgaatttataaaggttattatatgtatatatatatatatgcccccctatagaatgtaaaaattcgtcctaaacctttataattatttcaaaactattaatttcttttcttttttcctttttgacttttagtaaaacttatatatgtagaaattaatcatttgattaattttaccatctattgctctatttagaaaaagaaaaaaaaaacattttatatatttttaaaaccttttatgttatagtatgccaatttattataagtttgctcttaataattaattagataaatattatggtatgatttatataaagaaaaacagattcgatcttggctattaattattatccttaatatatatcatagctatctaatattaaggttgtttgccttcatagcttaaaaattattttttgatttttaaaattgaaaatggtttttaaaaactaatagaggccgtttggtaaaattttttaaaa

SEQ ID NO: 389872 - DNA, 1007 bp, Cannabis indica
atacataggataggaaggagcttcaatgttattgatactattacatggagattaactagaaatattatacaaataaacatcattattattatcatcatcatcattcatactaatcttaattatatataataaatagaagagagtgatgagtgatcagtcagttccagttcgatcggcattaatctcacggagaatcacaatcaatgcaacaacaaaggcataatccacattagggaacacagtcactctaaatgcttcttttccaagaaataaacttgctgcactatctttttcatgcatctgcattcataattattaattaattaattaattaattacaattattttataattttcattaatattctatagatgtttttgcaaaccattttcagaaaaattaaaatcaataacagttttgcaaaatgattttaatatatagatgattttttttcattaatatatatatgcaaaaatctatattgatcattaattaaggatcttacttgtgcaataacagcagattcatctccaagagttatcttgcatgatctttgaaaccaactccctttgaccttaaaatcaggaatttcttgctttgtatttccacctaagaacacttctaaatctgtattgaattgaatgattgaagactttttggctgtgaaaagtaagtcttttgcatctgagctttctcctttgtatacatgccatctcttgtgcattgtcattatctaattataaataattattgttaaacttacacataattaataataaattattcttaagagctagataatcagaaatgctaaagttaccggtagtgtataattattgagtctcatataattaaaggctaattagtatttttactttcgaattttgacatgtatcaaattattttttttttgaacatttctaggcgttaaaaattctccctgaactattgagattgatagattcaaggtattttgtctaattttattcaattttactgtttcagt

SEQ ID NO: 389873 - DNA, 1157 bp, Cannabis indica
atcttgtaatatgtattggttggtagacatggtaatagtgttactagtgctaaatagtaattctatgttctttaattgtttcagtgactctttcagccttaattaacttgaaatttcaatctaccttaatacgatgtacgttaaacaagttttacaataaacccatttttgtacttttatcactgaacattcatgtgaggagacttttcaccaaacaataataaataacaataaaacaatattaaattggtggtggtaattatatacatgtattttatataacaaaaccaataattatatatttctataaatacaaatctctcgtaatcaatctttcagttcaattagttggtttattggtcaaggttagttgaccaatgatacatatgtggttggttgatgtaaaattaattcaatattattagtattattctttgacattaaggtggttagttttaacacagtttctttgatccttggatttagggctccccatcctatctatttttttttttttcattgatcaagtctaattagtaattaaattttaaaaaattattatttgatttaatccaatcaaacctcaaattccaatttaaaacaattatacacataattgaaattacctaacaaactataaaaatatcatcattacaagtgtaatacagctaaaaatttaaaataattaaaacaacattgttagtaatataataaaacaaaacatcattagaaaaaaataaataaaataagtgttgcaaattcaaccaaaaaaaatcactaaaataataattaatatataatttttatttattattttttgttagacctatttgataatttagctattaaaatatattttaatttaatttaaatatttattgtatatgtttaaatgctttgatttaattttatatggatgatactaatttataatgtattatactcataaaaggaataaataatataaattatggttcaattgacattaacttctctttgttacttgtttttttttgtaataataatgaaatttcattaaatcaaatcttccaaaacaaaggaagcaattacagtaggtaactcaacaccactaaaaacacggtcagcctcaaaaagagaagatcgcgccaatgaatgcgcaaccttattagcagacc

SEQ ID NO: 389874 - DNA, 1024 bp, Cannabis indica
aacttttccagtgacggttaattttctagcgacttttttagtgacttttccgacgacaataactttttcggtgacttttctggcacctacgacttttccgataccgttgacttttctggcgaaccttattattattttacaaatatagaaatttttacttttttttttaacaaaaatatagacaattaaaaactacatataaatagtaaaaaaaaaaaaaaaacttaacaaatatctcatggtattatttattatgccataaattaattataccttcaattcctttatgaaaattccccattgtttagaggcccaagtatgaagccttttcttgattgtatcaattatgataccacaatcatccattctctatttggttggtctcattggcactccagtcccaagcatttaagagggtattgcccttcttcaagcccaatagactgtaaaatattatcttttcaagtttaccaaaaaagatttgagataagttaacaaaaattaaaaatgaaaataattaatatgaatgttctttaaatttaattaatatgtagtatatgagttgttcatatatataaaagaaaaatcatagtgtaaaatttagtatttttataatatataatgcagtatggtattattaaatttaaaaccgcaaatcacatcgtactgcatagtttgacgaaaatgcagccgtaatcacgtcgtaaagaatttcaaactatattttttgtacagtatagtatgatgcgagtggtttgtatggtataagagtagtttgatgaacacttttactataactttcgtatataaccaacttattatgttgtagcattggtctacatcttagaggaaaacaacgggccaatgccctatatgaagcctatagtaagttgtcaacaattggacacaattaacacatattgcaaggcattgaccatactccacctagagatggaaatttataccgtggggatggtaaccgcggggacccgcccctaatagggtggggattcctcatcttagt

SEQ ID NO: 389875 - DNA, 1491 bp, Cannabis indica
tatttttcttacataatatccctttgttcttctttttgttttgtagaaaaaatgagtttcctcgctatcatggctactagttctaaaaggaagaaacatgtgaccaaagctaatgaaccacttgcttgagaggttgtgcaagccattcccgctgcttcttctattccttcgaagaagtcaacgaagagaagcaaagccactataactgaagcttcttcgccaatcagggttttgcacaaagggaatgaaaaggttgttgaaatcaaggacaatcctcctacttctgtcattgttgcttctctggaaaagatagatgttgtcgagctgagtacccaaactttgggtgaatcgaagcttgcggcaagcttgcacacgcagggcatcgtgttactggcaactggaagaccttattgcttccaaggcaaaaagcaaaccattggggaagttggtgtcttccaaacctccacatgtcattgctcagaagggcttcaacgatatcttcagggtgagtattcatgcttttggattcacctttcttttcttattaaagacatcctctaactttgttttgtcatttgtaggcttgcttgtgcttcgcttatgctatggacaatgatcataagaaattcgttgaacttgcaaaaaagttatcatttgttgagcaaagggcttctagtgcaaagaagaaggtgattgacttagagaacttagtcggtgagttcgaggtcaacatttttaaccttcaagatgcgacaaataacatgaaagacctagaagacagtttgaaaaaggagcttgcagcatcaaggagtctctctccaagtctcttgatgagaagaccttgagtgtttttgaattggaaggtcaagttcgccgtcttgagggtcaagtggcaaccctctaagaaaaggcagctatggatatcttaacttatgatggttactattttgatgtcgtttacaaatcttggtcgaccaatggagccacgactggcttcaactggacagctttcctaacagatcaagtcaactttctctctagttgatgtgagcaacgcgcgaatgaggaaatacttcgtgatatcagttttcacttaaatggtgatgctccggatgtcagggacgctacaagggtcgaaggctacaaccctgagcacccatactttatcattctcaaagatgcaccaggagagaatgtagtgcagattgaagctattggagacttagatagttgatagctttttgaggacgttgtcttagtctttctctttaattttttttagtatttagttttagtgtgttagtcggtcatcctgggcgaccatttaagtgtggatatgccttcgtaaatttattttttcataatttgttctaacttaattagatattaatccaatttaagactttattatgattgttatatttatttatttttgtttttactttattcgttaccgcataacctctaacacttgcacaatttttcatgtct

SEQ ID NO: 389876 - DNA, 1658 bp, Cannabis indica
agttcttctgaatttcgaatagttttcaaaatctttgattttcgattatttaataaaatcatttaatgaaagtagaactcgattgaaatgaaaatgatttctattctaatatattttatccttatcgttgtcgctatttatttactcaatctcgctctctaacaaaaagattgtagaaaagaataaaggtacctacgataatttttatgtctaacatggatgagaatgatgaaaggattggtaatcatgagattatcgatagcccatcgaacggcggctttactattcttattgtccttctcaaccgccaccgcggtggcattaaacggaggaatggtatcgtccggataaaattgggaagccattgttgttagtatagcaaaaataccgaaaacaccaccaccgacaacagcagcaacaacctcctccgccgccaacacccggtagagtccgccggcgaaggattatacaaagggagaatatagattaggattatttattagctatagatttttgtcttatgtttttgttttttacaagaaagaaaaactcaagtctcattctctctctcatgatatggataaccgaattaactaacttttaaatttacgtttcactctcaaccattggctttaattagacttaaggctttaattaggttgtttgaccaggccatcatctctttcaattaattgattttttttttcattttcatttttcttatgaaagaatgattaaaaaaaaatagttaaatatgataatataataaatttataatttttttttttgtgaattttttatgtaggtatatatttttttttggacatttaatggaaatgttttaataaaattatttgacctcatttataagtgacaaacaaattagtataaatgcataacacgagtaataagtataaatttggttagcaaaataataataataatttttttttttttatcaatgagcaaaaattgaaagatttgaaaataataatgttgtctaataggagtgttactgtaccgtcaacattttattacaatcttttagtcaatttttgtatttttttttaagggaaataccatgttattataaatcaaaagatagttcgtttacaataacagagtatatcggcggtggaatattatccaactaaaagcaagcttcttctaaccctaaagcatatctaactaactcatgggcagccatgttagcattacgcttaacatgagaaatagatacattagggagagaggaaagaagacaagatatgtctacaattaagtcttgaaaagaggaaattgcagaacaagtgtcagtcaaggcgttaaaaacgatgagcgcatctgtttcaatatgagtaattggtacttccatttgtaatatccagttgatggtgtgaaacaaagctttagcttccatttcatgggatgcgaagttgccaacaataggctttgacatagcagcaagaatacgactagtagagccacgaaccactgctcccactccgattacgttgtgctgactgtccacggcaacatcaacatttacaatatgtttggtaggaaggagaagtggagggatggagaggagaggagggagagaggtgggaggagataacaaatccctttgtttggcaagagggattgaaggagagaaa

SEQ ID NO: 389877 - DNA, 956 bp, Cannabis indica
aattaagattacaagtataataaaatttaaattatgaaattatatgtgtataattttaaattataaaaagttttgctataaaattttaaataatttaagtataaaaaataaattgctaaaagatccttatatagtaataaattgcaaaaaattaattaataattataattaatttaattttaaaatataattaatcttaattaaagttttataaggaaataaatgattaggttactttcaggttacaagttatttattatttatttttatttaatttccaaattaatcacaaccatttaatagtaatccaatggcttaaaaaaaatgtaaccatgatggttacaataaaaatgtaaccattgaaacctcttccatatatatatatataataatatataatataaatatattaaggaaattaccttatatattatttttttattttttttttctaaaattacggtttagatttttaaagtggttgcagtgctagttgcaataggagtttctgaatgattttttgttacaatttagatcgcagcgctagttgcaataggagtttctatataaaattccgtaaaaaatgcaaaaaaaaaaaaaaatataaataataaaaaaaaaaactaatttgaaaatattctactcaataataatcttctttataaaacactaaataatataatcactcttcgcacaactaatgtaatttttttaatataataataaaaatataattttaatatatagttaccgtaaaattatatcatctaattctatattattaatttttcttctattaagaagtttaaacttatacaattaatgcacatacatagatttttaaattattttgttttctttttttttaaaaaaaaaaattgttattacaaaaataggtaaatatgatggtgtagggaaaaattgaagtattctccataatgtattatttttatatc

SEQ ID NO: 389878 - DNA, 1118 bp, Cannabis indica
attacaattataaatgctaaaagatacacttgtggaacatgtacgagatataatattttgagaaaaacataattcatcaagataaatttattattacagaaaaatttaaaaattgtagataagtatctgttcaaacacaattccttaaattagtaatagaggttgtcagtatgtgggcaacactattcgccaatcgcggaatggtattacaaaaaccaccaccaacagtagctaataaaaaataaatatttaataaaacagactaaaaaataaaatttatcgtgaaacttattaatattgttattacttattattgtaataatggattggatcttatataatttaatttaataattattatagaatattattacttatttataaggtgtaatatttagatggtactaagcaccattacaccaatgtctaaaagtagtgtttttcaacattagatactatcaatttaatttaactaggagtgttgtttttttttaatttttaatcaccaaaaaaagtaaaatctgtgtctttaaaattttatttttaaaaaataaaaatattttctgtgttctataactttcactttcatttttattatttgatttgatttaagtcaggtttaagttcggatctaggaccggggtcgtgatccgagtctgggactgggagtgaggctggagttcgagtcccaaggttcacgtttcgatcggaatcaagaatattgattaaaattttaaaattttaaaatttcaattctcaattaaaaaattgaaaagtgaaacaaatttatagaacatatttttgaaaaatatttttactttactaattaaaaaaatagaaaagtgattaaaaaatattaccaaatgcacttttaataaataatatattaaaaagcagtttatcaattttaatttaattaataaataatataaaagaaaaactatttatcacttataatgtctccaatattcaacaatgtttttggtattgaaaaaaaaagataattcttttctaagatatataaaagagacatttatgtatgttaaaatagaaaaacaaaacaaaaagaaaagaagagagagagagagaaagagacattaagtctagcatataattta

SEQ ID NO: 389879 - DNA, 1985 bp, Cannabis indica
tagatagacgtcactgccttcaagtcgttcagggcctatcggccaatcatggcattaaaagctgagggaatgtcaatcacgataaactgcgccatcagtgttcttgtggttatattttctccaactatgaggggtaatctaatatacccgacaggtgcgatgctttggccaaaaaatccatcatcacttggttgcaaggcacaaaggctttgttgtccaccatacatctagccacgatcatattctcaatttgcacagtaacgactaggggattattatgcgggaaactgactggtgttgaatcttcctcaataaaggagatagtgggctctataggcttttgttgcttagaactccagtcttcgacagctaggactttgcctttggactcgtgacaaagtgtctgagcatagcactccctagctttgctgctttcaccaacaatgtggggtctacctattatgacccctagatgtcttgccacgggtggtggcatcagatctccattttggcctccttgcacctaggtctggttgtcttggacataatgacacaggtggggattgttaccccttatgaggtactcaatctccctcttcagattttgacactcattagtgtcgtggtcgaagtcgttgtgatatttgtagaacttcaacatgttcctctttcccatctcccttctaataggaaagggctttcggtatgggactattccttgagtggccatgaagatggccttaggcttttctattaggagggtgaagcaagtatacttctcctccttattactttgtggcatgggagaagggttaaacttccccttttttccgattgttcctcctaaagctgttggtgtcacgcttttttttagtggtttttacccctagaggtttgggcagcattgttattgtctgcttatgcacctggtgggtcatgaggctgctgggtgccttatgattgcctactattgacatgccccgcttgggcttgtcatatggcttcttcaagtttgataaagtcatctactctatcgaggaactctttcatgttgttggtggatatcctccagatatctttccagaagtcacttagtgggagtatgcccctggtatggccatacatcggccttcttcagtatggcctttgactttggttgcctccgccataaatctctgaatataaatcttcagactctccttgttgtgctatctctgacagtggggctaggaatatgcgacaacgcacatcatcggtgaccttctggaggtcaaattgcatctcgaagtatttgatgtgagccaacgggtcttctcgttcagtatacatcttccataccggaattatgaactttggtaaggatgaggcattttttatactgagaatggtgatctccttgaccgaacaagttcaagctttgaaggctttgggccagctatgccctggatcatgtccctgaggttttcaactgtgcttggacaaaaggatctgttgctatggggacttgattgaatgaccctccttggggaggatacaaattttgaagagataggggtcggctggccatacccttggagagtgtatggtgaagatcaaccatgccttacagaccctggccggccattcccaagtacgggagttggcctaggctagccaagcttatgcccagttgttatgcttggccgagaagacttgcattgggtaaggtctgtccacctaatactcctccatgcctagccaaacctacaaaaggcagggtttggttgcccgtgatgcttccttggctggcaaaacctacgttgggtagggtatggttgcccatgatgtcgtagtgaactggtgttggttgtgtgctgattgggggtaaatcgcaccaattgatggagttttgttgatctagatgcctgaagtgatcaacttcacttctcgaatcaccattttgggtgttttcgacccactctcagtcctcgtcggtcgaagatcaa

SEQ ID NO: 389880 - DNA, 729 bp, Cannabis indica
tggattgtaccagctttagctttcaactgtaacttttatataaattcttcaataaataattttttaactgcttactaaacacctttttgtcataaattttttaaaaagtagcttttaactttattaaaagttgtgtcaaatggatgctaagtacatatcatacagtgtacaaattttgtgtatttagccttagtgctctaaatacgggtcagattttttgacacaatatgaaattagcattagcgcgattaagcacgaaaaaattcaaatttgaacacaacatagcacaatgctaaaaattgacacaacacgacacaaaaaattgtgtccttaagcacaacacagcacaagaagcacaaaaggcatgacacctaagcatgaatagactagagaaaaaagtaggacacataacaaattcgaaaaacacaatcaatatattaaaacaccttataatttattattattaataataataataatatataaatttatcaatctattagttataaataagttaaaataataatagaacttaaatataatactaacataaaaaactaagattatatattaatttatttatagagtatgatattaaaatttaagtattataagtaaatattcaaatttaataattttttgtataattatctgtaaaacattattcaaaaattatataaatataattaaagctataaaatatacatatattttagtaattataaatat

SEQ ID NO: 389881 - DNA, 1607 bp, Cannabis indica
tcgccatgttgtaaacaccaattattgtaacgtgctgagtaagaaaccctaggtgggcaaaaggtatgccctcgcccatacatgtggttataaaaacacccctatttatcatgtgtaaagggtgaacaatttttacttacagaacctctgctaaaattcctatgagctttcttcttctctaagagaaacaaaaggaatacagaattaatactcatattgtaaacacttgtaatacttaaacacttactagtaaggctaattcaacagactcgtggaataggaattattaaagcccggaccacatgaaaaactacttgtctattattatcgttttatatttttcttaagctctaattaattggttttcgaaaatctcagtaaatattttggtgctttcattgagagctaagaaaagtttgccagtcgttcaatcactccaaccatggtgaatatccaaaagaatgtaagcaagaaaactccattggacaccattgtggaggaagcagactccctcgcctttggcctctgaataggcgggataaaagaagaaggtacgaccaatgtcgagaaccgcagggaggatgtcgagaatgtgttcgatggcctcaacgaaaactagctaccagaagatggggaagaataggacgatgacaatgactatgtgagagatgggtactacaaagatggttattattatgaccacgactcgaacctactacgagtgaccaaagagtaagaagctactcagacagagttaacaaaacagaggaagctcactgcaaagatgaaaataatgatggaacgccttcaaagcaagtttgacgacttaggtgagtccgacgacgaacctttggttgaggtgatggccaaaaagcatgctcacaaataaacagaagttgaaaccttcattccttgcaaggataaaggtaaaggcaaggtgggtgagccccacaaaaatctactcctaaaccttctcggaaagatacaaatccagctggccagccctcgaggatgcagaaggccactggtgcttttgagcctgtatgcccttctgaccctagaggcagaaccgtgccaaggggagaatgtacaaaagtacctaagcccaaatggcggaggaaccaccctagcgcttctgtcaatcaggacggaaggataacctgggacattctgaggacagctggtccaccgcagacctccgacagcaattagacgccaagtatgagaagtacaagagtgaaaaggcaaggtcacgtgggggtgaccttaggaaccacttgagcgtaagatgaggggacgtgatcttctcgagagtgacataaagaggttggaggagtagataactactctaaccaagttggtcaaaaaacaaagcagagctctcttaaactcaaaagacggagactcagagccttgtgtaaggaggatagcaaaaaccccaattctagaaaactttaaaatgccacatattgagttatatgagggaaggattgatctacgagcacatttggcgaagtacgataaaatgatgcaagtttctcgagttagtgacggcgctaaatgcttacgcttttccttaaccttgaccaagtatgcggaatattggt

SEQ ID NO: 389882 - DNA, 1245 bp, Cannabis indica
gatatgtacaatattcatctgcttgtactcactactgtacaaccttaactttttctttacctacacatataaataataattttgagtcgacaaactcagtaagaaaagcataatcaaaacataaacataaaccagattctaactagacacccatacacccaattataattctatcacgcgtcccacgcgtactgagtcttgtacaacagtactattgacgataatataagtctatactcggtactctagtcattaccgatatgatagcgtcaatcagtactttgccaaacatatatccgtgagtatttaatacaactctatgtacaccaataatgccattactaatatattatctaacaggtatttataaatatgcacgctaaacacgtaatcacatatggtagtattatactaatcttaccttgattccaaatttaggtgtgcaggtctacctgagtgggaactattgctcaacattttataggcccctaagttacaatatatgtaaaattgataagtgataatctaaatcactttttggggacttagtctaaaaactaaatgttttcctatcgctaaaaagcatgactaaaacctaattaccgagaaaatgttgaaaagtgagattttggaacaactaccccaaaaaattagcaagtcgtttctatgaaaatagtagcccatttttctgggttttctacctagaagaacggtagaccgtttcccagaaacgacctgtcgtttctatagcagaaatggcccgaaatttcaaaactcaaccaaaacgattccaatctttcccaaattatccaaaacacctaattaagtcatagcaagcataaacgacctgaaaaattcatcatcaagatgctacaacaaaaaccactattaaaggtctaagcttgagttcaataactgaactcaagcttaaacacacccactgttgtggtaatttgcacacacaagtgtacgtatcgttaacaagtaataaactcaccaggagtgaggtcgatccgacaattgtagttaagtactttaaaattaaatctttacttctatttggctatataaaatctaagagaaaattaaactagaaaaaagagcaagtaaattaataagaaaaataacaatgattaaagttagtgcttcgatttcaattgtatcgattcattatggtttaatatgattatcttcctattatcaatttctatgcaacaacaggtttactaaggtaatttatagtct

SEQ ID NO: 389883 - DNA, 1186 bp, Cannabis indica
ttttttttatttttttaagaatattggccgcaatattattcgaattatacattttgtcacacttaattttataaattgatttttttttatcgacaaaattctttaaactgctattctgttttagtttttactattttgtttactttcttcgattaaatgccaaaatagatcgttgatgtgtacatgaatacacatgtggcatgttgtcatccacataagtttaaaatgtttaaaaatacaaataaagttattatagtttttatttaaataaaaattcttaggtttaatcttttatttaaaaataacaataaagttattatagtttttatttttatttttgggtttaacctttttctttcgtatttggcgataaaactttctaaactgctattctattttagtttttacagttgtatgggttttggtgcagtcatttgagatcatactggcaattgtgtcacttcatcagttttctcagcattgggtttactttctctatctgtagccgagggccgagggccgaggcaatggctattaatttggtggatctccaattgtgttctcgacttggctatgtgaatgttgaagtcgaaacggattttcgagttgtttctaagtttttgaacagaaaagagttgtgtttggcggtttatgatttaattttgcaagatatttatttagtttgtaatattttaatttttctaagtttttgttttgtaatcgttcgacaaatttcatcgttcataattttgttaaactagttctctttcttgatgacagcattgaagtttatgtaaatcttcaaacttattttggctttagggcctaattaatgaaaaatttcattaattcaaaaataaatatataaacaaatagttgtatatattaatatttctcattacttttacttttagcctaaaaatcttttaacaataacataattttttttacttctaatcaaagtttgtggggacgaaagcacctggtttagatggcctgaatgctttcttttattcagaagaattggtctactctaggccaagatcttgttaaggctgtgttggattgtcttaataataatagagatttttccttatattaatcagactttaataactcttatccctaagaaacaacatgctcatttcatttcaagatttttaggtcctactcagtctttgtaaca

SEQ ID NO: 389884 - DNA, 636 bp, Cannabis indica
gtagcatgagaacataatgaaattagaacaagaacgaatgaagattgtttttgaggatatggaaagggttggcttctaatttcaatgaagatattatgttgattgagagttgagacacggaaccaccaaaggtgtggttgaattttattccccatgactctaatctagtgaataaaaattacctgtgccaaactccatgtactatcctttttttttttttttcttttaaaaaaaaaaaactccatatactattcctgtctcaacaataaaaaattataatctgtccatccgacttggatccagacatggactcgaaacccgaatctggacgcggccttagatcagaatccaaatccagcctaagcctcaaatatgaattcggccctattttcccttcgaattttaaaatttactaaatcatgccccgctgaacttttaaggtcgttaaaaatgctctctgaactattgaaattgttgaatttaaggacttttgtccaattttagtaaaaaattttaacatggataaagtacaggaggcatgatttagtacttatcaaagtttaagggacatgatttagtagatttcaaagtttgggagtatgatttagtacataaaagtaaaattgaatgaaatta

SEQ ID NO: 389885 - DNA, 1545 bp, Cannabis indica
tttgaaaaatacagaaaaaaaaatgttttgccttaggagttacatgcgtcatcaaaacttttttgcgagttaggaaattgccaggaaatgttttgtcggcgacctagctaattgccagcaaaattttttcgatagggctcaaccaccacgttaatgtcggcggttacatttacgtcggcgacgtatcacgtcggcaaaagtgactttcactagcaaaataattttatttgctagaaaacccactttcccgaccgtttattgtcgtcaacttttacctgcgcattaacttgctgacaaaaatttacgggcaaattcaattaacttttgctagagcaaataacgccgacaaaagtcgcttttcttgtagtgttgcacccaatgggtctgactcatttagatgaatctataaaattcgggacaaaattagaaatatactgattcgatttcttggtcaatgacgtgttaccattaattgtttttagggtatttcgtggactatttaaaattatcatatccttgttagtgtaagtagtaagaatatgtgcttcatgtttgtttgtagtgaacaaattgtactcccactatgataatattgcacggtttaaaataaaagtaataataaaagtttgacgacacaataggaatccacaaaaagtctataaaaattccattcttcttatgcatatagtagattattggtatatgaagtagtaaattcagtttctgcagttctctttttgttatcatcagtgttttaataatgtcataatcattataaattactttatagctaaattgtatatttgctagaactcattgattgtacaacatatattcgaaaggaaacagcattaatatttctcatcattaatttatcatccgaattaaaaaaaataaaaatcagcctgatttcctcactatataaaacactagatctgtcttcacgtttaggccatgtgcaatgatattgtaacattgatacatgagattcttctgttcgtttagatctcttgatatgaataataatatagctatagctataggcaagttataaaaacataataattattaaaagtgtttacttgtaataataagatgcatgtactttatctctccagatgtgatcatggggcaaaacacaaccacaagatgatgatcatgatctcattatcataagccatatatatatcatatataacccaacaaatttaataaatgtattttattttatagtctatcaaatgcatttgaaccatcaatatgaaggaacaaatatcaaccatagaatttgactgcaattaattaattttgttactatatacatgaaagtaaaatttgtaaggactgtagaggacacacaacaaagacaacaactcatcaatgcactctctgtacgtgtggaacgtgtgcattggttttttttttggcaccgtactatgatgagacacgtatattatactttctgtacattgtaaataattaaaataagtaacaactatattaatttttttttttgaaacggaacaactatataactttaatatg

SEQ ID NO: 389886 - DNA, 1240 bp, Cannabis indica
ctaaaagtttgtttattagttttttgtatctgttcgtattaggaattatcttcaaggttggttagtaattaaaaaaagttgtctaaaattaagctcagggtcctatttttaccattttagaaatatagggtccattttgtcatttaacaaaacacagggtccaatctgtaacttttgcaaaacacagagtccaaaatgatatttaccctagttattatgagattatttttctagctattttatagttgatttatagttgtcgtgattgatttcttgttttgttttttttttaatttatctttagctgaacaaaatgtatttttgtaatttaattaaaaaatttatgctgtaaaattataaataaaatattaaaaaataatatttttgagtttttttttttattattttgtattttaaagttcaagtatttatgtatcttacctcttgattataatgttatgttaaacagagtaagtggtacaacaacatggctgggtttaaaaagtgtatgctactatgctgttcagcaaaagtttcggtaaaatctcctatactttctaacattaaagatttacatgtttatttgttttatttcataattgatctaaaataataataatatataatttagatagtggtatcccttttcatacaattaaataaatatgtaaagacgtgagatgatgaggtgagtgaccctaatattattttatatacatgacatgacccaatttagtaggccattttatgggaccttagaccaaccaaaacatgccatttcacaataaccaaattagaatcaaatcccaaaatgggctcacatgatgacaactttcaattatgtgtattgtattgttaagaaaaaagaagagtgaagaaaggctcatagaaattggagaggtgagtactatttagatcacgagcttattgaattggctattcttgattgaatagagacaaattatattctattataaatgtaatttgcataagattattaaattaaggacaaaactcatcagtcattgaatgaaatttttcatcccaagttcacatacatccataaagaagagtggttctataccttgttatatatatctaagttggtgtacttctagacaggtctcatctaacgccgtatagacaacgttccaccaattttaaaattgtctataataaatacaaagagcttctagagtatatcccaaaaaatgtattatttattttatatatatgtata

SEQ ID NO: 389887 - DNA, 1312 bp, Cannabis indica
cgaggaaacaagtacttttgggggagaaacatatcaaactggaggccagaatgagggcccaacccctaggttgccacttggtgttagcccagcgcccaggttgacattttatcaacataggcaatttctaaggggctttcccgagaagtcttctaggaatattctccattttcatcaaagattaagatacaagtattttcgagaattaaacggagccatttggtggcctaaaattagacccattgcccatgttaacacctggagctgggctttttccaatcatatttctgaaaaagtgtttcaaatattttttcatcatcacaaataatgaacaagtaaactcggggagaaaacgagaatcccaaggggcaaaaaactgagcccaacaccgaagttgacaattaaccttgtgcgctggcttcgatcactcaaatgcaaattttgatccgagtattctctccagaatggtcaaaaatgagataggagaacgttttctcaatttcaagaaccttggaagtatcaaaataatatccccgaagctccaagaagagaacgcaacatccaggttaacgtatgacctagtgcgctaggtttttcttatttgattttgattctgtctcgagcattcatctagtttttcatagtaaacgagagctatgaactcagacaagtgaaattcacaactttgtatttttactttgttagcaaagtgactaagtcgcaaattgggtagtttcgagtctctcgatttcacgaaacaacaacatcttcgagaattggtaaaagactttaccaaaaaaaaagaaattgactaagtggtgtcaaaataccacttaggcatcaaaaaatacatcccaacacattttccactcacctagcatccatgtcgacgtcatatgtcaatctcaacattggttgtcaacttgggcactgggctatcaacctaggtgctggtataagagtagcctttggtaaaatgaccataactcacttaatattaatttaattattgtaattcaacttattttgaagctatttcaatgctccatcaaatcatgtctcacactccaatctcaattttgaagttatcaactccaaattttatcctcaaaagagttataaatttaagctataacttactcaaagtgagtgttggggtgcgactcaagctccaaaaattaacaactgacctttggagttaatttcaccgttcgattatcatcaaatgttaaaaatatcttaaatgtatttgttcatatttttgtttatattttattataattattttaatatgacctcattccctataaaa

SEQ ID NO: 389888 - DNA, 530 bp, Cannabis indica
actaggtgtcaacacctaaggcaacaatcaaatcacccaagtggcaatttattaaaatgccccttaacttataacttaggcattttagagactaggggtaaaatagtcaaaatctgtaaccacgctcaaaccatgtagtttattccctccaatatacattttaataagaaataagattcgagacctacccatgtgatcaaactagccttcatcgcattttctattgtcacagagcaaaaattgtaattgcataattcaaatatcatagaaataatacacctagagtttaataaattctctggaattgagaaattataactctaatgcccatttctaacaatgggacccacaaataataaaattcataaaaaattataaaaagacaaataattaatgttaattgcctttactaatccaaattatgaaatgcggccattacagtgatagattagctattcatatgaaatccatggtacattaggagtcgagagataattagaagggtaaaatagtaattttgaccaactcta

SEQ ID NO: 389889 - DNA, 802 bp, Cannabis indica
caaaaatgtatatattttcccttcaaagaaatatactgtgtgataggatttcctaaaaaatggtatggcaaaccaaaacatataaataacaaataaaaaaaataatgttattaaaaaaaaaagtgtccacaaataagattggtgtatgaacataaaacattttcgaccttacactgcattttccgtaatccaccataccatatagtattataatccaatttaatactgttcacatattttgaatatacaataataatattaatattgttcaaaaacaattatttgcaataataagaaaaatgaaaaaattataaataaaaataaatcgttcattgttaaaaaaaataaatcaaaacataattatcctattataaaacattatttagagaatcactccaatagttcatccgtataataaaaaaaaattgttttaaaatgtaaaattgaaaaatttcctaaaattattacataaaaaatacaaattaacacggtgtggacaacatttatacttttcatgtatttttaattactaaaatacattttacattatcacttacacaatcagataatggttgctgggtggttggtcaaagtttgcatcagacgaaggtttcaattagacgaaagatgctgagtggttggccgaaggttgtttcaaacgaaggtttcaatcagacgaaggttgttgggtggttggcgaaagttgtatcagacgaaggttgctgggtggttggccgaaggttgcatcagacgaaggtttcaatcaaacgaaataactgttagcaaaatattcatgcaactg

SEQ ID NO: 389890 - DNA, 855 bp, Cannabis indica
ccatcacgagcagatacaacagtataatccgcacaagcgcagattttaaattttttacttcaattcaatataatccgtgcaagtatgaaaatccgtattttacagattagattgaattgaattgtctattttgaggtctaacataacatggtccatgtgcacaatatttacgtcaagctcaagttagttttgtatttcgaggggctgaaatacaagtttgttttattcaagtttaaatttgtgcttgttttagtaatatttttcaaataaatttgttcaacttaaatatttttttaaagtaaaaatgatcagtgtaaagttttttttatataatatataaaaaagtgacaataatagtccttttattattttgttgccacggtgcccttttaattattaaatgattaaatgtaagctaaatttgttaaatactaactaaaatatttcgttgtaagggtgcctttttagttgttaaatgccacctaaattcattaagcgtttggaaagccacaatgtaattagatttgtgtgtaattgaagataattacacaatttgacatgtttgtctgaccatgtaattacattgtaactgtgtaattagaaggaattgaggggttccaattacactctccaattctcatggcccccatgagaattggatgtaattacaccgtgtaattactaaaaacttttcatattaaacattagctactaaaaaatattatttttccatgtaattactaactattttgccaaacaagatattaggaattcatatgtaattatcaccttatatccaaacacaccttgcattttaaaatagtgtaattattaaactgtataattaccacccta

SEQ ID NO: 389891 - DNA, 2143 bp, Cannabis indica
tatttttaccgcaaattactctcttttacattgtttgccccatatatttatctcacaataaactagagatgcaagctgctagctaggagcttaggattccaatatttgataaccaaatttgtgttaaaattttttagagtcatttgtctcttggttagttaagtttgtgtgtgtgttttttttcttcattattaggcaagtggttaagttgttagttaattgtgattgccttgatcagcttgatcatatctcgtaatatttgatggcacacaagatgaccctgtttaccacacatatatcgtgcaaataggtcggttgcctcagccctcttctaagcatgtctaaaatattcatttagttggaatgggttagagttctgatcctacgaataatttttaatctgaaacattcagatacttattggatctcagattagatctactttgccccgcctaattttttttttccgaatcaaatctgatccgattttgtttcaatatattaataaaaaacttaattcaagaatcgaatcctgaagccagacccggaccccttaggacctaagacctgaaccggacccaccaaggattcaaacccagacccgcgattggacccgaacccgaactcgaacccgaatacccggaactggcttcgagaccggactcggacccaaacccagaactcaagctcgggaactgagcctggacctaggacccaaacctagaccctgacccgaacccgggttttgggaccaaacccgaactcggacccaaactcgcgacccaggctcgagactcgggcctggaaacgggacacagacctagacccttacccaaacccaagaccagacccgagtttgaagacccaaatacccaaacctggacccgaactcgagatccagtttggggcccctaacctaggacctggacccaggaccgtacccaaactcagactcaaattctgagactaggacccgaactcgagattggacccgaaactaggaccgaacctaggactagactcgaacccaagaccaaacctagactcaggacccgaacctagaccgacacttgggactcgaaactgggatcgggacccgaattagaactcgaattcgaatcaaaacctgagacccaaacccgaacccaaacctaggacccaaagccagactcaagcctggaccctgacctgaacccaaacctaggactcgaacccagtctcggacctggaccctgaccttgacccgagcccaagatcggacctggcgaacctagacctagaactgggactcgaacttgggacctagattccagacccaaacccgaactcaaactcggacccgacccgtagttggtgttggggtcaattttattaaaaatgtattataactttacacaatctattaatacaagtcaataccaaacataatattgtattaaatattataaaattataagtttagatataaagttaaaattctttaaaaaagagttaggtcggatcagatccgatctgagtaacgggtcagactcgatctgatctgagtatctgatctagcggggtgaggagaggcgaatccttacataatctagatctggttagatcatactcggtcagatccgacccgatctatttagactcctaacctcttctagtgaagttgcctcttccatggttaatccacaatttgagttgttcctctataatttcctctatttaataatccactaacttataaaaaaatgaaccacttaatgtagagttgagagaaattttcttgagtagtatcaagattcgatgtagaaatttgtttaaagttttattttttattttgaacatattgattgaacttcctataatgtgagagcattaccacaagttaagaaaacaatagaatacttgtaattcatttcaagtccgccaaaaacgtagagacacgattcttaattagagaagcattatccaattgctgccagagcatcaccaagactcttcatttttaagatgtatgtaacgccccaatatttttccttattttacaaaatactaattttgatgcattaattaaaaagattcaaagctgtttggaaatacacagtgggttttacaataaatatgcaaaaaggtgaatgatcattcatat

SEQ ID NO: 389892 - DNA, 1137 bp, Cannabis indica
ccaaacacaaaaatgtagctagcaaaagtgacatttcttatagccttgagcttcatataaagcaattaaagcctttttctcttgtactccaacatcctcgaaactttccttattaagaatccttaaagcaaatgtaactctgcaaagtttagaatagattttatacattctagtaccttgaatcttattcacgaaatttcttgacagtaaaagaagttggaagagtcggagatttttctttatccttgtttttcatttttcttggcgccttgggttgtttcaaggacacttctgcatttgcagcaacttgtttccttccctttttcactggaagagtgaaaatgttaagtgcttctttgaaatccatctcattgtccatatctgcaaaggaaaaaggcgcaagtaagacaaattgacaagaaaagcaaggatacaattatgaagataaactcccacctaaactacacttaggaaaattatatgaggaagaattggcttgagtataaaaaaactccccagaaccagtaattttctaaagatataaggtgttaagtggagatagatcccaattttacagcttctgcaacttatagatgagagcaaccctaattttgttgttgaagtggggtctctcttctttgatgatactgaaaagcttcttcatgatccaagtgcaactctctaaggagccaaagcttccacctccttttctgttcctttttattatcagagttcttattatttttcatttatttattttctatttgttctgttattggtaactttgaatagttgatgccatatcacatgtttgagagtagcagctctaagtaaatacatataggagtcgtttggtacgcaggtttcattacatgggaatagccttcacattacttggagagtgatgaagggaatcataaatataggaaagtaacattacagtgtttggttgtacacagaaatattatgatgatgcctaggaataagaagattactttgcttggttggaatggaatgtgattgcttttttttttttttactaacaataactgtattttttttttaaaaaaaacgtttttaaaaaaaaaacgtaaaactaactaactttttactttttttttacttttttactttacg

SEQ ID NO: 389893 - DNA, 959 bp, Cannabis indica
gttggttgacaattataaatctaagccagctttagcagatttcacttcacgtgaatgtattatgcaatgaaagcattatgttgtggacgcgaagtatttctagtttttaccattatgttattaggctatttatgactttttacaaaagtactaaaatattgactaagaatttcagtaaccagtaattagagcggtatgaagtagttaatgaatgttaaaagagatgattttttacgtggttagagcattaatgaatcttagtccacgagtcactatatatatttatgagagtatatattacagagagttttttagttgatccccatttttatttattattggggaatttataacttatgatggtggtaaaaaagccactatatattatcgtgtttgtttacaccatacctggcacaatttcctaactctaactttgggcatgattgcttactttatgatgagttttaggctgcctataagagtttggcgggatgtgatttattccttgtttatgacttgatggctcatttatgcagttttcgactgatgtatagatgttcttaaaatcaaggaataatgggcttaaactcttaaatacgcttggcagagtaaggtgtgtgacgctctttcccatgtcgtattaaatgcatgtacagtgtcttgacccttgagtgtcatgtcatctttcattagttctctcgtaccactgaatatgcttctctctgcgagagagcaaacaagaggtgctcgcggtccagctagattctcccgaaaatgactaacttgttattactccatggaaataatagacttcgagaggaattaaagcaatgtgtcctgtaacatgagtccattgctacctggcttcctcctagactaccacgtatttatggagaaatcctagacaacaggaggtaattgggaggccttaatgacgtaaaggatgatttccttcgagc

SEQ ID NO: 389894 - DNA, 1423 bp, Cannabis indica
ctatatgtaaatttttatattttcacgttttttatacccagtaatagaggaaatgggtcggatgacaattttagttacatggatacaaatttgtatcaagtattttacagagaaatattattggatatcttagaatatcaaggtttaacgaaataacaaaattagaccattttactcatagggttacgagataacttaatagggaactaatgccattttagtctttttaccctaagtgattagtcactttttttggaatattttttagggttgtgactcaccatttattggtgaccagcagcttgaagataaaacaaaaaggaaaagcaaaagtaaaaggaaaaactaaaaccaaaaaccaaattcaaaagaagaaagaaaaagtcaaagtttacattctcttttccctctactatgtggctgccaaaactagagtaaaacctagtgtttccaccattttcaagcctcttcatagctagaattcatcaaggtatttagccctagcttctccatgtaatccaaggtaaaccctagctcattgttatggttttctagggtttttgatagtttttagttgctgtttatagtaggacatgttgagaaagtttaggaaggctagaaaaagcatcttaaggttatttaggactatttagaagtggtttgaagtgttttgggtggttgtagcaaaattattgcaagtttgaattcaaagaaatcaaacttgacttggttgtgataacatgaattatgttgcgaattgggttaaggtttcttcattaaaagtgttaattatgatgtgtataggtgttttgccaaattttgtaaggtttagcttatgattgggtgccttatgtgatttccaaactcagacagggaggtttcggaccgttcgatttaggcagatttaggacggccatttaatttgattattcttgagaatttaattgagtctctttcatgaaaaattttaattatgatgtttttaggtaccttgcaaaatttggtaatgtttggattagaactgaatgagctatgaaagttttaaagttgtgtattggagttttggatcgttcgatttaggcaaaatttgggggttcgttttaaaaatggatcgcctattttgagacttttcccaggaccttgattgagtgttttctcgatacttagagtattgccatgatatctatcgatagagaaacttttagtcttgaatttaagtcccctaaagtgttaggacaagtttttctagaattgtgacttagggccttcgactaccaacaactatttccactcaggttgactgacacatctaaaattaaaattgaggtaagactaatataacacatatacatacgtacatgtttgcgtgtatgacatatcagttagaatgatagttggtgtatatatgattgcatcttgatat

SEQ ID NO: 389895 - DNA, 527 bp, Cannabis indica
gacgctccatcaacgaacactttccatgccagcatcgtgtggggctagcatatttaaactggcctccgcttcattacattctattatgaagtccgcaagggcttgtccttctatggaaatgcacgggacgtagtgtatattgaactggctaaattccatggcccatttaaggaatcttcctgaggcttcaagcttctgcaagacttgctaaagcggatgatttgtaagtatcttcatgatatgggcctggatgtagggtcttaatttccttgaagccatcaggaggcgaaaacctaatttctcgattaagggataccacgtctcggctcctatcatgtgcttactgacatagtacaccggatgttggaccttgtcctcttcctggaccaaggctgcactgacagtgttctcagagacggcccagtataataacaagtcttcttcgtgaactatttttaacaatactagtggtttggccatgtgctcttttagttttttgaatgcctcctcgcattctttagtccact

SEQ ID NO: 389896 - DNA, 869 bp, Cannabis indica
aaaaaaaaaaaaagaagattagatacatcaacaattaaattattgaaagaagaaactatttttgaaggagtattcaaattggataccaacaaagcttctgtctcaacatgagaaaatatcaatttgcatatcaaggatccaaatcacactataaaacattgttttagcttgtgaaatttccaattattggcttagcaagagcagctacaacctggcctttgtcatcacagatcactgcttcaacttcaatggtgtttcgacaagcattcaaagttgcatatacatttaatttaagtgcaccaattagcgggagtgtccatgaaacctaaactggtatcgtcaaggagatccttggggttttactctatgccagatggaattttatgcgagcttctcgaaagttgtgcaaataattttcagcaaagatagctactgttgagactggttttggtgtagctccatgaactattttgtttctttcggtccatattgcccagagaagaaaataacttgttccatttcagccttattaagtattgaagatagatgtaccaaaaaaattccctttatgcataactgaaactttagtccaatcaagtaccatttgggaatgctgccaaaccgaacgagcatatttacatccaaaaagtgcatgttttatagattcccaagctttcatatagattgagcaagtagagtccgttaggggtgtgttcactaagtatccgatctaatccaatccgcacgatccaatctagtatattccgcaaaatgcgaatatctgcacttgcgtggattggattggattgaaaaatctaaaatccgcacttatgcagattggatgttgtttgacctcaaaaagtaaccga

SEQ ID NO: 389897 - DNA, 685 bp, Cannabis indica
aaaaaaaaaaaaaaaaggaaagcgaagccttaggcttgctgcatcaagttttctatatctttgatcattaatgtccaaaatgttccaaatcacatgcaattttgtaacattatcactccttggttgtctacaaaaatgtctctacaagaacaataaaatattatagctcatcaacatcaattcaaagatgcatctataattatatatatgtaacttttcttacatatcgatatatgattgggatctgacaattgtaatttggaataaccttcgaaaatgttacttgagaaaactcatttgtgagatttaatttaatcaaacataattgtattattacgtaaaaaacaatataataacagttcgccattttatttaactaattatatttaatttgcaatatttatttaatcaattaatcaaaacattgtgatataatatataaaaatatttatatatatatcctctatatactatacatgtataatttttaaagcaacaacaaaatctgagaatatctgaaagaaagccagtacgtggtttgaactttcaatgaattggaacaaaatctctctggtttttgccaaacacgatattcctatacatgccatggaaatcaagtaaatctacatatatatatatactagcaaaaagcaacgtgcgaggcacgtatagtaaattttatgct

SEQ ID NO: 389898 - DNA, 519 bp, Cannabis indica
aaataaattttttatcttttttttcctttcccttttttctttttcaccttattcgtcttcgtcatcttcatccagattccagacgcacccctacctccacccccacccccacccccaaccagacccctaccccctacgacgaagccttgtcgtcaaaaatggaggccaccgattctgtgatttctcccccgttatggtttgtttcagatttctccctttttctttctttcttcttcttcttcttaatctccttcactctcaatcccgattttctttaatcacaccactaatcaaatttctctttctcttatattcgaaacccgaaggtatacctagggcatatgttcattttttttatccttctctaggtctctctcttttttgcatgttaacggcgacgagctagtcgtggttagggtcgtcgatcacagttgaaatgtgtgggatgacttgggatggagtgaaatcacagtcggagcaaggtgcaacgattatggttttctggtttttttttttctt

SEQ ID NO: 389899 - DNA, 2387 bp, Cannabis indica
ccaacctgcttcatcctatacacgtaaaccagccaccacagccacaaccccttaaggaaaaacaacccctacttcatcctattctagtgagataagtgttcaattgctggtatgaggacacatagctagccaatgtccaaacaagagagttatggtgatttgagaaagtggtgaggtagagtctgaagatgaagatgaccttgctgacatgctacaattggaagatacttccatagaatatgaagatgaccttgctgacatgccaccattggaagagtatgagaaagaatatggtgacatgcttgcactagtcaccagacgagccttaaacttgcaagaaaaagaagaggaagaggaggtgcagcgtgagaatatttttaatactcattttcatgtgaaagacaaggtatgtagtgtgattattgatgggggtagttttactaacattgctggttcttccatagttgagaagctggggcttccaacacttaaacatccacatccatacaagttgtagtggttgaatgatagtggtgaagtgagggttacaaaacaagttttggtatctttccaaattggcacatatgaggatgaagtattatgcaatgtggttccaatggaagctgggcacctccttctaggaaggccttggcagtttgattggcgagtccagcatgatggcttcaccaacaagtactcattcacgttccatcagtgaacaatcactctagctccattgatgccaaagcaagtctatgaagaccaagtgaggttgcaaaatttaagttataaaaagaaattgagtgagaaaaaggatagtgcaaagatgaatgagagtgagaaaaaagagagacaaagggagaaaattgtcgaatcaagtgagagagaaaaaaaagagaagagttcgattaatgagaaaaaattacaaagagaaaaaaataatttttatgcaaaaaaaaaagtgaggttacgtgagcttggcaaaataaacaatcaatgaaatttttcatttataaggaggctcttataaacactaaccaatgtgattcttcgctgcctagtgttgttgtttctattttgcaggagtttgaggatgtgtttcccaaggaggtaccacatggtttaccacctttatgagggagaacatcaaattgattttgttcctggtactttaatcccaaacgacaagcctatagaagtaatcaagaggagacgaaggaacttgaaaggtaggttgaaggattgatggagaaagggcatgtgaaagaaagcatgagttcttgtccaattcttgtgattgtaattcccaagaaggatgggacatggagaatgtgtgttgactatcgagccatcaataaaataatgataaaatatcgactccccattcctcgtttagatgatacattcaatgagttgtatggttcttgtatattttctaacattaatctatgagcgggtatcatcaaatacgaatgaaagaaggtgatgaatggaagacctcatttaaaacaaaacatgggttgtataagtggttagtcatgccttttagataactaatgcacctagcactttcatgtgcttcatgaatcatgttttgcgtgcttttattggaaattttgtagttgtgcattttgatgatattttcatttaaagcaagagcttgcatgatcatgcctcacatttgcatttagtttttgatgttcttaggaaagagaaattatatgctaactttaagaaatgcacttcagcactcataagcttattttcctaggtttgttgtgagtgctacaggtattgaggttgatgaagagaagatcaaagccatctaagagtggctaactccctcaactataggtcatgttcaaacatttcatggccttgctagtttttataggaggtttgtgaaggattttcgtaccatcaccgcactcattacataagttgtcaaaaagaatgttgcatttaaatggggtgaagtacaagagaaggcattttaattacttaaacacaagcttactcatgctcctgtagttgctttgcttattttctaacacatttgaaattgagtgtgatgcttctggtataggtattggcactgttcttatgaaggatgggagaccacctacatattttagcaaaaagtggggatgccctaaattacaccacctatgataaagagttttatgcactagtgcaagctttagaaacatggcaacaatatttgtggcccaaagagtttgtgatttgcacagatcacgaatcccttgaaacatttgaaagggcaacacaagctcaacaagagatatgcacgatgtgttgagtacattgagacatttccttatgtcattcgatataaacaaggttaagagaatgtggttgctgatgtc

SEQ ID NO: 389900 - DNA, 1445 bp, Cannabis indica
ctctctctctctctctctctctctctctctctctctctctctctctctctctctacaaacaagagcttaaacacttagcctttttttctgtaattactatctcatgaaaaataaattaaatctcgaagtaaacgtagctctataactatcgcgacatggatagtgaactactatattcatctcaccaatctagtggtgttggccattttttcagcatcaacaaaaataatacaaaagaatgtgaggaaaaaaataaataataatagtgatttttaaaaattatttttaagttttttttaatattggagtgtcattatcatttatagggtgcaaatagaattctcctacattaaattatataacacatgatacttaattaaatcaatagtgatatagctgtatatatatacatatatgtgtatagtgccaacccgacccatattatgaaaagcctacaaaatatgagttgtatcgtaacgacccataaaaagatataagtcgtgtcgtgtcgtgctgtgtcaatattttaaagggtaaactcgatatggcctataagctcacattttcgtatcgtgctcgaactcgtgtcgtgtttttttcaggttgatctgttttcataaatggatcaacctgttttcttaaacgggttgaactctaacttcacttttttattactttttacaatcattgagttaatcattaaattatgtgtattttttatagttttaattattttttacataatttttcaaaaatactttactcttaattatataaaaaattaattaaaatttaaatatttttttgaatgaaaataacctttattagacagtaacattcgctaatacaaaggcctgaagagaaacaggagcatcgctctcagtaaaacgatgacctgaccaataacaagcactacgtgccatacagtgcgcgactttgttagcagaccgtttaacatgaccaatagaaacattacttaaagaagataaaataaattgacaatcttgaacaaatagaccaaaaatagaaggcatagataccgaactaagaatagcttgaacaactaaaatgcaatccgtctctaaaatgacattcgacttgttatgcctctttatccaactaagtgcctctttgacacttagaatctctacaatctcgagtcggcaactgacagaagaaatagtggaaaacgcctcaattaatcaaccatcaaagccgcgcgctacaaaaccagtgccgatctcatttgtgtcttcaaaaaccgccccatccacttgaatttttaactgtccagctgccggtttggaccagtgttctcttgtgtcagtgggattggaagccagggaacccgagtccagctgcttagactgggcacacgtccattgtcgaagagtagtacgagtcagccaaacacatcagccacactacaacttttaccattctaa

SEQ ID NO: 389901 - DNA, 970 bp, Cannabis indica
cgttacactattagtgttatacttgtgcaagaagaagaaaacatccagctcccgtctactacgtaagcaaaagattgttgggtgcagaatccaaatatccaatgatcgagaaattgacattttgcttactaaccacgtctcaaaagctaagaccataattccaagcccatgccaaaaaagtacgaatgaattatcccctctgtcaggtgcttcaaaaactagagtcctccggtaggttgctaaaataggccatagaacttagccagtttgatatccagggtcagccactggtatccatcaagggtgaagcccttgctgatttcataatagagtgttctagcttaaatgatcttccgaaagacccagttttggagcttcccacctggaaggtctacatagatggtgcatccaacaaaaagagagttggagcaggggttattctgatttccccacaagggcactctggaggcgaaataacggtggtggcttcgttgctcaaagtggtcgaaaacacaagactcaaatatgattcacaaactaaaagaaaaatgattcacagtaagatatgaggggggaaaagtttagtgtttatttttatttaattttcatcatttctacaaatatcaaacatctccacttgtctaagatatcatgctgcgactgtgaaagagagagaggtcgagagacagtttgatgcaattgctgtgagggggagagatgatggagaatgactgtggccgttgactgtcccggtgttgcgattgttgtgagggtgagagacgagagagcccagaacttagataataggatggagagagagagcagcagggttcatggggtttgctttgggcttggaagacaaaaggctggtatggtgaaggcctaccatcgggggtagatcacagagagaaagaaggcctctgtcagggatagatcgcagagagagagagagagagagagagagtacgaa

SEQ ID NO: 389902 - DNA, 821 bp, Cannabis indica
ttttttcccaaaaaaatattgattagtcttaatagccaagttttggtggtttgttttgtgccaacttttgtttatgttgtgccatttattaggtcttacactataccaataacacattataacatttgaaacataaccaaaaatttgttaataaaaaaaatatatatcacataaaaatacagaaactaaataactacaaccaacaagttaattgtctaattaaaaatacacacatttagattatgaattagtaaaattaaaatgtcaatataagatcaaataattattccaaaaatttaaataaaaacaacctaagatgaccaaattaagttgttaatagtgaaggttaatgttgatggagctttgtttgagcatgagggtcggtttggtgtgggttgtgtagctcgtgaccactgtggtaatctgcttgaagcctttacaacgggaaagattggactagtccaacctaaaattgcagaaattatagataaagaagctttaagttggattgcttgcaattcttggggcacgttttgttggaggctaatgtctgcttccaagctatccaaagtaaaatttctatgtcttctcaatttggtcttctcgttcaagatgtgcgccattttttttcatcttacatttataatttgtgttttgtaaaacgatccgcaaacaagttgactcattgtttggtaagagactcttgtttctcttcaggtcgtgtgcttcagctggaggactgttccgctaaagtgcgatcattgttataaacgatattattattaattaatgaatctactgaatttattcaaaaaaaaaaa

SEQ ID NO: 389903 - DNA, 2445 bp, Cannabis indica
aataataataaaaaagaaatgcaaccaaacaatttaataaataatcaacataaattacacacaaaaatagataaaatcacaatttgttaaaaaaattagtaatatatataagaatctagatttaaaaataaataaaaattattgaaataattcaaaaaaaaacaactataacttagataaaaaaaataaaccaaaaatataacacacgaaataatagaataaaaaaatatttatatgaataattataacattaaaagaaaaaaaaagaatgctgaaaaaaaaaaaaatacaacataatatatatatatatacaataacacaaaactatattcttcttatctcattttttcttcgcaatcacacatttactcattcctaaactcaaagccttggaaccaccagagacacacattgataaatcatttttagctctaccacaatcagagagaggcaaaggagaatgatagatagacgagcgaaggattcccattttagctaatgaactaatatgatcagaatgagaagataaccaaaccctaaccccgatatttgcttaacacatgtaaaaagatttaaaatgaaaaataaaaaagaaaatgaaaaattgaagaaaggaaagatacaaatatattagtaagagagtcttacgtgattgacttgttgtaggcttctcatgctaacatcacgcgcgcgcaaatagagaagagattcaacaaaaaaatgggccggtaatgtatgcaaaaaaaattccaaactaaaaaaacgttaaaaaaaaaaaaaagaaaacagcactaaaacaacaacaatgcataaacaaaacttactcacaaaaacaagattatttttgtaaataatattcaaatttaggtgctacatgataatttcttattataaaatttaatataattttttggtttaattatcactaaataaaatacaaacactttgtttgtaaaatataatattcattttccaaattacaataagaaaaatagagatattattctaagaatttgcaaagaaagagattggttttgtacctttattgggcggttggatgacaacgacgactactaggggtgttgatggaaatggtggcagcgaagacggaagtttgacggtggtagcgaaaacggaagtttgacggtgacagtagcaacaagagtcaacggtagcaacaaaaataggagtttacattacatttaagtagttactaagagcacttccaacaacttttccactctatcctttaaaatatctcattaaaattttactttttctatttttcctcacacatttacattacaccatacatcaacttctttaaatttttctctatatcatttaaatagtatatcttcacatatattttattaataaaatattatttaaatagtatatcttgacatatattttattaataaaataaaaaaaaatacacaaaagagtaaaaagaagaataaaaaattaattaaagaaacgaaaaagagaaagaaaaaatataaaatatgtttacctcttcactattcattgagctatatgtagagaagagattcttggagtttggagaaatatgtataatagctaagaatttaaaatatttgatgaagctcaattttaaagtcttagctattttattttacctttttagttattatagctcacttgttatgagtgctctaagagcatctccaatggagtgtcaaaaaggtggtacattactatattttagtacacttaagaaaaactatactctaatggtgttctaaaaagtgtgttaaatttggtacatgctaaaaattgtgttaaatttggcacaaaatataacattgtgtcaaatttagcccacaataaatattacttttttatttactataatgtcactaattattatgattaattgacttttactaaactttatttactttaattaccatattactattatttaaataataaaaaataaaaataataaattttgtatattttcaataaaatataaaatgaccatcaatataattaattattttttccttattttacatcttgtgtattagagcacaattgtaaatagtgggccaaatatagcacaaacttaatttttgtgctaaattttgcataaattttagattttccattggtgatggtataagattttggtaattagctaaatgctttgttaggtgtgattttaaaaaaacaataaataaataaagagaaatttgcggctaaacccccttatgtttcaattgttacacacttaacctcctaatctttgtttttggtggtaaaactcccttgagttttattctgtttacactttaatacatatgttaaatttggctgttataaatgccaaatagaactgccaacttgtacacttatgtacaagtggcatagttttattgccctaaattatttttataatataaaataataaataaa

SEQ ID NO: 389904 - DNA, 635 bp, Cannabis indica
gtgctgtgtaattggccaaagaaatacaaatcagctgatgccgactggtttgctcttctatagcagctattttttttctatttctgctggtgccaactggtttaacagcagctactgctgtctattgccctatagcagctgctggcaattgatttctctattgatgaggtgtagccgtgacttgtaacatataatactcaaggtatttgtaattacattgtactgtatagactaaagtcgggtcttcctttgaagatgccaataggttgtaaatgtgtttttggagtaatgaagtacatgattgattgatcaaaaaaataataacttttttcactctaaagagttggaattatatttgaaaaaacatgtttgatggtgacgaattttctgcaacatggttaaaaaaattatatatactcaaaaagtcaaaaaaataaattagaaaaatatggtgtatcgaattttaaacatgtttaactgaaagctgattggttgaaatgaattagtgagtcacttattgatggaattattttaccaggatctatatttattaacaagtatgttattaacattctaaatctgaacttctaaaatgatatgaaataaacacatataaagtataagaaaccttacaa

SEQ ID NO: 389905 - DNA, 1585 bp, Cannabis indica
cttcatcatcatctacttctttcatcaaggttctttcctagctaaaatcttaatttctcttattcattaagttttacacaaaaacactactaacattacaatattatttttctatgcaagaaaaaaagggaaaaaaatgggattattagtgggcataaatctcctcatcataagctttgtctcagtaatttcatcagccaaaggctcctactatgccggatggacaaacgctcatgccactttctacggcggcggtgatgcttcgggcacaatgggtatgtatacatattttaatagtgatattattcggttttgttaagttgaattaattaagcccaataagttttgtataggcggggcttgcgggtatgggaacctgtacagccaagggtatgggacaaacacagcagcactaagcacagcattattcaacgagggattaagttgcggtgcatgtttccaaataaggtgcgccaacgaccctcaatggtgcctccccggcaccattgtggtaacggccactaatttctgtccacccggtggttggtgcgaccctcccaacctccacttcgatcttgctcaacccgtctttctccgcattgcgcaatacagagccggaatagtacctgttgtttacagaaggtacaaccaaactactatattttcagtacacgaatatataagttgtaactctattcaattattattaggaaagtgataagttttcaacacccaacattataaaattaggttccttctagtaagcatatggcagtttgagcctttgcataaagtctcttgtattaaaagatccattgtttttattaaccttttatatataatattataaatatttttttataatgtatagtatatatatacacataataaataattatggcataattacactcaatgtttcagattttatacgcttaattaaatactttatttttatttttggaagcaaaaataatatttaatgttatacaattctcttacatctgttactgctattttcgttaactcataaagagatgcaaatctaaattaccataactgagcgaaccagtacagtatatgtgaaaattattataactgtcaaagaactcgaaacaaattgacttgttagggctgtacgtagtagatatttgtagcatatgtgagactttattaatgaaaatatttgttttataattacagggttcggtgtagaagaagaggagggattagattcagcataaatgggcattcgtacttcaatttggtactgataacgaacgtaggtggagctggtgacgtgcatgcagtggctatcaagggatctcgaagtggatggcaaccaatgtcgagaaattggggtcaaaattggcagagcaattcatatcttaacgggcaaagcttgtcatttatgttacagctagtgatggtcgatctcttatctcttacaacgttgctcctcctaattggtctttttggtgtttacatatactggaagacaattttcgttactagcctacctacctaccctttattacataaattaaaaatgtgtagacaatatatagaaagagagagagagaga

SEQ ID NO: 389906 - DNA, 945 bp, Cannabis indica
taaatgatagagcgctcatttgaaagcatgcccatctgatacccagatgggtactcaaagagcctaacgtggatgttgaccaccttagagtgtcgtagatgtctaccttttatgcatgccagattaccaagtgacggttgtcttttttctaacgaagattagatttgtgtcccacatccaagcatgttagtgcgcacacctccaccacttttttaacatacgggtaatgcaaacctctaattttaaaggcgaaagctttgggcaacacgtggctcctatctttaaaggttaaaccattgaaggacacatatccatatagtacaaaatagtctcaattatccagctgcagcacgcatgggtattatgtttctcacgagacccaacaatctgctactattactttgggtcttcttcttgaagagaaacttagagtatagagttagagtttcctgcaaaaatcttgtaaacacttcaaaaataccctaagaggctaatagactgactcgtggactaaggttaattaatatccgaaccacgtaaaaaatcttcctctgtatttctgcattttgttatttctttagttctcaaatatttagtttctaaaattttttttaaatactattgatatttcatattttcctcacaactaagtataaatacatttttcactaattatatattattttgtttatgttataaaataatataaaacagataagaagaaaagaagaagataaagagagaaagagaaattgaatgagaatttctcagttgtttattccaatagggtgaacccctatttatacaaaaatatgactaaaagaatgagaatctaaatcaatgtaataaaagaaaatacaaccaagcattaatggtgataattaatttggtgatttagacatccataaataatatttcataacactcccccttggatgtccataa

SEQ ID NO: 389907 - DNA, 741 bp, Cannabis indica
attatatccatttgttaactaaaggaaattaaaaaccatattctacttcaaatactcatttgctactatttaaagcaattcaattcagctactaaaaaaacactaccaacaatttgataagttttcatgttttggctacatttgataagttttcaaatttccagataaacaaacactacaaaattttgacgagtaatgtatcacaagtgcaattcatacaatgaataattgttcatgctgtaaaaggcaattagacattacaaacaaacctggagacgttgaatggcttgctggaaagtaagaacagaggatttaggtggctccgaattcgaaagctgcggagcctcggcggtggcagaggaggtagtaattgcagatactggagttccggtgaagcggcgtgtagcggtgaaggggttggggaagcgagtagggaaggacttagcagcgtagaggtggaaggaaatgcgagatggttggggtttgagaaaggaaatgactaagggaaaggccagtatagccatggctggtaactcaaactgagaaaaccttagcctgaaaattttggtcctagattgagcgtgactcgtcatctagaatgcctatttatatggtttatgagttatgactatgtttatgctttctttactaaagtaatgttttgcaaaagttattggttggatttgtattttattaaataataaaatagactattttaaaatggtaaaaatagaatcttga

SEQ ID NO: 389908 - DNA, 1717 bp, Cannabis indica
tcgaaaaggcggtggtgatcaagctgatttattattcactctagagatcatgacacaaattccaaagtcaatcaaatggatggttgaagaatttttgagaacaaagtagaaaaatgttatagtccaaattctggtaccatgtagattcataacgcctcatacccaaatcacgatatctggagaagatttacagcaactgcattgtgtgacttcattggaaatgaaggaatactttttagaatgatgtatactctctttaacctaagtaatcttatatatcaatttctactaaaattattctaaaaccttaatacttaactatttaatgtaggtgcatttgggaggggttacatgatttgaggcagattttcaagttttacggctcggagcttctaatcgatatagagaagcaacaatccattaaggttgcgtcagaaagattggctcgttggttatcattgatgtaaaaccaacactaaatattttttaatccttagaatatcaggtaaacacttcttaagaaataatttaaaatttatttcttttgaaattatttttatactatcttatatacatgcatgtatattttttagtgcctattggatgctagaggtcattgcgccaggaaaaattatctatttaaaccatataaatggccataaaattccctaacaaattcatgcgatgttaaaaaagtaataatttaattactctttatataataaatctttattgtattattaactaagttatatatatgttaattaattgaaatattaatataattttcaaaataatgcatgcaggtttttaaagggatcaaatgcgtttattggggtgtatccaggaatacactagcaaattgtccaaaacaatctaagaaccaagaatgtagtttttgtgtattaaaatacatcagtgacattgtcgcatttttcgcatgtgcaaatcttagtaattacttaatcaagtttttaagttttaattattaattatcttatttattatattaataaacaatctaatatatatattaatataaatatttactttctttatagtttgggaaaaaaaaaacatacgatgcaaaaattgatttattgttgtttcaatggaagtgtatagaacacttgctagcggtgattcacgaaggcgtggaatgatgctgaattgtataaaaaaaattattcctttattttttatgttaacttgtaattttttactctattatttttctatgtttaaaaataaaaaatttccttgaagatgcttactaccataactaaaggaaaaattacacagtatactattttgtgccaattttttacttttatactgccatgcgatataattaatatttatattgtataattttaatacttttatatggtagtatactacatttttttttaaacttttattttctcatttttggtcacgtgtctcaccagggttacactgtatcaattaattaaaaatctttttatatataaagttttgatgttgatgtgggctatcacttttagtgacaatttcaatttttttaaaaagtttttttaatatttttttttatttttttacttaaaattaataatgataaagacgagacccattacgtgctctcattttaatttttcatcatatttcttattctttctctctccatgttcatcttcttcttcttccttcttcatgggtttctttttgtttgtttgtt

SEQ ID NO: 389909 - DNA, 1674 bp, Cannabis indica
tcaggtcaaattgtgaatctttgtgagtttgtggtgtgttttttaccacgtatacttgatgatctttatgagtcattagaccgtgttcttagggctctcttaattctgtgtcatgataaatatttgggtctctctttctttgcggatcagagtaaaagtgatttattccactccatcaaagacaatatttggaataagttatttgggtggaaaccaaaactttttcttctggttgtagagaggtctggttgaaatatgttatccagactatctctgtgtatgcaatgagccttttacaactccgatggatattgtgaatgaaattcatagcatgtgtgctcaattttgatggggtggcgatactgataaatgtaaattacattggtacacttggggccatctgtgttggcacaaaattgatggtggtatgagtttcaatgtatatttttattcaatttttattggctaaacaagttgctcgtttgtataattttgttgattctttagcgacttgagttttgaaagagtactatttttctaatagttccattattgatgtaatggagactaaatgagcttcaatttttttggaaaagtatcttttgagggtgtgatctttgaaaagaagagtgtcgttggtcggtggggagtggggaatcaattcacataagggagaactcttggatccctaaagaccacgtgggccaaacttattcgcttagggagtggcaaagttggcgtggatagggtgtgtgatcttatgcttgatacgagggtggaatattcctcttatttgagattttttttgatgatggagatctgttttgtatatttcgttctcagtttcaatagaaatgatgattaatttggaattcttctaagttaacaatggctagtttacagtaaaaagttgttatcgaaactcagttgcttggcttgggtggggtcagaaattatcctcggtagggtcttcaaaatggttaaagtttctttggaggctctctcttcctcgaaagataaaaaattttgtatagaaagatagcctgaattttatccaaacttatgctaatctgactagatatggagtgaacgattctaaggtgtgtcctatatgtttacagaacaataaataaactctccatgccttgtgaattgtgattatgtgttttccttaaatctattcattatgggtgggagttgagggggttggatagtttgaaaatgacgtctaatttttatgaaatattgattgggattatggataccgtaaaagttgagaaatttcttgttctttattggagaatttagtatcgctgtaatacttttgtgcatgataataagccgctttatgatgatatggttattagttgagctcatagctgcctatggcaatttcaagatgcctaacaccactttgataagtcgaatcttgtgagttctcaacatgtaacttcttctcatataacaggggttgattttgagttgaatttggcagagtttaatttgtttatggatgctagtatttgctcgaaaaggaggtaatttggcatggggcagttgtgttacattctaatggtgatgtgctttgttgcgttactactctagtcgttggcatgcttgaaatgcatgtggcaaaggcttaaaccttgctacaaggtcttcttctatgtaggc

SEQ ID NO: 389910 - DNA, 841 bp, Cannabis indica
cggcggttgcgaggtgtcgcgtggcgggggtggttgggatcggaggtcggcaattgataatgtttgagatcggattaggaatgagatggtaatatttgaaatgggtagggttttttagagaaaatgaaaaaaaaatggggaaagaagaagagtaaatggctcgagaatgggaaatgtgacttttaatgtgcacactataagagctaggcgacaagtggagcgacaattgtcgcccctaatgccttgattgtatcaagtggcagggcattaggggcgacattgtcgcccctaatagtgtgagcgggaaaattcccgcctaaaagtaacgtttgattttcaacttatattatgtcgcccctaataattttttgtcgcttctaatacttttaggggcgacacttgtcgctcctaaagcttcctatttttttttaaaaaaaaataagactatttttttaggggcgacttttggtttggagagtttaactctcctttctggcttggtaattgtaactttgttgttttctcttgagtttattaagttgcaattacttaaaaaaaaactttttgtattactccttccaaaataaaaaattaggtattaaagtgcaataaaatattaattttttatattattgtcgccaaaaaccatttgggtattaaaatatgataataaaacactttaagtttaagtattattaccacaaatatgtttttgtgtatatattgctaagggcatctccaatgaaaaaacttaaatttagtgttaaatcaacaccaaaaaattactgtttcaacaataatttttttttttttattttcaaccacaacactaaaaattaca

SEQ ID NO: 389911 - DNA, 640 bp, Cannabis indica
aaaaaaaataaaaaatgttggttgaagaaatgagcatcccgtcacatgttaccacgtgagtgagtggtcggggcctgtaataagctgctgctctcgtgatggtatagtaataagagtttttacactatatattgaaattttttacttttttattgtggggaggaatttttttttcaaaaatactgtatattgtgttaagtttttttaattgtttcacaattgttttttagttgttctattattgttttaattatactgttttgttatttaatggttgttttataaacttttacccaaaatttattatttttgtaaaatctccttattattaataatattagactgtgtaagttgcaagttacaactagtgttttctttttagcatgaagatattataaggatcatttagagcattttcaatacaagtaaagattaaaattactataaaatgttacatcatcttaaatatatataatacatattaataaaattaaaataaaatataatttaaatactattaaaatatttgtaaaggaggaatatacatcctttaaaatagaaaattgatttacatcatcagttggaaaatgatttttccataattctttaatttgttttttttttttttttttaaaaaact

SEQ ID NO: 389912 - DNA, 900 bp, Cannabis indica
aaaaaaaattgttagctagattttttattccaattaggattgagatgtacaatagtaccttaaatttagaaactaagttagtaaatatactacttttttttaaaaaaaaaaaattaaagaaaattgccaaatataataaattagctaataaaattataaaatacattactacataattttttttaaaaaaatatataataatttaattaatatataatattttctccatattgttaccttgtaacaaaaacgaataaatatattagatcatgaaatatatacaacagtatttgatatatcgtatcactgaaaattaatatatctatatatataaaggagagataacgtgacactctcaaatttttctaataagtattatttgttgtctccttaattttctttctttaatcactacaaaaaatattacttttagtcacaacaaaacttgtgactaaaagtgaaaaaattgtaacttattataaattatcattcctatgttgtgactaaaaggttcgtggctaaaataatatgtactaatgatgcttcacttagctagcttctctatttgtgtcatgtcctctgacatgtgatttgtctctattctatagagtttttctttctttgttcattattttttctgattttcaccatggcgtccagtagccgatccacaactgggttggaacagcaatggaaagacatctgtttagaagaagaagaagaaaatgaagtggcatacgagaaggaggaagtcgaagagattgaatttgatgatcgttggtgtcttgttgggcgattattaactgggaaagtgtctgattttcagatatttcaaaacatgatagcggatttatggaaacccgggaaaggcatgtatatcaagattcttgaacaaaccgg

SEQ ID NO: 389913 - DNA, 1626 bp, Cannabis indica
ataattaatattatgcaacattcattttaacacacacctcatcttatcctactttctcaaacacacttttatattctaacattatgttcaaaaagtaatttttcttttatatttagaaaatgtttatttttaattttctactacaagatagaataaaatcttcaacaacgagtgaagtgattgaattatgctagtggatggactaaatatagttttttaaaaaattatgagttattcattcaataaatacagatttattactataattttttcgttttaaattattgtgacaatttaaaattgattactattagtataagtccattctcaagttatttataatttgtgaatttatcttaaaaaatgattggttgaattgtattaacacataaatgtgcataaatttgtgtctccacatattatattagaattttatattttaaataaaatttaattttaatataatatcttatttactatccataaaaattatgaattatattttgaccttgtcatatattttgttcacaagtttatttcatgattatatgtttaatatttaagttctattaaatctttaactgtttaccgagattcttaaaaatcgaattaataaaagattaagctaagaaaatatgattattaagtaaagaagataattttttttcgtgattgcactacaacaaaattaggctttagagacagtttttaagggctttcaacgtcaattttggcaaaatttactatcaacgttgttccaggcgacgttgtaggggtaaatacaaccgccgacataggggccttatggtgttggttattataaaattatcgacgccatagagcccctataccaactgacgctatagggccctatggagtcggttattatgaaataaccgacgccataggatcttcctataattttttttcagctttacaattttgtgttttagcaaattttttatatatatatatattattttattattaatataattaaattaagtataaattacatatgataagcataaataaaaattaaattgaaaagttaaataaatacacattagcattgggtattgatttgagatggtgcagattttacttcgagtatatatgatggggtgcaaaaagtgaggtgagtgaagagcacttagtagctttatttgaatggcataactttctcatttcttaactaatttagtaatgtgatcacttatttttatataatttttcaagaccaataaaatgaaacaataatttaaggactaggataaatagaaaaaatcaaagaaagggttaaactttgcatgaaactttgtgaaaacttcgaacattaataacttttgatctggttgtctaaaaaaattctcttttgaatactaaaatcatattatgcactccttttacccaatcgtttgtactttattttactattttacttaaaataaactaatagaaaattcttatgttaagtaatagaatcaatgtttatgatgtatttattaattctactacaatgaaatgtgcaatactattttcctattatatctcttctgtatttaaataaaatcatagttgtaatacccgaaattaagaaaaagattagcaaaatcctaattagat

SEQ ID NO: 389914 - DNA, 1296 bp, Cannabis indica
aaaatatattttgtcacaataaattgtaatttttgtgactaataaacggactatttacataagaataataatttataattagtcacaacttttttatttttagttataaattttattgggactaaaagtaaaaaattttgtactgtgtatacataccataatcggatccagaggtagctaacgccagaacctgttgctgaggatgaaaattagcacataaaattattaagtacagagataaaatataagcaatgaatgattccatttctgtattattctagtttttaatttcttataatatatgtgttatatatatgctacgatattgtgtacagatatgtgaagtgaaagctctatatttatatacaggaaacgaaatggatggcatgcatgcaaattcaattatttaatatattatataatttaataaaagattgctaatcacgtgtgaaaaaaacagctagatatatagatacaagcactctaaaaaaatatttttttttaaatagtcgggtaaggtattatcgtcggcttatcttacaactgtcccctatcctatcaatacaaaattgagtagaataggcgtcgatgaaaaaaaattattaagaatattaccgaccataaaaattgacggcaataatagataaaattgccatcagctttaagccaatagcctaacactataaacgtcgattttggacaataagctatcagtagccgacagttcaaaaccgacacttacctatagtgtttgaaattgaatacggttggcctttttttggacgataaggcctataccataaaatgagttaaccaaggtatagtgacatttgaggacaggattatgtttagtccagactcaatggtacccattaattgcttttatggtcaaatgacattttgttgatccccacgtttcttttttaatatcacttgtttaaaatgagtacctttaatcatatttgatcacgaccacacacagcatatctacaaaaagaaaaatgatagcttaatgattctatataaatatagtaggggcctctcaaaaagaccccttcagttgaagtctctaacagcctataagaagttgacacctcatttgataaagttgtgttttatttgataacgagaaacatcgaattattaaccatttttattttaatattatttttttaaaaaatactattatgaacacaataaatttctcattaacatcatctaaatattttaactagggttggacatccgatccaatctaatatttttttcctcatccgatccaatctaattagtaat

SEQ ID NO: 389915 - DNA, 1895 bp, Cannabis indica
attctctcaggtatgaattttacaatacttttaaaacatatatactgtggagtgttatgatcagcaagaacaaatcaacagccagaaaatgataatgacaagttataataagatcaagaattaaatgaacaaaggcaattaaaactaataaaaatatgatgtagtttcaccttatagccacaacagtacaaagtcaccaactgttatatctgacagttagttaagttagttaatatctaaattataagttaatgattgtttggctttatggtgcaggagaatgttggtttcatattctcaatcggttcgatcgggtcattagtgggagctgtactctaccaaaatgttctcaaggattatccatttagagacttacttttctggacacagttactatatggcttttcaggaatgctagacttagtgctggtttcgcgattgaatctgaaattcggcatccctgattacttctttgtagtgattgatgaaagtttatctcaaatgattggaaggcttaaatggatgcctcttcttgtgctcagcacaaagctttgtccttcgggtattgaaggcaccttcttcgctctgctgatgtctatcgataacattggacttctctcgtcttcgtggggtggtggcgttctgcttcatgtgttgaagattactcgaacacaattcgataaactatggcttgcaactttgattaggaacatattgagagttagtcctctaatgctgctatttttggtaccgaaaaatgattctaaatcttgcattcttcccatggaaaattttgacatagaagaggagactgaaatagaagaggcaaagaatgttgaattggtttcccttgtaaacaatttggattatggtagatagccaaaacagaagaatctctcaatctcaccccacattgtgagtgagaggaaaagagaaatagttcatctaattaattaattattattaccattgttaatgttgatgttattaatataataattattgcctaaatatagaagtcaattaggactcttatttatatatatgggtacaatcttaatgaatattacttataaatagatattaatagaaaattttgagtttctatacttaattttgctatctaattaaaaaagtttgaggttgttctattgagttaagagagaaataaaaaaaaataaagttaatttgagttaaagaaagagataaaattaatgttaaatataaacatatttttaagaaaatgagagaattttttaactaaatagtaaaattaagcacataaattttaatttttcttttattattgttcattagattaaaatctcatttttgaaaagtagtatttttaaaattggcatttaattatgtatattatatatttttttaataaaaccaagaaataagcattcattatatgaaaaacttataaataaatgttccaaataatgtgagatagtcttctaaggacttcaaaatgggcctttccaattttttaataattcacaaatatattccaataatttttctataagaattgactgaatatacagtatatatactaaactacactaaagagaaaaagagagtgaacctaaagctgcatatcttagtggtaccaattgaaaattgttgctaccaaaccaaatcaaatcaaatccataccaaactcatatcatacacaaacatatcaatataataaagaagtttatcttctaataaccacttaactaagacaattaagacaaaacagtactaacaaataactagttaaaaacaaatctttagtgttgacaatatacagagtatgctgcatattgttttctcttgaactttaaagcagctaaaaaatctgcattttgttaatagacaatgtttctaaagaaggtgaaatc

SEQ ID NO: 389916 - DNA, 1245 bp, Cannabis indica
taactggtcatgtctatataaatcatacaaactatctgttaataattagatacatatctaatctttaaaaaagagttaattaataattaaggtaggactaagctaatcttatggttctccatcaacgactttcccacatccataggtatccaactgagttcctaaaagaaatatagagggtgagcttataaagtccaataggaaaacaactaatatcaaatgactatttatttaataaaaattcatgcatggttagtgttatccgcatttttggtacaatacacatggcctccaaacccacctagataggaccttccgagtgttattttggttatgagctcatgataccttttgcccttgatatgtcgagctccggtatcatgagcttggagggaaagggaggtgcgttctcagaagacccttccgatttccttgtttgttttctcctataaataacaaaactctagctgtcatattggcccggaagatcatatcgcaatcaaaaaagaaacttcccataacaagcgtagggcaattatttcagaatattttcccattataatcggatacagttttaacctgattaaatcaagcctgattttcctagttagcagattgtattcttcatgggctggacttcatgagtaagcccaaagacattgttcagttgtaaactccccagtagagagaaaatgggaaaccctaatgtaattcttcaactactataaatacccaactaatctcatagattaagggttgaattctctcgtgttcttttgctcaggaaaacataataagatacatcatgtatcccttcgagaatatttacaagtaaacacttcactgaataaaacggactcgtggactaaggctagttaacgccccaatcatgtaaaaattgtttgtctcttattatattatttcttttaattattgtttcttcaattcttattattttattctgtttccaaaaatcacgggaaacagatagcttttataataaaatatttcatcaccattatcaaaatgtgtaaacaaagtagagagactacaaataatcacaatatcaagcgtcaaatgcatatcacaccgtccactagactcctagctctcaataccaatcatagaaaacgacatccaaaaactgggtagtcgcacctgataaccaccataataccggggctcaaatttaatgcactccctgtacagattttaggtatttcacctacaggtgagtgcacacct

SEQ ID NO: 389917 - DNA, 709 bp, Cannabis indica
catagatatagaatagaatagtttttcaagttacatacccttacaaatagaagctaaaacacaacaaaacaaaaccattatcatatagttcgtatcaaacattcaattctgcatattgaaattaatatatatatatatatataaatatatatatataataaacatgatttttgttacaattatattacaaaagaaatacaaaaaatagtaagactagaataggaaatgcttatcgaattatctcaactcaaagaggacaaatgaagaaaacaagaatgaaagttgaacgagttaattctattctaaacaaaatatttattttatttcttatttaaatagtaaatactaaaataatcggattaacacaaatcagtagaatcagaaacttatacataatgtgatctcatttttcttttagcctattattaaattgttgatgacaagtgtacaaatataaaatggatataatgtcttgtctcatgacatgttttgaaagtttttgggttactgctgtatgattctgatttttttctgtgaatctcggtttgtctcttgtagttgtttggatctttctgtgatggcttcgagtagtatggcagggggtgattggacagatcaatatgctcaattacaattggaggaggaggaagaaagggttctgatttctgatgatcaagagggagaagagcaagcttttgatgacaggtgg

SEQ ID NO: 389918 - DNA, 1404 bp, Cannabis indica
gagtcataaccatcactcatcactgatcttgaatcaccaaactttagcctttccagacacatccttttgatatgccctgttttcttacaatgaaaacatttgacgttctttcagtcatttgactgtgatttcgatcttgattttccttttgttcctttatggtttcccctcttctcacttctacctctcgtatataatccatgaccatttctagagttctttaactaactcctttgattcagttcttttgaattcaaggctgattgaacatcattgagtgtaattgactctcctccatacaatattgtatcattgaaatgtacaaataagttcagtaaagaactaagtaacaacaatgattgatcttcgtcttcaatggtaaccccaatattttcaagatcgatgattaacttgttaaactcgtcaatctatttctaatagatttatcttccatcatcttgaacgaatacaaggactgcttcaggtatataatgtattcaccaatgattttatcatgtacaaactttcatgcttcaacaaaatccaacccgctgtggcttctttggtgatctttccgagaaccttatctccaagatacaaaatgattgcactatgagcctttgtaagaatctatttcttctcctttttagacatagaattaggaacagatttttctccaagaataggctcatacaatccttggtgaaccagtagggccttcatcttcattctccacaatccaaaatcattcgcgaatcgctgaacatttccacaatgtattttgctacaaccatgattgcgaaccttgctttgatatcgatttgttctgaatcaatcaatgacttacgatgaaagagcactagattaacaaacaagcactcaagaacaatactataaaagaatcacaagaaccaaataatgaattaaagcagtaaaacaatgagaagataacaacaaggtttaatgagttcgagccatgtgcaattctctacatctcggttggaacaccagcaaccatatctttattgatatttgtttgacaaggttaccagaatctttcatactttcacagagattttaagacaaactttctcttcacacttttcgactccctctttccctaaccttaacaacacgattaatctcaagctatcaaatgatctgatacccgatggattacaaaggtgatagctacataaaggtttgtattgttgctaaaattagcttcgctgatattaatgctaattaatgctgagtcagctctagaaccacattcaacgtcagctccctcaaacgttcggatatttctttccagccacattgcccatactatatagccaaacttgatgtttgtcacaactttaagttgtgtttactgttgagaatcatggggttccatctcaa

SEQ ID NO: 389919 - DNA, 1123 bp, Cannabis indica
atatatattttattaaatataattatattcttatatggaggtataattttttaacatgagattttaaaaatatataactaattacaatttaaaacttattcttatatataactagccaaaattaagatttaattttttttataataaattagaggttatatagagtgttattagatagagattctatattattgtattaggtgaatatatatagcatgcactcttggccaatgatatggttagcttagttgtatttggaatcattgtttttatttctttcttgtcatgttttaaatttagctttgagtacaaccacctcttgtgtaaacatctgtactattatggtcttttaggggcttacaaggcagctttactaaataaaatttagtaaaaatatgttattataaaaccacttaaggcgatgttgcttggaattgtagaggtttggggcaaacctttacaaatttgaaattaaaagccctgattcggttgggcgctcctgatttcatttttattatcgaattaaaagtggacgctgctagtctggtacgttcccttaataatttacatttttatcataatattgttgttgctgctgtggatgtgcgggggtcttattttggcttggaagaggggttttatatttgaaagtatttcgatttcaaagaattagatatcgggtcttgtgttttttgactcagagcatcatccgtggttattgtcttgtgtttatgagcctccttacttccatgagaaaaagagattttggtcagacttgatggatcttggaaataagtttggttgattatgagtgatgtaaattttgtcctaactaacttagagtgcgttgggtctaaagggaaggatcagttcctcccctttatcttgaagcttattaattgtcatgctttgattgatttacccattaaaggtgattacgtgacttgggataaccatagagatggagagaatcacattaagtcggctgtaaagaccgcttagtttaatttggaaattagcagttaatcatgattaattatgaaattatttatagctatttaaataattatttatactgttattagtgaattctgagatgcattttatgtcatttagtagtttt

SEQ ID NO: 389920 - DNA, 1643 bp, Cannabis indica
cttgtacaaccagagctattacatgaatagctaatacaactcgtattaaactaatcagcctctatataattccttaaatcaaactctatcattccctcttatgttctttatttctaagctttggattctaatagttacaattatttgaacaaattaactttacaaaattctttactcttgtaacttccctatcccaaagagccttgtttctagtcctccatatcatgtatctgtatgtacaagcattaaaaacgagaatacatatattctttcgcgatttactatgtttgcatctgcctatcaagttcaacagccctttaaattggtattgattggtgcttatacagatccaattcaaaagttgtctgagatagaatttgctaaattacaacgagagagatcaggccttggtttggaaaatccctctctcaaatggctatggcaatgataattggtattggatgaaggaagacaatggtttattcacggtcaaaagcgcctatgcactaaacaagagattaatggcagtaatgttatggcggctaattttgggttttgaaagcaactatggcaattgaagcttcctccaaaggtccttaattttttgtggagagtctcaactaatttcctacccactcggtttcaactgatgacaaaacatgtgcctatcaacactcaatgtcccttctgtgatgcagctcctgaaacaccattgcatgtcctggttcgatgtgcgtttgctcaaagctactggtgtttgtctcgggttcctggtgtggcagctgctgcaatgacttttacagcttggttcgaggaaggtttgggtgtttggactatgtccgagaggttggaggctgctatgttgtgtttgtcgattttgaaacacaagaacgagctggtatggaactctaaaatgcatgaggttagtgatgttgtgacactagctaaactaaacttttttgattggtataatgctcaaaagaataccctgcatactcaagaagtaaattgttcggttgatatggatttggagcattggacccctcccaaatttcctacaataaaagttaatgttgatggagcaattttcacaaatgaaaggcgttttggtattggtttggtaggtgttcggttgctgggatagtcttacaagcaaagaggataagaaaagtgtgtattttgaagccacatgtggttgaggctattggcataaaggaagctttaagttggattaaagcaaatgaataggaaaaatagttgtggttgagtcagattgcttgagagtcatcagagatttacaaaagtttaaacatatggcttctccttatgaccatattatctcggattgtatgactttgtgttcggatatttttggtgtttcttttaactttgtaaaatgatatgctaataaggttgcgcatgttcttccgcgatcttctctttcttaggctgattgtaatttttctagggatgttttacctacggtaattgcatccttagtttcagatgatttgatttaataaaactcatcattattcaaaaaattctacgttaaaagtaaaaaaattgtgactaattataaattatcatttctatgttgtggctaaaaggtatgtggttaaaagtattagtcacaaaagtta

SEQ ID NO: 389921 - DNA, 1225 bp, Cannabis indica
actccacacgctactgaggccagtaccgttaaaggacgatttgaccattggctggtaagaaccttcttcatcgtgtggcatacaactgctgtgaggattcttgtgcgaactaggacacgtatcgcgcaaaggtctctcctttgcaaaatactctctaaccaggtcattgagcaaaaaacatatttgaatggtgtgtacgcgtactaccatggcctgacacgggggacaagatctgaccttgtgtcagaaaaaggtgtaaccatctatggagcgactttcacatgacgctgacatggccaacccgagacctctatcgcgctccggatcctttaccaaaggaagtaattctagggagtcatctgctcccattacctctgagatctgaggggcgctcattttcttgataactttgactaattctcgttgctgctgtattcttccctccgattgcgccacatgtctcattcgtaaaagcttagataacaaccataaaaaccaacacaactcgggtttactcatcgccgtgatgtcatctttcatgccacgtgtcaacattgatgtccacgttactagagaaaattttcgggttaacgataattgttgttaggtttcttatatatcggttgcctaatgcctcattaggcaacagtactggaaatgttgtctcattaggcaattcaattggataattgttgtctcattagataacaatactagtgttggttgtctcattaggcaacaatacttgagttggttgtcttactagacaacgaagaaatagttactttataaagtaacagtttagtttgtcttatttgataaatatttggtattagtgattaattgcattgtgttattagatttcgtgtttatggaattatacatgtgaatacttgaatatgtttaaatgtgatatagatcatatttgtatattgttatgaatgtttgtgttattttttgatgagtttttataatttacgagtgctttgtgatgcatataagctcataggtcagaggacttctcgacaaatgtacatatcagctcattcggctagcagtgccgagttgttgggatttcgttatggcccttttgagtttcaagtatattttttttgatgcggtgatcaaaatcacacatgattaaaaaagaagcaatccacaatcggcagcggcacctcctcgaaccaagttagctcattgttgtgaaaattatatacgcaagtat

SEQ ID NO: 389922 - DNA, 715 bp, Cannabis indica
gagatagtgggttcccggtcctagtgcaagtaatggtaccccacgctgaggcgtggtggagcagggacgtgcatgtaatgatgttcctggagcttaagaatgtcctacccactgtagaggatttatagagctctattgtctgggaacaatcatgtttccatgtagaaccccctttctgggataaatgattgcgatgcgaacccactatcccaaatatctcgctcaaaccaaaatttcaatctcatccttcaaataatcacacttgtatgtagtgtgacccttctccccatgagactcacatcctgagtttcaatcatgtatatttcttcctccatgtgacgttcacagaggtttcctgtaatggaccatattgtaggttgctttgtagacattttcctgagtgtctattaaacttgtatactaggtgtatttatggtcataatccttcctttgcttttttgaagaatcactacggttgtggctcttaacccctctcttgctcgtggaatgaccggcattagaatccaagatcttagtttttatttgtcttggagccacgctatatccgatctgtgccacaccgtatttggaaaaatagttctgtgtaggcgcgagaccggaggtagtatgtgttgggttttatgccctaaataaaactcatttcaatataatcagatttacttactaatatagatcagaaataacatttaatgtt

SEQ ID NO: 389923 - DNA, 557 bp, Cannabis indica
ggggaaataagagattgtttgcttgtgtttttcaatctttaaaattgcatagaaaataatttttgttattttaacaatttaatacgatttgtctaatgcttcataataactattttataatttttttactaaaaatatattaatattctataccttaccacgacatgaatcagctcacctcggacccgaccccgattcagggatcggaccccagactcagactccaggcctagaccccaaaccccaaacccggacccaaagaatggagctcggacctcgggccctaggcccgacagttggagcgtgaccccaagccaggactcggaatcgaactcgaccccagacccatacccaagtatgtgagaaaatataaatgtctattctatataaaatgtggctatataacagaattcttagtttatgagaaattatttggtgacattattagatgttgccacgtaaagggtcagcattcatgtagttagttaaacctaaatataattaatctactgttgcaattaataataaatatttttttattaaaaattattttcaaa

SEQ ID NO: 389924 - DNA, 1464 bp, Cannabis indica
gaccttggagactcgatcggaggaaaaaaaaatatcataataggttaagttagttgttctgatgagagtatcatggcaagtttatattagaattactgggatatttaaagatacttgaggttgacttgatgccctaggattagagatttcttagtggttcagaaatgacaaaataaattttgttaattatattttattattattattattattattattattattattattattattaatctagtatatatatgttaaaaaatttaggaaacctaacccactccctctttctttttcatgcaatcaaatcacctccaccaccatcaatttttcttcaattcccagcctaaaaacctgtgttctaagccctagtagtagccagctggtaatccttgaagctggtaatccttgaaggggaaaaggctagagagcccgagatcattgatcgttctctgtacatgtcggccaacacacttagaccgaaacttgaggaaatggcatgtcaaagttagagcagccatgagatggcggtgttctccgttgaatgtacatattgacttttttggcttgtatggacgagtttctacgagttgctgtgtctattttgtattttgacttatgattgtatatagtacttttgtaaaaattttgtaataggggatccccggaacaaaattttagtgtcgttattatattcattactaggaatttgttttagtgaattttttaatattatcacagattttaataattcattaatctactattattaaactaatttctaaaactacacacgtggcatccctataaattagggcgttacaactcggtatcagagcagtcatggttttaaaagtcctaaagattggtcgaatatgtacatttactaaaaagacaggtcaactcgtggtatagtaagtgttttatatttgtttattttttttattacctgcctaattattacaaagcatgatggaaaagtaacatgataataattttgatatgagtatatgtgttagatatgctcattagcattgatatctggttaagttctagatagttggaagttctggatcacgggtgccattagatcatgcaacaatgatcggaccagttgaactgcgagctagggatcagcgtagatggtgaggaagatcatcctcaaccacctcaagactggaaacaagtgtttgctaccatgcaggaaacaattaggtaacaaagggagtcaattcgagacctaacagagcaacatgcttgtcctgcacttatctaacacctcatgtagtgcaacagaatatgggggatcgtagggaaccaatttatgagcagttcaagaaaaaaaaaatctacatgtgtttaagggtggctaagaccttctaaagtaaaagtaatggatgagtataattacctctatctttgacttcatacgagtttaggatcgtaactgttggaaattatttt

SEQ ID NO: 389925 - DNA, 827 bp, Cannabis indica
tcgttagcaccaaatatataaatatcaaaccagaaaaatatagatataaattttacacaatatagttctatataataccatcaattaatcgggatgtgtatgagacaaatacaaatgtaaaaattggtgagattaataaaaggataaactaacatagagaaagatctgtttttgtgcttaatttttcaaaagagaggagatattaatctttttcaaatgagatgagagagatatatataaatttgaaaaatgaattgtgtaattttttagaatttgtctcaaaatattattcccgctatatattagggaaatattttaccgcttaaattttagaaagtgtggccagaaagtgatgaaacttattactgtaattttacatttgacattttctttatttattttaaaaatatataggaaataactgtctacttcctcacatctttatatacacgtatttagttttctataatttaattaaactttacacaaaattaggtgttggtatagtaaaaatttagttataaaaaatagaaaaaatcaattatactttatatatataaattaattattcgtataatagtgggtttgaattttattatttgtatgatgtataatcttccataaaatttaaaaataataatataaatagagaacaatattaactttaatacattttttttctgtacaaactaaaaaacatgtaatacatataaattgaatatggattacaaattaggaatatatgataatttaattgagtactaatcgctaaaataaattgggtataaaagtataacatttgttaattccatttttggcatatttaa

SEQ ID NO: 389926 - DNA, 1199 bp, Cannabis indica
cacggggattggggagtagcagtgcattcagaagactctccctgatggcgaaggagcttatataagccttcgtgttcttttcttgatggagacttgtttacctcccatgtggttgataggattcagatctcacttggttttgactttaggtttgaagtccctaggaaacaggtttggggggggggggggggcgggcggagactcatgctttcgtgggtgccaaatatttatgttaatattttcactttctctttgtaatattagttttaatgatactagtatgtttcattttactggtttctagggttctccggtacatagcaaagacctattacttggaattttcttcataagattttttataatgctcctaatcttccttggcttataatgggagactttaattcctatcttttgaatagtgataaatctgggggtaatttttattctaatgctgacatggagtcttttgctcattttcttgaaaaatttaatcttttccctcttccttatattgggaataaatatacttggaacatggttctacttatgaacatggctgtaagctctgagccttggtgtgatctctttcctaatgcgattctttaccgtttgcccttctatgggttggatcatcgagccttgaagatttctcttaacataaagaataatatttgtcctacttttgttaataaaaaatttggttttgataatatttagcttaaaaatcttgaatttttttatattgtcaaggagtcctggagtattactaatctttccaataatagtgcttttcctcgttttctcgagaagcaaaattcttgcatttcctatcttaagtcttggaatgtctccactcgccatctcttcaaaactaggattaatgctcttagcaaggctataggtgaacttcaaagttcattaccctttaatagtaactctgctaatcaagttaaaagcctacaatctcaacttgatgctcttttgtatgaagaagaggtttattggcatcaaagagctagaattacttggctcaatgttggggataaacatactaaattttttcatcgatttgcgtcttattggaaaaagatcaatactattcggtttcttaaggatgataagggtaatattgttcataattttgagcgcatttgcaatgttgtttgtttcttcttatttttcttcccttctccaat

SEQ ID NO: 389927 - DNA, 1082 bp, Cannabis indica
agaatgtgggtgggatagtcagggttggggagaaacaagagtatgggataatgggaggatggaaattgaggtgaccaaggcttcagggctttcctgttccgataaattaaaatttttgaaaaaaaaaaagtgaaataataaatattataattaaataggttaatggttaaaataattaaatcaagggatttatatataaataaaaaaattatttaaaaattttaattgctaaaataggtctttgttaaatatttatttaattacttaaaaaatagttaattataattaattaattctaaaaatggaatttttacctattggtaacctgctattgcaggtcaaaaaaaaatgtaaccatatggttacaataaaaatgtaaccattgaatagtcacccatatatatatatatatatatattaattgactatgctaatatttttattttttttagtaaatattgatattttattattactattattattattattgatattttttttaaaattaaaatattggtaaaataattaataatgtttaatgtggaggttagtttgctattttactatatgcacaatgttttttagaaaaaaactatatacatgattagttagatattttagttgttatattggtgattttgctctatttttatttcaattattaattaacatattttttttttttgaaaagaaattaatgtagataaaaattgaggaaaaaattagtgtagagttttatgatattatgtcaccacctccatcttcaactttattccaatagtctttttatgacctttcataaatctcaagagtttgtcattaaaaaaaaatgatttttttacatcgaataatttagactaatgactaaattatgatttattcgaagttatcgacaactgtaaaattatcataaagaaaagcttatatttttaaattagagtaatttatggtgaaacccccttatgttttaatttgtatacacttaattctcttatcttttttttggtggcaaaacccctttatgtttttatacatataacccccttatttttttttgtagcaaaaccccccttatgttt

SEQ ID NO: 389928 - DNA, 2556 bp, Cannabis indica
aaaaagaaaaaagaaaaaaaagatgaaaagaaacaaacaataaatttgttattgtgtatctgtagagatctagttagggaattgtaaacatgtgatctctgcagattattgtgaaagaaattaaaaaaaaaataccccaaaaaaatgagaatttgaaacaaagaaattatgcaacaaaaaagcttccattgctgttttattctttttttatttatttttttttttcattttttcaaatttattgatttttggttgcttaaatatttttgaagggctattcttaaaattgttggaagtcatgtatttttctgtgtgataatgatgagtatgctatgtttattttaggatgttactaaattgttttttttttcttttttactggtataatcttattttttccaaaaggatagattagagaaaatatagaaattattaaatagttttaattctcatgggtgactgaaataatttatgatccttgataaaaaataaatgatgtcaattgttgaaacattgataaataaaaaccacataaagactagtattttaatttgacttaatatttttattaagtaaaacattatctctaatctattatatatttcacaaaagctgtcttgttaaagcaaataagaaaaaatcacaaaagttgtgatgaaaatgttagaacatactataaacatatactagatataaggtaatctttattctctagaatagttactgaactttcttatcaagaagagaagtatcattgaagctatgataacttggagaagaagaagtcttgtgttctgggcgaaaactcggccaaagaaaagcgcctatggcgaaatccctcttgtaagctaagtcgccgtgagttggcaagccatactcggtgagaaggcgatcgagcttccactcgggcatgtcttggtaatccttcttggtgtacctcgggtagtgaagtggcatctgaaaatagctaattccattacttgcatctttctttagactccccatcttatagtatagattgttatattctttctccttaacaatgtttttcttctcaaacatttatttactcaaactatatgagtagtattatgaggagtgaaaattatgtatgtagagagagattgaagaagtaaaaggggttattatatagtgtgtagtaggcattaggcaaagtaattaatcacaaggattagttggtttaccttctcaaaaggaaaacacaagaattggctgatttttagctacatgttgtttgtgtgcatatggataattcaccccaaattaattgattttcttatctcatagtcatagctcatatttatgaaaagataaatgctaaggtagccaaatattgcgagagatgacaagaacaagaacaaatattaatataaacccctattttgcaagcgcaagagcattgccattagttactctagatatctagacaatattacaattagtgctatctagcgggtttaacagtttcgccaaagaagacgtggtagatcaagacagagtatgttttttgtgaaatgcctgaataagagtttgacagtctgagtaaacatccccgtagagaatatcaagctactggacaaccttcactctatgtaataggacatgcaacatcaattttgagagcatacttagccttcagtcttcaacttacacattttgttttaataaataatatgagaaattactaaccaagtgtgaagcgcttagtgtagtgttaaaaactttaaggttttaaatagtaatactttagtaaagatatttaaatattaaaataatataaataggtttctgaattaaaattaaaaaaaaaaacaagtaaagataccttagtgcaaataattcctttttttttgaggtcatttttcattttgttatttattaaatttgactaatatatttaatttaactcattaaaacttttataataataagagttaatattattttggattttattttataaaagttattgattagaccatttattttattaaataataaaattttctaaaatagtatacataagatttcaagtttaatttttgacagtttttttttttttaaccaacttgaagataattcttagaaggaatatatacagaaaacataactaattttgttaacacttttagatcgagttattattaagttttattttgacaacaaattaatttaggggtactatttagtactattttagaaaatacagagtaatttctgtagtagaatcttggtagaccctctatttatttcggcatctagaaaattttgaatagttaacaatatcaaaaataatgtttaaataattacttattttcgttattgtaaactacttgaaatttttaaaaaatttatagacttagataactataacatccacgattataaaaaaattgaactaaagtgctttcttgaaaagattaagagtctaccgaaatacaaaattgtcctgtaaacttacccaataaataatattgggaaattctacaatgcacccccttaaaatggatacattgatgcacccttatctgtttt

SEQ ID NO: 389929 - DNA, 1361 bp, Cannabis indica
aaattagtagacttaaattaaatagaaaaatttcaattttttttctgatgagtagatcaattgtattgttcaatcaaaaccattacaacaacacatttataaccaaaacaaacttatcccaaaccaataataatcctttcacctatatgagcagccccctacctttatttatggctatctatacaaatttgtagaaaccaatttttatcaacactgtcatcttacatggtaatgtacctgctaatctaatcttacaatcatgttgtattatctttacagtatgcttaaaatgacatagttttttgttccaaaaaatatcattccgagctcgccaaatatgctacactactgctgcaataatggatagcaccatactcttacgagtgttgctcatcttttttcccttagatatccaccggagaatctaggcaaaatccatccaagccaaactttgataattcccgagcaccttttgctatatgaacaatcaaagaagaggtgattgatattctcttttctcacaccacacaccaagcaatgttgatctatagttggatcatattttgatattcgatttttggtgcgaagcttttaccacattaccaaccctatgacaaatctatgtttaggaataatcaatctattccaaacaaatgtacttcatgtcaccttaacttcttgttcaaatagcatcttatgcctatattgttgtgaaatgaaataatcttgattcatcttttctttattaaacgcattattcacagtaacaaatttcttccaataccagctacaatccgtgggagtctcatactcctaccaattttggtccaccaaatacacactatttatccatttgacaaataagttgtcattttctttggcaattgcccaaacatatttcttcattgcatcctctactcaaccaagagttaaattatccaaaacctcttttcatgagaaagctttgtaaatttcttcaacttctctaagaaatttcttaggtagaatcataatttgagccaatacgaatggattgacaataacacctaattaatcaatgtcactctcctcatatatgacatatttttttagctccatattctgattctattagggtgtatttggaaataattgtgtaattactaggtagaataattactagggtggtaattacacagtatagtaattacactatactgcaaaatgcaaggtgtgcttggatatgaggtggtaattgcatatgaatttctaatgtcttgtttggcaaaatagttagtaattacatgggaaaataatattttttagtagctaatgtttaatatggaaagtttttagtaattacacagtgtaattacattcaa

SEQ ID NO: 389930 - DNA, 1296 bp, Cannabis indica
tgtactgagaatcaaaataaaaagaaagactaacataaaaacactacgtttcatcgtccaccttaataataagggaacttagaaatctgtaagaaaattaactaagaaaagcgttaaactaacccataaaaagggagaaaaaattgcattataaagggtttcagctcaaaaataattaatgagagttttttcttccatatttactcggtttggttacaaggtgttagaattttcaatcttaatttcagcccataacaatttttgtttgaccaaatgatttttaaaattttattcccagcgaatcatataccaagtatcaaaaaaattaaaaataataaaaaattaggaggaagtgcgtatcatataagtgcgtaaataaaaattgaatttaaaataaaacaaaaataaataatatgtatatatttgacagaaatataaatactaatattaatatatattaaaaataaagatagaataataaatatagaaataaatagttgtatataaaacaaaaatataaatattaatattgatgtaaagtgtaaaatttaaaggcagaattaaaatacagaaataaataattgtatatataacagaagtataaatactaatattaatctatagtacaaaatttaaagatgaaatataaattataggtgcaataatttaagactgcgtatttaaatatttaataaaaatataaatattaatattaattataattaataacatataaattttattatatataattataataataatatacttttcagtaatatatataataatatatataataataaaatataaattatatatataaactatttataataaaaataaacttataataataaataaaacttactttactgctaaaaaaatgtaatataatatgtataatataataaatagtagaaaaattatactaactttgattaaagtagtcttttcttcttacggtaccctggtaatggtgccaaaaacttgttggtaccaaaatagtatattttacattcattaacttgcaagcgcaaaattttttattatacttatttaatataagttattaaactctaatctagttccaaaaatagtgaggtttttggtaataaaataaagtggttagaaataacagtaacatatattttcagtgatatttgagggaattatgaagggttcagaatctacttaaatgtatacaaaatatttatatttatattgattctcataatttaattagtaatcaaagctgttaattccatttttggcatatttaattgacaaaaatat

SEQ ID NO: 389931 - DNA, 549 bp, Cannabis indica
aaaatagaattaattctaaactattttttaagaaattaatttctaactttgttttaatactcttttatctcattctcattcacaacatttgcaaaactattagtttaaaatattcaatatttacatatatatgtatacaatacataaaatactcatatatctcattctcattcacaatacatatttaatataacacaaagtacacatacatgtataatccgaccaccacgcacaaccacaaaaatacaatcttaataatatagaataaccctcaaaatatttacaaaataaaaaataaagcaatgtacattgctaaatttattaaaaattagattcatacctaatatcagttgagataatgttttcaacaccaaaaactgcggccatagctacaaccaccactaaaaaaactgctactttgagtgacaaccttttagtcacaacataaatttttttggaaacaaaatgtgacttttagtcacacaaaaagttactagtgactaaaacatagtattaaattacaagttgtcactaatttagctttagtca

SEQ ID NO: 389932 - DNA, 1715 bp, Cannabis indica
ttatgttgaaaaagttcttaaaatatttaaaatgagtaaagctaaagcagtcagttctccacttgcaggctatttcaagctaagctccaaacattgtcctacaagtgagagggataaacgtgatatggcttcaataccttactcatctgcagtaggtagtttgatgtatgtaatggtctgtacagggccagatattgctcatgcagttggagttcttagacgattcctactatcctggtaaggattattaggaagcagcaaaatagatattgagatatctgaggtacttccaggttgtgcttatgctttcgctgtggtgaacctatgcttgatgggtatatagatgcatacatggctggtgattatgattccagaaaatccacttcaggattcttgatgacattggtaggggagttatttcatgacaaacaaggttacagaaatgtattgttttgtctactacagaagttgaatacatagttgtaactgaagcttataaaaaagctttatggatgaaaaagtttctacaagaattgggcttgcagaaagaaagatacattgtctactatgatagtcaaagtgccattcacttctccaagaattcaacattccattcaagatccaagcatattgatgttagataactggatttgtgatgtgcctgagatgaaagaattgcacttagaaaggtgcatacgagtgagaatggttctgatatttgacaaagactctgcctaaagagaagcttaaagcttgtaggcgaagatcgggcttggtagagcccaccaactaaggcggatggggagatttattgggtctgccacttgttgttgggcttggattaataaaggataaagcccatttaaatgaaacaattaagagaaaaaaaataaaggggccgggtgatggttgtgtcatggagaacaagctcaaccagcagaaagagaaagaaacaaaaagagagggaaataagagaaagaaagctagagagagaaagaggttttgtcactttactttgaagatcaagtggttaattctcatctattttagctcaaattttgggtagtgaatccttgcaaggtgctctaccaatctatcggttccgatttagtgattgtcctctctaaggtgctcttctacaatactcacttagtgagactcaaactttttttatttgtgtatccatcttttgagatgatgatgatgattgtattggtggtccaagattgtctaatcttgatgttgttatgagcctctagtcttactagagaagaactttgtaatctcattattgaactttagtgatagtggatgatttaagctgactacaatctcgtagttttttcttgcattgagtgtctaggtaaaaatcttgatgtctcacttttatgtttgatttttgtattttatattgcttgtggtgctttagttgatatttgatattgtttattgtagtgtttgataagtatcccatttataacatacaaagaagaaaaatgttataattaattggaataagtttttccaacaatttttttaaggggagattgcacgtctccatgtttaatgtttaagttaaactaattaacataataaaaatattaaaatatatatacatataaaagaaaaaaaatgtacttcatatttaataatgagtcccataaataattctattttttttttttgatttaagcgtttatatattacaacatgtt

SEQ ID NO: 389933 - DNA, 582 bp, Cannabis indica
tggggaagctgcctttgaacgctcgccttggttgaaatcctcccgtctcgtcttcccaattctactgaatagattgccctccagtctgcaattacatattttgatgattaataatatacatacgcacacagttatttataattatctgttcgaagtttatacgtgactcgctactattttgttatctatatgttcataccaaacacatgatcgaatgaatataaataaattaattcatttgaccactataacatgacataaatcattatatatttagatcaaatacattgttaaggttctacatatataatcgatcacaatgcatcagagaaaataggtcaaatggatatatatttatttatttgatatatagaaataaaaatgattccacaagtatatatatgttacttattttttaattaatgcatctacatattactataattttatatatttgatacaatacaatcatacaatgattaattagggtgtgcttaattaactaaaaccatactagctgcgtcaaatatatattttgtagagtgatagtaatacgtcagattataaatatatttatatata

SEQ ID NO: 389934 - DNA, 2077 bp, Cannabis indica
tttttttacattttttacatatttttgctttttttttacaagttgttcaattagtatattttcaaaaaacaacggtgttttcttgttgccatcctgtagcaacaacatgaaaataacgaaaaaataatccttcatatttttgtaaaaaaaattataaattcatatttttctaattcgttttatcaattttgaatatttataaaaatatcccatattataattataattataatttggatgggatatatgcagcttgcggcaggtcttttgggtgtgtcagcaagccaagatgctgtaattagaacattgttatagatcgtagagagatgagagtggagccatataatataactgtggcagagttcacgcaaggaatttctgagctttggaacaggttgggaagaggaggtttgaaagatgaagggcttattgtaccaatagccctaggagctgaaggaagagtttctggaaatgtgctctctgctgatcaaaactcgcttttgtatggaaggacaccattggaggttgttagaattgtttatggaactggtaatgaaaccatgtttgggggtttctttcctaggggagctaatggtcgcattgctaagtcttgtctacttgtctcataagcataatatatatatatatatatatgattatttccatgcatatataaataatacatacgtacctactaaataatgtaacaatctgttctccatctaaaactcctaatataaaagagagttgatgatcaagaaagtagtactataataaataaataaataaataaaaataaataaataaataaataactacaaaaatgacaaataaagtttgtactttataattaataataatataaataaaaaatttaaattattaaactctagttctatatatatcttggattatatttctaattaatgcgggtttatatatatttgtgtatattacttaaagttagagcgaccatttgaatgattatgcacgttattataggtattaaagtgtcatgagttaaatgtacaaatacttagaaattattgaggagctaattataaattagaaatactaaaattgataattaggttatataatagtagtggttcctaaaaataagagtcattatattctcatctttcccaattaagagaaaaaattagacaaatctttaaattttgtattcttgaaagattattacccaataaaatttagtctacggattaagatcatcattactaaattaaatatctctattaagaaattaaggtacgtttttattattaatattttctccttctcttcgaatcatcaagggctttaaatctattgctatacacttttaataatatgtaatatatttacgtatgatattgtatattttatgagtaaaaaaaatttatatatatatatatactgattattgtctatacaactgttaaagtaaaataaattttaccactagagaattaatgaggatcacctaattgatagttgtgatgacagctatcccataatgaggttgcggaagcggttagtcttttctttgaaattcaaggatttcttttgtacgaataacatattctttcattaatacaaaattggtttttttgacggttaacaagggatcaattatgaaaattattggaaaaggtcagcggaaatttttctcaacggtttagaaccagaagttaactgtaggaaatttaatatagtattttactatcctgaccctacaccaacaaaacaaacaaatcaatttccaaggtcaatttagacctttctctgttcactttgacttttcaaagtcagtccccaaaacggcttcgttttgtctttgaacaaaaccaaagaagagttcgagaaccttctcattcactccctcactctctgaaatgctcgaaacactaacccttgcaaacccagaaatccaaacacaaatccaacaacaagatcagatctacaatgatctgatctaaacaccctcacacacacaaaaaaccagaaagatttaagttagaaaacaccagattttcccgaagttcaccaataaattggctacgtctccgtttga

SEQ ID NO: 389935 - DNA, 1364 bp, Cannabis indica
attattattatttttaaaagaaaaacgtccaaattaaaactgaaattaaatgagaaaaaatttcaagaagaaaaagaatgtgtaaagtatcattaattaattaataagagagtttgcctgtagttatttacttggaaactcaccttgattacataaacatcaatatttgataagttggtgagaaggaaaatattgatggagttaaatgccccgcgtcataacagtcaactctatatttggattttgtcaagttgtttctaaatcaccatcttttagtagtctgaaccaactagtcaagaagactccaaatctgaagcctgagaattgaaaaatgtcgaattggcatcctagaagctaacccgagctcctagggtttcacccagtacctaggttgacatcttgggctagagtttcagttttaaagcctgtcttagtgaagattgctaaaaccttgcacttgaacatgaataagacctgtcacaacatgctagaggcacccaagtcataatcggaacacttcccatttgagacacctaggcagctgatgcccaagccaacctggttgtgcacccagtgccaaggttgactaaaagtcaacctagggttcttccaaaaaaaaatctaaagatgtttctcgggcattcctttcgccttcatccaaaatgaggaaagggtgctttcaggaaagaaaaggatcaacttggaggccaaacaggtgacccaatgccaaggttgacactaagcctggtcacttgcgcccaggttgacacattgtcaaccttggccatttccaatgacgattttgacgaagtcttaagcatattctctgttttcatcaccaattaagatatgggtgcttttgggaaagaaacagagccatctgggagctagaacatggactcagtgctgaggttgacactttgtcaacctgggctagttccaagcatttttcttaggaagtctcctaggaattttctccgttttcatcaattagaaagatataagtgttgtcagggagcaaacgagaccatttgggggccaaaacagggacccaatgcccaggttgacattggtgctgggctctatgcccaggttgacattcaacctggttcgtatgatttcgctcctcaaacataaattttgctccagacattcttcttatcttggtctaaaatagggtaggagatctcattcgcaatctcgaatgccatagaagtaccaaaacgagttccaagaagctcatcaaagagcactcatcgccctggttgacatgtgacctggtgcactgggttctgcttatctaattctagtttttcctcgagcatctaactattttttgtagtaaacgagagctacgacttgtg

SEQ ID NO: 389936 - DNA, 1448 bp, Cannabis indica
aaaaaagccgtaatggatgatggttgacttaatcaatacggggtggaagacgaggccccctacgctcctccagcaaggcatcaagcctcttcttcttctcccagaagcgaacaaggacttcctcaggctttggatagaagtcgagcttgaggttttggccattagtctgccaagccataaaaacgccgtcatcaaagcccttagtgcaatgattgcaaatgacaggggctaggagctcatctcttttaggcttcttcagggcctaatctttaaaatccctaagctccttcaccttaacgctcaaattggccgtcgactgcaagtctgcctgatgcagctcctccatagacttcagcctggcagtcagatcctcgaccgcctccttggcctccctcagctcgcgcctcgccttggccacggcctcgtcctggatcttcagctcctctgccttggcctgtaatgcctcctctccacctgtgcctccctctgttgggcttcctcctagaacgctttcctctcagccgccaggtctctcaaactcttcatggcctcatccatgcccccgaacttggacataacatacccatgatctatcgaagtctttgagaggcttccagtctctacaaaaaactagttaagtatgagagatcgggtgccacagggtagagcataaacgaaaaggaaaacccagtaacaaagacttaccgtggtcatagcagtgctgatatcctgaacttgataaatggcgtttgtggaagagcaggctgcgtatctttttgccgggagttgggtcaaatgggagacgaattggctagtaagtttggaggcgaagggagcaagggcggggccgacgaagtggttgaaccagtcaatcagagggtccatgttcaggtcccaggcgttcttgaaggcctcctcgcgcaaggaatttttttgagcctcccgtaagacctttttcaaggattccacctcggcattccccctgttgtactcatccatggcgtagttgtgtttggcaactcgaagctgctgcctctcctcatcgacgggaactgaagtgaggatgatgcaagaggtacaacatattcttctgcctcaggcggaatccccgagtccgagctaacggccggagtgtcctttctcctaggcttcttagaagattcggcatccaccattttgcccttacgcttccggtccagctgggccataatctcaccttcctcctcctcctcggcctccttgtcctcgtcgatcaagacgatcgtgcctaagggggcgctggaagatgacctccccagggtcaccacctgggcaggcactggaggaagggaagggttcgggctgtaggtttcggcaagagtcgccaagaggtcttccattggcctggctgcttcaaaaagaaataagcaaagtctcagaatggctataagaaagtatgcacatgaaaa

SEQ ID NO: 389937 - DNA, 1044 bp, Cannabis indica
aattgattgattggtgtgaagtgtggaaacattgaattttaatttgaaagaattggactcactataagaaaggaaggtcattttgtctatgcagcaataaattttgttggtaaaagtaattttcactagtgcttagaattgttggtgaaaatggagcactgacatttatgtgctagttgagccccattttgtataattttgcttgtcatatattgcgctaacaaaactttctcgcgaagccaaattatgtgtgaaaaagttttgttagtgcagtttgaattgcttgcaaaaatttcccaaaaatgaggatatacgcgagaaagtttactgacactttgcacttcgctgacaatagatttttacaattttgttttttaatttttacacatttttcacggggctataaaatacatcagtaaaagaatttttgtatatatatttttaaaaaaaggttaaatgaaatgaaatataaatataattttaatttaaaataaacctaaaatttaataaataataatttaaaataatacattaacataatttaaaacgtatattattacacaaaaaaaatactaaaataagagttgtaataatttaaagaaaatactaatgtttacactaaaaatactaaaataatagtttgactacaaattaatgacatcatcgtcatcgtcatcgtcgtcatcgtcattgttgtggctcgaaggggtgatctgtgatgaagacccaatgctaataggagggaatgatattggaaatggggccatctcaggcatgttgatgtcaggaataatgctgaaaaaagtacttgatattagaaattgatacacatttctacaatactaaattaagtctagaattttctacacatttgtagaaaaacatactctaaacttttagataattgtagaataatttagaattttctagacatgtagaaatccaatagaacataggcatttctagaaaactttagtctagaagtttctagttatgcatgcttaagaaatatgtagaaatgtatggataaaatccttgaactag

SEQ ID NO: 389938 - DNA, 2237 bp, Cannabis indica
attgacaaagttgaagtgaagtcattggaagtattccctctacatctttttagtgtttgcctcagcgatagaccatcactttgtctcttagtttacagatttgggttagagttttctttcccaaatgtgttcccaggagccgtgggaatagatggagaagcatgagcatttgtaaaaacagttgaagtgttaacccaattatgcttattagtgattgaaactgattgagtagttggagggtaagtcgcaaaagtattattacacaaagatgctgaaattgcaggcatgtaaattgatgatagattagtgtaattaatatcaggatcatcagatgagagtgtgggtttcacacgatcaatcttctaagcagaggaaagtgaggttagggtagcgtgatgattaagaatgggaggcttaaaataaatggagtgtgatggtaaagtaacatgtggtggagcaacattaatgactagaacatgtgccccattgttgtcattaacttcgttgttaacagtgtgttgggaggactctccatccaagaattgtcgtggctgaggcagaccacgtaactaaagattaggaattgcagcagtgagacttttcttggcaagccgagtcaaaagtggccatgcatcccctttggaaaaatccgttctatatcgatcgcaacttgaagttggcagaggagatcctttgatgtacgactgatactctagtgcaggttcttctccattatccaattgctcaagatatatctggcatttgttatatgggtgaccaattctcccacattccatacaatattccggcaaccgctcgtatcgaaatttaacccagaacttatctttgacatgagtaagagagatcatttgtcctctctttagaggtttggtgacatcaattttaactcagatacgcagaaacgaccccgaaccttcattcagggaatcttcaaaaacatcaatgtactcgccaacaatatttccaagagcaaaagccaaagatttagttttactcaaaaaaggaaggcggaagacttgtacccaaaaatgtgtaaatttaagatcttcagaagtaaaattttttccaatttcaggtgtatgtagaacaaggcggtggttttggaagtggaaaagttcacgattcaggactcggattttatccccctcacatccgaaagagagcataaacatatcagaagattcagaaatttttacaggaaatctcccatcccaatgctcagacatttgattttgcaaagtggacaactaaactttcttctttgtaaaaatcttggcatacagcaccgtatcaatagtaactgagggtgaaatagcttcagaatcatgaaattcgaacactgattcctcatcttcagttaatgtaattttctccttcattttattagtgagcggatccatggtgaaccaaaggaacactgattagaagttgaaaaagagaagaacaggggaaggacactaccaaggaaataacccagaaagaagaaaattcagttaaaaaaacaataactgcataaataactgaagaaaaactgcaattttctgggaaaaagatgaataaaactggtaaaatccatatgggacattaactgccacagagcactaaaaaaacaaaaaaaaaaaataataattacaacatacacatttataagaaaacaaatagattaaaaagctatgtatgccaaaatagataggagtctactataacacctctttaaaatggtgtactataaacttacccaatattaatttacaagatttctattagaaattcattatgcatccttcatttttaaaattaattatatagatattttgtcaagaaaaaaatcattatagatagaagatgagtgctaaggagactctctattgtacaaaaatgtactctattttgcactctctccatcatccaatgacaagtgtcatctttcaagattggtttatttgtgcttaataaacagggtgttcgcggtgcggttttttactattttttcaaaccaacccgcacatgcggtttttctaattttccaaaccgcacccgcaccacgaaactaaaaaatcgcactacaaaaaatagtgtggtgcgatttttgcggtttggactatcaccaaataattaaactatcaaaaatacaataaagtttgagtaacacttgtcaaaaataccataaggcttgaaaataaatatggaaaaaaaattaagtttcaacaatacaa

SEQ ID NO: 389939 - DNA, 1359 bp, Cannabis indica
taacataattgcctcctcaatcgtcacaccactactgttattagttaaggatagtgacctttgatagatgacctctaccaaggtgttctatttcagttggttaaaacaaacataggttttcccgaaattgaaatcattttttaactattatttttctagttggaagatcgatggaccagtaaatagtgacagtgatatgattggattagagaaaattggagaagagcaaggagaaaatcatagaatttaacatgtacacacttcaggctttaatcatggcccaattcggtaatgggatataatttggggctgcaattaatgtttccatttgtgacatgatgatgatcttaataggtgttgtgattgggctgtggatattatataatggctccacatggttcactcatcctaataatagagcatttttattaagttataggggtgttaaatgttatcataagatgtatggtatttaacaattgttagtgacttttttaatgtattaaattaaaagtagttgtgctgtaaggaaaagcaattgtatctgtgctgtgagaaaaagtaactacagcagaactgtgtgtttggtaaattataaatttcaaagtaccgtgagttgttaagatttattattataataatatgacattgttataatctaatttattataatcacaaatatataaaaatttattttttatatatttttaatttttttttcaaatataaatttacatgcacttgataaaaataatttatagtatttttatattatgttttatcaaatgtaaaaataatagaaactcacgtatataagaaaaattctaggttgatgttgtttggaattattaaaataaaatataaattattttttaaaaaaataagaaatttaataattatttattttaatctaattaatttattttaaatatttttaattttctaatatataataaataagtaatatggttttagtacaaataaatttattatgattttttaatcaaaacaactttttctaaaagtaaggttggagcaactttagcttttagctgtagcttcttcaaaaattcttcaaaaaacagttttttgactgcttaccaaacatatttttatcacaacttttttgcaaaacagcttttagccttttcaaaagctgtgccaaacgagccctaagtatgtgacatctgttatttaattattccagctcatgaagcttacttaatagtagaatttacgcacaatataaaaataaaaaaaaattttaaaaaaaggcaattttttgttagcccttattttatggcattttatgcttttttgacttttctatttcatatatttgtagagagagagagagag

SEQ ID NO: 389940 - DNA, 1167 bp, Cannabis indica
aaaaaaaaaaaagaaacataattttactgctaaaaaatagttaaaaatgagataaagaaaaaaagaaattgttattttttaaagagtaatttatagtaaaaaacacttaattaaatattttgaaggtagaaataattgacaagtcagtgtttatgtagcaacatttaattggtccaaattatttttagttattaaaataaaatttctagagaatcatctaatataaaattactacccttttaaaaaagaattaatgttaaataagaattaaattactccatatttatcaaggttttcatccgaagagagttttcatgtaacactggtcgcttagctaatattagggtattcatttaattttgtctacattattttacttatagtatatctgatctgcactaaatatggatttcgtattttaaattcaatctaattcggacaatagttcaaatccaatccaatctaattcaatacgcaaaagtacgaattggatcgattattttaaattagttattttttaatattaaattatttaatatttatttaaaaaatattttttttgatcaatcgggtgatgttttattactccaaatctcaatttgtacaacctacaagcatcctcaattaaaatagaggaccttagactatattatttataatgtgtcaaatcatactttatcactagtataaactttttttgaccatatacatgagattcgacttttagttatattcttaacctgtgtaaacactgtattgctattctttgctttattttcccaatatttgatgtttcgagtacaccaaatgatgtacaccaaggctggaagtgcatcaaccaatgtggcaacttcctgaatttgctcatttttgctttgcctagccatttgacagcacgaaacaaggaattgaaattcacgttccaatgcagccaaatcttggtctggtttaagcattcctgtgagaaagaacaagcaaaaaagaggtgatcaaccgattcctctccattgctgcataacaaggggtctaagtatggtttgaactttatgagtctatccttggtcttaaggctcttaagcatagttagccatagaatgaaattgtgcttaggagagttaagccgactccacacaatggtagttttggttgagttttcatttcggttgc

SEQ ID NO: 389941 - DNA, 1403 bp, Cannabis indica
aacatcaacaacttactgcacagggaaatcgatacgaaaataaaaggaaattaaacagaacaataataaataacaaatagacagtccgagctaaacaacctgtcaagcaagaatctagatttcgcagtttacatcataacaataaaacgttaaagctgaaatattggaactaattcgctgagcaactaaaatccaatgcatctcacatttcctccattcatcagtaattgaacgcagtagagagagagagaacttaccggagattgaaagatacggtacaggcaacaaagtagaagctaaggctttctaggttaattgattaaggattgcgattttcccctcccaaaaatgatctacaccaagttttggaactcgaactggaactgtaactctcgaaccagacagagtatgaaatcccaaaaataaaagaaagaaatttggaaccctaaatactaatttcaattcaaatttgttggcactaaaatgactaaaacaactcgtgccgctcttttatcaaagcttctgccaatcatctaaccagggacattttcgtcacttaactatttaattcccgaacgacgatgtattatgtgtcgtacacgcttaaccattcaaaattatatttataaatttgtgtcgaataagatgttctggtagaagattgtgtttcatagtatattaaaccaattttattgtgagacattaattattttgagatttttaatggaaaaaaatattgtatagagatggttaatattttaataaatgaaaaattagttaaagtgtcaaatttagatttgtttaacacaatgtgacacacaactttttaacaggagatcctattccacaaaataaattaatattatgtttcatctaaattttacaattgcacttcaataaaaagttttttttttactttctaaattaattttatatttaataaagcttaattgtaaatcaaatatagtattgacttattttttgaattaaatttaataaaatatttacactatatatcataaatggtcttagaattttaatttaatttaattttctcactcgaactttgacatgtgttaaactgtgctccatttaacttttcaggtgttaaaaacccaaataattgagattattaaattcaaagatttttgttcaattttattaacaagcgtgtaacatagatagaaatttagaagacacgatttgatatatattaaagttcaggaacatgatttagtatatataaaagtttaagggctcgtttggtacgctgtattgtaatatattgtgttggattgtgttgtattgtataggggtgtacaaaaaattttataaaccgaccaacccgaataactcgcccaaatcaaaccgaaaaaactaataaaaaatacaaaccgaaataa

SEQ ID NO: 389942 - DNA, 1166 bp, Cannabis indica
agaaaggagataaacttttggagaaaaagtaacttcaatacccagaaaatagcctagagaacctaaatctttcatctcaaattgagaagctaattctgactttaacacttcaattccttgtagatcatcgttagtaataatcatatcattgacattttgtcaacctgggccaattttgaggagtttatccaaaaaatcttctaggcatattctccattttcatcaaatattaagattcaaccatttctggggagcaaacggaacttttaagaggcctaaaactggacttagcgcctaggttgacacatgacattgggctcggcgcccaggttgacatatattcaacctaggctgtttccgatcacttttctaaaaaattgatctgggcatcttttcgaccattaaaaataacgaagatacgagtaaactcggggagaaaataaaaattacaagggctttaaaattgagcccaccgcccaggttaacctggtgtactagtttcaatcactcaatgcaaatttttctctaagaattctccccaaatatggtcaaaacggggtaggagacctcgtccctaattttaagaaccttagaagtgtcaataagacatcttggaagctccaaagagagcaaccaacgtaggttgacaaatggcctagagcgctaggttctgtttatccaattctgattttgtctcgagcgtctagtttttcatagtagcttataaagtcaaaagagttaaattcacaaatttttctttacatttccgacaaagtgacttacttgaaaattgggtagtttcaagtctctcctatttctgctaaacagcaacatctccgagaactggtgaccagcttcacaagaacacagaaacaggctaagtgatgtccaaatatcactcaggcataaaaaaaaaaatacatctctggcctattttcctactcacccagcatctaggttgatgtcacatgtcgacttgggtgttggaatgtcaacttgggcaatgggcccaaaatagcctttagtaaaatggtcataatattgatttgattgacacgattcaatttgtgtttcaaagatatttcaatgctctatctgttggattaaaaatcttatgtgggcacatatgtataatgtatatgctattataaagtgtgatacaaaat

SEQ ID NO: 389943 - DNA, 2101 bp, Cannabis indica
taatattaagtgagggaaaaaatgcgctgcagctgatatataaccagaaaatatcaaacttaaccttagaagaagaagaagactatttcttctaggctttacatcaagaagttgagctacaaccaagacactaattttatattataacgacaaacttttttcttttttagtattatttagctgatgaactgacatctcagttaagcacttttgctatacccgaaaagttaaatgatgtcagttaaaatctccctaatgacaacaaatataagactactagatgaataaacagagggtcagtcataagaagatcaggtgcgctacttagttcaaaactatactgcttcacaattgcatcataacagaaaatgcagccttatgtcaaaaagtaaacgagactatgctactacgccttgaaatcaagttttgcctggaaagcaaagatataaaggcatgagaaatagagaaccatcagtagattctggaacaggaagctaagctaaaatctattattgattgctcgttgatgttagcttctgactacctgtcactaaattgcaagcactcaaacaaatgttaagagttaaacaactggaatgcaaaaatttgtgtcaggaatattctaaaattatacagtaaaaattagatgaaaataaggttatgttaatggttagtaatccgtacttctgattggaaccgtgatgaccatacgttcacatcagcacctccatttgaatacattcctccagaagccagggggctagcatgttcaagcccactttgacctaaaactgatgcattccccaacagtgtggttacacgcaatatttctgctccaaaaatgtcaatttccaagaataagatgtaccagtcagcattggttaaaaagttagcagtcaatggatagacaacacgatattttctccaagtcagtaaattaaagcttccccaaaagtaatgaatgttactcaattaatgtactctctaataaatatattaaagaaaaaataaagttattcaaacactaccgctcatgtataataagattagtaaatgagtaacttttatatattgtgatccatattaatagtaagccaagcagtaaggacaaaaatcccccaccaaaaattattgttagttacaaaattaatgagaaagatatgtgtacattccttagtagaagttaagaaaccaatacctagtcatcacaaataaaatcaactctcacaataaagtaacagaatgggcatttgagcctaaaggagaaatgggaaaacagaaaaaaactgtggggaaaaataaaccgaagactcaaagaggtagtccaattccatggacgattgttaacaacaaagctatttgccatcttttacaacaattccaaaatgataagtgaaaaagtgcccataaactaaagtgatatgtcagcagttcccacctatacccttttacgattatgaataatttcggattgtgcagtttttcttttaagattgccaaattcaatcacattctatatgtgagaaaaaagattgttggccaaccgattgatcctcctcgtgcagaaatgtttccacaacaaaatccgacttagattatgaaactgtatgattatgatccataatcaaacaactagtcagccacctacctaacagccgtagataactattctaaatcctatatagaaaaggttatttacagacatctcatatgtaaagtaagtaccactaaaataaaaggcaggagcctttgattaacaatatttcatattcttgcagctaagttcatgtgggtggcaaagtactaagttaactgtttatactcttccgatcatcataaccatctttcacagccaagtaagtctgctcaacagcttggcccttgataattttgagacatttagtggcatcctcaggatctgaggtgccacatatgcaaagatctccctacccatgaaataaactgcaagagaacaaaatataggtgatcacaataacattattgacaccactgtagctctcatctgaagaacttgctaaatccataacatacacaggacagttagatggactttcttaacttctatacttattccctacca

SEQ ID NO: 389944 - DNA, 1199 bp, Cannabis indica
tgtgtagttctcttataccataaattttaacaactataaaagtggttatatatacagaaataatactcaactaatacaacactgtgcgtttccaaacatgctcttactcttttagtcaataagtttttatctaatacaacactagttccatttattgtgggttcagaatggtaataaaaatgacaaagaaattattaattatagcatgtgataaaaatgacaaatgaagtaactactttagtaaacatgacaaagaaagtagttgggcttctttataaaaagacaaacaagttagttagatcaagaaagttttgcaatgtcacataaaattctcatttgttattaattttttgagcaagcctagattattatttttaacaaaaaaaattgtgatcataatatgatgcttaatgtacattataatgtacaaaaaaattgtgccatatattacttattatattttttaattacaaataaacataaaacttaatatactatagacacgtacattatatataattaataataatttaattaagtaattaatatagaaatatgaatattatatttttttattaatttaattacaccaatcacgatacttacctaattactaatcctatcatcagattaataatttcgatattattgttttcagttttataatatagatgaaatcgtaaatgtctaaaatatctcaattttattttaaatttataaacttctattatttattttaaattccaaaagcaatgaaattaaaataaacaaatgagttgaaccctaaattgaaaataattactaaaatggcagcccagtttggtgacaaatataatttagtaattaattatggcgatattcctcgtcacttattgcttgatacattcgagcaaagtctccatcactcaacttgtaaatattaaaaatctaagagatttttcaaagcatagttctcatttttcaaagtgtacactctagtttccctcgcgtggcaatagcaagtttgtctttccttcgttaatatattgtagttgttgaatattggatttttaatcaaccaacgcagaggggtaataaatgtgatttaatcaaaaattacaataataaatacagttaataatactagatattgcaataaatgtaaataaaagatactaaaatttaaagaggttcggtcccagatgtcggtaatagcctac

SEQ ID NO: 389945 - DNA, 897 bp, Cannabis indica
gaaagagacactactagtgacataaacactgcctgaagagtgaacacaaagattacctttttgactgggactaaattcgataaagacgcactttgttgatcgaaattggagtttgttagaattatatggacgaaggtcagggtaataggcacaaccaaaagtttttaagaacttatagttaggagtaaggccaaaaagtttctggataggacatttataatgaagtactggtgtgtgtataggtgattgattaggaaagtggttttttggaaggcttcccaccaaaatcattgaggcatatcggagtgtgctagaagtgttaggctgatttctacaatatgacgatgtttactctcaacttttccattttgttgatgagtataagggcaaggatgcctaaattttactcctatagactcaagatatggctcaaactttttggtattctctgcccaaatctgtttcgacagttttgataggagtgttgagttgtttttcaacttggatttacaatgttttaaaaactggtagagcactgtctttagtttgagaggaaatatccatgtgtaatggctaaaatcatcaatgaagtgtatatagtatcgatagccatgtctagatatattgggggatggtccccgtatgtgtgagtgaacaagttccaagggttgttttgattccttgagagtggagggatagactttgtgatgaactttaccaagttgacagctagagcaaaactgtaaagtagaggataaatatttcactacaagaaatccagcttttaccggcgcattgttgcgccggcaaaagtacactgactgcgccggtaaagctttgccggcgcagttgtgcgccggcaaagcttatctgggaagcttggtcggtaaaggactt

SEQ ID NO: 389946 - DNA, 520 bp, Cannabis indica
aaataattcatcacaactcatcaatttgctcaaaatcatgctctcaaatgaaaattaagctcaaatcacttaattaaacacattcaaactaaacagctactaaaatcactaaaaatatgctcaaacaatgaaacctataaacataatccaaactcaatttggtaccacattctcgaaattggtacaaaccctatccaaacctctaacttaaccataagaaaatcatgagaaaagagggagaactcaccttaccacttaagcaatacttgttggaatatgttttacaaggatctagatttactaccatgtatgttgtttaacatcctaaatatgaatttctaaaacaatataatttaaacacatataaagtttgagaaaccttacattgggtgtagcgaaattaaatggctcctttcgctcagatctctatcccttgtatcctctctgtagcagagtatcaccaagatctgagcccgattctccttctcttgacttggattcttcacagtcttacacacta

SEQ ID NO: 389947 - DNA, 2580 bp, Cannabis indica
tctctctctctctcttcaaactcgtgatagaacccaccaccaccgaaaatataaacaattggatgtaagtcatttgttttgtttatgtttatgtcagaccgagatacgttaaccgaccgatcgagcgagatacgtgactcgaccaattgattgagatacatcaactgaccgagatacgtcagccaaccgaccgaccgagatacgtcatccgatcgaccgatcgagatacgtcagttgaccggccgatcgagatacgtcacctaaccggtcaactgaccaagatacgtcagctaaccgactgaccgagatacatcagccaatccgagatatgtatctcatttgagataagtcatctcttttgagctatctcattccatttgagatgtgtcatctatctagtatctaggatacatatttaataaaatatatagtacttcttttagaatggaccttttatgacttttgatttttttttttttataataatttgggcttgctgatttttctcccaaacaatagatttcttatttcttattatttttttttggtagggatagttttcttatattgaatatcccttttgagcaaaaaagctatatatatgaatgattgttattatattggagtcacgaggtttcgggttcatacacggtgaagagtgcttatcaattattacaataatataaacggcgtggggtgttgatactactacaagacttattcatgtcggtttttaaattaatttttctagaaccgtcgctaataaagttaagtgaatgtttaaaattattgggaatattcaactattctcgacaaatttaaacaagtattttagaatcccgaactgtgcaaaatattcataattttaaaattcaaaaacgagttaaaacgataaccttggtagtttaaaactattgggtatactatacctgatgattttaaactgtcgacaataatagtatacccaacatttttaaatcatcgggaatagcgtgttaaacatataaaaactcaaaaaactctcacattattcaaacattcagattttgctctctagtcttcaaacttgcgatggaacccaccaccaccaccacaaatctctctctctctctctctctctctctcttcaactagtgatggaacccaccaccaccacagagctctctctttctctcccattcattgtgatagtggatctcgagggttggtggcgcctcttcctcatcggtgaccatatgtttaaaaaataattaatctctattatttttattttggaattcatatatttttaaaaaaatttgcatttcgcaaattgtcaggtatctgaggattgtgatttcgacagagctgaccattcttttattgttatattttttttttatctattgtgtatataggtctgaaattttgatatttgtattgtatattgtttatattgtaaggatttgaagatttttttcctatgtaatgatatagctgactgtgcaaaactatcgtcaataatagtatagccgaaggttttgcaagtcgcccaaattataggcgacggtgcaaaggcgatggtgcaaaattatcgcctatagtataggcgactgttataaacagtggattataatgctcaatattctcaataattttgcatcgtcacttattctacctagctttctcaacggttgaatagacgacaatcttaaataccaacgaaaatattttacttgagtgtttaaaatagtcaaaaaatctcaattttttagtagtgtgatttaaaactctaggttttagcgtaatttttgtggtaactcaaaattcctccaaaagtcaaagatcttgtatatggcgtgcttgtactaggtgtcttcttacgatgtattaacttagtttgaaacatgtgacaatacaaagacattgtctccattgtttgtgtgatgatgagactattatgcgtattctcagtttgtttgctgcccaatgtctagattagctaatcttggtgtcggtttggtagttgttgttggagtcaatttttctgtttggttcaaataggttagagaatgggtagggaaggagaagcaagacatggtggttgtgatatgttgggctacctggcgagctcaaaatgaaattatttggaacaagaagattccaagtgtgaatgatgtggttaatttaaaaaagttgtatcttgaataatgaaaaaatgcccaaataaaagatgactatactccattgcctagtgtgcagcataagatgatgactagatttgggtaaagcctcgagatcagaatcaaatcaaggtaaatattgacgctatattgttggctcagaaaactcattctccggattggagttttttgaatttatctttattagttttagatttattggatgtagtttcggactgtaatttcttttctattaacggaaacttcaactttgttgctgatggactagccaagaaagttagaatttctagccatatgactggtttgtttcaaggaaagggaaatctccttgtgatgattcccatctatttgtctttgttttaattgaacttggattctttaaacaaaaaaaaaaaaa

SEQ ID NO: 389948 - DNA, 723 bp, Cannabis indica
aattgaaccctaaaattgtgacgcaattgaatgccaccacgttccttgttctgtgaatttggccatcgtgagaagaattgctgagaggagcgggaaactccacgtggttgacaaccatggaactggagacaatcgcatgctccaatttcaaaccgccataactgctacattattttattttgtctaatcagtacttcgctttcaatttctcaaattttaatttcatccaaatacacgcggtttcgactaatttgtaatctaaactaaaactaactttttataaataaaaaaaaaaaaggaaaaggaaaaaaagaaacacgacatctacaaacgcacacttaactttttaactttaattaaacttttagattaaattaatacataaatcattatttgtaaacattcagatcttatttcctaatgcagtaataaatatttcttcttctttgttctcttcttttaatgggagtaataatggcacttacaataaaaacatcacatccttatttttctcccttcattattccgatgcagcacacgtaatcaagtcataattattgattatgttacattatctttctaattattgttgtcctaatccgaatataatattgcaagtggggtttttgttagatattattataacgggttttagtccatttttctcttacctcttccactttttttctttttcttttggtatggttaaatcttttaaggcag

SEQ ID NO: 389949 - DNA, 1394 bp, Cannabis indica
attcgtaacttgttgactgtatactatcaattcatttattgatgagaaccaccttgcttggaaggcgtaatactgagggagatataaacaatgcatagtgaggcatctaccttgctgtaggtaaaacggtgttagcaagatgaattggttattagaacacttagcgtataatatacgtaataataactaagtgtaataacttgaaggatatgattgtccagtctacaaggccttatggtcaaagagcagttcttaagcttgcttagtacactgttgctcatgtcattgttgtgtatatgaataaaccaagtcatctatgtacaaggcgagatacttccagcgagatacctctaaaagggagttcctatctatgtctgcgttgactgccttaaagatggtttaaatcacagctaagttgtttttaaatgatatttacaggtacttaaatggagcgtatttaaagcccacaattttggggaatactgttatacgattcaaattaaaatataaataactgccaacctatattcctataaataggaacagattttactgaaaaaagggagagaaaaaatcttaaacaaaaaagtagttgactgattgtagaaccctaattctatacccagaaatatctaaatgagatagactcatggaatatgcagagttaatagcaaaaccacataaaatcttggtgtcatttttgtttctattagttttctgaaatttcttataatttttgtgttaagtttattgcaaaaagaggctcaaaatcgttaacgaaaaatatgcgttaacagtttggtgctttcattgagagtctacgtgataaaagctcagaaaatccctcctaacccaagagggaatttcttctccatgcctgataatggggaaaatgacaatattcatcgtgaaaagactaattgtcgtcctggaaaagagccaatgggctcacggaggcaatccacttcaagaactacacgttcaacacgatcaacatgttcaagaagaagccaaaatgataatgatcaaaacccagaaactagggatgaggaaactaacactaatgctagtggttctgtacctatgagcgagggtgcttatgatcccactaggtacgtaccgttggttgagttggaaaatcgccaactgtggtagccgcagccaaggagacttaagaaaaacaacacacaaaccaacctgatcctggagtgagaagaccgtgaggtttaagaaccaggacgcaggatacggctcaagaaaacccccagaacactcaggaggaggaacctagggaacctagcgatgttcctaaagatgaacaacaaataatcaggcacctcgttaagaagtgccctgaagagccttaggattcacaacctaggggaatgaaaaca

SEQ ID NO: 389950 - DNA, 1061 bp, Cannabis indica
tgaaaggaaactgaacaaacctttccgtttaggtcgactgagaggggctgaaggctgcgtttaggttgactgagaggaggagtctttcgcatttaggtcgtgaaagtgatgaacatgcgtttaagtttagttttagggattttactttttgttgacttaaaaagaatttcaacaaaaaaattgaacataaatgtattgcaattaacatcatttaattaaattaatttaaattaaaaaaaactaattatatcacataacatcaacctaatgataaaatttatttatataaaataattatataaaattgtaataatttattaatatataatattttattagaataataagagtgttaataatatttagaaagaaagtagtcttatattaatgaattattatgaataactatagtttttattatggtatatatttaatatttattatatatatttaattaaaattaataatttcaaatacaaaaatataaaaaatatttttttataatcatagttatatatgctgcacattttctagattgctctatatctttcccaatggagtgcatataaaagtgttggatgtatggaatgtgtagatatgaattgttttttaaaacaaaatttgagaagaccgagaaatatgggatctgaaataaagtttcaaaataaactacatactaatttacttaattaataaatttcattaaatgttttcttttttatatattataatcatgtttaaattacctccaagacacacactatagacttgcgaaaccaggactcttgaacatttaaattccattaaatgttcgatctctttgactaatatatatagtaaattaatatatatatctttatatattaaaagtgtctatctaacggcatttcttggtttaacattcttggtttaacagaatatacttaaaaataaaagaatattctgttaaatttaacgattaggtttgatcccgttaaaaaataaacccaataattaaaacaaaaaattaaacaatctttcaaataaacaatcttttaaatattaataatctctttttaaat

SEQ ID NO: 389951 - DNA, 756 bp, Cannabis indica
aatttcgcgaattgatggaaagtattagacccaaagcccctagtttgagatgtgtggctgatctgatatatcgaagaacaagatgctggaacttggggtatctatgcttcctttttggtgctaaaatttgcaaacggattggtgagattcagatcgttaagaatgttaattatgataatctcatctagaaagagtccttagttggaaaattcagtgttaaaggtgcatattgggttgatccaaaagcaagatttggagacaataatgtgctttggagatggatttgggattcgaaagttcatccgcggttgagtatgatgatttggagagttttcaccaagactctccccacgggtgacaagttctgttcttcgagggagaatgtttgccctgtgtgtcatgcagcctcagaaactcccacccatctgtttgcaaggtgtagttttgcctctgcgctctggtttaccggtcctctgccagttagggtcgacttgattcctggcgataacatagctgatctcttatgcaatctttgttcctcactggattctaatttgagagtcgaaatgctatgttgtgctggtgtgatttttgattggatctagaaaaccaggaattggattattcactccactggtacaaggccttgtgtggattattcactaactttagtgatagttaatgtcccttttttaaaataataaagcaaatgtctttttttacttttcaatacctaaaatattctttattatataa

SEQ ID NO: 389952 - DNA, 1680 bp, Cannabis indica
ttttttttatttattataacaccaaaattgggtgtgatagatctatctcaatcatttaagtaaaactatttttaacctttttaactatgcctttatactgttttgacaggtgagagagaggaaaaggaaaaaaaaagaatatatatctaagggacaccgtttggtaagtgcttgaaattgggacaaaatcattgccaattgagaccacctttaattatcttcactactctgctttcggtttccgcaatccctgcaatccatattccaattcagtttcctttgtctgttttcttattttttcataccagagagtttcccttgagagttgaatccattgaaaagagagaagaaagaattgagtaaagcatggcatttgcagggacaacccagaagtgtatggcttgtgacaagactgtttatctagttgacaagctaacagcggataaccgtgtttaccacaaggcctgcttcagatgccaccattgcaaaggcactcttaaggtatttctgctctgatttctctttcactctctctttgaaagtttttatgttttactttttttttatagttctgttctaaacaattcgagcccgaccagatgaaaccttggaactttaattagttgtgtgctgtgttaaattcatttagtttcgtcaacacaagacagacctggctgcttcgaatgttgtctctttggagattgacactctgtagatccaaaccaataatcgataaaagggaaagaactgcattcataggattcatttaaccacaattctagagcaagaatgtcatttaccttcatttcttttcagatgttatgttatccacacttatttgcaggattaagattatattattctaagctatctgttgagtgcaacttgtgagaatgtgattgatgtcttagtcttaaaccatctattaagttgggctacaaatatatgttggacttggacccctatgccattagatacatttgatagattatccaaccccaagcaatctctaataaataaagtcatttgcaacttttctgatcaaaagattatcaaacttgcagcttagcaactaacaactcctttgagggagtgctctactgcaggccacactttgatcagctctttaaaagactggcagtctgacaaagtttcgaaggtagaatccaacatgatgaattttacgaactctctcttttcttttcttaccctttttctttttcctgaggctaatcttggctgtttttattccatcattcatctcagggacacctaaaattgtaaaaccagaaagaccacttgatagtgatgtaatgtctctttaaccagtgtatttttctcttatatttttgctttggcaaagaatctgtttcctaattattcatgctctcaatcctgaatttacaactatcttccaaacagaaacctgctgtggccaaagtaacaagtatgtttgctggaactaaagataaatgtgttggctgtaaagattactgtctatccaactgaaaaggtaaaacacgtgtgtgtgtgtgtttgtgtgggtgtgtgcatatgcatgcaggcgcatgtgtgtccgtatgcgtacacctttattcattaaggaggcgtttggttgggaggaataaaaatataggaataggaatgggaatgagaataggaataggaatggaatggaaa

SEQ ID NO: 389953 - DNA, 859 bp, Cannabis indica
aaaaaattatgatcttttaaaattctataactagacaatagtaaaattgttcaaactagaaaaatgacatatcataaaaacaattcttttatagtttaaaattgaactttcataagtttataattgtgtaatctaatttttttattattttaataataaaaaatatcatatttgttattaaaagtctaatttctaaatatcataaattgtataactctagtttttttttttttttaaaaaaaaaaactaatattaaaaatttataagattttgtttagttggatatgttgccatgaaacttggatgatgggaatgccaaggaccctgagagatggcaattggcccacttagaagaaatatatcatcacgagagataaaccaagcgaaaagatctcccagagggaaacttcttctgggagctcctcgtggtcctagagggtcccactcgccttcacccaactccaagggatcttttattggaattattttaccaagatctagatttactaacaagtatatttcattaacatcctaatattctaaaacaatgaaataaacacataagggtttaaaaaaaaccttacattgggttcagcggaatataatgactccttccgttcaggtctctagcccttgattcctttctgtagcagagcattatcaagatctgaacctggatctctttttctccttcttgagcccgattctccttcttgttgattggattcatcacagtattccacactatgattgagataccacttgatgtgtgtgggcattcactctatcactaatggctgaaattatttagtgtgaagaaaggcttagtgtttcgaattgaagaagaaagaagaaggaa

SEQ ID NO: 389954 - DNA, 2743 bp, Cannabis indica
gacgatgacctttggtatgtggatactggtgccactaatcatgtcagtcatggcaatgttcatcttgacactgctattccataccagggcactgagactctagccgtgggcaatggtaagcaattactcatatcccatattggtcagttatctatcccttctagtccctcctcttccttacatttgcaaaatattttacatgtccctgctatcaagaaaaacctagttagtgtttctcaactcaccactgacaatgatgtctttcttgaattccataaatcttgttgttttgttaaggacaagctaacagggacagtgcttcttaaaggaagggctaaagatggtttataccaacttggagagtcatcaaactcggccattcaatgtcatcttgctacaagctctagggtagatacatcttgttgtacttgttcttgtatgtgtcattcaaatgtacaaaataattcttgtaactctcaagaaattaataaaagtacacaagatatttttgatgtttctcctcaagtttattctgcgtccaaatttaatgatgttaatagttggcatttaaaattaggacatcctgcagataataccttggccaaacttttacctcacatttctcatacagggtctattaaagcattacaattttgcaatgcttgtcatcaaggcaagagccataaattgcctttttctttatccaccagtagggccacccaacctctagctcttatacacactgatttgtggggtccttcccatgttgtgtccaaagatggtttcaaatactatgttcattttcttgatgattatagtagatactgttggatttttccctttaactcaaaaaaatcatgcctttgatgtctttatcaagtttaaaagtcttgtggaaaaacaatttaatctacctattaaaagtgtccaagctgactggggtggtgaatatagaccatttgctcgtttcctatctgaccaagggatccattttcaacatccttgtcctagaacaagtgaacaaaatggtcgtgcggagcgtaaacacagacacatcactgaaactggtctcacattattagctcatgctggtttgagtatggattattggtggtatgccatggcatgtgctgttttcaccatcaatagacttcccacaccagttattggtaatatgagtccttatgagtgtctctttggtactaaaccagattacaatatattaaagtcctttgggtgtagttgctttccccacttaagaccatataatactcacaaacttgatttgaggtctcaggagtgcatattcttggggctattcctctcaccataaagggtatctatgtgaacatccaactggcaggatatatatctcacgaaatgtcaccttcaatgaaggccatttccctgctttgtctcaatcaccaaaagcaacaactactcaggtatggtccttcactccacagcctacttttacatttcaaacaaataataatgctacatatactaataatggtgttcttccttctctctcatcttctaacaccacggctaatgagggacaagaccacacaatacaccaaggaccacctaatgtcactataccacctaccactatacaaggaccacctaatgtacctataccacctgccaccatacctcaaggaccacatattgtcaatccctttaactcacaacatgccacggctataaacactttcccatgtcctataacacctattaactcacaaaatgccaacctagacacaacttccaatgatgtccttacatcccataccactcacaatgtattaaataatacacaaccggccactttatccttttttcctgcagaaagtaccataaacccaacaatacactccactactccaacggctagtagtaatcccatacaggacatagtacttcaatcaccccttttacctgatgtgccacagaatgtacctacaccaacctcactcacggataacccctctctaaggactcatcctatgaaaacacggtctctaagtggtataaggaaaccaaaagcttttactgctacaaaatatcctctacccgagtcactcattccttctgagcccaaaaacaccacagctgctctaaacaatccaaggtggtttaaagctatgaatcaagagtttgatgctctaaaaaaggcaggtacatggtccttggttccttattctccacatatgacagtgattggaaataaatggattcacaaagtgaaacttgatgcctatggaaaccttgatagactaaaatcaaggcttgttgctaacgggtatttacaaacaccaggaatagattatgaggacacattctctcctgttgtcaaaccggccacagtgagaattatccttactctagccgtgtcccttcattggtatgtcaagcaaatggatgtctccaatgcttttctaaatggtgaacttcatgaagttgtctacatgagccaacctgaaggctttgttgatcctactaaacccactcatgtgtgtcaacttcacaaggctctctatggattaaagcaggcacctcgtgcatggaatcaaacacttcgagataagcttctggaatggggatttagtgcatcaaaattggacacttccttgttcacctatggctcgggtaacgaacattatcattctccttgtctatgttgatgatttttaaattaactggtcctaatgcttcactcatctccaacgctgatttc

SEQ ID NO: 389955 - DNA, 504 bp, Cannabis indica
caaatatgtgtataataaaagtggaaggctagaaacacactcaaattctacacaataattacacacttaaaaataaaaatggttaatacttaatacatattgtgtgtaattagtgtgtgcaatttgaatgtgtaattagcattataagaaaatacttcatcgtaatgctaagtactgtaggttcctcgtaacaatgctgaaaaaaatactatttgagaaattacaaaattcgcatatataatttgatttaaaaatagagttaaaaattacagtgcttgtatcatgaatattcataacactaatagaattggcattgtcacaactagacaaaaattataattttattaataagtatttgaggctaaaaaaagactacttacaaagtttagtgacttatgtaaattttatttttagatagtgggacaatatgtaaaattttatttgcatcctaaaattttgtaagtttactttattttaatatttttattttacataaaatttata

SEQ ID NO: 389956 - DNA, 843 bp, Cannabis indica
gtgtgcccaggtaaccaagaatcagttttacagtttatgttcagacccgatcctactctccatctcagtttgaatatttacacaaacttaagttgaacccaaaaaaaaaaaaaaaaaaagaaatgttgataactttatctaggggtgtttatcaaccgctcacacattataaactgtccgtattttactatattgcataaaaatatactttgaaattttttgtggtgcggttacagtttgcatgttttctaaatcgcacggtgcggtacgatttgcgattttgaatttaataattgtaattcaaattataccgcattatatattatatggttactaatttttacaaggaaatatactatttagtaccatatcttttctattaaatacatttgatatcttgtattttcaataatacttatttattaccttatattttgaaataatacatatttggtaccctaaagtaaaatttaatcaatataattttattaatagccaaacagttctcaattatatgtaattaaataattaaatttgaatctaaaatttgtaaaattgaagataatttaattatgttgataaaattttatcaaaaaattttgagtttagggtaccaaatatgtatgtttttaaaatacagggtaccaaataagtattattgaaaatacagaataccaaacttgtatttaaataaaacatagggtaccaaatatgtatacaccctttttacaatatgatttttattgtctttttatataagaataaatatatatatatataacatatgtatatattatattattttttttttagagacaattcaatataatgatttgatgatta

SEQ ID NO: 389957 - DNA, 658 bp, Cannabis indica
ctccaaccaaacatcacctaagtatattcaatgtattatcccaaatcacatagaaaataatcttatgtaacgcactattcttcatcgcgggttgtgcaaaattgaggtagagtcaaattattttttgtcgtccaagttatttgaagttcatgtaccataaaagcaatatggctcactactgatcgagggagaaccatatttttttatttcgatcgtatttgctcgtgggcaatgctctttcgagttcatttttgtaatgatgaatgacttgattatgtaatgaagttttaccttttattttttttatcaaaaaaagtaattatataatttgagttttttattctaattttaagggtattttatcctatctttactaaaataaaaattagaatacatgctagtagaatagaaaattttaaatcgggataaatagttgcgaccgaatcactagaaaatagttcaacgttcaaaagttctaagtcacataagtgataaaaattgaaaaccaaatttcaaaaattaatcctctcaagcttttaatactcccaacaacttttttactttcttttttaaaatacatcaccaaaattctactttttttttctttatttttttatttattttttaattttttttattttacaacatatttttacat

SEQ ID NO: 389958 - DNA, 497 bp, Cannabis indica
gtgtctggacccaacgccattctgctcgtgcatggtgatacggtgggggattctaattttaggatatcaatggtcgatcttacccccagagagttggctggctagatctgatcttttgtggatgaaaatcagtgcagtaggtgttttgagggcacacacatctaattttcccatttttctagtgcggatgatggtgtcaggtcttattttgagcaacacctctaatcggttcattttttgtcgttggctagacctcaacaagagatcaggaggtcttcattcttttctagcacatacttgttttccgagaggctcacgctggtgaccaccgtgcatacctctttctttagctctcaatgaaataacaaataatagatttttatgtggttcaggcgttaattatccttagtccatgagtctattttattaggctcatcgatcgatcattatttacacaaatacaaatatattggacttttatgttggaaattatttta

SEQ ID NO: 389959 - DNA, 1596 bp, Cannabis indica
tttatttatttttttgaaatggagctctgagccgtggtcggggacctaacggcctacattagcaatctaaatttacccaaaagaataaagtaaataaataaaattagtcaagaataatcatttcaaataatagtaaagcaaaacactatttcatctttacctaaacctttttaattcttaaaatttatatgcagaaacatggggattgtataaaagctcgtaaatttatttaactataccatgttaactgtctgcactttagagctaaaagtactaaattatcaaactttaagaatgcatttattcactttcaaaaatttcaaatgtagattaaaatggttatcaattattaaatgtttaaacccaatttttatggataaattaaattctcccaataataatggaagaaaaacaaacaaaaaactcaagttaaataatgaaaaaaaaaaaaaactaaaaccagaaacaaaaaaaaagtaatgacctgcctgtagagagaagaccgaggattgaggtcctgacgaacaagagtccccatagaaaaaagtgttgacctcaaaagttcgaagctttaccaatttccaaaaatccgaaaaacggcatcgtatgcccaaagtcctaaagtcaccaaaggatagttaacaatagtgggactttcacgttgaaattggggtctccatcaatctataaaattatgaacctctttcgttttgggtacaccaatttttaaccctagaactccttgcatcgaatcaagaaccgtagaattagccgacccaagaaaattagcaatcccagagcgtcgactccaacatctcgaagattggtgggtatctaatcctagatcgtcgtcttcatcatcatcattggagatttaacgagtaaaaaagagacagagatagaagggaggaaaggcaaaagatgagaagcaattgtagcttttttcctttttttcttcttcgtaaatttttattgcgataaaaatttatcagctacataattgtatacgattggaattgccatatatgaatttgtgattttttatttattattaatatatacagtgatgaaagttaacggagacgttaattgctagttagattttattaaaagaaaaacgaaatgttaaaacaaataattattaaatcaagaattctgttatatagacacattttatatagaaaaaaatatagttaagtataattttcagaaatgaatacacttggaagcggaatcaagattagatagtacgaggacaaacatcaaacaacacataaaataaaattttataattaggggtttcagtgactaaaactaaaaatgttcattggctcatattcagtggatttgaacccaattgatctactctaattatttactagatactagattttgtcatcccatccaatccaatcaaatttagtcatctgatctgattcgatccaataaatgtattaaattagatcggtttcaaccattagatgtattaactgattttctattagattgtagccatccaatcccttttagctaccatttaagctgattttattaaaaatatatatatttatatatacatatggaacacttcttaat

SEQ ID NO: 389960 - DNA, 729 bp, Cannabis indica
tctttactttcatcatcaggggacttgataactacttgagcgtgaagcaggttactcaatacatttctgatgaaccttggggctggtacaagtctccttcgaagctgtgaaagatttcgtctgatgtactagagttcacattctaaataaatatgcttaaaataaagaaggggaatattatcaatacaaaaagtagcagagaactatgtttaatttgattgtgctagtgttaatgttgggccctctttgtgcaatattggaaaaacatcgatgatgaggtcctgagagctggaagaaaaacattttggcagatctctctagatgatattgttgtacattttgtgacatgacaaactgagatccgtatctcaacttgacaaacaaatctattacttatccccatttcgatatacgtgcctgactattgaacgtgcatttgaatcttttaacggatagtctcactgtttcccaaggttgaaaatcatattaaaatattcttcttgggttttaataggagaattactataatgcaccatggtgtccaatactctcctcattacagatcgattaaatattgagttttaatcttcggtgagatatattaaattctacaggtgtagttaccactggtgtagttattaatagtagtgtgctggaagttttagtaggtttggactagtgttgtaaatactgattgagttttttgacactagtacgagcacgattagg

SEQ ID NO: 389961 - DNA, 1254 bp, Cannabis indica
aagaggaagaagaagaagaagtattggctctggaaatggaaggaggagagagagtggaatatatagagagagaagtagtacaagtcatggtgattaataattaaatgaataatataatgcgggtataagagagtttgtggggtgtggtttttttcgaaacttttggattgacaatcaagtaagttaatgtgggtatttggtgtttggaagaaaagaaatgattttgatggaatctgttgagaaagaaaatagtttctttaatggatataccagttggaagatggaatagttggaaggaatcaaatgagaaactgttagtatatgcccatgttggattttaactcttctttccttctttgcaggtcgtaatctatattcaattgcaacccaatccaatctccgattctattgtggattatatataaacagggacttggacttttctttaataaaaacatttttttttagagagaaatatttcctattttgaatgctaatacaacttctatcaatttttgtgttaaaaattgtaatagttattttttttaatttttttatagcactattcgttatgttcacaacatcttccttataaatttcaaataatttatagtatcgaaagtttgaagttttttaaacacgcgaggtaaactgaaatatcaaaaactctgtctctggtactgtaaactattgaaaaaatttcaaaaatttacaggaatgatattgtaactataacgaatactgctatgaataaaactaaaaaaaaaaatatgctagcatataatttcaagcgtagaggttgactaaaaggtttatgaatacgcgtggtaaattggaatatcaagaactttatttttggtattataactatttaaaaaaattcaaaaatttacgaatgatattgtaactataacgaatactgttataaaaaaaatattctcgcatataatttcgacgcgtgaaggttgattaagaacatctctaaagacacgacatattgtatatattatgtagtgggtaagctcttcaagaacgcaccatatccaacatcattttgaggttagtgctacagtgcacgatatacacgatatcgtgcaccgtagacacgacattcttttttttcttttatatatatatatatatatttagggatatgattttgtcccgttattgtattttcacggattgtaatctatgatgtacggcagccgtcagatgagggagttatttgatctgacggctgagattgatcta

SEQ ID NO: 389962 - DNA, 933 bp, Cannabis indica
ggttacttattggatgttaaggggagttgtatagccttttgggccgcgctcaacctttttcaagtttcccattgaaggttaagggagttgttttgcctcttgagtcgcgctatgcctttttcaagttttatgatgctattgaaggagcttatagcccttaagcggtactcgatctcttgcattacattcatggcacttaaagtgctttttgaatgcgagaaaataggtatgtattatttaataaatcataataattaaataaaaaaatgtagaatttattgtgagttaaatttgacacagttttaagtatgtattaaatttgacacactttttaaattactattaaaataatattttctttaaatgtactaaaatatggtaatataccacttttttaaatctctaatggaaatgcattagaatagatctcccaaaattgataactatagtgatataccagttagagaattaataactatgtgcagcagtgtaattttttttctactttttttgttaagttgtaatttttcgtttattcctaaagattataattttactgcccataacgtagctaaataggcgtttgctaacaatattactggcatggttaatccttcttctataccagcaactgtcatttgtaatgactatgagatctagctttattttagagaaatttgcggtaaaacctccttaagttttaatttttatatacttaaccctcttatttcttttttgtggcaaaacccacttaagttaaatttttttttgcaaatttaaagtttcagttagatattaccgttaaataccaactgaattactactgtatcgacttcgaagttttactgttacatatacataggtgtatacaatgatcatctagttgatatttaacaataatatttaactggcatgtcaaatttacaaaaaaaa

SEQ ID NO: 389963 - DNA, 686 bp, Cannabis indica
ttagggctaaatagtgaaatttctctttccttactaccaagtaggcaaataatataaagttgcttgccaaataagatctttcacatttggagaaaccttgaattgccataattttttttttttcattttttattattttaaaatgtaatatttacaactaatataaaaaaagttattacatgatatataattatttagtttaactcttaaatttatttttagttatttaagtttattttagaattggggcactctttatttttttgcacaaattttagctaaaaaagataaaattttaaagtagagtattttttttctcaatcttacttaaatcatgttctataccttagttaaaatttattatttcaataattctttttacaatttgaattcgcagattctttagtgtatgataaaaaaaaaggctaattagtaatttttctccctaaactttgacatgtactaaatcatgccccctgaacttttttggccgttaaaaattccccatgaactattaagattgttaaatttaaggacttttatctaattttagtaaaaaaattctaacatagatgaaagttcaaggggcatgatttaatacatataaaagtttgaggggcatgatttggtagatatcaaagtctggggagcatgatttagtacctgaaacagtaaaattgaatgaa

SEQ ID NO: 389964 - DNA, 672 bp, Cannabis indica
gtttattatagaaaaaatcccaacaaaaccctagaaaggaagtatggagatgccaaattaagttatttgtatcttgtgaaaggatttccctctttctattattataaatgagttagattctcaagtaaaaaaaataaatgagaactattggttgaatttgaatgagcccacaaaacaagaaacaacatcggatgtgaaaagtaaaaattaaattattaataaaatttttggtatatataattttgtggaacaacctttttctttctttaatgggtaagcttatcttcccgtacaattgggcatgccccattattgtcactctctactgactttatcactatattatgaacaattaattctcatgatatttccttatctactctccctccataaccataagagtagtagtagttggcaactaacctagctaagcttttttggtatttttaaatataggaaaaagaattgttaaaaggcatcacactgtgtttatcatttttctcagtgtcatactgctagtgtaattaagtatcgagtctcatataacttaagaaataacttttaatgaatatcgcttataactaattgtaaagtgctacctataaaaagtattgtacactgctaatgcttaataacaatgctctaaaaaaatacacatttgtaataataatt

SEQ ID NO: 389965 - DNA, 1958 bp, Cannabis indica
agagcttctgccaactctgctagtgagtcttatgatgattgttctcattgaaaccccagccgaaattggccataatagaatcaagagagtgactagtggcaatcagaagacgaaaacaagtcatggtgtaggtgggaatcgcgtggatgacagacttaacgtttctttaccctctttagaaaaaactttgtgctccaattgttaaggtgaccccacaccttatcattgaggtagtgaaaaacttgtttcttcgttctaccaatatgctgagggagacccaagtatttttcgaaagaggttctcaccagaatatgcacgtagtttgaaatcagggtttgatcatgaaggccaacattaggagaaaaatatgatgaagatgtttgaaagttcacttgttgaccagtggctctttcgtaacgactaagcacctccttaataatgttacatgaattaatggaagtctgacagaagaggatgctgtcatcagcgaaaaagagatgagaaattgcaagagcagtgcgagccactttgaaaccaataagagcctgagtcgtttcctgttgccgaaggagagaagaaaagcccttagcacaaagcaaaaaaggtaaggagagagagaggatcaccttgtcgaatgcccttagaagggacgacatggccagaactttaccgttgatattaaattagaaggtggctgacaaaatgcaatcgattatgagttgggtaaaacaaaaagggaaattgaattttcttaagatggcattgataaagggccattccactctatcgaaagctttagccatgtcaagcgtgatagccatccaccctttcttccctttcgatttaagcttaattgagtgagcaacttcctgcgcaatgatgatattatccgaaatgagtctttcaggaaggaaagcactctgattgggagaaatcaggttgttaagaactaactttagcctattggcaatagatttggatataatttatagatgatattgtagaggcttataggcctaaagtctttgacaaaaatcagctgcttgactttgggaataagagtgatgagggtggtgttgagaggagaagtgtccccattaccattaagaaaactaagcacagcagacaacacatcttttttaacaagaggccagtttattttataaaagttggagttgaaaccatcaagactaggagctttatccaaaagaagttggaagaaagctttttcaacctcctccacctaaaaggcctcgtttagcatggatttgtcgcttgtagacaaggtgcggtcaatgccctccaaggcagtttgcatgtcgattgcagaagggtttgagcaggtgaagagcgattggaaataagattcaatttcatgagtggtgtcttcgtttgtggagacaatgcccccgctcgaattatggagtttgagaattcgattgattttctttctgtaagaagcatggtgatggaagaacttcgtattttatccccctgggctaaccattaggctctagcccgttgtttcaaataagtctcttatttataaagaagagtgtcaagctgggattgaagatccttgatatgatccactgtacgagcatcccagtgggtgcaactcctggcgcactcaagatccttctcaattcttctaatgcgttttttaaactgaagtatttttttttatggttctaggcatttaactggtttgcgcaatttgattgagtagcaaccaagcaaggaatgtcccctaagagaccatcagaacagttccaagacatctccaaggtcttaggccaattcagttctgaaagccacacattttcaaagagaaaatgcttagtcccatgcttggggtgcgaagaggtagcaccggtggtgacaagctcgacgacacgatgatccgaaccaaaaaagtcatgatgagtgaagagtgcattagggaaaagattagtcca

SEQ ID NO: 389966 - DNA, 592 bp, Cannabis indica
aggagtgaatatcgatcggtttggtcaattttttttccctaaaaatttagaatttgatttttgattttagcggtaaaaattctaaagagaaaaagagaaagaattgatgcttatatttgtttaaaaaaagaaggaagaattgatgcttacctattgttccaaaaggaaaaagaatttatgctttgtatgtaaccaaacatttttttaaaaaaatgtatatatttaaaaaaaaaaaaaaaaaaaagaatttttctttttatctttaataatatgttatcttagtattttattgcaattaagtacaaaccattaatttttgttgttgaataataatgtggcaacaattatgtaacacaaaaaaatatttaaaacaaaaaattaaataaaaaattagtatcaaaaatatgttgtcacctagagttgaagaaagagggtggaggtggaatagttgggtagaagcaaaaatgtccaatgtagagaagatagagaacgaaaggtacaaatagagagaccaagaaattttagtgcatgcttggcatcataactaaaaaactgttttttgtttttaaaaacagaaaattgtttttgaaaa

SEQ ID NO: 389967 - DNA, 590 bp, Cannabis indica
atgtattaataccctcacctatgaaggaaaaaaccgtgataaacaatacgtaaagtatagtcaaaatacagataaaaaaaaccataaacttagtgcagaaataaaacaaaaaatacattccagccctggttacatcggaaatttccattctccacaagtctagaaaagacagctcttccaaaatgcttggtcttaaaaacccaagttgctgtccaaaatctgattttctccccaacaacctctgctgagttttcattaccttcaaaaattctgctatttctttccaaccaaatagcccatagagttgccaaagatgctttcctccacaaaataaccttgagcttgattcctgataatttactcactatcatttgagtaacatttccaggtaatacccagtagagctcaaattcctccagcaattttgcccataatctagaagaaaaattgcataataggaacaggtgttccacttcttctccacaattcttacagcaaacgcaccaccctggagaaatatagaggaaaggtcacctcttttgcatgatatcatgcagatttactttcccaagagccactaaccaaacaaa

SEQ ID NO: 389968 - DNA, 1258 bp, Cannabis indica
taaatctgatgcccaatcaattaatcaaaatttcttcacatatgttcatgttcatttcaactcaaacatcaaagctgtccgaactgacaatgcaaaagaattaacactcactaccttttatgctagccaaggcaaaatcaattatcattcttgtgtagctcgacctcagcaaaatgcggttgtcgaaagaaaacatcaacatattctaaatgttgctcgagcattgaccttccaatccaatttacctatttcataaaggagccacatggtaaaaacaactatttatctcataaatagaacatcatcaacccttttaaaagataaaacaccatatgaactcctccacaaaaaaccaccacaatattctcacctcagaaattttggttgtttagcatatgcctctcatgtgtccacaccaaccaaattttctccaagagctcgagcatgcattttcataggatatcccgatcatatgaaagcctacattctccttgacatccaaactagctacatctttcactctcgagatgttattttctatgaatccatttaccctcttgtcaatcaatcatccaacaattacaacaccattcacaatatttttcccactaaattttctgcacttaatcccacagacaccactaatatcccatctaatgcagaaaatacaaatcccacacacataccagcagtttttccaactgcaacatcacaaccaactcaggttgttcctatcaatatagcagtaccaccccctgcttcaacatcagcagcacctgctgccaataaaaacatagcagtgtcattccctgtatcatcaaaagtagcttctcctgctaccaaaaattcagcagccattcccactgctaccacgacagcaccttctgctgcatcgaaaaattctgtagccactccaactgtcatatcagctgaaacaaatcctaataacattggcaccaaaccaccagatccccccatccaaaccaaaaaaggtagaaccatcaaaaaacctacatatcttcaagactacacatgcactttaaatgcatccaacaccacctatcctataactaactatatcaactatgacaagctttcaccaaaattcaaagcagccatccttgctgcccatttattcgaaccaaaaacatataaacaagcttgcaaagacaagatatggaaccaagcaatggatactgagattgatgctttagaagcaaacaatacttggattgtagttcctctacctcctggacaa

SEQ ID NO: 389969 - DNA, 698 bp, Cannabis indica
gtaggttgcccaatataccctcaatctatacttaagtctagcttataatttacattaacctaagtaatagagacatcatcagtaaaaattaatgggcgtaacttaaagaatttaaaaatggaggtaaaaattaaaacaagtaaaataaagtaagtatacaatgtaatttcctcttaagtagctctattatttttcatatatatgtgaccaaatttcatataattgtttttaaaaactattttctgtttttaaaaacatctgcctctacaatcttaaggctactgagataaattgcaagactgatacacaactgcagccaacgacgctactagaacctattttaaaatttggtcatcagctttgcaatttatctcagtctcaagattgtagaggctgatgttttccatttgaaccacctttgaatattttacaaacattgcttactcaaatgacaatcgaaagagcatttatataaattattaattataagtactttaaaatgtgtagaaaattatgggttatttgacttcataacttaaaaactgttttcaatttttaaaaataaaaaataacttctaaaaagtaataggattgctcagtcaaattttttaaaatagttttttgaaaattgggttttaaaaaactagaaaacagattacatcaaagtgttgttttttattttcaaaaacaattttttt

SEQ ID NO: 389970 - DNA, 880 bp, Cannabis indica
atccgcacttgtgcgaattgagatgttgattgacaaaaataacgacccaatccaattcacacatatttataaaaaaaaaattaaaaaagttatataacaaataatattttaatataaagaaattagtaatttaaacgtctaatacataaaatacaattatatttcaaaacttaatagatcaaatgtatatccaattttatatataatttttttctatatacaatttaaaataaaataaaacattttttcatacataaaattttgtttcttcctttcaatttgttatttgttatttttatttattttaatttattgttgaacacataaaataacaataatttattttattttgttgttagttatatagaattttttttttcataaatattaaataatttaatattaaaaagtaactaatctaaaataatcgatacaatctgtacttttgcgaattagattgaattagatttgagctattgtacggattggattgaatttaaaaaataaaatctatatttagtgcagatcgaatgcactatgaacaaaataagacactatgaacaaaataacacagatccaattggatcaacactctattaaatgagtttgttatattagtagcaactaggctacattacacattgtggtaataaataacttcattgaaaggctaagcctatgagcacatttcccaatattatttatctaaactattaaatacttccattactattgtcatatatatttaattaatgattgtttctttttaacagcaaaaaaaaaaaagaaagaaaaaaaaaaaagcaacgacctctattgctaaatgtaaatatcatttagaaaaatagatgaaaaaataccaactgtagtaaaggaaaaa

SEQ ID NO: 389971 - DNA, 639 bp, Cannabis indica
tgaggctgtgacttgtattgtacagaacaaggacaactgagattttcgagagaacaatgacaccagactcatacgtaaatatgagggccttattccattcatctccaaagttgggctagccttttacaaagtcgaactacctacatggatgaagatacacccggtcgggctagccttgtacaaagttgaactacctacatggatgaagatacacccggtcgggctagccttgtacaaagttgaactacctacatggatgaagatacacccggtccttcacgtcagcaacctcaagccgtatcatgaagatcctaaatatccaacttgcaaccagtgtaccaggaatgacatcagcatacgacgacacaacagcagagaaccagaagaaagaactattcatgtgaagagaaagaagagaaaagagtacatgatcaaatggaagggtctcactgaggatgagatcagtcaggagaaggcgatagaattgcattagttttttcagaagaatgaaggtcatgtagtaggttcgtcagggacacgacgaaattatgtgggggagaatgtgtcgtactggcccatgtcgtacccacaaggggccattttgtaacatgaacatgccttggtgcttgatcattagtc

SEQ ID NO: 389972 - DNA, 2006 bp, Cannabis indica
atgatctgcaaaagaaaaccgaacagcgtcaatgcatttaaaaatgtctactggacaattgttgtgtaccttttcattctaagttcgtcaaatcatgtcaataattaacgaagcatataggaaagcctcattctcattaatgcctttggtttttaggtcccataagattttgacccagtcccacattcttataccagatcgcagatggggaagatactccagggatttgaccgccataagtgaaaggaaaaattacaagatagaaagagatgctccatagttttgacctccgttcaacacagggggcagctttcgtcctctataggaaatcttcttcctataaccgagcaaacaggaagagccttggaaatgatacaccaccaaagaaccttgagccgctctgggattttactattccagagcttgttccacatggatggggcaacctcgcaaggactcgttctttcctcagcctgggccctgtaagctgatttgcaagagaaacaaccattactttccaaagtccaaaaccagctatcctttccaaggtcagaaggaatgccccctttcaagatagctgagatagtttcattatcaaacaaactgttaagtttttggatattccatccaccattgtccaaaaggagctcagctacctttatctcctcattcaacgacggttctcttggttgggggtgaaacccttcatatgtgcaatccatggatcaaaccatatatttgtatccagaccatccgccacttgcttacaggcacccttacgaataatggcccttgaattagccacattcttccaaaaccacaaatccgaggcttttcggttacagtcaagaaagggcttacctttaagatatttggcttccagtattcgacatcataaggattggttgcctatcagaaggttccacccccatttagcaagggaagcctggttcatttctttagatttctgaaagcccaaaccccctaaagacttggggaggcaaagtttgtcccaggcttttaggtgaattccgtgattacccttctcggaaccccactagaagtcgcgaaccaatccatcaatcttagcagctagtcgattggagagcttagttgtttgcatagcatacataggtagagataatcccactgacttacttagagtcgctcgccccgctttggagagtgtctttatctttccaacaatgcaatttcgcagtcaggttatccaaaatgaagttaaagtctgcatctttttgtctagatctgaataaaggaagccctaaataattgacgttaccctccggcgatcctattcccaactacgccttgatcctctatttcatactagtgagcgtatttttactgaagaaaattgaggtcttcattttattgaccttctatcccgaccaagagcagaacttctcaagacaatcccagtaacctttggcctcctctaaattggcttttccaaccagaatgaggtcatctgcgaagaagatatgagatataatagggcccccctattaagcctgatcccgctgatagttctcttggcttgggcgtcctctagaagccttgacaaaatttttgcagcccagataaaaagataaggagtcagggggtcaccttgacgaagaccacacgaagggataatcttgctaaaggatcccccattaaggcagatattgagggaggtggtagtgatacactaagacacccgattccgaaactcttgaggcacccaaagcacgaaagcacatgatcaatgaatccccaactcatcctataataagctttcataagatcaatctttattttaagcaaaccttctctgccttttttcctattaaacgagtggattatttcctggcaatcacataattatcctgtatattcctcccaagcacaaatgcagcttgggtgggggaaataagcttaggtaacaatagtttgatcctgttagcaatgaccttagagatgaccttatacaccacattgcaaag

SEQ ID NO: 389973 - DNA, 1062 bp, Cannabis indica
ttttttagatttttacaatttcatatagatggcaacaatactaatgtttgtaatattaatcatctaaatgtatttaacaaacttaatcaaaaaacatacaatgtttaagaaaaatactcataattttcattggctaaccacttatactttcacgtaatctacccactgatcaggtaaaagattaatctgatcatttgtgtatggggtgttgaacccacaaatggcctatatataaaacaaaaacatatcatatatctttttttatttcttataaccatctgtcctcttcttcttgctcttttgttacttctcttgattctatcactattcctaaaacattcgtgaagccatgtctcatcctaattggcttgatacaatgatagaagagatgaatgttttagttgtgaatggtacttgggacttggttaatttacctttggaaaaatgggtcatagggtgaaaatgggtgtttatagttaaagtcaatcctgatgacacaatttcttgcttaaaggcatggcttgctgccaaggattatgctcaaacctatggagtttttttctgctgctaaactgacatctgttcaactatatatatttcaatggcagctactcatcattagactttgcagcagcttgatattaaaaatacttttctttctaaagatcttgaagaagaagtgtatatggagaaacctcctgggtttgttgctcaaggggagttagtgcgagtttgtcgtcttcgtaagtctttttatgattcgaaacaaagtcctcgtgcttggtttggaaaatttagtcagtctattgagaaatttgatttgttaaaaagtaagtcaaatcattctatgttctataaaagattaaccgacagtattattttgttggttgtgtatgtggatgatattattattactagagatgatactgaaagtatctcatctcttaagtcattccttcatacccatttcacacgaaggatttgggggtgcttaagtatttcttgggtgttgaaatcactcggagtagacaaggtatttttctatctcaaagaaagtatgta

SEQ ID NO: 389974 - DNA, 606 bp, Cannabis indica
tatactctcttgggtgtggcataggaataataaagagagaatccctttgggaaacaattatttatcctttcaaaaacacaatactgaaattgtaggcatatataggagagagataatatattgagaaagacatgacaagtaataagttcttaagagcatctttgatggggttacttatggagtggtatttgatatatgtgtatttatattaacattatatatgaatattattatccaaaataagtaatatatatagtcatgtaacattatttatttatttttcttaaaaaaattagtttatcatcaattaattttttgagagaatatatataactataaatttaattaaaatatagtatgtgagatcatggtgaataattttggagttgtatattattgagtaatttttatagaaaaatgtgttaaattttacgcgaataaaaaaataaatgaaataaaataatatttattttatgtatattttgacaattattaatattgtccatcattaaaaatgctttaataatatgtcaatcattgattttttattgttataacatttattttatttatttatttttttgataaatgaacatttattttatt

SEQ ID NO: 389975 - DNA, 976 bp, Cannabis indica
accaatttcatagtgtctaatctatactggagacttaacagaaatcattttaaatacaatcgagagctattttgatctttcatatttcgtcttcttttttcttttttcgtttattggtgcagtgtatcaaagaatatacatttaataaagttgccacaagatacatatcacttcgatagaaatgttagcttagatggcacccgcttcacaaatcaatgaaaagtaacttaaatttatcagtctgctaaccaactagcaccaagccatttttctaatagaaactgaactgagtacataattaatgggcatttggagatattgcctcacatataaaattaagtaatattattggttccctaattatgctgtaaacgtgtacaccaagttgagtaggccaggctccagcaataactaactttatattgaaaattttgaaataatacaaacatagcatctttcgtgagattaattaaatggcacttggcctgatttattttataaggaaatgtgccaaaaccactcgtgttgattacaaaatatcatgcatatagtaaggcctcatgaaaatagatgctcaaagatacaagttaatatacaaataggaaatgagttggagataatggtgagcagggaacattgcctaaacattgctgacataaaggctcgattcaattctccatgtgttaatatgcattgatatttgaataagaagatgctttatgtttcctttacctaatgatatctataaatacatacatagctgatggcaaagtaatcaaggcaaaatttgctaaacaatcaaaactcacaaacaaaactttccatcttcttgagagaaagaaagcaatggctgccacaaaatcaaacttacatgtgcgctcaaacagtttgcccaccaaatcacaccctgtattcaagagtgcagtaacaattgttgagattagggtcttcttatgcaacttcatcatcatcttcc

SEQ ID NO: 389976 - DNA, 1038 bp, Cannabis indica
atatatataaatatatatttgaagatggtataccccatgccaagctatactatttagggcttgttattgagaaatgaaatgggagaaaactaaaaaggtcatactctatactttttaccatattgagaggatatatatatatacacacatatataacaagtagacatatgttgtatatatttatataatacatgaatatataaatttaatattgttattggtatgtcaaggatcaatttaacttttatataatatatattcatatttttcatcagatgatcactctctgaataaatatgtatagagatatatgaatttctaagcatgcatgtttttgtcaatataatatatataatatattttatataccatgcgaaatggagtcttcatcactttcccataaatataggttattatacatatgtattgatgcatatttggagaataataagagtacggtatacatgtatataagtagtcttggaagtagtacttaatttataatcaattaatatatatcacgtactcatataaatatctttataatattattaattctagctagtaagtaaatgtcggtatatctttaattaccagtcttcatttccaatatatagacattaattatgaacctatttaatccaaagattattttgtttggaagctatggctcacacatatttttaatcattgcaacattctaagtaataatatcttgtaatataaccctcatgttgattttgaagtatacagattgctcagataacactactgcatttccactaaaaatcccaccaaatagtattaattttttgcaaaatcttctttcgaagaatcattatttgagatcagtaagtcggtattgctatcaacactgagttgatcaatgtagcacgaccatcaaatgaaaaattcttcaaactccataaacgcactctcgctgaacccagggctggccctgagcataggcggactaggcctggaggaaattacactctatactctttttatattgtcatcttttattcttaccctctt

SEQ ID NO: 389977 - DNA, 1653 bp, Cannabis indica
acatatatatgtgtatatattatacaaaatgatcgaatcacttttttcataaaataatagtaaactagaaaatcagcaattggcaatttgacacaaaaacacaaaagaaaatccctttttctttcacttctttttctttcctcttcttattctatcacttggtttttgttgcctcaacaaacaaaactcaatgttacctcaattctcttctaaaaattcatatggggtttcgatttcatccaagttattttaagctctgtttttgagtttttctttaaacgaggttgtgggatatcttcacatatttgtttgtttttttttttcataaaaatattggttttgtaataaattttgatgtactaaacagaggaatcacatctctgtatcaatccatggaagaacattacttaacataaatacacacacataacatactgaaattattacaaccaaacttcacaatgaaacaaaatatttacacacttgaccatataaaattaagacacaacaacatgaaaatgccataagtacaaacttgaaacacatacccactaataaaaaaaacgcctttatgagattttcttcttcttcttcagctacatataacagagaatttcttaactaggtatttaaacatcatcattttgaccaaccttttctttgggagaaagaacccatgattattactgttagtagcttttggtttgaacttttttccatctgggtcttgcttcattctcatcacagttttcaaatctgagattattgtcactaccatgcctcctctttaatggaaattttcccactttcttatacataaatgttagtgtgtataaataggtaggagaaacaaaggaatgagaaattaagggtatttcagcaaaaaaaaaaaaaagagagagaaattaagggtatgacgtggcaaaagggactgtgagaagaagacaaaaaccatggtagtagtaagtaatgattctagaatgagaaagaatatgaaagtgagaactgagaaggggtctcaatcatgatcacatggcagtaagtaataagcacaagcttttcatttgtgtttttggttttggtcaaaagaaaatcactatactttgattttcttttccaataattcgatgaccaaattcttttgttatggtgtttatacattttattaagagagaggtacattcatgcacacattacaattgaattagtttgatcatcttttcttttggcataaatgaaaccctaattcatttggtttcatgaatattatgaataatatcactttgttatgaaaacatatggtataatatgaatctattttgtttgtgaggattttcaaccttgttctcacaatatttagtatgaaatttcctatagtacttgtcttatttggaggtactatatatacatataagtattgctattaggcactagtagtacctaatatcttcttgacatgtcgcatttcgattgattagcgatactttttaaaagctattatattaaattatatgggacctaatacttaattggaccaataacgatattaatacatacagggacggagggacttatgcctatatgtaggcttaagccctcacttaaatatatacattaaattttttacatgtagatatatacatatattaattc

SEQ ID NO: 389978 - DNA, 4499 bp, Cannabis indica
gagaggtcttgcaagtggacctttggataagcctacgtggaagggtgagggccaaggtggggaggacctcccgcgatgaggatgctaccggagggcctgtaccagctggaaaacctgtgataaggcctgctggccaaggtacacataggccccatagagaagcgtggtcagctgctggatagaaggctgctaagttagcaaatcggtgcatagagagggcttttccttttttggatgaggctctgaaagagctgggtgacggtggacctgacaggctttactcttccgagcattgggatctttctctggtgagttatgcttttagcgttgatcattttcttagcactgtataggctggcaagccattgtgcttcttgcatgttgttggaatgccttggaagcttatatgggggacttgccggccagagttgtgatgtatgatactgatggtgttttgccttatattcaggccctgatgaaactcagctcagctcgtgatagctctagggggtcttcagatgctcttcaggagcttgtgaagatctttgaggcttcccttgtagcaaaagcaaagccaattctgagctggaggccgtttttggcacagaggcaaacaacacagagaaaaactccaaggttttcctcatctcagggttgcaaactgaactgaggtcacagacaagtgcaagaggctcttgatggtcagctggccattaggaggattatatcaacctacccactgaacatacctatcagtttcacttgcacaaccctcgagccaaactatcgtacatgggtagtatgacttttgtggatagaatattggcccatgtggaggcactatttgagagctagatggagacaaaccaagttgctgcttatcgagaggggtcatcatctgggacacacgacgactttttggctgacccacctgtggaggaggtggccaacaaacattctcaccactaggccggtcaacattgtaatgatggggctggcctggactctgtggatctcgaccttgtggctccagatttagctccttctacccatacacacatgtagacatcattttcattagtattcaccatcgtgtttgtatcatatagacaatgttttcatgttccacatagcatgtggctttttatagcatgtgacattttagcattaggacattactcacttttgcgtgccatgtggcctttggcctttttgaaactttacattcatgccctatgtggcctggagcctttttagaacactgctttcgtgtcctatgtggcctaaagcctttttagaacattactttattttcaaccacagggccttcatgttcgtatctttggccataaactctctgtttttaaacactacaagtatttggccctgttgcttttttatcatggattttgtgaccgactaggcagtctttaatccaggctatcttcttatgttcttcacaagtaagggtctggatttactttgccaagccaaagtatgcctacatgacttagaggcaggcttagtagcttatactaagtgttaaaatttctctgtataagttctttgtgctagttcgatgcattgtacagtatgggtgccccttaagttaccatctagaaaagtctcttggtcacttgctattaaccatgtttcatagactttgcctagaatttgtgttacaagggtatcatagtatgcaagtggaactaagagtttaatctgagagcaagtgtttcaaagacacaataaacagaatataaatattgttattattcattaattggtctttgttgttgtgcaacttacataaattgtatctacaagcctatattacacaaatttttcttcaagatgtaaaggggctacccctgctcgcctagtaaaacaaaggccaccgttgaagaacaattaaagactacgcccaaaaagtgtcgtgggtgctagcgttttttgtactctaatgttgagtagatagaccgctaatttgaagtatagttttgtaagctaattattgatagtatttatgaaggtgttccccatgccagtatcctagtaggagaacgagctatatgttctctttgtaccctcccagcttgtaggctcccttactagttatctctataacttaataagggtcttcttagttaggtccaaacacttctgctgctgagtctttagtgttcaggaacactcttcggagcatcatgtctcctatgaaaaactttctgctcttgacatgtttgttgaagtgccttgctaccttttactggtaggcctgcagctttaagttggtttgttctcttctttcttctactttttcaagggactctcccagaagggtgctgtttgtttgttggtcataggttattcttttgtgtgatggtggcactagctctacggacaacatcggctcatagccatatgctagagtgaatggagttttcctagtggcagtcgtctcagtagtcctatgcgaccataggacctctatgagcaatttaggccagatgccttttgcttccacaaggagcttcttcaaggtgtccttaagggttttcttgatagcttctactgtcccatttccatgaggatgtgccatgatagagaagctcttgatgattccatgtttgtttcagaaatcagtgaacatgtcactgtcgaactatttgtcattgtctgacacaatcttctagggtaggctacactagcatatgatgttcatgacaacaatgtcaagcaccttcttggagttcatttttcaaggggttcagtttctgtccatttggtgaagtagtctactacgatgatagaaagctatacccctcctttttccttttcgtaaagttagtacatattaggtctatccctcacactacgaagggccgaacggagactacatcatagtgagttcattatgtggaggtcttcgtatctttagaaatctctaacacctgtcacattttcacacatagtccatcaagtcttcgatcatcattggctaaaagttcccctgtcggagtatctttttggataagcattcctcccaacatggttgttgcagaagccttcatgcacttctatcataagccattcagcatcgggtttggtgacgcacctcaggagaggcatagagaaactccatctgtacattatctcgtctaggatcatgtacctagaaacttttcttcttagtttgctagctttaatttttatcttctagcaaggctctagtttgaaggtaagcagcgataggtgtcatccatgttggagtgtcatccaacatgtcagcttcttctgggacaacaatgctgggttcttctaaaaactgtatgggcaccaaattttctttgtttgctatggtgctgcttgccagacgggcaagtgcatctgctgtggcattcagttctctaggtatctacttgatcatgtactggttgagctgactttacaagtatttgatttggctcaagtaggccaccattctatcacctcaaggtatgtattcacctaagacttgattcacaactaattgggaatcagtaaatatgtctaggtggtcagcccgtacttcatgtgtcagcttgagcccagctattagggcttcatattcaacctcattatttgaggcttttaagccgaatttgattgctccgtgcagttgttgccccaaggtgttgtaagggcaatgcctactccaaacaattagtcagtgcaacttctctcaacatggagtttccatgttatttcttcgagattttgttactgctcttgctctcgcttcttctctggctcttgtgttgatcggtgtacacgtttatggggtgtgcctggaagtagggcatgagctttctggaagccaacaacaagttgtaggtcagcttctccatgagtgggtatcaactttctacatcaaccagccttttgctaatgtagtatacagggtgttgtatactaccttcttctcttttgaggatagcactcacaacattctttgtgacttctaggtagacgcatagctcctcattgtataggggttcagtcaacaccggtggtttggccaattgcttcttcagctcttagaaagcattttcacattcctctatccactcaaatttttggttgcatctgagaatgttgaagaagggtaggtatttctttgtagaattggacataaatctgttggaattaattttaccaggatctagatttactaccatgcatgttgtttaacatcctaaatatgaatttctagaacaatgtaaataaacacatataaagtttgagaaaccttacagtgggtgcagctgaattaaatgactccttcggcttagatctctaacctttgtatcctttctgtagtagagtatcaccaagatatgagcctgaaactccttccttgtgtttgaattctttagagtcttacatactatgattgaggaccacttgatgtgtgtgcgcacttactctatcaccatagggtttgaaattatgaagag

SEQ ID NO: 389979 - DNA, 629 bp, Cannabis indica
agattgattttgtagaacacaataaatagtgttattcaaaccacccaaattgttaccttgtgctttaccataatcctgaagaagaaagaatacccaattttccacatatgcaatattaattttcttatttttaaacaaaatataattacgattgctccaaatcatccaagtaatacataaaaaaatcttctttcttaaagttttcaaattttcttaataaaaattctttaatattacaatacttatccatattatagaattgatgaaatttagtatccctccatttagatttagctttggaacactctaagagggagtgacagattccactttattgttgatgttgataaaaagtcaatactagctcgttagatcgacgagataaataataagttaagtaaatattaaagagagacacacatggtaataaaattacgtctatttcaaagttttatctctcacgataattataaggggattgactggggaaatagcttagatttttagagagaaattagatagaggtatcctgacctcatgagaacttagtagaatataaaaaatgagcttgtggagctctccttttatagggaaggaggtccattaaaataataataaaataatacaaa

SEQ ID NO: 389980 - DNA, 1197 bp, Cannabis indica
ggcttttgaattgaactaataaagttgtttataaatatgaaatgaaaccataaatcaataaagttcattcatatcgttggaacttggaagccagctcttttatcattcctagctagctttacgccaccaattagctgtgatttttaatgttgtagtcaaacaaacatcacattactattaattaattttgtatatacaagcttctacaaaagtcttataatataacatcatattaaataagtggtagaacttaagaaagaaaaaagaaaacttatgggcagaatacacatgcttctaataagagatatttactgtgaaacttctttaaaatttacaattattacatacatatgatcttaataaaaataagtgatagtaaaagtattttattttataattttattatagttatagtattttttggtcatttaatgtcaattcaaaaacacgtaacgacatataattagattacgtattaaataaactaaagaaatatatcaccacttatttttgaattgacaattaacaaatttaattagtacttaacaagtgcgataataataaaattattaaataaagtactctatcgttccttttctttattaggttcatatgtataataattataaatattaaaagaaaatagtcttctaataatgaaatatatcaaatatataaatattagtaaacaatatgtatcaatcatgtgcaaaaatattctgtcccgctcatctaacaacttttatactaattttctaaatgcaatgcaaccaatccgatactcaatatttttctatggttgatcgaagactaaaatagtaaagtatccaataaagattttcattttttccactaatttaattaatacataccccaccttctaccatgtaagtggaagacttcaaactttgactaaacatacaataatacatatatatacgatcgcatcagataaaccttttcagttttatttattcaacttaattaataatcaagattggtattgattaaccacttgagctaggttagttcaagtagccataggtgggtgtgtgagtgttgttgaaggttttgggttcgagtcccaagtaaaacatgttgtaatatataaatgcataaaaataaaaaaaaaaaaaaaaagaagattaatattgattgttgaaagagtacataatatagagaataaaccccacaagt

SEQ ID NO: 389981 - DNA, 768 bp, Cannabis indica
tgtaaatgccactttatacatagaaaaaacaaaaaataaaaaaagaaagcaaatgtttcttgaaatttcacttactttgacagttcaactgcttgatttgtatggagttgatcagaccctccttccttgttgccatctctaataattaatttggtaattagaacgttataatctactattatatatatattatatatgtattcccaattaaagacaaattatataaattttccaataaactaaatcatatgattagtgtagtacataattaaataatcacaacacgttttaatcgatcacatatgtttaactaataatagtacacgtacaaactattaaagtgatggcagaaagtagtttgagaaaaagactttatagagagttggtagttacctttgttaggagtggaaatttgccaacattaacttttcctaacctaaaagtactcagcattttgtttcttaacttataataatttggttacttttatgttttctcaacttatttgatcgtctaaaattcttttgaactatttagagcgctgaaatataaaacttaatcatgtgtggctaactaaatgcaaacttgattgatgtatcaccaacttacaccttgcatgtataatttaaaattgaaaaaattattaattttcttattatttacgattgataaataaaaaataatctaattttaatttctcttattagtttttcgttgacaaaataaattttctcgtaagattacgtatttattataaaatttcatatt

SEQ ID NO: 389982 - DNA, 3435 bp, Cannabis indica
caagatactcttcttgttgtatcttagttgttccttttggtcattcaatgggttcttcaaggaccctcaacaacttctgttgtgccaatagagatcttattttcctcctccatattctgtagtcatctgatccatcaaacttatcaatatcaggtttaagactacccatattgtatttgctaaaaattaaatcagataaaggtttagaaatttctataggatcattcaacggaatgtcctccaaaactctaatatctaattcctcctcttgattgctatcttcatgttcttgaatatcaaattcctccggttcttgattattgatatcttccagacttgcttcttgaatgtattaatttgaatctttatttgtaaaaattaattctgttggaattttaaaaaatctacagcttttatcccaacaaaacttcaaaggcacaaaattaatacaatagttcaaaggtgctatttttcattttttattattttatgcgtccataaaataaatggtattattaaaaactcacaaatgcaaatttgctatcttcttttcttgttctcccaaaacactaacccaaaaaaaaatcaagcctttctcacgaaaaactcaacactaaacccataaacttaatctttttaactctcggtcaaaacccaactcactcgaaataaccaagcacacaacgtctccgtcaagctctcaacatatcaagtaaaggttacaactttgtctctcttttattctcaccatttttctctccttttacaaagatactaactctctctttttctctcgagttctctctttttacaatggctctctacagaaacctctctcaatggctctcactccagctcacttctttttacaatggctctctacagaaacctctctcaatggctctctctccagctcattgattaaatgtttgagccctaatgactttattgttgtttcttgatcttggtaaagaaaatagtaatcgaaattggcgtaacaaattttttttttgttaattattttttttttttccaaaaacaataaagaattttgaaaagaaaatttaaatatccaatatttactacattatatcaaattgagattgttcatttcacaagtgcattcttatataaaaaaagtaaaaatatgataggcttttgttttccatgtggtacattacgcttgtggtttttttttttttttctttcacaaaatcgaaattgtaatttgtaatctcagcccaaagatggtgattagtttaacaaaatctttccttgttctgtcttgttggaaagtgcaatttgtcttaaacaacaaccctttttttttttctatcaaattgcatttgtttctccaatcatttaaaactttgaccctaagatagtgctgagttgttcaatatactttctttggcaaacccaaataaggatcattataagcatttgccaacaatgggaatgaatttgagttccctgtcattttggttactcccactcagccttaatgaattttctcattagttggtttgaccataaatcacaggcaggcacatcatatgtaatttcaatcacaggtacataattttcttttttaaaaagcaccgttgtaatttaagaaagaatgactaattgatctgagactgagagtggaagttagaggaaaatctcttcttgactaaagaggggccttgttcgtccttgtgttgattcattcatagtttgttaaataagattttactaattaaggtacaatcactcacttcacgaggatcataccttaattaatgtaatttcttgctaaggaaaaagtacatacatcttcaattgtttcagtgactagtgttgaactgtaaaaacaagaacaagtttgctggtgcagagcaccaaagagaaaaaccagagagaaaagaaactcagagagtgaaatgaagaatcaagagagtaacaatgcaactgactgcatcctctcataacagctcttatttatatactggaagtaatatacagggaaaagaaaagtaacagaaaagtttaactaactttgtaacagaaaaataacagaacaactaaactaactgttacatctaacaactagttttctatcttacagagacatgaaaatggaaattcaaatgcaaatgcagtgtatgtcaaactgatagagtagtaaattaatttctataattattgaatgaatgaacacaaaaagtattaatatagccatatgataagagcctgcaacagctgacataaacatagattcatttggggtatggaaattggaaaatcaatcaacttttctgatcccaactcatccaccaaaatgctgtttgaaagcagagaaagcaagttcatgatcaactcatcaaacaaattccaatacgcttttttgccctattattcttaatttggattcgtgccctattattcttaccagtttggtaacattttgggatattgtccagtccaaaagctcattctctgtcattatgtaattccttatatatagtgttgagttctattgtaatagtgttcttaaaaattctgttataaacttcaacttttatgtttaatagtccatacagtatcctcccaaaagagccagatttcttactgtcattactaaactttctgttatgacaattatgccattgttttctagccaatatctatgaataggctctcaactatttttgagctagaaattaagaccaagatcagaaagagagaaaacaagagttgagagaatgagaaactttaaagacataaacaagaaaaacaaaaccaatcctttggataattttcatcttcatcttgagctggaatacttcaaactcaaatacaaaacagtttcttaggatgatgatgatgttgatgagttaagatcaagtttgttccatatgttttgaatcccatctaatgtttcttcaagaatttttaatttctttttgttttcttgatatcaagtagataccgaaaatgcttgcactattagctcattcatcttcaaatccaaataattcattctgtcccaaaagtatctatcaagattagatccttatgatatgtattgatcatctctcaaaaccacattgatctcaggataatagaaaacaacttcaacacaaaatttctttgagtatcattggaagcagctcgaattctatgtccccatcatcattaatccattctactttgtacaaaatcaaacacttattcttttacactattgttttgtcaattggatcacagataccaaactcttaatcacaatagaattattattatccaaacatagtagttttaacatagtcttgaaatcttcaagattcttcattattccttccttatcacccaaaaccacaatcattaaaataaaatcactgatgagttgagacaaatatgtaccaacacaaatccacaactttttttttt

SEQ ID NO: 389983 - DNA, 948 bp, Cannabis indica
aaaaaaaaaagaaaaagcaaatagtataaggcaattgtgaaatagtttctccaaatgaaaaggtttctgcaattgtcttttctggaaagatgtttaccctcggttgctagtcctgaaagaagtcttggggaatgatagttgagttcgaaagggagttttcagatgactatcatgtccatttcgggttcaatcttcaggataactagttttttcttagaaaggagttctagctggctattcttcctagaatggtagatttggatagtcgacttcaattgactttatcctatctagaagtatcttcaacaagtgttcttggtctgcaagtttgaaagctcgtctacattcctggaggccttgatacttaagttgacgtggagacttcgctctaagaggagttggttaagttagttatttctaactaacttaacaacctcgaaattggtagccactaattttaagatcttgatcctaagcctatatataccaccttacttaccttttgagaagcgacaaaattctggagttttgagaattcaaagagatgagattgagagtctaagagagaaaagattcaaaggtatagagagaggtgcagagaaaagagagagattgagtttggatttttttaagaagaatcttctgtagatgaagaagattattgggtgtaaagtgtgagaattgaaatattttgtgagaattcaataaagaatctcatctcgactgtattatacctattcttgctcaatcaataaaggatgattacagtggtgttctagaactagggcagagccataaatcacgtcgatatatcgatcttgaatcagtatatattttggtattaatttctttattttctgcatttattgtttttagtttttacatactctgtttgcttctatttcatttgattgatgttctcaattttattaatcttgtcattgctaa

SEQ ID NO: 389984 - DNA, 2341 bp, Cannabis indica
tagattaaaaaacaaaacaaaaagaaaataaaagcccaccaatttgatttacgaattttagtgcactaattaaataaaacctttatgataaaaataaataaataaaacctaaaaggaaaaaaaagttaaagtgaaattagaaagtatcaaacttaagctctgttagagttttgttgggtttgtgccttctcattttgacattgattattttggtcctcttccagcaagggattatgctctcgtgattcatgaagggctttagtatactcttggagtacggtaacaatagaggatctataggagatcaaatttgaatgtgataaacgatgaaggctgggaagtggacgattcaagtgtagtgtctggcggcaacctatgccttttaggtcgcctctgtgcagcaagaattctataagtcgttcttgaaaatgattccttgacgtatatagaaattgactgagaaagattgggattttaaatttaagggcaaaacaaattcctctctatttcttatcttgaactttaagaacccattgcatttggataggattgtattaaagatgttgtgggttcttcaacatggattttttattcttgaacgaatggataaaatccctctgaattgggattgcatgtttgttggctattctaaagtgactagaggtagactacactatggtcatcaagacaataaagtgcttattttcacaaatactattttttagaggcattgattatatagatataatctcaaaactaaagtagccacaacgtggggataccattcagtttcactccaaaagtgttccatcatcttctacgccgagcaaaggatgatccaactgcctctgttgaaccaacgtaagttgtgacaattgaagaggacaatatcactaatatttctaaatataaagtcgcaatatcttgttgtagttgggggggagggggggggggattcaaggaactcatctaagtatgcttggaagacactagtgcttgtggtatacctagtgatttacgtagatggtatcttagtcattggaaacaatgattgagaaattgtcaagatatatatgtaaaacaaattacttgttctctcgtaagcagcttacattagtaggatgatagagtgtctttcaatggctaacactaatggaggtcacttgacttccagacatggaattcatttatctaatgagttgtttccaactactctagaaaagataaatgccaagaaaagaattctctaagcatcaatagtaagatgtcttatgtatgctcttgtatgcactagaccagacatctatttttgagtgggagttgtgagtaagtattagttcaatccagattgaatcattggaagataattaaacatatcctgaaatacaaaaagaagaactatttgttagcttataagggtggttcattaaaatccttaggctacaccaaactagatttctagacttgcgtcaatgctagaaagtttacttaagaaatgatgattactctaggagtggagcagtgatttttagagaaactttaaaacctatccagaatctctaactctactagtaaggccgaattataataagactgtcttaaagacaattagagaattattcaaactcgagaaagttcaatccagacttagccattattccatacatggaataactgctagtgttacttaatgataacacaaatgtagttaccaaatagtaaagaatcatgaaccataagaggagtaaaacatatagatgggaaattcacaaaatcatggattttatgactaaggagaatgtgattttggagaagctttatactaaatactgtttggatttacttttactaggatctagatttactaacaagtatgttgattaacatcttaaacatgaattttctaatacgatgaaattaaacacataagagtttagaaaaatttacattgattgcaacggattaatatgactccttctgctcaaatctctaacccttattcctttctatcgtagagtaataacaagatctaagcttggatctctttctctccttcgggttggttaccaccgtcttccgcactataattgagtactggacttgctatgtgtggacatgacactctatcactatggctcgagtatgaagaacaattaaggaggttcgaaatctctatagagggtgtctctcttctactagttgtcagagattggaaactaggtttaagttggttgaatagtaaaaaattggatgaggtgagagcatcatgttccttttatagtatttcaactagggtttagatttaaattatatggaattaaaaagaataaaataatgggaa

SEQ ID NO: 389985 - DNA, 2212 bp, Cannabis indica
aactatatataagttaataaaggtttttagattctctaattgttttccctaccattaaagaatatttcttcgtaaataaaaaaagttaatataaaatttatttatatatgtagtaaaatattattttgtagctaaaataatatttcttttataaactaccaagtaatttatattataacattaatttttaacttctactcattagcaaattcatgaaattttaccactattggtgtaaaatatatgaataaagcatattttaaatattttggtaagaaattaaatattgtataatatataaatactcagaaaataataaataaacaaataaaatatattaatataattatttttatcaacgtattaaaattgaaaaataaaattattttaatttaacacaaaaaaataaattaaaataagtaaaatagtttggggaccgatttatcaaaaaataaaatttaaggaccaacttacttatctatataatttaaggtcatacggtacaaataagtctacaataaaaaatctttaaaattaattaactcctttaagattaaagaaaaaaaactgctcattcggtttgtgtaagctcactatttattccttagcaacatttaaattttaaaaggattttgattttttagctatatatttagctctattgtttttcttttgataaagtttcacctctattgttggaacttctcaaagtttttgagttccaacactgttaagattgggcttacttgtgaaaacaaaagatcagatctgaatgatatcccagatcctcttttggattggactgaaaactcgattatgaggtgagtttcttttttatttttgaattaaatcttcttttctttttagatattcatatgagttatgaattttagaaatatcttttcgaacccaaaatctttaagctaacgaaattgatcaaaaataaagaaaataacaatgaagatttttacgtatttagagtgttaatgagccttagtgcacgagccaatattaatacttgaaatctaaaaaagcctaaggtggcgtttggtaagaggaaatagaatggaaaggaaacaactttaattttattcttttgtttagttttattttaaagtattgaaatgttattcttattctagctatatttttattacttcaaactaaacgccaccttatgtgtgtttgttatgtgagtttgatttggagagagtagagttagagggagtagacttggaggcagtggcggacccagaatttaaagtgaggcgggacgtattttttttgatggaaattgaaccattgacctctaccctatatataatttaacttaaccattgcagtaatgccaatattatgtctataaatattatattttattataaatatatatcgtaactttaaattgcatatatatttttttcctgatttttttttcagggggtgactgtcccgcctcgcctccatgtgggtccgcccctgcttggaggaaatatgaaatctgtgtgtttgaggggattagcattatcaccattttaatttaaaaaatgagaccttcttggaaacacaaatctcttgtcattaaaatttgatttaaattttacattctcatttctatcaagtctaaacctcatacaaaacgccctattaagatttataagaatgtctgaactctaaactttgtcagagaaattgaggaatgattttctaaccccattgcatgaagggtttttttttttttttgtgtatatttatagtgtttagggctcttgcttattagcccttgcccactgatgaggtgattacaagtaacatattaatatgggcttatctggtgaagcctgacccatgaggcgcacgatgtatgttgatgtggatgccacatcacgttgacaataaaccgtgtctaatctttaataaagacacattaaatgtttgattgccaattacaatagttccatatttaggaagatatgatcttcagacaagatctttaggagttaattttgatatcttaggatcttataattaatgagaatgcttctgagctggacatctgaatgctcgttgtttacttctcgagatgtcatgttcaatgtcttccagatgtgcgctatgctgtaagagtatctcgcctggacgagccttctgtcttccacccaaaaagtatgttcttgctaatggactgttggaatttattttaccaggatct

SEQ ID NO: 389986 - DNA, 846 bp, Cannabis indica
actgtagaaatctaaaacaatgtcttatttttcaacttattaatacctcaaacgttccaactagcaatattacaattatccatcatcaaataattgcaatacatgttcccccttcttcatattcctccatctcctttctcaaaccaccgtcaatctcctgcaacacacagtatatggtccctgatttatttgatttagtgtcttcatctatattccttttccctaagtggctctgccttgccgtaacttatcttttgggaataagccactctgtatctcaagtccctacatttatcttctttcatcagtcaaaatgcttgaacctacttcaaaaaatacgatcagtagttgaaacagagctttcacttgtgttttagccgctgtagcatcatctgaatgtttgcctttcttctcattccctcctttatgacagtctgccatgatatgcccatatcctgaacaattcttgcttttaattgggagccattcatagaaaacattctgctccactaattgacaatgttgtcattcaggtgattgtatgaggtggatcatccatgatgtccatgtccaccggtatccttgtcaattgaacttgggtgcattccttagtatgttggtccaccataatcagttttccaatcgtactaactaacgcacttaagctatttttccccaatactgaagcccaagatcgtgaagacgaatccatagtgggacttttcacaccagcttcactgtgttcaagtcgggataccacggtctgattataactggtttcttgtcgaaatgtatcatgtctatttccaacactttggctatagtggcttctgttgggttttatgc

SEQ ID NO: 389987 - DNA, 2588 bp, Cannabis indica
actagagtatagtgtataataaactgtacttggttcatattaaagatctcttactttaatagactaccgacttgttctattcatatcgtgtaatcttaattctcttgtacgaccttacaatattataccatcttcatatgaataagaaaattttagatatttattaattatacttttataattaatgtattcatttatcttataattacatttcatttattcttaaatatattatctattaaatacttgcttttagggcataaatcctaacaagacattggttagagttgtgattaggtgtatgggtgcctaagttacagttcaagatgtatgtttatgatttatacttttcttacgaagtctgtcgactcacaattatgttatgtgtgtaggtaaaggcaagacaaaagtcgaacaataatgagtctggagcttgatgcagattgtacatatttagatggctagacctggagtgttcggatcttcgggcagcatgagctcaattttgtagtcgttgggcgacactttttgatatactgtattttggtttattttcatgaaaaatatttcaggtcccagaatttgtaaactttaattatttattatattatttagtaaagtttattatttattataaaatttgtaattatacacaatttatactaaattatttgattagcaaatgttagcatagtaatttataaagcacgaaaacatacttaagctagtagggcgttacacagttagttatgacctctccatttgatttagttgttaatgattgtaggaatttgattatttgtatgagcgaagtctttttagtatttttgtattattatgctaacatagtggtttataagtttgctagacttcatgtttttttttctagattgagtttttgataagagtgttgtttctactgaatttatgtttatgattttagacaatatgtttttttgtgctaattacattaaaaaaaaaaggcaatggagctgtgattcctaatataccccttctttcacatatataatatttttaaaatttttattttttttaagtaaaaaaaagcttttcaattaattttggtaaaactatttcaccatatatatatatactaggtagatgttacgtggcgagccacgtaaatattggttttatttaaggtttagattttttttttaaaaaaaaattagtaactaaagtggtatgattattcgaacgatttgttttataaaaataaactgtgtatatcaatgtatttagtaagtaaaagataattgtgtctatgaactaatgatatgtagttatccataatgtgaataaataaattattataagtcataacaatatatcactttaacatttattatttgaccctaaaaaatttaaaggaacaatatatgtattttgtaaaatttaaaggaaataaacagataaagacttgcatttaaaaagtactagtttatagcttctttcattttcagaacaacaccatgtctcttctggaagcaaataaccttaggaacgtcaccacattaaatggccttacaacacagttgtggtatgaaggtacactatcttcaagttttttccctttgaaaatgttaattcccacaaagtgacactttgcaagccaaaattgaaagaaaacaatatgcaaagtgtcaatgtttaaaaatattagacaaagaactgttatgtaatctagaaatatttcaaaataaaagtgaattccatcatgaatactgtgaaacaatttaaaataggaagcataagtcagtaacaatcaaacgagcctttatattgcaactcaattgcaactgcagtagaatgacattttaaaaatttgtgatcaaatgctaaaattaattaagtcaacaaaatgatattatatttcatattcagtaaaagataaaaaatgtaactacctttttcatatgaccagtggcaactgtgatgtagaacaaagatcttcatttgatttgccttttaacaaagtactctaccacactttcataatatcatgcaatgtttgtccctacatatttttaagatgcaccattttacaaactcatatttgaacaagtttatgcaaacagtttaaattttatcatgatatccccctgagtttatgattatagcatgaatgtcgctagtcttagtcatcacaatgggacccacatgggagcccttcagtgtgagttgcccaaatcctttactcacacatatcttcagagctaagctaatcctcttacaactacacatttactgaactgttcaatcagccccttctaaacactacatagatgggagaaatttaaaagtctaaatcaagtgactaatcaagttgacttgaaattcttgattaatttttctcaagatacatttacattgttgaaagaattaaaaacctgtaaagaccgcttagtttaatttggaaattagaagttaatcttgattaattatgaaaattatttatagctatttaaataatttattatactgttattattgaattcagagatgcatttctatgtcattcagtagttttcatatttttgcattttcggtgcccggtattttggaac

SEQ ID NO: 389988 - DNA, 677 bp, Cannabis indica
ttgctactttacctttttcgtttttttttttttttttaaaaaaaaaaatagtttttgaatttagtccttttttcttcttatcattttcaatttttattcaattaaactccattcttttcccacgatcaaaacccacacttcaagcaaaatattgagattttattccctaaataaaacctattttaatataatcttatttactattaatagtacattacagaacatatagttatttacaattacagtgataatactgattaagaataatattatggtcagtgatatttttgaatatagactgatgctaacaaaaccaaaaacaaactacaatgcaattgctatgaaactaggagtttaatgaattcttaaattttttgttaatgagtccacaaagttgttgactaacttcttctaaacagtaggtgtcaaaattattgtggttttctgcgtttttttctgtttgtgtatgttcattgttgtatcaaaactctcaatgactacattagtgtagtaattggtagttctctagctgctaagtttgtcgagtttagcgattcaacaatgttagaagtcatagttgtatacatgttgtgtttgatgtagtaccttgactatttgtggtatccaacttgttgtaaatagggtctaacatgcttgtccaagctgtcaagctcgct

SEQ ID NO: 389989 - DNA, 2133 bp, Cannabis indica
tcatcatatatttttaatttttttctttgtaaattataatttttatttttattcaacatttttattttattctataaaaaatttattttcattattattctctcatatttatttatgtccctgaaaaaaatttatatttttctttcttataaaaataagaatttcttttattaatagttgcagaaacaaattttttttgcccccactaacatagatcgctagctctgtcactagacgtgtcaccactaaatgtcacttttgtcagtatatttttgtactagcaaaaatttggtattgtgctggtaaaatagaatttacttctgatgtgttggcaaattaatgttggtattagaacttttggcagcacaaaataaaaactgctcgtaaaaataatttttaccagcgcgtaaatgcgctggtaaaatttagattttagtcaccgcaaatgtgcattggtaaaactttgacctttttaccagctcaataacaaattgtgctagtaaaagtgacattttttatagtgcacgttaataaaaacagtaatattgttgtaaattagatacacaagatctatattattgtaaatttttttaaatattaaccatttatatttttaattgggatcataattttcagttatatgattaagatttttttttgacaaaagttatatgattaagattaattacacattatgtgtaagaaaatattggtaatttgagtgtgtctcaactatctcccttatttcttttgttttttcacttttcagattttccacacacacgttatgttctcgcccttaaacagtttttgtggcattttctattatatatttttgaataatttgcaacttaaataattaagattcagttctaaataaatacttaaatttaatttaacagtaatgatacttaagttataattctagaattctcttaaatgtcaagtcattatcacatgtcatttttttattagtatatttaatcttattttttttaaaaaaattaaaatttaatgacttagaccaatcaaatattgccacgtggcaatttacttaacacttaataacgagatacctacaaaagttcagaaattataacttaagcatttttagtgttaaaaattaaatttaaatatttatgcgaaaaattacttgttaaatatatataacaggacaataaattcatccaactatttttttttttttgacaaagaagaaaaaacttttagataatcaaatcattcaacaaaacaaaaatgggagcattactcgctcgcaaactacgatcagctataaaacaagtagatctcgttaaatagtgagctccattgtttgcggaccgtttaataaactttaaagaaataaatctatctttcatatcaaccaacaactccttggacttagatataattctaccaaaataagagaagaactacgaatatggactgtatatatagccacaaggcagtgggactccagttccaactccttgtattctgatggtttctgcaacctcaggcgaaattacaccccgaaaacatatctggccatggttaagggccacacacgagaataagctaaaacagtttgttgaggcgatggtaccttccaatgctctctaccatcttcaggggacatcaaacctagagatggatcaaaaactatgtcatgagcataatgccatcgattaagattatgctacgaagtctttttgttttttcttataaaaatcttatctctagtatatttatttatttattttgctgaaaaaatttactattgttttatgagattctcttcgagtgagagagaaaattatcagactgaggccagatgatcatcagccttggaaattattattattattattattattatatgtttagaaaaggtattggaatattattgtgattgtggggaagagcaataatgagtagtcatgatgatatggtacatgcatttttctttttttttttttttgtgagggagtacatgcatttttctaatggatagaaatacgtacaatatatgacaaatattggaccctacaacaacttttgtatcatgatggctttaccagtaccatggtacagtaacacagggtattaatagtacacatgatctaatattta

SEQ ID NO: 389990 - DNA, 634 bp, Cannabis indica
tttagatgattgattataaaccgttgatgttactcgacattttctcttgtataggtggcgtgttgcgaatctatacagacctaggtgagtgccactagtactatccacatgtgtggtgttattttagtttctattcttgcactttgatcaaatggagggatgaggaataaagaaatttccttgcataaatttcgtaccttataagtgtttttctatttttaataaatcatgttttttctttaacacaaatatgttttttatgtttttttatttactgaaaaacatgttattctattgaacaagaataagattacaaataacaaggaccatatggaaagtagaagaccattccaaattattatctagtccaaacttgacttaacacatttatgagcaacagtattttgagatctaggagcataactaattacaaggccttcactaaaagataataagtttttaataaaagtttaaaacattacgaaatacagagtagctatgtctgaaggtgttgtcgagtgaatttcgcaacaccaaattatattatttgattaatacaaaagagaattttcagagaaacgacaagtgcgagtattcgacctaaaacggcgagtactcgactgggaatgtgaga

SEQ ID NO: 389991 - DNA, 2563 bp, Cannabis indica
ttttttttttttggttcgaatttcactattatacctagtttaattgatttaattgagtaaatatttatatatatattcattattaaacatgttttagaaaagattaatagctatatatatttattaatttataaaattgttttaattaatttttatatagctcaagttgagtattaaaaatagtaatttattaagaatttgatgtatttatttttgtgatatagaatattacttttgaaactataaaactatatatggatatagacttttaatttggtcccaaattctaattgagataagttggtggatgtaaatgttgtccaataaattactttgcaaataatctcagtagtaattaaagattaaatttgtatagtgtacaaaaatggaaggtgatggactaaattaaagagtaaaatttaaatgatttgagacattgatcatattagcatggaaagatagaaatgtaatatcgtaaattctattctaatactcattattaaccaaaacacaatttgcatgtatatttaactaaacaatatttgagctcatatagagtgagacaatatgggccttatcattttagctaaatagaagtccatgggctaagtttcttcgttgggcccaattgcttgatcaaataaggttgcatattattcttttgtttttttggtaagagagacattttttcatccaattttaatatttttcattacaaaaaatttacttttaaaatttataactaaacataaaaaaaaaataattaattatatattattattcctaaccgcttcatctttttcttcatttgtccttagcaaagaccaaccccacgaccatccaacactagttacacttcttcttttccttcgctcatcctcatccccaattgcacgagaccaatcgttcattcctcttccgttcatcctcgtcccgatccaatcgcacacgaccagcaacaacagccgcacaagaacaccagctggagcgccccaatcattcgctcctcctttggcccatccccaaccgtcctctcctccaccagctcgttccgtccccaatcttgaaaaaaatggcagtaagaacttatgatttgctcaatatgatgatggtactaagatttattcttcttttgaatttcatatctattgtttgtttaccgagaaaagaataatatttgagactttcaatagggaaatttgattaaatatgcataaaatgctcttatatatttttctctaaatccatatgtattaaaattggccatatatgaccacattaccattttctccataatacccctcacatttgaaatcacaaaccaatcagcctcctctctctcccggcctctcgctcaaaccacgctcaaacaccttgctcaaacccacggtgacggcgcaacaccccattcgatgcacggtggaccaatcgacgaccgaacccacgaccatatcgatgaggcaatcgatgaccggatccacgacccacacggtgcacgccatccataataatgtggaaggtgtgttttttattttatttttttgggtctgaaagtgttaactatttatgtcggatctttgaaattggcaaattttgaggaggaagaagaaggcccgatgggtccgatgctagtccgatatgggtccgatgggcctttcaattggtttaaatatgtgtaggtccgatgggtccgatgggtccaatgccaagtccgatgggtttgatgcccagtccgatggatctgatgcccagtccgatgggtttgatgcccagcccgatgggtccgatgcccaatccgatgggtccgatgcccagtccgatagggtccgatttaaatcaggtgggaagaagaaaaaagaatgagaagagagagggagttgatgtaaatggggagagtattttggagataacactaaagctgtcatatgctaacaatattggcaagtataagtttaggagaaattttttaaggtaatgtaagcatatttaatcaaatttccctttcaatattcttcgtatatttagttgataagtaaatacatgttaaaaatggtgatattttttttttagattttgacctcatatttctatttaaacaagaaaaaaaataacaaaaataattttctattatttgattttttcaaaattgagaaatatttttctttaactttaaaataaattctaaacgaattcttttataatttttaaataattatattaggtggactaatataaatatgccatgtatacatgatagtacacgtagacaggatgacactttaaatttatcaacgatttagtgggaaaattttaccatttaaatttgaagttggagaattaaatataagtgaaataatagttagtagaatttaaccacaaattactctatcaattattaattggtcacgtgcttaatttacaagggaaatttgactttttatgcttacaaatacttaatacttttctcctaaacacataacatgtaatatttgtgggatatgacacattttacaatatccctaaaatacacccatttacattatcccatatcccctctcttctt

SEQ ID NO: 389992 - DNA, 597 bp, Cannabis indica
gtaataaagaaaaatataatcaagcatcaatggtgataattaatatggtgatttggacattcataaataatatttcataacaaatatacatttattgtgccaattataaggttggcttataaagaacttgaaaacttatagaaattacataatttatggaagaaaaaaaattagaattcactttttttttatgacataattaaataatagtttgggattatagattttttagtttgtttagcttttttctgtcatatttttgtataatgaatcaggaataccacattttataatttctctcgtctgtctcgctctcttttactcttgcgagacctaagcgaactagacacaatttcggttgacctctctcagttgttgccacaacgaaatgttaaagcttctctctaggggtgttcataaaataactgatccaatccaatccgtaaagtgcggattggattggattgaaaaattcaaaatctgcacttgtgcggatcggatgttgattgacatgtaaaagtaaccgatccaatccaatccacacatatttataaaaaattaaaaaattaatatatacaaataatattttgatgtaaa

SEQ ID NO: 389993 - DNA, 530 bp, Cannabis indica
cgttctttaatgtggctaaagagtgccttctgtcacgaccagagtaaaaggaaagtccaaggtatcgttcgtgacactcactaattatcatgttaagttgcgctgccataggagtgtttggagagaacgacattaccgacttatgaggatttagcatttggcttgaagctctatgataaatatctagagcttttcgaattgctaatgcagaagagtttcttgattcacaaaatagtaggctgtcatctgcaaaaaggagatgagaaattgaagacgcttgtctcgtaatctgtagcccttggaggttgccaatagtttcttcgtgctgcagccatcacgagagtccttcagagcagattaagaataggtagggcgatagtggatccccttggcgaaggcctatggtaggctttagaaggtccgttgtatctccattaagtgcaaatgtgaggcttgaggatgataagcatttaagaattagatcagtctgttgggttttgtgccctatataaaacccatttcaatataat

SEQ ID NO: 389994 - DNA, 1077 bp, Cannabis indica
attagatagataacataataatagcatatttaaggaatgaccagtcatttaatgacattgattgatataattatgaaaaatcgagtattgttattgggcattagtagtgtccaaaacattctatagctaatatttcacgtttagttatcgatatttttcaaaaagtatttgtttaaaattatatgagacctgacacttaattacactaataaataaaacactaaaaatagtactaaacattagtagtatcgtttagtaaaaagccactttttttttttaaatagggaccttcccttttattcttggtatatagagatattataatttcattattttatatcacaatagagatcatagttataataaatatctttaagtgtttttgaacaattctacgatggaatttcaacaatcaattgcactcatatttgttttttatagttatataataatttaatttttataaataataatatatattatagttataataagtatcgcgactcttttgaatatttttaaataatttactgtgctaataataaaattctaacaatcaactgcactcgtatttattgttttgttctatacacgtacaatttaaaaaatttcaactagtgacgcgatatattctttctaccaagacttttatttttctattacctacacaaaagatatgttttgacttaatacatctctttttatgattcttaccacttgatctctatacttagaattaattaagtatttcctaataataattatatattattaactaaacctaacatgacatgagataataatcaattggattggatcaatatggtaaaaagattagatgaaatggggccatctgtgagtgttgagttgagagagattgaccatcattagtgaaataagatgccttaaccaattgttattaaataaatatcaattttcataatcttcaaacattacttacaattcacactatataattaagggctttttttttttaccactataaatcagcactaatacactgcaatacccaattaaaggtagaacagtcatatatatatgtatgtatatttatat

SEQ ID NO: 389995 - DNA, 1769 bp, Cannabis indica
cccgtctctgatgggaataagcagtgatagggcggggatggggattaaaattcttaatgaagatggggacggagcactcctcgctaatttcccgccccgtgtgcatcactacgtgggatccacgaaaaaagttgcactaactaaaaaaactcaattacacattcttcaatctctatttttcccgaagcgcccccgtaaaattattgtgcagggacaattaattacgacagcttagtagaaaaactacggtataatacttcaaacccaaggttgtatcacatcacttttatacgaaataatatatacttttaaaattataaataatacatagaatgctgaatttacaaaatttactatacatgtggcgtgcgagatattgaaaattttgtagtcttcaatctagttatttaggtttactaaaaacgtattagagtttaaatttaaatgttacaaaaacgtcatttaatagagaaattaaattataaatgtataatgaatttggtatatgcatgctaccgcaaagacaatataatattagctagctttcctctatatatacgcttatacctctcattccaatatacaaatttaaaaacgatcaactaatcaattggatttagctttatcaatatagaaatattgcttggtttatattattatggatattgattttttttatttaagcgtttatatattacatcatacataatttgggattcgaacctagaacttccaacacacacgcacccctatagctacttgaactagcctcaagtgttcattatggatattgattttatagtaatatatagtactttagaagaatagtaaaaatatgatgagatcattcctcttcactaattaattaaatatatatgatatatacattacaaaaatattatttttaccagcacagttcgatactgcgaacttttaccagtgcatttcgctaactgcgctggcaaagaagtcaaaattttaccagcgtacatttacagtggctaaaatctaacttttaccagcgtatttacacgctggggaaaagtcatttttgccagcgcttttcattttatgctggcaaaaattctaatactaacattgatttgtcaaccccttttgccaacacatcacaagtaaatttcattttaccagcgcaataacaacttttggcaaaaatgacatttctatttcttgtagtagtttcttagttcatgccacatgtatgacaactttcattatataccacagtccatgacttaagtaaacatctttagaccaaagtagaaaataattatatatatggtaaattaatgtaaactagctagcacagtaccatccttgacgcataacttgagttctacatatgacgtgtgcattatattaataaccagtagtttcagtactagtcaaaaataattaattgacccagctgatgcaacaaacggtacgtagtagacattggtaaatttctaatttttatttattttaaattactttcaagagtccaaaagaatgcaaaaaattgaaacaagatgaagatttatggggatcagagattattgtcgggcacatttttagagatcactacaaaaaataattactttagtaacaatttttaattacaaaatatttttttggtaattaaatgtgacttttagttacaacataaaataacgtttgactaaaatataatatttagatataagttatcactaatttaattttactcataacaagtatattgtgactaaaaacacatttagtcacaa

SEQ ID NO: 389996 - DNA, 1408 bp, Cannabis indica
gggggtggattttaaccatggcttatggatatcagtcggacggtgaggggaattctatttatttttttgttatgtttggccaacatgtggtatattatataataaaatagtttgtatttttgtaagttgtgtttttatattattataactcttcaaataatattttaaaaaataaggaggtaaatattattttggactttatgttttgtaaaaattattaattagattttctattttgttaaatgataaaattgactttttgttttgttaaatggtaaaaatagaacctgagctcaattttcaacaatttatttttttaaatataatcaactttaagataatttttaataagaacaaaaacagaaaatgtaattagttttgtcataacatgatcggattattattaagttttattttgacaaaaaatcggtttagggtcatatttgtacaattttaaaaaaatacagggtccattttattatttaacaaaacagaaagttcaattggtaacttttacaaaatatagggtctaaaataatatttagccaaaataaaattttataataatatggtctttttatcatattctatttaattttatcataaaacgaatcagtaaacttaataaataattgcaaattaaatatcttttacatttttactttaaaattaaaaatataaattattatataaaatgtattttattatattatttattaatgtcaaaaagataaaaatatatatatttaatttgtattaatttatcaattattatctacgattttatttatttcataacaaaaaattaaataaaatgtgacggaataactactttactatgaagttatatttcaaaagtattattaacaagcccgtatattataggtacacaatttgagtgtaaaaggttcagaaataaaaaatatgtactaattattttaaggtgcttctacaatacacaataattgcttgaacctatttctagcatattaaatttttttaaaattttccaaattttacataatattttaaataattacgacgtacataatcataaaaaaatatttaaataaaaaattatcttgaaaaaaattagaataaaaaattctctcatacatctaaatacattccttcaaaaaattatagggacattgttgcacttaattttcttgtaatatatatttttgtaaaattctacaatatgcacctcttgaaaagggtgatcgatgtacttttatttgtttcagtatctagaaaaaaaatctattccaatttttttttatgattatatacgtggtagttatttaaaatatcttccaaaattttgagaaattcagaaaaattaaacacaccaaaattttttttttttttgaatgaaaatcaatactttattaactaatgaacttag

SEQ ID NO: 389997 - DNA, 1570 bp, Cannabis indica
atgttaggtgacaacaaagcctgcgagattgcaggaattggttcagtgctgatcaaaatgaacaatggattagaaagaaccatcaaagatgtgaggtatgtccctgacctcaaaagaaacttgatatctattggtgcactaactcttaagggctacatcatcaaaatagatagctcacttagagttctaaaagactctacagtggtgatgaaagcaaatctcagaaatgggatttactatcttgttagcaaaataatcattggaagggctgcaacagtagtcaaaaattaaggaatggatcagacaaagctatgtcacatgagatttggacatgtcagtgagagggggctacatgagcttgaaaaacaagagatactcaaaggtaaacttggtaagatattagaattctgtgaaaattgtgtttgtggtaaaagttggaggttgaaatttacaaaagctaggcatacaataaagggaaaactagattaccttcactctaatctctggggtgcatctagaacaaaaacaattggtggagcaagctatttcttaagtatagttgatgactatacaagaaaggtttgggttttcttactcagtaacaaaaattattcttttaacacttttgttaattggaaaactttgatagaaaatcaaactaacaagaaaattaaaatgttgagaactgacattggtttggagttctgttctgatgcgtttaacagatattgtcaagagacagaaattagaaggcacaaaatagttgtcaagacacctcagcaaaatggcatagcagagagtgaacagaacattgattgaaagagtaaggtgtatgctaacagctgctagtttgggtaaacaattttggggagaagctttgaagactgcccgttatctcatcaacaggtgcccttctgctgctctgaactttaaaactcctcaagaactgtggacaggacatgcactaggaattgatcatttaagggtctttgggtgtattgcctatgctcatataagataagacaagttagagccaagggctttgaagtgttgttttattatataccctgataggggtcaaaggatataagctattgcgccttgaagatggtttcagaaaatgcatcataagtagagatgtgattttcaatgagaatgaaatgccaatgaaagaatcaaatacaagaaccaagactcggaaaaatgtcacagatagtatgcaaatccagattgaagaaattcaaaatgatgctagacaagatgaaactagtcaagaacaagctgaagacaatgaaacttatcaaggtggatctcaggggtatcagcttgttagagacagggaaaggagggttgtcaaacctcctgacagatttggctttgcagattgtattgcatttgctcttgcttttccagaagaagttgaatgctctgttcctagcacctattatgaagttgttaacagcaagaacaaggataaatagcttgctgctattgatgaagaaatgacatcactcaagaaaaataaaacatggaagactgttactaggccaacaggacagaagctaattgg

SEQ ID NO: 389998 - DNA, 958 bp, Cannabis indica
ataatgtatagtagtttcatagcatataaattaacttcacttctatatttgttttgcttctttgtaattgattctaatttacttgttatagagagtaccacactgataatgtgtaggaacataataccataacaggaccggccctgagagtaattgggccataggaaaacgattaattattgagcttgatataggaacataataccatatcagggctacagggtcgatcgtgtactacatgtaagatgcattggctacttcactcattgtctataatgggcatctgtcactttgtaacaggtgagagtacaaatgactcgaacgcaaatgtcgcccttgaaaggtgcattgtactcatgggagacatttagtgaagacatgtcttcagtggatgaagatacaaaaatcacagcagttggtctcttagagcagttaaatgtcaccagagactccactgattacttatggtacacaacaaggtatgataaaattatctgttttctttcataatctaagttgaattttgagtacatgaaacctggtatgaacattcactttcattttgtgtacagtgttgacataaaatcatctgaatctttcctacgaaacgggaaaagtccaactcttaatgtgcaatcatcaggagatgccatgcatgtctttgtcaatggacatcttcaaggtaaattccttaccactcaattatgatatgacttgttgaaaggaaaaatgatagagttcctaaatgcgaaatgctggttgtataatctattgacaggatctgctcatgggacaagggtgaacaagagattctcattcacaggaaacgtcaatcttcgttctggatttaataaaatctcactgctcagtgtagctgttggattgccggttagttatttctacgaaatttccaacaaaaaattcagtatttatggcactacttgttgaggtagtttat

SEQ ID NO: 389999 - DNA, 652 bp, Cannabis indica
attattggagattacatgaatacttaaaaatatcaagatattttaggagatatttctctcacatgagtacgtaaaataaaaatcaagtattattgtgtgtgtattgctcaaaatgagaatgaattgcgcatttagaatttaaagtgagggatcgtaatttttttttaaacctggggcaaaaataaactaaaaagaatgattttgataaaattgaactgactactaccctatgtaatctaattgactaccctatgtaatctaatttatgtattacactaaaactaatattatatttataaatagcatcttttattataaatatatatcataattaattaaattgcatatacattatttttcctatttttattttcaaaaggggcaactaatccgccttgcttctaagtggatctgccatttagaatgatggctaaaaaaaaatagtggtaagctaaagaaaatattacattttgaatgggtagctttgagtagtaccagaggcccaaaaggggagagtttaaataaaggggtaagttgaaaaatgcctcttttattaatcaattaactaaatttgcctttaagtttatatttttttgaaacatacctctttttatatgtgttgtacctaaaataccctgacataagagagtca

SEQ ID NO: 390000 - DNA, 598 bp, Cannabis indica
cccaattcattcatacactctctgactcgccaaagttgataccaaaaaaaagtgaatctcaaaagaccctttccgcttgaagtcacacattttgagcccaacgtagacctactagtaaaacaaaccaattctgactgaaaaattgaaaaagaacatgcaaacgaaataattttgtaaacgcaataagtacttttaattttcaaagaagatggttttgattataagtaagtgattgttttcataatttattgccttaataaaataattagtattattttagcttttgtagtttgtttttatttaaaaaattatataaaaaaaagtgtgagttgttacaatgcttctgcctaaaaaattggttattgtgaataaaattccttatatatatatatttttttcttcattatttttttatgatatttgattaaggcatttagttttctatgtgttttttttttttcatatcatttttctttttctatatttcattgtttaaatttttgaaagaaataaaacaatcataattttaaagtttttataatatttttctctatctataataaattctctcatattttaagtttttctttttaaaaaa

SEQ ID NO: 390001 - DNA, 504 bp, Cannabis indica
caaaaatcttaattagtttttttatcaaacagatgtgatcacatttccttgctcttgcatataattttattacttatataaaaaaacatataattttattaatttggaaatatacataaaataaaatttgagaattaatgtaattatagtttatttatttaaacctttcccattaatctaaaatataaattaaaaaatatctaacttttttttttaaaaaaatattactaaataaaataaattatattatattaaatagaatacacctaagaataacaataatgaaaaaaaatacttaaattattattaagaacacatattgttcttttttttttctaattataattatttttaactccagcaaaaatttaagttttgtgtcttgaattcttttcatgaacataggggcggactcacattgtagggagggggcagtcgcgcctagaaaaaaaatctaaaaaaaaatatatgtattttaatgagttacaacatatatttgtaata

SEQ ID NO: 390002 - DNA, 922 bp, Cannabis indica
catcactctccaagatcctgattcaggaaagggtcggagcaaggtgcatcgatttaaggctttataggctttttttgtttaattggttttttgagattgtaggatgtaatattgaggaagaaagtggagatgaagggatgatactagtcagcagcaagcctccaccaccaaaggaatgggtggtgaattgtagaagttgttatttatttatttaaataatttttatgatgtggacgaataagtattcaacacatggtaattttaaaaactataagcagagttgttaaattgggcacctactgagaatcttgagcttgaagactattactgtaatttttcgagattgaggacttatttacattaaagtaaactttttgtgacttatgcctcataacatgtgatatttttattagcaactaacagatctactaacagatctgttaaaataaatatggaccaacagactaagaatcttaaacttggggactattgctgcaattttttgagattgagaacttattagcatcagagtaaactttttaaagacttataccgtaatttttcttaaaatttattatttaaggtacaacaattttaataatttaatgcttaaaaaatttcatattttatattatttacattaataataaataattcataataattaatttatgatatagttatatatactgtaaacgtataattcattatttttaaaaaaaaaaaattaaaataaatgttagaattgaagaaaaaaaaagttatacaacaatttagtatagaatcaaaatcaaacactattaatattgcattaatttggtacgcacaaatttaatgtaaccttaaaatgtaataatgttaaaattgaggaaattacattattacattatactttacttattttaatttttatctctatttt

SEQ ID NO: 390003 - DNA, 813 bp, Cannabis indica
aaaattaaaaataataagaaaataaacattgcaaatttatattttattttcactacaaataaacaaaataaacatcaatagtagattataaaaaatactaacaattgttactatataaaaaagtatttccaaccgaaaaattataaaaaaatgtaaaatgacttatcttatcaaatgcatattagtgtctcaaggaagatccacgagtactaattcaatcatttaaataattattataatttcaatgactttataactcaaatattagataacttaaatcttttaattaataacttaaattatatttgtaataatttaatttaactactgaaaagatttaatgatagaggtttcaaaaagaatatatgatttgaagaaatttttaaaatgaataagactaaaaatatttatttcataaaaaaaataattaaaaaaacaaactagtctaatcaaatgtgttcatttttaatgatttataaataaaaatactaataaaatcatgtgtgatttttgttagagtatataaaactaattctttaattagcagctatgaaattatggattactgatgatgtagttgcctacttattcctttaacccgaaataattagaatatatgtgtatgtgttttgggatagatcgatgttcataaatgggcaccattcgtgatatttggacttttatgaatttataattttttttagggaaacttataaaaatattagaatttgggttaacttttacaaaagtactgtcacacggaaaagttttcaaaaatactgtgtttttataaaacaccagtagaacacaaaa

SEQ ID NO: 390004 - DNA, 1309 bp, Cannabis indica
ttatttgcctataaaatgagagggcaaggtatacactaatcactacacacatcttctaaactatataaatatatatatactccacacaaaatatataatcttgattttctatttagtccctaatatacaacaatggcaagtttaattatgaaggtactttggttggtggtattggccatggtgatagcatcaccagtggcacatgcaataacatgcagccaagtgtctagcaatcttgcgccatgcttggattacctaaggaacggcgggactgtcccggatgcgtgctgtaacaatattaagtcgttgagcaatgcagccaggactcccgccgaccatcaggctgtctgcaactgcttgagcaaagtttcaagcggttccaaaggattcatgagctacaatgcttctggacttccgggcaagtgtggtgtcacctcctgcaataggtaacattttatattgcattttattatactttaattttaaaatctgaaaaattatgatttaatttagtattaaatcttacatatttaaatataaagaaactcaatattaaaattgttttacagagaattaaaatttcaagttcgaatctcccaaaacataaaaaaatatatatatattatattggacaccataagcaatatagttagtaattaacgtgatgattaaataatattttcaataattattaatgattgtataataattagatttatacagtatatgctcttttttgataatattaatggtttattattttttatttttcttgatgcagaattcggtaaactccatggtgattttttcagcttatatatataaatatatatatatatatatataattataagaataaaaaagtgttggtgttatatatatttataaacctcactacgtgtatttggattctctttagagactcgttttgtaagtttatagctttaattagtattatgtaatgttttataattaacgagtaaatgaagtgttataaagattgtaatttgtttttaaatatatttttgttattcatatgtttatttctacatataacatataatataatcaagtaataacctacaacaaaacccaaccagtttttctttttcttgaagtttttctcaaggacggcctctggtacagtaactgtaagagagttactatctcggttctccctcaacccttttcaccccatttcccgacatttccagcatcttcttccctgatcttcccatgtcaacccttgattgcaaatagcccccgtatcccccgcgctcagcatctatttaatgcaatctctctctcc

SEQ ID NO: 390005 - DNA, 1573 bp, Cannabis indica
aaacataaacaacacgtatgacctacatccaagatggaagatatatctaaaatagatgagttacatgcaagaaagagaacttatacaagactactgagctaaatgtcctaattatgaaagttatacattatggataggaaaaatatatataatatggacacctaaaggacatatgtcaaaatatataaagatatcttatggaagtaatagacatatgtcaattcaaagtttaaatctttgttttttttttttttctttttgaatggaagttaaatcttgttaagttgacactaaagggtaaaaaataatatataaatagaggagatagtgtaagagaaggaaggaatatagagaaaagatcaagaatgaacaagagataaaagagtttctaaaaataaattctttaaatgtttttttttatcaatgataagaccatttttggtcaaaacacatatgtctttcctcaaattaaactctgtgtttcaaaagttttacttaaaaaaaaaattgtagtttaatcataggttacaggttgaaatgatgagaacataaaaaagaaggatacactaactaaaactcttccctcactaattaataattataaaagggttgtataataatatatacacgttaaatatatacacctcaaaatattcattatttttttcatctaaaaaattttcattattttgtgaggcacatttcaaaaaatataatcagttaaaaccaatatttaatttgtttgtacatgcatcattgcatataattactaaaataaataaaataatacataaacttccaaacaagataaagttattttatttatttatttttaacaaaacaaaaaatgacatttcttcagctcaaagtaagatggttggattaaagataaaaaaaacaaaagaacaaaaaaggagtaaggagtataatataatatagcataacatggattggattggagtcagaagagagaagactttgttttgagttttcctacttttgacccaaaagcaaaatgtgtgtagttgtccacaattgatcctttattttgcattatcaaatatcaattgtagctagtgaacataggtggtgttaatttaatgggaaaaaaaataagaataagaagaggaatagaaataaaataaaataatatttaaaatatataaaaaaaattgataagaaaaattattaaattttttatcattgtaaaaagttttatttagtttgtaaatgttgagaatcatggggttccatctcaaaaccaattggcaatgagtggagtagcccatgttcttatatatggctcaatactttcacatttaatccatgtgggacaatattctccaatatcccccctcaagatggtggctatttttgctcaccaatcttgaatcaccttatcataagtagtgccatttgctcgcttatttttttattttgcggctgggagttccatttgctcgcttattcttgttcgcggctgggagtaccattttgctcgcttgcggctggctaactctttgataggtgtggatcgaaagcccgctagggatatggctctgataccatgttg

SEQ ID NO: 390006 - DNA, 1415 bp, Cannabis indica
atttagttttttttggtgttgaaagaaaaaagaaaaaaaacgaaatttccatattatatagaaagagtttactttgtaaaagcatcaattaatataattttgtgtgtatgaatatgacagccaatacatctctcaataatcctattaccaatattgatgttcgggaagaatatgcgaatgccttccgcaccgaatcctatattgactttttggacacgtgtcattgcaatatcaaatgctgattacgccactgctattccagccgagtccaccagctcggctcggctcccatcctatcgtttattcattgaacatcttttggatccagatcagcccacagtcacacacatcttatccttggcccataaccggcccaaaatccatgcactactctctgaatatttcacccaaactgccaatgcctccatcctatgtggcactctattaaacgacattcagaagacacgtggcaaataccgttattttaaaacctcaatccaatcagttaaaggaggagaaataagtcatataatctcaaaccaactcactcagttttcttgctcaatcaacccattcacttctcctatctcatctccaagccgagttagaattgttcaaaaaggttgttctggattacttcataggctcgaagtaagccgagacaaagctcgagccaagcttcaactcatgaacaaactaaaacacggctcggctgttgtcctcgtggctttgacggcttcattgagtgtgattgttgtgacacatgcactctcattagttgtagccattccaaccttgatttcagcttcaatagagttggcttcatcaaggaagctggctagggtgacagcgcagctcgatgcagccgcaaaagggacctacatactaaatcgagactttgacataattagtcggctcgtggctaggctcaatgatgagttggagcacttaaggggagctgtgaaattttgggttgatcgaggagaagaagattggctgaaagttagcaatgaagtggtgcgacaccttaagaaaaatgagtcaaatattaatgagcagcttgatgagcttgaagaacacttgtatctatgctttatgactataaatcgagctagaagcttagtgatgaaggagatgttcaatccttctcaaccaactaaacaccactgtatattgtcatcatgttaataattttgtaatcatatcataatattaataataatatttatataagtatcaataacaaaacacacaaattttttacttttacttactttttttttattattattggagattttaactctacatttatagtgtcatttattgtattttttatatttgtatagtctatactttaagttttttttactatttttttttgtttcttccttttctaatacatgagcatgact

SEQ ID NO: 390007 - DNA, 745 bp, Cannabis indica
agggagcttttgacttttgcatttatcgatgctaacaaagatgagtacaaacaatatcacgaacaacttgtaaagctgattaaaattggaggagtaattgcatacgataataccctatggtttggaactgtggccctttctgatgaagaagaaatgattatgaaggatgattttgtaaaggcaaatagaaaaatcacgagagaagtcaatacctttctagcgaatgataatcgatttgagatatctcttgtttctattggagatggactcaccatctgtagacgtctctattgattaagagatccgaggaaatataacatttttatgaagacttttccaaaccacgtgatagacgtgtatttaaaataaacgtacctttaaaatttaagtcttatttttaataaatgagctccttcattgctactctattttatattttattttaattttttttaaaagtataactactctatattttttttttgtgagaaattataataaatgaatcagtgaaataactattttataatcttcctgtggtctttatatatttttttttaaatgcttctaattcattttttttttttgcttaatttactaattaaaaaaaattatgtactaatatgatttaatacaaatattaataatttttgtaaaaaaaactaatcaccaaatccaatttatttaagtctcatcaaaatctaatttaattaataatttgattgatttgtttttttaattgaat

SEQ ID NO: 390008 - DNA, 1786 bp, Cannabis indica
aaacccataaaatatataatttttgataaattaatggtttcttttatacaaattattttacagtgttacgaataccattttaaagaatcacctttacaaaaatacattaaatttctaattttgcaaaacaagacagtatttagaaatgacttaaaagataaaaactaaaggggtaaaaaaaaagaaagaaaataaccttgcatcatattaggtcctcgaagccaaatctctccctcttgatttgggggaaggggcatccatgtttgagtattcataattttggattcaattccaggtacaagcatgccagttgaaccagaaaatcgacaccctaccttactgtcctcaatggaaataattccacaagtttctgtcattccataaccctgcaaattcccaccaatgcaatctcatatggactattctatatattaattcacatttggaatatcatatataatacaaagtgttagtctaccatgatttgtttgatttaatgttttttgttgtttttcaaaattaaaagagttaagattttaaatacacaatttgtcttatcagacatattatataactttcggttggatttatggtatctaaatttaataatatacggtttctgcagggaatattttaggtaacagcaccatttttgttttatggtaatatttaataacatttttattttaaattttttaatcacaacaataaaagtaaaattttgattttttaaaaaataaaaatatatcttataactattttatttttaattttaaaaataaaaaaataatttctataaattcttttttattttccattgttgattttatttatgtcggatctagggttggggtttggggttagatcaagggtcgaagtcggggtcgaagtctaggatctgggtctgagtccgagttggggaggaggtccaggttgaggtcaaggttagggtctagatcttagtctggggtcgggataggggtcaggtctagggttcgggtctaggtttggatctaggatcggggtgtgggtttgggattcgagtctatgatccgagtagagatttgggtcaagttcagggtcttagtttgggtctgggtcggggtcgaggtccggttctaaagtctaagtggaggtcggaatctaaaatatttattaagaaaaaaaattgtttaaaaaatttttaaaagtgaatttttttatttttaaatttttaaaattttaatttttaaatgaacaattaaaaaagtgaaaagaattttattaaatattattttaaaaaatatttttacttttttaatttaaaaaacaaaaactaactaaaaaatattaccaaacgcaaccttaataaatgtgttctttttatttttgacataggtagagattttaagtgctaattgtgtttatatgatattatgtattatgttaattataactgttttttttttttttgaataatagacaaaataactacatataatgtacgatattataaaaaaaaatacagaaataaaagtgattgatctatattaggaaaagtttatttatgatagaactagagaatcaaaactgacaaaatatgttttaaaataaagattttcttttaaatatttgtaacacgaggtagtgtttattggcttttctcccataaatatataacccttatacacacctgtatatcattggaataaatacataagacactattttttataaaacaattatatttttacattttaaatttttttttatatttttacaatttttcataaaaacaacacgaaaa

SEQ ID NO: 390009 - DNA, 773 bp, Cannabis indica
tgcatgtgtgagctatttccttcacgcgttaatttctttctttgtgaattctctttaatatatgcgaccatggacactaagaaagtgtcaatggttgcgtattggtgatgtcatcttatcttttatactattttattccaaacaagttaaaccttttagcctcttattaaaattcttcttggattagaattttgaagtgaattaccttgtgctaaattaacggcatgttaatgttacattaataaattattttaaaaagtgagtaggatgtaactgaaaatatttgaaacaatttttatagtttagaaataatttttgcagcaaaaacaaatttagggacaaaacgctacaaaaatcaaaacaaatcttatttattcaagacaaaatcagttttttttagttgtggtggtgccaaataccgtcttatttttttagtcttcggaaagaaaaatatttacagatcctcctgatttttcatcaatttttctattacactttttcttttctaaccaaccaaccaactaattaatttcttttttctttttctcaccaaacttttcattcaactatattttccattgttaagtttatttatgacttaaaatatacaatccattcaaataattatatatatacacaataaatcgtactctatatataattaaaagttttagaatggtgttgtagaggaagcatttttaatttagagtgaaaaaataaagggttaatactatttttggaccctgtgttttgcaaaagttacagattggacc

SEQ ID NO: 390010 - DNA, 2414 bp, Cannabis indica
acatgtatgcttatcttttaatatcttcacttctattttaataataattattggacaagagttcagagctttataaattattgtagatacatgtatgaggatgataactattttaaagttcacatgaccacagtttgtttgcctcttcattataaaaatcatatatggttaaattacacacaagaaaataaatagccaaaagaagcattttgatttatcagtttggtgctaagtttgttcgggtgttcaattgtgatagtatcttttaaagaatttgtttgaacgctagcttggagtttgtaagctacttatgacattcagaattttatatatagatagtttgttccctcttttgacattcgacttcgcttctttaattttcatattaacaaataaatattgactgtttatgagttagactctgttttttcttttatatttcttagctaactaacctttaactgattctgtttggccgccaaaaagacaaaatacataatagccttttttttcatcaacagaaaatagacattaactttgtaacaataaaactaaggaacaatgttgtgtgtgacttactatagctttaaaagttcatgttctttttgttgtttcatttatgtataacttgtttggtactattttttattttatctctttttcttttattttagaaggtagctaaaaggtgacctaaaatggagaagaatgatctcatgtctaagcgagaacgtcgcatcaatacaaaggttgatactttgtttctttggtgttagttttagttgtattgctgatactggaatatgtatctaactctatgatagaattgaatgtgatactttggttttttaatcaatattttgtgttgtgttcctgtatttataattgttttgaacatttaggcttcgaatgtggcatgaagaaaagtttggcttgtgggtcttgttggaggatctttcagagggaagaaagaagaagaggaaggcttattaaactttagaacaagtaagtatttttgttaattgactagcttttcctaaaatttctctctcttttcgatggttcaccggtgctatggcaaaaagggggaaaatggccggaaaagggaattcaaaggggaagaagtcggggcctacatctttggatagggttattaatactagatccatggatgcagtgcttggtgtacaggaattagagatcactgaggaggatttacaggaggcacagatcgagaatccaatagaacagtgcaacgattcaatggagtagtgttacgaacagtatgttgaaaagatttactcaccagaggaaactgaagctctttttcagagacgaagtgagatcaggcatgacttctctgactggttaagtgtttctaatcgaactactcaatatgtcaattcagggaagaaagcttctcccccgatattacgatctggtattgttcgaaatctggatacaagctttgctagctctgcacagtagactgagattaaaacttctccaaaagttaagattgattttgcagatatagaggatgaggtaaatttctggcagccatccctggtttgctatgtaattgcggctaatcctccaatttctattctcgatggctttgctagaagattatggaaggacatggtggtgaaggtggggctgcttgctaagggcatcttcataattaggtttcaaaacattgaacaaatagataaggtgctgcaacaaggttatgtattctttgataggaaactgatggttatgaaaccatggaatcctatagatgactttactaaggaggaagtgaattcggtaccaacatgggtgcaattgcaaggcttagatatcaagtattggggagagtcttctcttttcaagatagtggcacaagttggagagcctttgcaagtggatgaaataacaaagaacagagatcgactgcagtacctaatagtgttaattcaggttagtttggcacaaacttttcctgatacaataactttcattgatgaacatgatcatgaggtggaattaggggttaagtatgaatggattcctttagtttgctataagtgttcagggattgggcatggtactgataactgtaggaaagtagatagcaaaagtgatcaagggaaacaagtttgggttccaaagaagacacaggttactcagccgattgaaatagatgcagatggatttcaaagggttacgaaaggcaaaaaagtgaacatagaaaaggtgtcagggggaactgaagtgagtaatagatttaaatatttggacagtgagaatgagaaaggtgtaactgttaatatgggagagggggagatccctctacttccaatggatagattactatgttggaatgttaggggattgacaaccatcaaaaacacaatgaaatcaggaat

SEQ ID NO: 390011 - DNA, 1117 bp, Cannabis indica
agtgggaattttttcacgtggactaacaagcagcctggacctgatagaatattctccaagattgataggattatggccaatcaatcttggatcaatagatatgagtttgctgaagcagtatttttgaataagggattatttgatcattctccagctattctagctctacatcttgcaatggtagggggaaagaagcctttcaaatactttaggatgtggaaatcacatcctaagtatgatgttcaactcaaagatgtttggaactcgaaatgtatgggagaaagatgttccaggttgtcaccaaaatgaaactgttcaagaataggcttcgaattctgaacaaggaaggattctgcaatttattgcagtaggtagaaatagctgaatctggtttggaggctgtccaaaaccagatacaactttagcctcttgatcccttactttatatccaggaaaaagaatgtcgagaaaagcttgtgagggttcaaaaggattataactccttccttttgcaaaagaccaagattgattggattcaacatggggatgcgaatacttccttatttcatgcttgtattaagcataggatgaggcaaaaccgaatcctctctattgagaatcaagagggcagtagagtcactgatccaacactcatatctgaggctttccaggaattttacaagagcctgctgggctctaaacttgaacatagaaggcaggtggagcagtgcattctcacatcaggtcctatggtgaattcgactcaagctgattatctccttcagcagtttaccaaagaagatgtaaaaaaggctgctttcaacatacctgctaataaatccccgggccctgatggattctctagcagcttctttcaggataactgggaggtattggagatgacatatgtgaagctgttttgaccttcttggattcaggtaacatattaaaagaaataaactctaccgtcattactcttgtgcctaagattaagtgtcctaattctgttaaagattttagaccaatagcttattgtaatgtaatttacaagattgcaactaagctattgagttctagaatcaattgttgggtttgtgccctaaataaaacccattac

SEQ ID NO: 390012 - DNA, 558 bp, Cannabis indica
atatatatatatatatgaatagtttgtattttttgtaaataaaagctgataaattgtaaaaatatttaaaattttatttaactgtattttgtaattttttttactatagtatttatgaaaatatccctaaaaaatatattcgacactgttaaaaaatgtttttttttaaacctcaaactttgtagaactttttctatgaaatatagaaattataatttatcatacccttcgaaaaatcaattgcatacgtgtcatttttttttagaaaaattcactgttattataattaacaatcatttacaacaacaaagaaaatagaataaggaatttttcccttccaacaagtgtgaaacatctaatttaagaacatgttttgctaaaccatgcctaacttagttagtatttcttcttgcatgagaaatattaatgttagggaaagaggatagtagacagcaaaaatttaaaattaaatcagaataactagttaaatctaatctaattaagagcatggactattttatgtgtaatttaggaacttagacaaaaaaaaaaaaataa

SEQ ID NO: 390013 - DNA, 676 bp, Cannabis indica
cacccaaagggttgccaaggtaatattacttttattaatatagctacatcacattaatttacgtttacatattatctagctattatcataacagtaaagagtgaaatttaacaaatttttaacactattgattatatggatatgtggggcatagtgctagttagtgattttttatattagttattaattaaaaaaattgtgaaacgtgttaatattaaattatactaatagccatttgttatattttgtaaagtttgaccccaatagtatttctaaaaaattgacctaaatatatatgtagccttttcttatatgtccattaaattattatattcccactacaaactagtatatttttttttattaatttgtcacaaatgtatgaccgctacaataactataatattatattatttgaattctttgttttgtgaatatgttattgtaaattttaatcaaattctcgaaaagaaaaacccaaacaatgttatatagatatgatattacaaaccattttctagagatggcaaaaaatccggatatctggggcgggtcagaatccggaatgaggcgattctgacccgcaacaaacgggtccccgacaaactattgatagatattctatgaacagatgacttaattgacttaattgtttcaaaaaaattaatttaaaaaa

SEQ ID NO: 390014 - DNA, 587 bp, Cannabis indica
caatttttattattaaacacattttttttaaaaaaaaaaaagaaattaaatagtttttttggttaaattacgttaggagagaccaaaacacatagattatccaacttgtgactagaaaaaaagagaaggacagcaattaatattaataagtatagagaaaaagtagtttggaagtgttaaagctaaaatattgtcagaagagtgaatatataaaaaacaaaagttctgttaatgtaatataacaaaatagcagagggggtgtagctcatatggtagagcgctcgcttcgcatgcgagaggcacggggttcgtttccccgcacctccaacttttaaaactcaatttcaattacattttttttatttttttttttaaagaaaacctaaattaattatatgtatattttaaaggacctgaattaattatacatttaagttcatttaatgctgaaacaaaagtggtatatattttttttaaaagaacaaacaaattgaaaagctggtcatatctccttaatgaaattattaaaaaaatagaagaaggttattttaatagaataccattaatcattttcaaaaaaaaaaaaa

SEQ ID NO: 390015 - DNA, 666 bp, Cannabis indica
ttaacatgatattagagaatcttattttttatttactcttacaattattatatcaataattaagttgatatttttattaattttaatttagaggccaaatttattacatcaaactttgattaaaaaaaatgcattaaacaaaagttgaattcatgataggggtcctcccttctagggaaattgatagtttataaataataattaattttttaataaatttataaagagtcatattatggatatatatttatatatatgggaccatcaccatgcaatgtatatatatctatgagaactcataatgcagatttatttggttgtcgggcaaatccaccatattcatcatcatgtgctaaaaaatttagtactcaattctaacttaagatagtagtacatgcatgagacaaaatatatgtatatatatatacgtacctatataattgtttattttatgtatatatataatatagattagagcattgatatagtaccaattagtcactttaaaaaatttacttttcagcacaacaaaacttgtgactaaaagtgaaaaaattgtgactaattataaattatgattctatgttgtgactaaaaagttcgtggctaaaagtattagtcacaaaaattacagttagttgtgactaaatgtatttttagtcacaa

SEQ ID NO: 390016 - DNA, 819 bp, Cannabis indica
attagtcacaaaattacaatttattgtaactagctaaatgtatttttattcacaatatttgttgtgactaaaagttacatttagtcacaaaaaaattatgttgtgactaaaaagttgtcactaaaagtagtaatttttttgtagtgagaatcatttttgttgaaaattcgttttctattgagagaaattacattagaataaatattatttaaatattatattttataaaaattattggtagattattttatttattaaataatacattagattttgtatttttttaaaaatatgcaaaataatatcctgagtttaattttgttaaaacaactagatatagaagtgttatgactagagtgactatatttttttatatctatttgtgctaaaaattaactttaagtttgttataataaaaaataaattaacatataaaaatattggaattagtgcttaagactatttttataatacaattattgaatatttgaataaaaaattattattcactcataattgtaatttatttacatgccatttatctagaaaaaattatttgtttttcaatgtgttgattcaaaaattcaaacatagacttctaagctaaattcacttgttaaattggcgagaataaaatatatgttaagtataaataaatagacacatcaatttatagtaattcactccatgtatcgcgatagtacgtaatagagctacgtctactttgagtttttatactccacgacaaactcatgaaattttaccagcattgatgtaaaatttaaataattaataaatatatttacaattaaaaaatta

SEQ ID NO: 390017 - DNA, 1020 bp, Cannabis indica
cactcaacctagcatgcaagcaagccactcggcctagcatgcaagcatgccacttggccaagcatgcatgcaagccactcgaccaagcatgcaatcatgtcacttggccaagcatgcatgcaagccacttggacaagcatgtaagcatgccactcggccaagcatgcatgcaagtcacttggacaagcatacaagcatgccactcggccaagcatacatgcaagccactcggccaaaaatgcaagcatgacactcggctgagcatgcatgcaagacactcgaccaagcatacaagcatgccactcagccaagcatgcatgcaagccactcggaaaagcatgcaagcatgccactcagccaagcatgtaaacatcctagcaatgcctttcttaaaggtgcaactaacacttggtaaaactttcctaagtgttgggaatgaaattggcaggcgtacaacctcaaggacaaggcatgcacacttagagagtacaaccatgccttcgacatggtctattgataagagaaggtacgattagtggaggcacctcacctgcaagcactaaaatcccaacaaagggtacgcactagcgaccaccttagcaacttgaagtaacttgacaccaaaaaatggtacaaggaacaagaccacctcctacagctgtagcttacaacaccaggacgtcagcttttcccatggggaccacaagtgtatctcaagccattagagcctatataacggggggataattgtaaagaccgcatatggttaatgctttgaattattaaataattaaggtttatgtatgaaattaattaataattatgaaaggtatattttggaaataaatttaatatcatttatgctatttaatgtaaattacccaatttctgtgtttgtgttcggaagctgtggaaagcgacgttgggcctttagagagtcatatgttgtaattctagaatattagtggggtgttatagttaaatcttagaggcgttagaattttcggggtttgttatttg

SEQ ID NO: 390018 - DNA, 1207 bp, Cannabis indica
tttttttatcttaaataaaagaaaagggcaaagcactgtatctctctacctttctcctccacatcactactctcccttgacccacccctaataagcaatttccaataccaaccccattaaacttgctcttaggtcatatcaccaccacctcccacataagtcaagagtaccaaattgttttcttgggagcactactatagagccaataaagcccttataaatagccctcattttattttgaaaaatttgtataatataggctttgagaaatagaattacttatcttctttaccattgttgttattttaatacatacttatatatagattttttggcaacttaacttagacgaattcttattatcaacaatatgtaaagaaataattatacacatggtgtttaatttcaaaaaagaaaagatttttttttattaattaatgtatatataggtagaaaaaaaataatttctaaccgttcataaagttatttttataaaagttaaaaaaataatttttttatttttacactttaaaacagtttttttttatatgtatttttatagaaacccacctagtaactaattgaggaatttaaattacaactaaaattcacataacaacccacataaaaattactgagcaattcaaaccgtattttttttaaaaaaaaaagtaaaaaaataatatatgagataattttaaaaaaaaaataatatatgagaataaattactgtattaattaatagatgatattcttatcctttctaaacagtggtttctaaatacctccatcaatatcataaaacaatacaacatattgataagtttacattaacttttatcatatttttatgagttaattgaataatataatccaattaataagaattattttaactaaatattgcgcgccaaacacaatttataggtaatttccagataaatcatattctcatctttaattagtattctaaataatcatatatatatatatattaatattttgaacatctaatactcaacgacctcataagtaatctcaaactgattagttgtaatatcatgcaaattctttaagacactctgtatagtgcaggttaatcatgtttaaaccgttagatattgaaccacttgaggctagctcaagtgaccatagagggtatgtgttggaggtcctagattcgagtccgaggttatgcatggttaaa

SEQ ID NO: 390019 - DNA, 502 bp, Cannabis indica
aaacccaacataagattcgtatgggacctctccaagcagttacaggggaagattcttttaaatctctgctatcttctttagtatgtgtaattaactgcttggtattttctttttcattcctttcagagcttgtcatgcctgaagaagatcattatgacgagacaattgatgaggaagacattattgtgaaggaggccattgaaccaaaacttgtattgaattcttctctgcgggagatggatcggtactagaacaagttccataattatgacaacctccagaaatacgagaccaaaagaggtctccaaactgttccaaaattattctggaataggctctctgttcacgaagagatgcttagtaaatgcgccgaaggaggctttagcatttggagttggggtcacgtagagatgggagcgcatctttcactaagaagttgttggattttatgccctaaataaaactccaattcaatgtaatccattttattcaacatcaataa

SEQ ID NO: 390020 - DNA, 735 bp, Cannabis indica
ttaaatatttaatttattggtagttattaattaataatattttcctttttagataaacttacctctttaaacattattgtgtattggaatataattataaatattgtgctatatataatatttgttaatttttttttttatcaaatttaatataatatttattacatcttgcattaaaaatagtgttttaaagtagtaagaaatgttatctcaccttccatatgttttgagtgttttcttgcgttaaaaataattaaatgaatataaaactacaataattaaaagaaataaatatttgtacggtaagaaattgttgtatggatgtatttggtcaaaagtgggggatggagtaaattattgaatcaagttgagttttgctatttttaatttagtggggttaagttcaactattatacttacaatgaagaaaccacttgaggctagctcaagtggccatagggggtgtgtgtgtattggaggtcctgggttcgagtcccaaattatgctgatgtaatatataaacgcttaaataaaaaaaaaaatacttacgaagaaaaacagttaactaatgtcagcaatgactgcatgatcacatgccctcccaataaaattaactatacctcacaatcacatacataagggcaaggcaatttccaatgggcatggtgtgtaagagagagaagaaatatgaataaatggtggtccaatttgtaaaaaaaaaaaaaagacaaaaaa

SEQ ID NO: 390021 - DNA, 1799 bp, Cannabis indica
agaagaattgatctaatctaataatattgattcactatgattatggaataaattttggcctaataaatacatataaagtctaattttcctttattttattagtgttttattttagttttgaattattttaaatgtatgggtgtgtgtatatatttaaaatgaataaaatatattaaaagatagaatataaaaaaagaataaagaagttgatggataggataatgtaaaagtttgctaaaaaatagttgaagtaggatcttagtaatgtaatttaaatgatagagaatagaagttgctcagaatgctcttagtgtaaagtataattaaaagaagtaaaatgtctttttttttttttttaagtaaaatgattaggaaaagtctattatacattccattgataagtgtatattaggttatttttaataatttaatagcttgtaaattaagataatttatttgagttaatattttaaattagattaaataaacaatctaattgaatgaatacaataaacatcttatattcaatatgggttttgtaatatgtaaaacccaatagtaaacttaattagggtttatgggactctaattagtttgttatataaagaatagataatttcataaatacacaaaaataataaaaagattacaaaaatacggtcgtgcacaattttaaatattttacggttttaagattttattcaaataaaatattgtatttttatatatttttatgttgtactcttgttattttgttgctgattttttattatttgtatattatttttatgttattttgatattattttgttgttattttttttttttttacttttctattgttttttttgttacttttctatagtttttttgtattttaattaatactgtaaaaacgtataaaaaaattgaacataaaagtacgtgtaaaatttaccaaaattaatatataattttttatataaagaacatgtttggtccccaagactaatctttaatcactcttctcaattccccttaattgagtgagaactcaaagaaagaaaaggttagtatgtgaaagataaattatttatgcaccaaattttagaatgaacacttgtttaattttatacattctattttaaaataattaaattgaagtaaaatattgccaaagtaatttttttttatgtagatttatttattttgagataatagaatgtatatgtttcttgtttatgggcttaataattattgattggataaacaatgaacatgcaaaattgaatggataataattataagagtaatttgcggtataaatacttaaattttactccgaatagcaaataagtacttaagtcgtatttttgacagtaaaaatactttctgtcactagtgttaaacttttgtaagtatctctctattttttgccatatatgtgtcagatagcgtaccatatcattaaaataaataccacatcactcttaccattaacaataaacattgccacattatatatctaaaagagaaatgcaaaaagaaaccaatggtgtcttagcacctcctcagtgtcatattactattagtgtaattaagtatcaagtctcatataacttaaaaaaatagcttttaaaaataatgattacttcttctttcaaaaaaatgattacttctggaatacaacgtcaacgtctttttttgtgaggggttcaagagcagtcgtctgagagtggttcggttcgggtcaacaacgtcctccgtttcagatttttgttttcatttattaatttactattattagtttaattccaatt

SEQ ID NO: 390022 - DNA, 1074 bp, Cannabis indica
tttaagttgaaaacgtttagttttatataataactttatgatttagagtagttatggagattctgactttatagaattgttcttgggtagctgtgggactagtgttgatgtttacttgttgaatttgaggtaattttgagttaaaaatcgagtttggaattttttaaagcttaagtttgagctttaatggcgttttcagtttaagggttaacttttaatttcggttacattgggactgtagtatatatggtatatatgtgtcctgtgaagtttgaaatgatttggataggtttcgagggtgtttcggtgagtacaaaatttgggatttttgggccagaccgtttctgaaaattcttgggagattagaaatcgtatttttgtcataaattttcactcggtgttcgttttggacattgtatatactatttcaaagcttgtgatgagctctataatgtggtgtatgctttagagccaaagtataagttttattttactgtatttgtactgtggggtttggtagaaaatcctagatcgtcttacgcaagtgttaagcagtgttttgggatatacacttattggttttattattattgtgacatagggcaaaaatcatcggggatgtttctccacttgggttgggcgacatgcttgaattcggatcaaaggtaagaaaagtatattgtactgcataacatgttatattgcaatacaattaatattgttgagaattaattggtattgggattaagatatggttattattgttatgtaatgaaaagattgcctgattaggcaataataatgtgaagataccatgagtgtgatatatgggctcacttgatcaggtgatgtgatatactttcggcaataccttattaggtacgaggactagtgatatgtgaattccaagttatggcatagactgaaactgttgttgggtttcttcctggcagtgtaccttattaggtacaggcggtagtgacatttgagtacgaggctacggtacgggctcccctgattaggtgatgcaacatattagtaccaggttgtagcacgggctcacctgattaggtg

SEQ ID NO: 390023 - DNA, 777 bp, Cannabis indica
tgtggtctgcaaatgtgttctgtctattgccatattccaatactttgtgcagcaaatctacccagtattaaatactttcgatttgattgatactgcttcgtattactcctctaccgtgagtgtttgtctatttatagttaagcctaggagtagttttgttttgtgcgatttagtcatttctatcttaccctctctgcaaagcttattgttctttagattttgtcctaataatagttccaactgattgtccccattgctcggtcctcttgtgtattctagttaccctctccaaccgtggactcttaattcaagtttggttttatttgctcttcataagttgttatatcatcagagtagcatatcgggcagtttcttcttctgtgtgtgtgtgttatttttggaagtgtttcttggatcagtcttacttttttccctgaagccgtgattccccttcacaatttttcccttcccagtcatttcacttccttgaacaactgtgccgtcatatactttatcccaaacaaacctttgtgtcttttaacttccattcagtcaccttcaatctttcacactctgccaggtccttcattgtttttcggtttcttactactttttagctacctaccctatggatgatctaacaaattctctctctgtcgctctcaacctcacagaaaccgagtgtactattcaaacacttcatgaacttactcctgcaactacacctgaaaccgagacacaacaagcccccccttttccttgtagccaaagtgcaca

SEQ ID NO: 390024 - DNA, 1459 bp, Cannabis indica
tgattatcaattattaatcaattgattctttggttctattttattaataaaaattgttggagaaaaagtaaataagcaaaacaatgaaataacaataataaagacaaggattattatgattcccaactatcctttattttactttctaatgcaattacccaatttttcttcttcttattcaatatacaagttgaattaagtagtttataatctggttaagacctataaatccaatctatgtaaaaactccctacatattcgtatggtaaaatttaatcacaatgataacattaagcaaaacaacttatattttcatacaaataatctagataatttcatcataaatcaatttgcatccataacaattagagcatattcaatttcatcttctaaaattttgatttgaattcttaaataataataatagatggttagtaattaaataattgcaaaattaaaataaattatatggaattgaatgaagagaagaagaaaaaattaaacaattacattaatccatgaaataaactcaagtagttcacataataatccttataagaaaattagctactagaagtcattctaaaataataaaaattcaattaatgacataaaaagatatagataaaagatatagaacactgtttggagtcttcgaatggtgtcttctactcttagccttccttctatgctcaaaattttctaaactttcaaattgtgctcaaagcttgtcttcagccctctttaaataatgaaaatgtcaagttgcatgcccataaacctcctaagttgcgaccttgctcagaaagttgtggccttctaaacatatttctcgttttgaattgcttcgctaatttttggtttcacactttccattttcttccaggaaccgagagaatgttggggccttgcttagaaagtcgcagtcttgatgaccatattccatttttcttcattttttttttcacttaaattttggaaagtaatgaaattggtgtaagtcaaatgttccatatgcaagtactaatcattgatgtatgtaatggtctgtaccaaaccagatattgcatatgcactaagtattgtaaatagatttatagtaaatcgaagaaaggagaattgggaagatgtgaaatggatattgagatatcttaaggggatcattgaaaaaagattagtgtttgggagatgcaacaagcagattgaccaagacattcttattattaattatgtagattctgactatgttggttgcatagacactaaaaggtccttgatagggtatgttttcaacatgtttggggcttttagcagagttagaatatatggccctcactaaagctataaacgaagctatttggatgatcggtttgtgttaagagtagtcagttagtctaatagttagttacagttaattctgtttttactgttgcttcaactggtgtattctgttatggtt

SEQ ID NO: 390025 - DNA, 1176 bp, Cannabis indica
ggatgatgtattatttatacaaatatatatttatttaaatttatttataatattcagtttttttttagtagaaagacaacaatgtatgaggtctggggtgtcattaataaaagaaagattattaggaaaaagactactttttttttctttgtatatattttttttttgtgtaaaatatgattaattatttgtgatgagaggttttcaatgactttattattaataagaaagctagttgattagttatcacaaatggacagattattatctaggagaaaccaaaagaaaattaggtttaagaaaaggttagaaggtaattaactttaaatggaagattatttgactaattaactttattataatttgttttctttcaaaagaaagaaaaaaaaactttagtataatttgtagctatttagatgatatggaaatgtagtctttgtttgtttctgattattttgactgatcaaaagtactttaaattttctttttctctcttttaaatcttgaaagttaattcagaaaaaagtttctttttattaattaaataattactattataaacacttatatgttagtactcagctgtaaaattaatactttggggaaagagtttgaaaaattggtctaaaattaggtaagctttgtttataattatatatagttttattgttgcattggaactcttgctttttacttaaaaaaattatatatacgaaaaatttacaaaaaattagaaaagaaaaagttacaaaatattttcatatggaattttttaatttttacactttaaattattttatttacaaaaattcatctacggtaaaaacaatacattattttttttttgattgttttatagttgtattatagttattattagattgttttttttttttttataatttatttatagatttataattattgagattaatttcttattattattttttttcttatttcagttagcatgatccaattttaaaaaaatattaacacttataaaatagttggtgaatgttataaattgtgtaactaataataataatatttaacacaatatttttgcactaatattaccctctaaaatgtcctaccaaataattatgcatgcaaagaaaattgatcctctcaccaaaaaaaaactcttatattatatacatatatatagat

SEQ ID NO: 390026 - DNA, 991 bp, Cannabis indica
cttgtctgcattgtacctgtactacatctttgttctttatatgtttctgcaaagcttcttgtaacaatcgactattatgtcatatgtaaaatataaatattatcttttgtaatatttctgtaactagctttactatatttggggaatatgcaggagaatggatgttggaagctggggccctagttttagcagatggaggactttgctgcatagatgaatttgataggtatttgttatgcttatcgggttttgatgaaactactttgtctagctttcaattatctgaacctaacatacatcatgtgcgtcatgatattttcctacctgtatttactaaatttattctctctatctcttcatcttttttcttgttataattgttagtagtatcattgatatgatactatttcttatcaaaaaagagaaaaagcattaaggaaagattgaaaaggaatggacatacaacacaaaaaagtgtaattgacattctctagaaatcattccaatataatatgcacatgttttctaaagcttatacattaagaaagcctaacgtttttttttaatcttttcatgcgttcttacaattttctgctcgttaatcaaatattgtatgaattaaaataatacttatatcatcattcaaaattttcaattatgattgctcgaggttattttatttttctgtttctttctttttgtaataaaactgtaggaaatcaagctagcaattagttgtaaatttacatttaatgtattttccatttactctagtattactaggtgttcacattgtattatatataccctttgtatacactaaaagaaatcaccagaaaataaaaatcatttctctcatttttctcatttttctacatggtatcagagcatgtaaaagctcctcaaaagaattttttcattccttcctttcttaaaattagggttcttaaaattagggtttggaggctctatcttagaaaactaattaaaa

SEQ ID NO: 390027 - DNA, 1022 bp, Cannabis indica
tagtcaaattaacagtacaaacaaaaaatattattacatttttctatttacaaaacaaaagtggtgttatttttagtgctaaatttgtggtcagtattagaaaattataattaaatgttaaaaagtattaattaattgcataaaaaaatcactatatgcaatgacggacctaaaatttttattatatggaggcttaattgttataaaaaaaataggtgtactttattgaatttatttatttttctgagtatttttttttaattttttgtactattattatcaaatgaaaagaaaaatatttaattttttttaactggggctatagcacccacactattgcgagtctctcccattgactatatgtaatgtacgtaagtaattaattgtgattaaatttaaatttttagtcaactagctatatggtggaggttttcacttttcaagactaattaaataaattttgagatgatgtttgcttaatttagtatttagttaggtatacgtaccgaagttctagtcaggtacctacgaaagttctaaaaatataaatttaatattattatcgtaaaaaattaaacttaaataatttatttgtaactaaaaaataaacttaaatatttacgctgtaaattatactatctcagtttaaatagatggattaattgaaagagaactcatcaatttgagtctttcagaaagataactttatttgaagaaaagtagagagagtgttaaaaaaagtagttacaattaagctttctgtaagttaagttatataaattacaacttagtgcacttttctagaatgattcattaatgaaaatacaattcaacttactctctccttttctctttccttcttcttctcaacagaaaggactaattaaataatgaaatatatatatactcatatttaattaatataaacaacttatatatgtattttgtttctattcttatattgcccttgtaacaccctaactaacataggcgtattacgtaatttttaaacatactgtgca

SEQ ID NO: 390028 - DNA, 931 bp, Cannabis indica
ttttttttttctaaataataatatatagtaatgacagctagtaaaatatttcttccaaatggtcacttttgtgcattgctacaaaaaggaaaaaaaaaaattaataatatattaagttctaaaattatatacataccccttaagattttctaaattatgcttatatatttttttagaaatattaaaaaattgctgtaaaattgcatattattatttgctcaaaaatgttatttaactaattttaaagtttaaattaaataaaaaattaattaatattttcttgaattgaaagttggccaaatattttaacaaagcactattttaaatagactaattagaaatttttactctctgaactttgacatagatatcaaattatacccattgaacttttaaagttgttaaaaatgcctcctaaattattgagattgttgaatttgagaacttttgtctaatttagtaaaaaaagtctaacgtgcatgaaagttcatggggcataatttagtatatatcaaagttcgagggatctaatttggtagatatcaaagtttggagagcatggtttagtgcataaacaatcattgaaatagtaaaattgaataaaattaaacaaaagtccttaaatctaataatctcgatagttcaggaataatttttaaccgctaaaaaagtttagatggcatgatttagtacatgttaaaatttaggggtaaaaattctaattaacctttaaaatataggtaatatttgcttaatcattaaaattctatcaaaaagtgttttcctttatttgttagtgctctttgctttgaatcggccatgcacaactcacatgggctttttttccctttagtccacccaatccaactaatgctttctcccttattaacaaggggtaagttgaaaaatatcatttttattaatcaattaa

SEQ ID NO: 390029 - DNA, 1042 bp, Cannabis indica
agagataagtagtaaaatagaaatagacacattaattcatttaaatgaaataaagtgacataaatctaactctaaagcccatatacgattcggccgtaagagttaattcaacccaagtctttattttaagctcatctcatctaacccaactctaagtgaagcctataaatagaaagagaagagagttttgtctactaatgatttctaagctagaaaatcctaagctagaaaatcctaaaaagctcacttcttcttctctttaattttcaaaacttcagaggctattttctcttggatttcttcataaaatttcgcgctccttagtgttgagaacttgcccacatatttcaaagcaatactcaacatagtgaaaatgactatgtagtcactttgtcaccagaaggagaattcaggtttagacattgatcatactctgcaatagaaatgattaagggttagaaatctgaacggaaggagtcatattattccgttgccatcaatataagttttctataacttttacgtatttaattcattttttaggaaatttatatttaggatgttagattatagaactataatccaacatacatgttagtaaatctaaatcttggtaaaatattttcaacactctattcttcatccctcctaggctctttcaaaatatagcctaaatattaatccttgtctcttcattttctcctcgtattttacaatttttctcttactagtaatagatattagggttgacaatttgtatttgtgtgtcgataccattaaagtaaacttaaacacaatcatgatgagtttaattagcatatcacacgacacaataatacaactataacataattattaagataaataagatttatttgttagcaaaaaatatgaaaccttagacaatttactaattttatcttgtcaacacgattatgacacgagatgattatcaaacatatcgatataattatgacacgttactattagggttcgtttggtatgcaagactagactgaatttgactgaaaatgattggact

SEQ ID NO: 390030 - DNA, 1529 bp, Cannabis indica
agggagggttttttctgagctttatcacagaggctctcaacaaaagtactaaactgttaacgtagattttcgttaaccaaatttgagcctcacggtaataattccacacagaaaaataaaagctatagaaaaataaaatatgaacacagggtttttttacatggttttgcagttaaaattctgcatagtccacgagttaatcttattcagatttttgagtatttttttatggcctctttcatatgagtttttttgtccctttttatagattgtttgccactatttataattacatagtgggcagttaattacaaagttgaccagaatatgtttacagccattatccctaaaatcgtgggatctgattacatatcttgaatgtaaatgcagtgtataattttgaaaattgtgtagctatgattttctcaattttactgggtcaaaaatattgtgtattaaacacgtcttcaattgctgaatttggagatgtctcgaaaaaaacttgattatagtgatcccaatagcgagcagggaccatacttttttccgaggtcgacaatgtatgtcttacgtcgatcgcgggtataaagaaatcttctgacttaccaaggttatgagcctcgctcctgtttgttggatgaagctataggaagtctcctcatattgagatggtaatctcacatacttgttctcgagctgatccgacttttacacttagttagcttattgcaagctaaggtatgtgtcagttttctccagtgcctcgctattcacctttagcgacatatggtttctcgttagtacactaaatatactctaatacctgcgtaattaataagttattccataaaaatattttgtaccgattcacattccctacattgatttctcacctaagatcttacagtcagcgcgttacaaatatactctaatacctacgtaattaatgagttattcttgtaccgattcacattccctttgtcttgacacgtgtcctccagctgaatttcgggtataacaccaacaccatagggttttataataaaatcattttcagcttcttcttcttcattacgaaaatacaacaccagtaaccacgagaacccacgaagaaactcttgtaggaattttatgccgtaaagaaacttaatttcattataatcttatttactttcaataaaaattagaaaacatatcttgaccttgtcatatgctttcgtcacatgttttatacatgattataagtttaatatataaattttgtaaaatcccgaacatatagttattcataattacagtgatgtcgttacagtggaaggtaattgtgattatatgtttcaaactacttagtcccttgatttatcagtgcacttgatttatactgacgtgataatcagcgataaaatttacttacacaatgatatgttgaatgtgctttccaacgcattaccaaaataatagtatcagatgtattggctataaacttaccgtaatatcttttctaagttaatgtcacttagttgatctta

SEQ ID NO: 390031 - DNA, 1392 bp, Cannabis indica
aagaaatagaaagcaaagaaggatagcaacaaatgagaagtaagaataagaaagggacaggttaaggtggaagattggaagtctatttataaggtgaagaagtgaatcctagccattggatcattgtgagatcaatggatggggttagtcacatgcacacatgagaagcaacatgtgactcacctacctcattgaatggtcttatcaatatttaagtacgtcatgtcagatgctctaccaaacgaggtgcaccacaaagagcccaaaggacgactcaactacagtaaaaaagctgcttaaaagtgctcttctagactaggggacaagtgttaatcatgggaatcccaataaatgaatgatctattagacaacatgtatgagagagaaataatgtaagattcccaaaacaaagaaaaaggacaaagggtggaccccaccctttttgtccttgtccccctcgtcacttctctctgtcatatctcctcgcgcacccaactccctgtgcacccagactccgtgcgcctggcttccacgcacccagtactctcgtgtaatatctcgataagcctaatgataaataattagggtttatatttatattatgagttaatcaggtaataagtgggattgtgatcctactaatctatttcagcataaaatttaaatttgctataagtgagtaaataagcgtaatttataaattacgaagatttatatagcatgtgtgaatgtaatgtgagctatatgtggaataaaaatatttttagattcgacgaccttgaagactcgataaatggataaataagcgtaatttgttaattacggaaatttatttaaaatgcatggatataatatgagttatttgtgaaataaaaatattttcaagttcagtgatcttagagacccgattggaggccaagaatatcacaacaattttagttagaaatattgattggattattgggataagttgattttaaaaataccgaggtattttggagtactcgaagttgaccaaatatcctaaaaatataaatttcttaatggctaaaaaatgataagataactatcaataataaattttttattaatattattattataaaacatatttgatacgtttatatagatatgttatatgttttaaaaacataaacagaaggaacgaacgaaactcttttctctcagttcaatgaaattttcatctccttttatctatttcctttaattttgaactcaaaatctagcgatctgagctttggtaggagcgagataacaaatctttgaagatggaaagcttaaggtattgtttaatttcattttaagcttagaacgaatagtttatataaggttacgtgaattatgaaaattctgactttatagaatagttct

SEQ ID NO: 390032 - DNA, 940 bp, Cannabis indica
atgcccaaaatgcaagcgacgtcatttaggcgaatgtcagaccaaagcctgcttccaatgtggagcactaggccattttagaaacaactccccgcagtcatagaagactaaagtcaagaaagaaagccttagggttcctacttgggtatttgctttgacccaggcaaatgcacaagttggtcctttgactattataggtgagatttctattgatggtattatgttttccattttgattgattcaggtgctacacattcgtatatctctagtagaatcattgagaaattgagtagaccatgtgatatcatgtctagtggatttggtaccttgttgcctactggggaagtggtaatctccaggaagtgggttagatctcttctagtattactagaaggaagaaaattatcagtacaaatttagaggattttgatgcaatcgtggggatggattggttggccaagtacaatgctaccatagattgtaagagaaaaatggtgacatttgaactagatggtgaaaccttgtttatctttacaggaaatattcagaattctaatgatatcaacactcaagaccagggaattgttgcaagaaggatgtatgagatacctggctagtgtaatagataccacaaaggatacaccgaagggataggagaaggttcgactagtgtgtgaatttctagatgtgtttctagaagaattaccgagactgccaccaaagagaaagattaatttgcagattgaattggtaccaagggctgagctagtttctaaggccccatatagaatggcactggaaaaattgaaggaattaaaagtctagttacagaacctggttgacttgcggtttacgaggctgagtacttctccttagggtacaccagttttgtttgtcaagaagaaagatgggtcactacgtatgtgcattgattatcga

SEQ ID NO: 390033 - DNA, 901 bp, Cannabis indica
agtcatgtcaattttgttatggtcaactttctcccaatcaaagcattgaatcaatgaccccaaagccaaacctatgactctactagctaagcctctcccagggcaagatcttctaccaactccaaatggcattagcttgtatccaaattcattctcaatattaatgttttcaaacctttctggcttgaaattctcagcatcttcccataatttaggatctctatgtatagcccatacgttaaccaataaaattgtatcacgtggcacatcatacccgcaaatgttacaatcattggaggagtaatgaggtacgagaagtggacctactgggtataacctgaaagtctcagaaattacacactggaggtaagggagtttcgagatatcagattcttccatcaattgccgttggccaatttcagagtcgatctcggctttaactttttctagaacatgtggatgatttagtaaattagacattgcccattctaatgtcagtgctgatgtatctgttcctccggcaattgattgctgtacaaaataaagtaaatttttatttctttttttttttaagtgatcggcttaatataaatatgtatagataactatgataagtggctaatatgataataattgaatattttatctattaatatgtatactaatttttagccattgaataaattcaagggaaattatcaaatctctaaaattataagataattaataattcttttatttataattaatttcaaatcctatttattaggttaaagtaaccaaaaatatagacctaactccaattttgattttattataaaaaatatagaccaaaaaataaaaaattttgtaactaattataaatcatcatcttatattgtgactaaaagatccgtggcta

SEQ ID NO: 390034 - DNA, 1218 bp, Cannabis indica
ataaagatgatgtaaaattcctaaagctacatcaagaaacaataaagaagagttatttatgagggagattatttttagtgtagtttatttcttttatttcaaaagttgttattttaaaaatatctaatatttatcaagttcacattttattcaatatttgattaattatttgctaattgttagtacatgcacatttaattgtcatacataaaattctactcattttgcttttaataatcatgcatctcatattagaaatatgaatcatatgattatttagaattgtcctatatgttttatgtgccttggatttagagaaatcaattacataaaatgctaggttgaattaaatagtttaataacctggtaatccacaccaagtgatttacttcaaaagttagttacataattaatctatatttttcaaaatatgatattttcaaaattcacatagtaatatagtattagttaaattatttttagacctatattatagtaatttaactaatgtattacaactggttaaatattaaaatcaatttttcaaaaatagttttaataaagagaaacgcattttaaaatagtgagcgggagagggttgtcatctgtaatgaaacccacaatctctattattagtccaacactgaggatattaagagggcctcgagacgactttgttttcgtctccttaaggaaggtattgaaccatacattgtcaaggttggtttcctttatagataggacaaagtgacatattttagtgcgatactgacctttaaggtgacgttactaagttaagtcattgaatctgaaataatgagttacactcacaaagtcatgtccctgtctttgacactagaagatatgtaacgtccccgcttcaaggctctattaggcccttacacccacgaaatgatggtttttatacacgggcacgccactctggctacttcatggaatgaaaactgaccctacaaaccaacacgagtgtttccagcgtactttttcctcactcacacacttcgtggaaaaacttcccaggaggtcacccatcctgaaattaccccaaggcaagcacgcttagatgtggagttctttagtgatcggctactgaaaaacaagatgcaccttattgatatagatagtaccaatcaatctatttaagccctcttcaactatgtagtcccatacctacacagtctcagaatcatcacactt

SEQ ID NO: 390035 - DNA, 1995 bp, Cannabis indica
gggcgataaaaagtcgcccctaaaagtctcttttcttgtagtgtgggtgacctcctgggatgttttcccaaaaaacgtgcgagtgagaacaacgctagaaacacttgtattagtatgtagtgtcaatcgtcaattcaggaagcagccagagtggcatactcacgttacaaaaatatttaatctcacccattaacttcattgtttcaatacgggagattgaaactacatagatgaacttgaatttataatatattatgagcaataatataatatacagtgattaatatatacaaaataattgaatttatttatttatttcagtaaaaatattatccattttatatggtttaagggcaccattcccaacagaaaacaaaatattaatttggcttacatatttgtttaatcctgatagattttgatttacttaatggataaaaaactaataaagacttaaataataataataaaataaaagcattaatcaatatctaatattcagtttaaatttaaatttaaattcaaattcaaattaagcttatttatcttatataaattaatcttcgtttctctcttcttatgtgccacctttgattaaaagatcaattccatgaacacattccccataatgttatgtgtaaggtagttttgttggagaaaatatttgattaattatatatttattgggctaaaattatttttctaaacctaagctattcaatattagtagaatagatcttttttcttttttcttaaaaccccattctacccctcccatttgaatagccccccctctctctctctttcccccttctctctctggctctctgtaaacacacccatggaggagcacacaatcggaccacccacacgacccacaactcatgaaccaccccgatttcgcgaccacaccacccacaccacccacgaaccaccgcgaccaccacccaacaccaacaatatctttgtcaaaggtaatccctaatttttttcatgatttagggttaaagcaattagattttatggttaagtctgtgtttttagtggagaatatgtgatttttgaggtttttaggctcggatctgtatttttatttcaactccgattgaggcccggtatagggcccgatggtagtttaatgttgaaggggttgaaggttgaagaagatagcccgataggtccgatgggcccgatatagggcctgatgggtttcatattgtcttgttgatatcggacctatcgggccctatattagaccccgtcagttagtattttttagaaaaattaactggtcatcgggtcccatcaggacctatattgggcctttgtcttcaaccaagatctaatttttcatcactatgcattgggcctgcatcgaggatgcatccgacctacctaaaaaatgtattttctaacccagaaatcatagattcaaatctaaccctaaatctatcaataaacaatattttaaccctaaatgaataagaaaaacattcaaaaatacaatagggggaaaccgtcattgagggttgttcatcttcgtggtgggtcgactgggtggtgggtagagtgggtcttcgtcctcatatggtgggttgagtggtgctcagatggtgggttcgatggctcttttccttcgtggtggtggattcagtgggttcgacaatgaccgagagaaagggaaggcagagagagagtccgtttttggaatgagaggggtaaaattggattttagtaaaaattaacctattttacaaattttgaatagttttgaattagtgaaataattttagtccaattaatgcataaaaaattaaattgggaaattatagtaaatggccccaaatgataggagtatgttagtttatgtcctcatttcaaaaaaatatagcaaatggccctaaatcataagactatgttagtaaatgtcctcatttcaattttttttttatttttgatttttttagaattagaagcaaattatttaaacattat

SEQ ID NO: 390036 - DNA, 1637 bp, Cannabis indica
agcatgcctttagaatagacaattaaattttttttggatgaaaggaatctcctcattgcctttcagttatttttttctctacctataacagcaataaaataatgtaacagtaatgttaatataaaggtgttattcgtgttcttggaggaaagacacgtggagtaaccggaaggtaatcaccatatctaaaacacaagaaatcttgctcatattgaacatgaaattcggaaaaggaatgcaaataaaaataaacagggtcgttcctaggcataggcgggctaggcccatccatagggctcacacctttcaggggcccaaaataaaaaataaaagaaaaattattaggtttttatttgattaagtgtattgtaaacaataaatattcataatttagttggttaaggtgtatgacatgcatgttatataatcccgtggattcgaatcccataacactcttttcaaaatatatatatattttgaagggtcccaaaatcaaatttgccttaggtccataaattttcagggtcggccctgtcaacaaggcaaaatctctccatgcctaaaatgtaattattgatcttctactgtattttgcttcggacaaacttgatatataggacatgtctatggtaagtatcttacttttgtctctatggtaggcacatttttagaaccatagatatttaatctaagggtcataaattgagtgcatataaataagaatacttacaatgcattagattattcctaaaattatttttttaataatatttttaaattaaataataatttttttaacctcctccaattaattaatctctttttaattgttctctctctttcattagaaacctcctccaattgttcattggttcatcatctgggttatttcaaacaattgacattgtattgattatattgacatggaaggaaactcaggaagagaagaacattgtcctcagttactagatttgattcctcaaaacagagagtggttcatcaacaaagaaaaagagaagagaagccatggcacatcaaatgagaaaaagttaaagcttaggcttggtccaccaggtcaagattgaccactaaaagataacagagaaagagatgagtctctcctttctcttggatatttctttcaaaacactaataccatcatcatcaacaacaacaacaacaacaacaacaacaacaacaacaacaatagtggaaaccatatataaccaaaaccacaagtttacttccttagagaacggaggagttgggaatgttctatccacttcccccatggccttattctactctgtcctcttcaggttaccaaggaaaagctccaacgtcatttcttccaagcttgcctgttatagcaaaggaagccctagagtcttgttgccctaaaacattagtagagtggcagtaggtagagaaaaaagcattttcaccagctactattcctacaaatacagctgttaccaacttctctcaggaagaataagaatggacaaaatggggctcatggaaaattataaataacattaaaaattagcttttaaaaagataaaaaaattaaataaatttttattggttatcagataaaattttaattgggtgttaatttttttaattaggtgtca

SEQ ID NO: 390037 - DNA, 1741 bp, Cannabis indica
ccagctccagtgctcatatatattgatatacaaatagatgttacgtgtcaagtcacgtatgttaattttattttaatttttagttttttttaatatcataattttaaaataataatattcaatgtagtgataatcattgaaatttgaaagcatatagtgaatttaagtaaaaaaaaaattactattatactttgtaataataattaaaaaaattattattcatcttaaatttatcttcagaattaatgaaaatgctcatctggttaaattatcaaaacattcaaatttaatttaaaataatatttaaaatttaactaattctaaatatcaaattttgaaaataatttttaataaaaaaataaacaatatgaacaaatttattattaattgcaatggattaattatatttagatttaactaactacatggatgctgacaacaaaatttaataatttgttatttttttttattttttttaaaaaaaaattcacccaataatttctcataaaccaagaattctgttacataaccacattttatatagaatagatacatactaattaaatagaaaatcaataaatataattctatataattgggtatagaagaaagcttcataaccaacaaatatatactgtgatgctcgtgacggtggtggacaaagtgaccacaaggtgggttttagaaataaggattagaaaatgatgaaaacgtgattttcccattttcaattttacagcataaaatttggatacaacttgaattgagttttcaaatactaacataccaatcagttattattgtgggtcctaccaattttaagtttttgaaaacataaaattgtatttgaattgggtaccaatcagataacaacccaagaattcttggcaaccaccttgatatatcaacaataactcagcaattcctacaaaatgaacaaattgtgtgtgcatcataggggtacacacgggtcgggttttcggggtttcgggtttgagttttcgggcgtcgggtcttggaaatgcacaaccgaattcgattttcgggtgtacggatgtagtcaggttaagctcatgtttgagtattgaaaaagaagaaaaattatataaataaattttcacctcaaccatccaagttttgaaaatcacgattgaaagctctaaaaaaaaatattcgacttaagctcatgaaaattgccattgaaactcatcaagtacttatataatcatgcaaaaaaagcaaccaagccacaaaagaatatgatttttttaaaaactccatagatttagcaatgacaatgatcatccaataatcatatcgaaactgcataaagctctaacactgataaaaaattttaaatttaacttaaatttccatataagaaactaaatatataatcaatggaccccttttgtgtttttgatggttagaaagttgtatttttatttttttatatatataataatatatattatagttatttaagatatttttgtttgaaaagaatagtttttgtttagcttcataacttaaaacctgttttacaatttttaaaaacaaaaattcattttaaagaactaatagggtcgtttggctaaatattttaaaatcactttttagaaaacagatcgcattaaaattattataaaatatcataatttagagaaagaaaataaagaataaatgaaaatataaaagtcaaatattaggaaactaacaaaaatggaatattgattacaat

SEQ ID NO: 390038 - DNA, 927 bp, Cannabis indica
tgctgaaagtttggatttattatggtagaggggcaatggagaaaaggatttaaacaagagtgtggtttgtttgtgtgaagatcagactactaattagtactctaagcttagttatacattgacattaggatgatgcaagtgctagtttttaacttatttgtttatattttgtaaaatggatgtacccttttatagtgcttgtagttttagcttgttattgtaaatttttgggcaggaccaaaaaatcactaagtgacgtttggttggaggtaatgaaatagaatggaaagaaaataattttcaattttcatgtgcttcgaattttgatatgtgccaaatcttatcccctgaattttcatccatgttagacttttttttactaaaattggacaaaagtccttaaaaatccaacaatctcaatagtttagggggaatttttaacagtcttaaaagttcagggggcataattttgcacatgtcaaagttcgagaggcaaaaattctaattagcctttttaattgacgatctttattatatttagggttaataccatttcagtacccgtattttatgaaaaattatcgactagaccatctattttataaaatgacaaattagaccttatattttctaaaatagtataaaatagtactatacgttcaattttcgataatttctttttataaccaactaaaagataatttgtagcacaaacagatgcagataatgtactcagttttgttattaattattattaacttttattttaataaaaaatcagttcagagtactattttacactatttttttatgggtaaatatcattttggaccctatgctttgtaaaagttaccaattggaccttctattttgttaaatgacaaaatagaccctgtatttttcaaaattgtacaaataggacactga

SEQ ID NO: 390039 - DNA, 535 bp, Cannabis indica
atatatatatacatatacaggccttggattattaaatggtaaataacaggtcaggaatttgaatttcagatacgacatgattaaatgtttaaaatacatttaagtgataatgaagagagatcgagtagaagtaactaacctgttctgttcctctgaggttgtgagtaactttccttggaccctcttcctgaagaggaacaatgattttagtaccctttaaaagacctgaagtaccagttgaatcaacctcgccactagcagtgagtgttttcttcatcattaaccttaacctatatatctctgttaatatagtaaaaaaaaatagttgttataatcaattgttcaccaaaacattaccacaaaatgagaccagaaagatagaaaataaatacggtttgatttcagcttatactcgctgctgtcaaaccaccaatactgggatttgctgcgcaactgggcagagagagaggagaggcgacgcgcagggcgcgcatctgggcagagagagaggggaggcgctccatatgtctaggcc

SEQ ID NO: 390040 - DNA, 931 bp, Cannabis indica
aaaaaaaaaatattttctgtttagtgccataattagtgctcctttcctggcaataattatcaaaagcgagggtccaacaattcactacatagatggcctaacaacatgaaagaaaatgaggcttataatcatgaggcctaacgtcagttgcctctcttcaaaaatattctaatattaacaatttggctatctttattagatatgaaataagctacaaggccaaaaaaaagatactcaattagctcattcagccaaaaaaaaaccccttttaagcatgtttgcagatttatttaattggtaggtgcattgttattgttctttcagctcacccaggtttgcattttttttaatttttttgggtaacattataatcatttttttgaaggaaccattataagtatattgtgttcgtatggtcaataggtccactaattaaaatgggccatgtgttttttttttttattatttttgtattttttattttgaaaatcaaaggtattgaagaatatgcattattcctctatgatagactgatcttttcctccatgaggtggacttgagagctttaataaagcatagtgctaattttaaggacttaaataccatatcttttactcgtaaagaattgaattatgataatgttctatcgtagtaagacaggccctacatccgccgttcgatgtaatcatgtggttttcttataattaacccttttaggtcaaagtaatgatgtacatatacatttatataaagtaatgctgtattattagtcataattttttttagattttatataatttaatttaataattatcataaaatatcgttaattaattataagacactatctataaatagtgttagcagggccggctttgaaatttagtgggccataggaaaaaaaatatttttgggccctcatttaaaaaaa

SEQ ID NO: 390041 - DNA, 2247 bp, Cannabis indica
tatacattatatttacaaaacatggaaatgacatcgttgtgctctgtattgtatgatcactgaaactacttcgtacatcgaattctctctcggtcgttgtcgtcggagatttttaaaaaacaatcgagtcacaactagtaataatatactcattctctccttccctttctccatcaacgctgagttaagaaaattcactattgatgtttttgcatctgagttagggaaactcgagtgacaatctacacgtagcacagaatagaaaaagagcgaattaagaatagttgaaactaatttgtaagcatgatcatacataaccatgaggatttatcattgcgttatgaggtttatgtgtatagcctaaacaccaacattctcatgagggttggtgatttttcttacttgggtggccattgtgggaaagacattcttgtaggcagttctatccattagttggtagaaactgaacttgacaccactgaatcttctattattgtcgcatttgatctaaccactaaaacatacatccaaattccacttgccaacataaatgctaagggcaatgtccatcacttaatagcggaattgggtgggtggctttgtgatgttgcaaagtccaaaagatattatagatgacttgttgaagcagagtatgttaagtatgttactgggcctttcaaatatttaaagcctctcaagtatttcaagagggtccataagttcttttcgatttttgcttttatcagtttcagttctaacaatgttcggtaggtcggtttgaacattttttcggttctttgaattttatgctcacccctacatgatatcgatggatacaaagaaatgctatggaggatggggttgtaaattgtaatctatacatcagtataattctaaaattaagagaaatgatgtggcattctatgattttatctttctatattaatttttttcttacttttgtatatattttcaaattttaggatgatacgcccatagtatatgtttaaaaaaaaactcttacattgattagttaatatgttatattttatgttatactttataaataacacattcaattattcacttttatttgtatcaaaattattattattttttttctctttttatataggtgataaattaacttagtattacccaattattttaatttaaaatttttaatatatgttataaaatatcaataataatagtatcatatgattatattttatatattattataaaatattttatcactttttaaaattaaagtttattttaattaaaaataggtaaaatttatatgtaagcaaaaataatttataaaaaaaataaaaaatatagaaaaaatatagaaaaactctacagaagggaaagggaccacttttcccttactggatatcgtctctatgtttcacattagacaaattataattttagatctaactatatattttaatttgtactatatatttttatattattataaaactttagggcttagaaattattataaaatattttacaataatatatataaaaaaatataattatataataaaataatataaaatattttatttgaattttacattatataaaataacatataatattatagtaaaaaaagtatattatacattatatttacaaaacatataaactacatcgttgttttctgtatcatctgaccactaaaactatttcgtacatcgaattctctctcgttcgtcatcgtcggagattttcaaaaaaataatcaagtcacagttggtaataatatatttatcatctccttccctttctccgtcaatgttgagtgagggaaattaaccattgttgtttttgcatctgagttaggaaaactcgagtgacaatctacacgtagcacagaatagagaaagatcaatttaagaatagttgaaactaatttaaattgattgataacaaaagagaaactaatcaaggcaaaaaaaaggtatatatatttattaattagacttaataaagtatcttaattaacaaataaatcctagaatctcttttcttcacaattaagccctagcttagtgaaaattcataaactagacatagtctaattttagaattataattgagtaactaaaatcaattaactgagtcttacaagtagtattatctcaactagtatggagaccatgggcctatatatccgagtctatatgttcctcgatatagatacgctattaattatccattgttata

SEQ ID NO: 390042 - DNA, 1237 bp, Cannabis indica
aatttattaagtttaattattttaattttaataaatattcaaattaatattattctttttccaataaaagaaattactatattacttgtactcctaaagaaaattctggtaaattaatatttttgatgcatgatctttatttacacagtaacatctatattatttatgtgtggtatatattcactcaaaaacgtacgtaatagattacttatgcatgaaaacttaatgtgaaattatacttgtatccttacctagcacatataaaattaccaaaatatattaataaatgtttgtgtcaactcaaccgattagtataacccgttatattaggttagtattgtcctttatgtaatttttgttggcttaaaataatataggtgtcagaaaaagaaaaaataaaacgaacacgtgtcacttttttagattggactatatttgttgatagtatatatattatttattgtgcgtgactagtcatgcaattgacactgtgcgtgacttcatccaaagtctattgccccatttatacaatttagtttctggatataaattattactcattgtatgcatatattgctccatatttatacaagtaagttcttgaatataaattataattcattgtatgcatatattgctctttatatatatacaagttagtttttaaaattctaaatttactaaataaatgagttatattaaatttagattttaggtcctacgcaaaagtatgatttactaaattgcccacccattaaaaaatatacaactttggagctgatatattctacaataagaaccggctataacaaatatatttagagtgtgtcactactaatttgtataatctatagatattttaaaattattttaatccaatataaacttattttttttaaataggcttgaaggactcgcaaggcatataaatatatttaataatacttgttcgtgatcggtctagaaaaaggatgttgagtgactacattcagaatctatttatatatagtagaactttatctaagaatatatttaggaccaaataaattatattctaattgagaggttataattaaataaagttatactaaaaataatttaaaacaccaaaaatatcaatataataacaatgacaataaataatctttaatactacattataatagaattatttttgagtaaatataatatttatacgtgcattataatttgaaaaaaaattattaattctacataa

SEQ ID NO: 390043 - DNA, 1336 bp, Cannabis indica
agagagagagagggagagggggggggggggtcggggaaaagagaaaaaatggggaaaagaaaatttaaattaatgtatggagtgggtctactctatttgttttatttcaaaatatacattttactcagtatgaccgagtcttcataatgcacgtataaaataaaaatttacttttatattttcaatacattgatatgtaacattgtattttattgtatgacattatgtattaaggttatttagaccatctcacaaaatttttaaaaatttaaataatttacaatatatatcaaaaatacaaaattgattattttaaatctcattttttatattatgaattattcaaaaatttatgaaaattagtatgatatcttttttttttaactaaaaactcactgtattattaattaaaagtgcaaatttgctaacaaaatagcatgaagatcagtcgggacaaatcccccactgaatcgacgacctgaaaaagaacaagaaacacgagctaaataattggtcgccttgttcatagatcgtttaacaaagataatagaggcattatgtaaagagaaaaatagacgtttacaataaaaaataatcagttcaaatggagaagacatttggagagtatgacgaattgcataaacaactacttaacaattaatttcaataacaacttgagaaagattctgatgtttgatccaactaacaacctatttgacttccacaacttctacgatagtcagttgtatacacaactaggcaacaactttaaattagcttcaatggtatttcttccatggtcacgtgctaatcaaccaatcctaagactatcattcccactaactgcagaagcatctacattgatcttaatcatgctcacacccaaaaaaaaaaaatcaatgctcgctactaatagcagaggaagaaatagactcccttacattagtgtcattttttagcatccttccattgattaagatagacaatagtagatgaaacaactccattaataagattacttttaccttgtcaaattaactcattatgagcacgctacaaagccaacaaatcgttgccacttgattagccttcaagaaaacaatcataacattagaaaaccagctaaaaaaaaaatcaagaaacagtattcctagaattgaagcatcaaaccgctacaagcaaagtgaagtaaacagatattcaatcataatataaataatagacttaggtggcgtttggtaatactttttaaaaacagtttttgtttttaaaattacaaaagtaaaaatatttttaaaaaacatgttctataaaactgttttcacttttcaatttt

SEQ ID NO: 390044 - DNA, 547 bp, Cannabis indica
aatctggagttcttgttgaatgtatgtttatggaggactctactccatctaaattgttcttttaattttgagagacgactccaattaatgaagacgacttgttcaaaaaatatgctcattgtgtattaaatgtaacacatggaggctatcctttaatatttttaatattttaacagctgaaaatttattttatataatttcttaaaataaagggttcaatttaaaatttaacctcaacaaggaaacctttttacattaacttagatatactctaataaatatttttttagaatgattgttatttttaattttgtcttattttggtttataatataaatttgatctaaccattgatatttttcttttcttatgtcttataattttttagttatgcagttggggttcgatcccatgatcctctcaaaagaaaaaaaaatatttttatagccacttgaactaatttcaagtgttatattattttgaatggtaaaatatattttttacatataatattgggaaaaaataggaaaatacaaaaaagaaaaaa

SEQ ID NO: 390045 - DNA, 1320 bp, Cannabis indica
gtatttgtgaaataatccctaaacataatgcatagaaaagggtctttctcaatatcaggccttagctagttgtcattcgaggaaattagactctatatcctttttatattgtcctcttttatttttatcttcttttttaaagtctatcatttttacctcttttttaacactttatcaattttgcccctgtcacttcaatatactcttcatgtcactactttatatcaaggtattttgggtacagtacatacaaaaagaggtatatttcaattaaatataaattagaagtagatttggttaattgataaataaaagaggtatttttcaatttaccccttgcccatagcttgggccggcactaagaagggtattataggtatgaatataaagtgtgccgatttttttaattttaataagcttgtgttcaaaaatttaatataatcaaatgcatgcatataaattcaaatttccctaactatatatacatcatcatataaaaaaagtaaaattttaattattcagatatcataaataaaaaagggtgcttatatagatatacttattttttaggggtgcacggtaaaagtaccatttaatttatgtacactatctaaaatatttgaatatgaaaacctaaattcaaaataatgaagaatacaacttctatttatgatagaataattagtattttcattgtttgacgacactatgtaatcgtgcacctaaataaataaattgttaaaaaattctcattatataatcatagcctttttattaggttttacttgtttttatttgattttcattgttttaatcatttttttaaaaaaaatacatattttgtattaattcttttgtaattattattaaaaattcaataacttttctgaaaagattctttttcctaagaattttcatttactcaaacattcttcatatttacaaactcatattattatgttatgaaagatgcaaatttcttacctaaatcaacaataaatacattggccaataataacttttagattagagttatttaagagaaggcatgatttagaaatagaaaatatttaaaaaaaaaaaaaaactaaattaacaatagaaatttttacaaaaatacaaaatggattttttattacataaacacttacacacggttacctcaacacttttaccttttctctttattttattatatatataccacatgcacactcccccatgcatatgacacgtgcatctcccccatccctcctcaatcaaccatcaatcacttccctctctttttttcattttttcctttgatttttcatttctttt

SEQ ID NO: 390046 - DNA, 1267 bp, Cannabis indica
gctaacatactagaaaaagagaagatatatataattaaatagataaaaaaaataattaatactaataaaataaaaagattagtccctcttcttctgtgttattttagtcttcacccccatttaatattttaggggataatattggcgcccaaaaaaataggagcgaagaattataattacatcgtaattacaaaaattatcgagcatgcacacgtgtagaatgctaaaaaaaaataacaaaatacttaatatataccgaattataaacagatcatgtaactaaagtcaaataataaagaaaagttataaaatacttaaggaattaaattgatctatcatttgcacatactaatcttattgttcttttctaattattaatttcttttagagtaaatatgcattaaaatttaaatacataaaaagaaaattatttaaaatactacaattatggttccaaataaaacttaaaagttttttaaaaatatatgctaatataccacaaaaagatatatataataaaaagataaaaaaaaaaacaatactagtaaaatgaaaagattaacagtccatttttttgtgtcattttatcttctccatttaatatttggagataacattcgcgcccgagaagataggagcgaagaatcatattttcatattaacaaaaaattattgaacatacataggcaagatgaggcagtcggttcctctaaaaaaatcagaaaaaaaatgtatgtgtaatttaattagttacgacatatattttataataaaaaaaatgatatttatagacataatatattcattgttttttcataactattaattttttaaggtaaatatgtattaaaatttaaataagttaaatagaaaattatttaaagggtaaatactattttggaccctgtattttgtaaaagttactaattagaccctctgttttgttaaatgacaaaatagatcctgtattttctaaaattgtacaaataggacatgaactgattttttgtcaaaataaaacttaataagaatatgatctaaagatgttatgagaaaactggttacattttctgtatctgttcatgttaaaaattatcttaaaggccccctcacatgtgggatccatttaaattgtggaattgactctgataccatgttgcatattagctaggggttgcacctatcatcaagagaaaaagaatccacttacaagtctttctacctcaaaactagggctgtacgaaaaaattcgtaaaccacccaaacc

SEQ ID NO: 390047 - DNA, 1678 bp, Cannabis indica
agagagagagagaatatcagagagatgggcaagtgaggggggccggggttgttggtttcttgcaagggcgccgccactcaaagcaagagaagaggagagaggaatcaggaatagagagatgaggtgtttatttagggttttgaaaattaagaatacaaaaaaaaaaaaataattcgatttataataattattatttttttctaaaattgacacgtatcattaacaatttagtcgtcattgatagtataattagtgacgaccgtcactaattaatagcccaacattttaaaaaaaaaaattgcatattatatatgatcaatgaaaatattgtcgtcattgatatttgttttcagtgacgactttaaatatcgtcattgatacttaattactttcaatgagttatcactaacaattttttagtgacgatctatgttcccattgacatcactaacggaaaagacactcttcaccgatgaaatttatccccattgaagcttatttttcttgtagtgtatgactaaaaatatatttattcacaataaattataaattttgtgactaatacttttaatcacaaactattggttacaagaattagtaactatttttttcacttttagttataaattttattgtgattaaaaataaaaaaaaattataccaatcatttttagaaatatgtatacatataggttatgaaaagaatgttagccaggtacatgtatagaaaaaatatattataattgaaaagagagaatccctctagctaatggtgactgtgtcttgaataataataataataataataataaagtattgtcttttttctagttaatattgttaacataattaaagctattctgctttcatgaaaattaatggatatactttttattttatttttatttttttgtcatgagaaaaaaggcacgagttcatggtatatatagctataggctataaatataatatatatatatatttatatatattgaagatatatcatttgagctggcactgaataaaacttgtgcatgcgcaaaccctaatttcttgttttcaaactaaagaagaagaaaaacactaattggccgtttatgtcacttttagaattttttttaaataacacgaaaaaaatgttgagttttagtttatttcttcttttgagtagtgttgtaaacatgggccgatttttgtcacgacatgatcaaaactggtacgagcacaatccggtacgtaaaacatatgtgtttaggcacgatatggcacgaaaagtatgagcttattttgcatgacacacggtacgtaagcataaataaattagttcgaaagcatgacattaaaaagcctaataatttaataattataataacaataataaatatttatttattaattaaaatgataatagtattcaaattataataattataattatttttatattattaaaaaaaaattattgtgtggaattattattaaaaaaaaatattaaagtaattaaaactataaaatacacatatattttagtatttagctcatcaagtgtaataaaaacgtaaaaatataaggtatgaatttgagctcgtatcaataaacaagttagtctatttaagaaaaatgagtcagcccgacacgaattatactagatttgcgagccgtgtcaggcatatcctat

SEQ ID NO: 390048 - DNA, 607 bp, Cannabis indica
catcatagaagtttcttgagaatatttttttgctaccaccaagaggcttagcctgctataattgcaactgtaaagttcacccagcaaagcatttataagtaatctatcataaaagtgttgaatttgttaaaaagattaatttctaaaaataatttctaattcttaagataatcattttttataattaacaaaataaataaaattttgaaaaaaaaataaaatcttgttggtaacctactctagcaggtcatcaaattggcacttcattagtctatttagtactcatcaatgcgtattacccattaagaaaacatcatatatgtatatatcaatatatataatgacattttaaaattcctctaaaactatttttctctccataaatctacaaattgatattttactattattttaatattttttttttaaaaaaaaaaacataaatctacaaatcgatatttgacttattttaatatttttttataaaaatataaaatatttttaaaaaagttacaaaataaaattaaattccaaaaaaaaaatattaaaacttaaatcaaatataattaatcataaatttcgtttatatacatacataaaatatcaa

SEQ ID NO: 390049 - DNA, 3501 bp, Cannabis indica
aaggaaaattttatttatgtttgtttttaaagagtaaaggtaaggaatagggatgaaggttatgaagtagaatgctataatttagttattactagccaaagggtactccctttggctagttctagtattttatagggagatctagttgcttagtcttggcggttagttgattctattcagtttgaataattttctaattaaagttttattctattttttattttttattttttcaggtggaacttcagtttttattgagttgagagcgttgttggaagatgttatagctttattgtctaaatttccgggggcagttttgtcccatggggctcgctctaagtttttagcggcctatggttggcaaagcatgctctgcggttagacgatgagctatcctggttcgaggaggttccagcgccggtggcagcgtgggcgtcgtaaattcatgagtgattttaatcactttagtcaaaaaaaaaaaaaaaaaaaaaatttgaagtggctttggggcaaaaaatcaactctagcaagtcatccatttctacagtctcaatactgatgatgtttgtagaacaagaataaatcagctccttcaaatgaaccaagcgaatgacatgagtatgtacttaggtttgcctagtaccatggggaggaataaaacggccgttttgggatatttagcgagtgcgtaaaaaacttcggggtgggattcaaaaattcttttaagggcgcggaaggatgtcttgattaaatcagtggctcaatctcttcccagctatgccatgagtgttttttcattgccttgggaaatcagcagagatattgagagtttactagcaaaattctggtggcgcagtgtgtgggaggctcaggctttagttcgtgaaggggctcgtttgtgtgtgggggatggtacgggtatcaacatattgggggagtcgtggcttcctgactctgttaatccttgtgtaatctcagaccatcttgctttacaacatgccaaaaagtggctaacattataagtatagaaggtagagattgggatatggatattttaaatgatgtcttcgtcgaaagagatagagagttgatccttcgaatcccgattaaagtaagctcataccgtgatcatctttgctggtctaaagaaggcatgggggaaaactcggttagtagtgcataccaaatgctgcaatcgaacaaagggaggggtgatgatgcaactgtgtcttcattttggagatgtctgtgggctttaaaagtacctctgaaggttaaaaatctggtgtggcgtgctggtgtagattgtctcccgactctggctcagctggcgatgaaacgggtggctgttagtcagcagtgccctctctgcaacgacgaaccaaaaaccatattgcattgcccagttacatgtaaggtggtgcaacaagtgtgggagagagtggggataggcacaaacagtttttcagggggcagtttcgtggactagtgtgctggtaattttaaaaacaagtcggttgaggtgaaaagcttgatagcaactttgtgttcagcgatttggggggctagaaatgatcatatatgaaaacaaaaaacgatgaatgcattaactattgtggcttctgcaaaaggttttcttgatcaatggcatattgctcaaaatctcaaattgagactccttggtaatgtagatgcggtaatttttgaagagcgaaattgttttggtgtggcgtgtgtgactcgagatcattatggcttccttttggctgctcttacgaagctctttatggggtctattcatccgatggttgttaaggctataagctttcgtgaggctctaagttggctcaaaacacacccagtgaacttggccactattgaaaccgactgcttgttggttgttcaagccttgagaagtactattcatacaagttcgttatttggtgaaattattattgaaaactttacttgctcaagttagaaatgtttcgtttaattttgtgaaatggtcagctaatgtagttactcatgagtttgctagagcatctatgttacatcctgatcgtgttttcagtatgggaaatgtcctaactgatttgctttctagtgtggttgctgattttgaatgataaataaagttgaatttcctttcaaaaaattaattaatgtagacataacctatattattatgcgaatttgaatagaaattaattatataatatgtaggagtgttcataaaataatcgattcaatccaatctacactattcatccaatccaatccgcaaagtgcagatatcagcacttgtgcggattggatgttaattgacatgtaaaagtaaccgatccaatccaatccacacatatttataaaataattaaaaaaaattatatatacaaataacattttaatgtaaagaaaatagtaatttaaaagtctaatacatgtaatacaattatattgaaaaacttaatagatcaaatatatattctattcttatatatttttttaacatacaatttaaaataaaattaaatattttttatacataattttttttctttctttgaatttattatttgttattttatttattttaatgtgttgttggagacataaaatgactataatttgttttattttgttgctagttatgtgaaaaaaaatatttttttcataaatattaaataatttaatattaaaaagtaaccaatccaaagtaatcgatccaatccgcacttttgcggattggatttgaattattgtgcggattattggatccaaaaaatgtaatcatgtttttagattaattgctttatttgtatctaataataattatattattatcatattaattattacaagtatgctatctaaataaaattaatatactaaatactaattatttattaattattgcactaatttcttattctccttttgttttttctgagtagaaacacaatttctcttcatctttcttcaaatttatatattacctcgtctaatgctattttttctatcttaatcatttatttttcaattcaattaccaatagaaaaataaacaaacaaacaatgaaacaattttatacataaccattttctattttttaaattctacacatataaaaaaagtaatttattcccacatcaatgtcttcttttgtgagggattcaagaacagtcgtctgagaatggttcgtttcggctcaacgacgtcctttgtttcagatttttgttttcatttattaatttactattattagtttaattccaattaatatttttatggggttagaattataaggagttcattccttaattaattttaatgctgtgatcgtatttatgtgttgaaactaatttagttttttcattagtcttgtcttttgatatggttctttagtcttgtcttttgacatggtttttttagtcttttcttttagtttttctagttcgagtcttgtcttttggcatgggttgtgtagcttagaatcat

SEQ ID NO: 390050 - DNA, 942 bp, Cannabis indica
ttgagtttgtaagcggcataaacacattgatttttttagtggtataagtaacaaatatttataaaactgtaatttttttctactttcgtcaatacaggctctattttaaatttattaaaaaaaaattggaagtaacatacatcatgtatttctgtccagactaaataatttagaatatgtgtcttaaaaaaacacatacatgttaatggagagagagagagtagaaaaaaaaataataactttaagagagaagaaagagtaagaaaatagtgtaagaaaattgatttgtaagaaagaataaaatgtaataaatgttaggggaattatctcatattatttttttttttacctttttttttttaaattttacggtttgggtttctaaagtagttgcagttacggtttctgtacgattttttgttgcaatttacattgtagtgctggttgcaataggggtttctatacctaattctgtaaaaatgcaaaaaaaaactgttttaaattgtaaaaatgaaaaaatccctaaattttatattttatatgtaagaaaagagaaatattgttttgacatgtgaagaagataaattttatttttaatggagtgaagtagataagttaaaagaagtattatatcactcctttttattaattttatggaaattaaaaataaaagaaccgccacaaatgtgacaacaagtttcccctcacacatcttaaaaatgcttctttagttaaaaaatatgtattataaaattattttaataaataaatatagttttggtaaaaaaaaataaaaattaaacacatcatcataagctgataaaatgacaaaaaggaaatttaaaaacttttatactgcttaaaaataaacaataaaaaagaaattttaagcatatcatagtaaaaataatacaattataaaaaaaacagtaccccatataa

SEQ ID NO: 390051 - DNA, 1112 bp, Cannabis indica
aatggatagaaatcgtacaatatatgacaaatattcggaccctacaacaacttttgatcatgatggctttaccagtaccatggtacagtaacacagggtattaatagtacacatgatctaatatttatacaattgagtaggttgcttagtcgtgagcgagtattggagaacattgtcccacatggattaaatgtaaaagtattgaaccatatataaagaacatagggtacttcactcattctaattggttttgagatggaacaccatgattctcaacagggaggaataaaaaaaagaagacgtcgttaatattattacgatccaatataaattacaatatgttctctcaatgtttaaaattaaacctttaaagtttttttgttttttttttttttttgagaaaagctatatatatatattaatgaacaagttcatttgtaacaatagcttcaatagggtttggatagacaatcctccaaacaataacggtatccacccgtaaaacgaatttatgcgcagcagagttagtactccgacaaacataatttagagagacacttgagaaagaggacatatgatagataatatgtcgaataagatcatgaaatctaccataatattgttgaggattgttaacactttgtgagacaatgagagcataagtttcaataagatgaacctcacaattaatatcacccaaccattgtagacagtaagagattgcctttgcctcaatttccttgacagaaaatctccccttaattggtttagaaattgcaacgataacctgatcacaagaattatgaacaatacctccagtacccattatttgaccatcattatctaaggctgcatccacatcaattaagtttacaacttatcagtgggtgggggttgcaacggttgattgttgacaagtaaattctgagaaggcttggcaggcgagctgttggttatgcggaactcatgaaggtataccatagcttttccataagattaggttgaggaagagctcggagttttgtgacatttttgcatcatcttttaattattaattttagggaaaaaacaaaaaatacaaaaagaaaaaaaattacaaaatactttgggcc

SEQ ID NO: 390052 - DNA, 687 bp, Cannabis indica
aatgataccgcgcttcgcgcggtttctataacattagaatggtaaatatctaaattattttatgttcttataaaaattgtttataatattaattaagaagtaattagaatttctttattttattctctcttttaattactaataataaatattgaatataaaaaattagaaaaaaaatcacaaaatttgatacctacaactcttgctaaaaatagaatgtgcattgtcacaccttctttacataggagagctatatatatagatagattattgagttgtcatcctttcctttttttcgttgtttataacattttttagttgctaatactaatattaattatgaagtaattataatttattttgttattctcttttaactaaaaataataaatactaattaacaaaagtcaaaattagaaaattataattcttaataaataaaatgtcatgtcacctctttttgtactacttattatatcataattatatagggaaatttgatcttttatgcttcaaaataatacatggtgttattttgacccaaaaaattacacattgtgtaaatatgcctattttgtcatgggaaccccaaaatgccctccccatctaacagcctccccttctctctctttccctctcgtttgatctctctctctactcgcactctctctctttcactttctctct

SEQ ID NO: 390053 - DNA, 1185 bp, Cannabis indica
tgtcaatataaatttgacacatgcacaaaagtatacacataagttctctatatgggcaattaactgtgaaaaatagatgacaccttaaatttattagcaattcaatagtttggagggttttactatcaaaatttgattttaaggttaagtgcaaatagagtaataattgagagggtttagccataaaaaaattcattttataatttttaatattaaaataacatatttataattacacttttatatttatatatatatattataatgtgagatagtttaaaaaaataatataataataaagaataacttttagtgtaaattttagtattatggttgaaatagaaaaaaaaaatttagtgctaaaattatattcttttagtgttgatttaactctaaattcaaattttaatattagaattgcttttaaattgagaatgtactaagatccaaatagtagaagaatagagaagaaaaagtagctatgaactacattcaatgagagaagaaataaattgtagagatgaaaaaccaaccagttaaattatttttagaaagaaaatgaaaaaaaaaaaaaatccagcttcataaactttttatatttccaagagctggccttaatttaatgtacataatagctaaaataagttgaatgttagaaagggtatttagtattttacttagtattgatataattaagtattaaatctcatataaattaaaatattaataaccaatcgtaagacgtcatccctaaacggtcgttaagtaccgcacaatagcaattctcctaaaataaacctttaaaagtcatccttatctaaggtctaaaaaatgtctatatactattatggacataacaagggtaaccaccacttttgtaaatttttataggagaatttagtgcaaggcaaatacccaaatttcattatttagcatttgattcatgattattactttacaagagacgcgggacccacagtaacggaaaaaaaaagatgataagatcacaaaattttgtacttacggaaggagaaaaatcgctcattcctccagtccggcagtgaagacatcgccgagaaagtagacatttctgggagatttctccggatattgttggaaagagttccggcatactactctattatgatatcgatgttgggttttatgccctaaataaaacacatt

SEQ ID NO: 390054 - DNA, 1026 bp, Cannabis indica
cataatatggaacatataaaagggaaaaaaaaatataagtaataaagagaaaaataaactctcactctagacttttatttattatttagtgatgcccaacttgattgatgtgatggatttacaaaaaaaaaagaaaaaaaaagaaaaaacctgattgatgtgatagacctagacaaatgacattagcttgcaacacataaatcaaaagtaaattaatttaattaaaaatggtacaaataagacaataatattgataattttaaaagccacgttatttatgaaaattagatacaatataaggctctagatgtaaatttccctaaaaaagagtgaaatcgtgagaggtttctaaggagaaaaatcactaaacaaacttccaagttgctatagtaaggacgatgtttgggcaaaattcacaaaaacaacaacttagaaattttattttatatattctatttaaatgtttatacattataatatataattgggaactggaactcaacactgtgaatacacattcttatagtcacttgagctagccacttaagctagcgtaaatggttgaacaacttgaggaggagcaaaaggagtgtatctcaatataatctcacttctcctcctaagtcctaacctcttttattttatatacattaaaattattatattgatacttagataattaaattactattcagtacttagtgttcattattgagtgaacatttattgtttggcaaaaaatttacaggttttttgtttctttgcttgtttgttattaaattttttaaggctaattaggaattttacctcctaaattttaacatgtaccaaatcgtgtcccctgaacttttctggccgttaaaaattccccttgaactattgagattgttagatttaagaacttttgtctaatttcatttaattttactattttagtgattctttatgtactaaagaaagctcctcatactttgatatctgccaattcatgcccctcaaatttttacatgtactaaatcatgcccc

SEQ ID NO: 390055 - DNA, 1871 bp, Cannabis indica
aatttttttttttaattaatttatcaattttactcccgtcatttaacgaaaccctccatcctcctaactctccttgaaaatttgctcactactcaaaatcttggtcatcttcaaaaagccttccaactctagtttttggcgctagttatggcaattaaaacttccccctaaagttctaaattttctgtggagagtatccacaaacaaccttctaacaagatttcaactttcaacaaagcatatacctattgattctagttgtcccttctgccttgcagctcctaaaattgctttacatgttctggttcgatgtcactttgctcaaaattattggagcagggtccaagttccatctgtagcacttgatgtgatgatattttctagctggtttgaggtggggttggattcatggaacacagtagagattattgaggctgttatgatctgttggtcaatttggaaacatagaaatgacctagtttggaactccaaatagctagatgctagtgaagtggtaacagtggctaaattaaactatgttgacttgtttaatgctcaaaagaacgatgttactgctggtgatatcaatggcccgaatgtgatgaatcatgggcattggactgcaccaaaattcccatctattaaagttaatgttgatggtgcacttttcactagtcagggacgatatggcgtgggtttggttgtaaggtctgctgcttgtattgtgttgcaaggtaaaatcttatctaagggaggagctttgcaacctcatgtcatcgaagccattggtatcaaagaagttttatcatggagtacaactaatggatggacaagcgttgtagttgagtcggattgtttaaaagtcatcagtgatttgcaaaagcctaaacatatggtttctccttatggctatattctttatgattgtatgactttaattgctgattttgatgttgtttcttttaattttgttaaatggtctgctaataaggttgcgcatgttttggcgcgatcttctctttctgaggctgatcgtacttttagtagggacttctaccctctgtaattgcatccttggttttggataatttggtttaatgaagtttaatcattattcaaaaaaaaaaaaacattcctagtgagaccttccataattttcttcatctctttcttcatttaaaccatattaatattaattttaatattattaaatagatattttaaatttctggtgaggcgcacgatagcattcgtaggagctagagtccatgaaagtggtataggtataaatagatgtatatgtatgtatgagtggagaaaggtcatagtttgatttgagggaagaaattcaagttgaagaaagaaagagagaaaagccctaagtactaatgcgaccaatccaatggttaaggttacacctttgcttacagatctttatcagttcaccatggcttacgcttactggaaagccgacaagcataataagcaagtcgtgtgagtccttttctttttctatttggtcaacgagaattgtttttggaatttttgtttggtaatcgtgaaaccttttgcagtttgaagttatgaaacaaatttactagtttattttgttatgttctttgccatgcaattttttctaaaagagtgatcagaatcacactatgacaatcgtcgatgcagagaaacttccaattggacgaaagcgacttttataagaccaggttatttcgaaaatttagacaaaacaactcgagaccaccttcaagaggcatgtgaaaaaaaaacaaccaattggacgaaaactacctacaaaatagatatagacattggattagcacactatacaacgataatattataaatttttaaat

SEQ ID NO: 390056 - DNA, 3387 bp, Cannabis indica
cattttgacatgacaatgaacatatttcttagactcttcaattacttcaacattcacaaacttctttctccaaagtaaaagaatcctaccttccattttattactagaaaagaactctcagtgagaaaaactattagccatcattgcttgaagcctctcccctttaactttagtttcaaccaaggcccctacccctattttattcaatctccacacctccgcaactttctcttgtttctcttttttattcatacccctaacgttccaacaacttatattacaaaaatccatcaatcacaagttgcagtaacttactccccctatatcttcaatttgttcccccgttagaatcgcaaaagagttcctgagaaccttctcgctagagtccaagtgttttcttgttgagcccaagcccttggatgttcagttctttggagctttccattccccatcaattttcttccctgttgtttcacgatcctggccttctgacccttttttttcccttcagagatagctttattgctttggacagcttcaacttgagtttcattaactgtagtctcttttgtagtctccttagctgtgttattaactactgtaacagcttcaacagttactccttcttttgcttgccgtgattcttttactctagatacttctttcggcttttctaccttcctacattcagccataatgtgtccaaatccaccacaatgtttgcatttcaccgccagcactcatactcaatttcctgctctaccaattgcccatattcattaacaaaccaaaagattcgctccggtttatctgtaatctccatttcaacaagaacacgagcgaattgaactcgagttcgttccttagtgtgcttgtcaatcattatcaggttccccacagtacttacaagagcgctcaatgtttttttaccccaatattggagttcggtccttagtgtgatttaattatttattatttattaatttctgtaaagtatttattactaaaaagctaattaattttggttaacaaaaatctgtgttaacatcttttgatttgtaattttttatttttaaatagtaaataatgacataatatgtatttatacaaaacacattggatgggcatagtcattttttcattcagcaatgaatgttattcctacgatacggctggtagcgatccaagggaggacactatgattgtggttagaacgtaagtcttacattaactttatctaagatggaaatcttacaatgttaataaattattatattgtctaattaaaaatttatttcattgttaaggacatttgacatgaatgatgctttcaatccaagaggaaagagtaagaaaataatttggtttccagtgaaggtatgatgctaaaattgaaaagtattttatttaatcatttattttatgtataaattaaatattagtacatattatattatatgtagggctaggcaacctaatgacattgtgtgcagtttttacgtcatgcgactaatgagagattttatggcaaaagatctaaaagaatatctttcgaaacacgtaagtaattaacatattcttttaaatttgatcaattttaattatcaagaaactaacatattgatttactcttatattgcagtgtgatggtaagatcgagtatacaataaatgatattaacactctgcgtgaagaatgggttgactactatacgaaatattttctaaaatagttttacttttgtttttttactagcatgtataatcttagctagatttataaagttagaacatatagttgtcatacatatatatactagatttataaagttagaacatatagttgtcattcatataaccattaacaaaatttatatataaaattgatatattatgaatttgattagataaatagtattatatacatctgactaccaatgcaggagaaaatttaaaatatatatttttttctcctcctaaaaccaattacggtggttcttaacaaacaactattattaacctatctcgtatgttcttaaccgccgagatagaatagtaatctcagcagttcaaaagaaactaccgagattgctaccatatctcgacaattctagcatcgacattgcacatatatgagagcatgtggcacacctatctcgacagttatattttaaactaccacaagatagggtaccctatcttggcgattctcaactgccgagatagatcaacaactatacgtcgacggtcagatcctcggcggttgataaccaccaaaataggtctatcttgtgggttattaaccgccgagatagggtaattttattgtagtagaatatttatataataaattttttaaaatgataagttttatatatatgtaagaataatattataataataatattaataaaaattttattattaatagttatcttattatttcttagccactaagaaatctctacttctagggtatttggccaacttcgagtatcccaaaatacttcgatatttctaaaatcaacttatcccaataatcccatcaatatttataactaaaactattgtgacattttaggcctccaatcgggtctctagggtcaccgaacttggaaatatttttattccatatatagctcatattacatttacacatgctatataaatttctgtaatttataaattacgcttatttactcacttatagtgaatttaaaatttatgttaacttgattagtagaatcataatctaacttattacctgattaatgttggtgattatttaccaggatctagatttactaccatgtatgttatttaacatcctaaatatgaatttctaaaacaatagaattttaacacatataaagtttaagaaaccttacattggtcgcagcgaattaaatgactttttccgttcagatctctaacccttgtatcctttctgtagcagagtatcaccaagatttgagcccgattctccttcacttgaatggattattcacagtcttacacactatgattgagtaccaacttgctatgtgtgggcatgtactctatcactatagggttcaaaattgaagagagaaagagagagagaaggattcaaaaatatgagaaagataggaggctcaaaatttgactgaagactaatgtgacttagggttttcatcatccttcaatttgagtctatcactatctatttataggaatccatctaggtttaggtttgaattatttggcatgaaaaaattgataaaataaatggtaaaatcatgcttaagtggccgaccataggatgtgggcccaccacttgcaatttgccatttttcaactatttatcttatttttctcaaaaatgtcatatttttcaattcaaccactt

SEQ ID NO: 390057 - DNA, 851 bp, Cannabis indica
caccccagtgaactgttgttggtgctttgagatattggcttaacttgttgacagcaaaacaaatatcgggtctggtgttgcacaaatattgtaggcctccaattaagctgcgataaaccgtggggttttcgagtttttccccatcattaatggacatgtttttccctgttgcaattggtgtggggcacgacttgagattgtccatgttatttttcttcaagagctcctcaatgtattttctttgaacaagatataatcctgtcgcatctcgaatcacttcaatgccgagaaaataatgaagatgacccaagtctttgagggcaaaaagcttgttaagttgctggataaagccttgaagttttgagctgtcattccctgtaaccacaatatcatcaacgtagatgagatctaggatagtcactttaccatgcttgtaataaaatagtgaagtatcagccctggagttcttgaagttccattccactaatgtgttcttcaacttatcaaaccaagctctaggcgcttattttagaccgtagagtgatttgtgtagcttgcacacatgatttggtttgtaggatcctcgaatccctctggttgatgcatgtagacatcttcttcgaggttcccattcaagaaggcgttgttgatgtccaactgacgaatttcccaattataggagacagcaatagtgaggacaattcggatcgttgaggctttgacaactgggctgaatgtttcactaaaatcgagtcccggtctttggtgatacccttttgcaacaagccgtgctttgaatctttgaatggaaccatcagcatttcttttattttgtacacccacttgcaacc

SEQ ID NO: 390058 - DNA, 1131 bp, Cannabis indica
tagcctgtacataaaaaatgagtaccatcaggctactatcgaacctacatcgggcctacatcggaccgaaatcttcaactttttacccatttcaacaatagaaaggcatcaaacctggcgtaaaaactagtttttttgcccaaaatacagatccaaccaaactcaatcctaagtcttacgtaaactcacagatcacagagattcatcgtacattttcatcctaaatcactaaattcatacattttaactcaaaagtacaatgaaatgaaatgaaaaagagagggcccaaaatcttttaacattgcgattgtttggctacagtggtcgtgaattggagagagagttcgagatgtcgtgatggttgtgggttggtgagagagtccgaaatgtttgatgttaggggtaaggttggtggtagttctccggtccgagaagagagcaagagaggcggaatagataaaaattggcctaattggttaatattaattaactttaatttagaaaaaaaatttaaacctaatagattaatatttgatcaaatttccgtgaaaatcaatctgaagtcatcatatcaaataggacaacaccatatcaatcttttgttatattataaaatatctgaaattccattcccatagattagaaatgggttgtctcacagctaattttgctagcattcccatgtggcctttttatgttatataaatcgacatatgacatgcatagcataaagaaaccaagcttattattattattgatcaaatcatttaatcatctaacttttgggtagggaaaaagaatagagtgtgacccacttgtgggtatgaaaccaaaacagagcaatctggcgtaaattaagctgtaaagttagtcaataaaagaaaattgaagagaatgtcacatgcatagggctatatagggtttttagattgggataaaatcttgttaattgttatacaccataaactagtttttacgtacttagaggagctctattcgaattgcatttcacttaaatatgaactaatttgtaagtgcacaatcacacttataagttcaaaaagtaataaaagggataaatgcgtaaaacttaattgtgtactttattatgtagtatcatttattatagtt

SEQ ID NO: 390059 - DNA, 1461 bp, Cannabis indica
aatagttagtcaatgaaaactatgagacatttcagtctactattgatctcatcacgaaaaatctaaatacttaaaccacataaagtttgtcaaggattctttgtcttacatatattatcaaataatagtttaatcatctccaaaagatcactatcataaaatatgagcaatgtaacatatcaagtaacaatataaacatataattgctctcactattctctcacataatattgactaatgattatattatgaattgactattttaagaatcaaaatggatttaatccattgaactcgggtgtctttgttagttccttctctaggctcaatcgagccatttaacaagatatggatcttcaaattagaatttagttctcacatccttatgcattaattgattttcaaatagtcactattttacaacttaataatagtaatgaacaaatccattgttagactagagactagctataaggattaattcaccttactttgaccatcaaacaacttattcttaaaatgaaccaccatcaagaaaatctcccaattattatgggattaagtgtaaattttcacacttggtcatagcttggaaattatgatataacaatatcaattctctaaataaagattaagaactaccaatagctatcgattaaaaatttacaggtatatgtaattaaatttatcttgtgcttgaaatcacaagttcatcaaattgtctcaatcttttatctttatttgtccatatatggagtttcttatcatattttggtcaatagcaagtcatcaataataatagcataagcaacaaaataagggataaatcttaaataaaattttaactctcgtctaatgttagcttaaaaatccaacatgcataactttttatacttatcaacaataatagctagaatagacaaacatattaaacttgatattcccaacaaaattgagatgttcatcttctctatatgattaaaatctaagattttcaaatgcaatgtcttatattgcctcataatgttagaactcctgaaataaccttaaatgtaaatccttatacaaccacaacattaatgaggctattcagaataaaacaatatgatccattgaaactcatgttaggaatattttaccaagatctagatttactaacaagtatgttgaattaacatcctaaatatgaattctctaaataatgaaattaaacacataaggttttaagaaaaccttacattgattgtagcggaatatattgactccttccgttcaagatttctaggcactctttcactatgggttttaaataggtgaaaacaatgaaggaggtgaaatcactaagaaaggaaatctctgatcttgtctgacatagaaaactaggtttgatttggcttaaggcatcaagttgacaagaggatgagatgagagcatcatgttccttttatagtgtttcaacta

SEQ ID NO: 390060 - DNA, 1097 bp, Cannabis indica
aatagttaaaacgcttagctacaattgtcaaacagctacaatcgccaaccctaaagtgtggaagagagagacgagtcgagccatgcccggagatggctcacttgagtcgtgagcagcgaggaagagagagacaagtcgagcaagagagagagcttggggaatggcagagagagagagagagagatgatcagttgggatcggtggcgtctggaacttcggcgccttcttccaactacggcgctgcaccaatggaaggagacaaaaatatatcgggatagatatggaaagaagaaaagttcagcgttttagggtttcaaaattaaggtttctatttatacccttttttctttttctttttattctaaaactttttattttttatagaaaatagtacctacaagtgtcggtttataatctagaccaaaggatattttagtgtcggttcttatactcaatctgtatgtatatatttaacttttttgggtctcggttattgttgtagtattagtctactaaccgacacttaaagtcattataggtgtcagttaagaaacgacaccttagaagtctattttgtcgtagtgctactacggaaaaacaacataatttgtttttacaactacacagagtgttgtttttccgttgtttcagttaaactttgttttgacattgttgtcacgaaaaagcaatgtaaaaacaatatttttctgtgaaaaaaaaaaagacaagcgaaaactcatatataaaaatccgtaaaatatatataaaaataataattcatttttaagtgtattatataatttaaaaaaaaaaacaagttataacctctataatatttcttacttaaaattgtagaatttaaaactacttgcaatttttgtttgcttttctacttttctatatatataaatatatatatatatattctatataaagtgtgcttatataactgaaattattggtttaggagaaattcatgtatgcctttttatttttatttaataaaataataaaatattatttatatataagaaaataataaaaaaaacaaaatctcattaatatttgaaactataatatgctatataaagtgtact

SEQ ID NO: 390061 - DNA, 1102 bp, Cannabis indica
ataattcaagatcgaaataaaaaatatttctaaactatcatcacataagcacacaaaccatcatgaataggggcggagctagagctaaatagttagggggccaatgtcaaacaacgtaatatataacaaatttaaatttagtaattaaaatatcttttaagggtatgtttcaattgtgaaaaatattattattttttaaactttataaatatattttatacaatattttaaaaaataataaattaagtaattgaattaaaaacaaaatgtaagtttttatcctaaaataaaagtaaaatgcgagtgatacttttaaaatttgacaagattcaatttaatattaccaaattaatattaatatgtagtttcttagagaaaaaaaacttatattgattttaaaaatagtataattggttagttatactactattaatcaaataatttactaaatatatttttaaattaaaacaaatcaaattaagtgtaataaaaggataatacaactattactttactataattgtgaaacatacattcatttatataataaaattatatatttttaataataaaattatatttaattaaataaatactaattttttaaaaaattcatccatcaaaattcgtgcttgtatcaatatctttccataaactcttatatgttattatatatatcaatgctaagtaaataattttcaaaaattcaggggggccacaacccctgttggggtgtacgttgctccgcccctgatcatgaaaccattcaaatcaacacaaaacatcattttaattcatatttcatgaaagtaaatcattaccatagctccgaggccagttgttggaatatgttttaccaggatctagatttactaccacgtatgttgtttaacatcctaaatatgaatttctaaaacaatgaaattaaacacatataaagtttcagaaaacattacattgggtgcagcggaatattaatgtctccttccgctcagatctctaacccttgtatcctgtctgtcgcagagtatcaccaagatctgagccccaatatccttctcttgaatctggattcttcatagccttacacactattattgag

SEQ ID NO: 390062 - DNA, 1053 bp, Cannabis indica
aaaaggtcaaccactacattctcactaccttgtttatctctaatctccaaatcaaactcttggagcaatagtacccatctaatcaagtgaggcttagcatcattctttttaaacaaatagccaatggctacatgatacttataaataatcaccttagagccaatagtataggatctaaacttgtcacaagaataaaccacttctaacatctccttctcagtaattgtataattctcttgagcttcattaatagtgcaattggaacaataaattgcactaaaaaatttctcaaacaatgtgtgaaatgtatggaattgtgttttatactctacgaccagaatcaacttgtactatttttgaattatttggagaactattttgttatgcaattcaaggattattaagttgagcttcaaattgtatccaaacttacctctaacaaattcagaatagcatattgaagaaaatggtaaggtctataattagttactagaagctgcctgagtccttttagggaaattccatagagatagagaaacgatattctatgtcatcccatctaagtctgatcctaagataaccttggaatgataaaatggtctcatacttagtatacacaatcactagatccaaggatgtcttggtcatgaactgaagaagagctagaactactaactaaggtttgcatatttaatagctattctgaagtgattagggatggaccatcctatagtcattaagacaacaaagtatttgtttcaaaaaatactacttttataagaacatgacttaatctcaataaagtagcaatgtataggagatattattttatttaaaccaaaagtgtcccatcatgtataagatggtcccatgccattgttacattaacgtaagtcatcacgactaaataggataataccactaatattcctagatagaaggcgatagtaccttatcgtagtgggatggtttctaggaacccaccaccttattgttgggttttatgccctaaataaaactcattactatctgattagttatcaatttagaagt

SEQ ID NO: 390063 - DNA, 1203 bp, Cannabis indica
gattgaattagttgagctcttcttgcgaaagacaaatgtctactagtcaaaatatgcaagcttccttccatttggtaggtctcaaagaaactctaaaatatttcgcagaaaaagtactttccatcgtaattaactagaaatataaaattttaaaaaataattaaatcatcagcaaaacaaagattgactgattttatgtaagattacataaaggatgaaatctaaataagatattattctacattttagtattttactttgtttatgattaatatattaactaattattttatatatatatattatacagggtaaagatgcattagtagaacgttttgctcaatccaagtttggatgtgaaatggaagagtttctacctgtgagcttttatcctccaagagatggttctcatcattcgttgcgttgtcatcaaaataatgttggacaccttattcggaggaggacctaatagcaatatagaaagtactaatccccaattagcaaacttttttttttgaactcatcaccacatgaaatgaactatcactaatgatagatgtatatacaattttaatttgcacactcaaattttaaagattaggattgagattaattgcactttatagtgtataatttgagaatgcaaattaaaaaatatatgtatagctatgtttttttgagaaaatgttaagctatggttaacttttgttatatgaattatgtatgtgtggtttgagagactcaacaagagcttgtaattgactatttatatcgtaatttcagtaatgtaaaatatttagaatggtttgaaaatttggtggattatttgctataattattgagattgatggttaagtgttttacacaatatagtagtgtgaaaatcctagcaaatttacatgaagatgatgatgtcatgttttggtttagtgtgaaaatcctagcaaatttacatgaggatgatgatgtcatgttttggtatagtgtgaaaatcctagcaaattatataggagtgtttaagtaaggcttatggagagtgggaatcttttgtgttgttttaaaagttagaatggaaggaagataacttttcattcattatttaaagcattcttaataatttttctataatagagacaaatttaaaatttaaagaaaaatactaaaattatgtttagatagctaaaataatattttaatttttat

SEQ ID NO: 390064 - DNA, 1853 bp, Cannabis indica
tcaagttaacaatatcaggttatttttttcaatctatattattgtggcatttcatggcatggaatatagcatagatattcacagtgaaaattccaacactatgatttatttatttaatgaatttataatttccaatagacaagacttgaaggtataaccggaagcaagactggacaatttgctgtcgttcttgaggtagtattgcttttttttttgtggggtggggttggttttattgatcattcattttttcaagtatttctttttatatatgtataaatataacttctaaagcagttttatccttctctttataggttttcgaagttgcatcatctcttttcatggtagatgtgcgaaaagctgctggggacactcttgaatatcacaaggtgagtcttctgttcaaattggaggtaacttttagtacccggcacagtaaaaaaaaaaataaaatacaacagagcttcttcttccacaatcgtctttatcttctcctctttagtctaaaagcataagcctgcgctctatacagatcatacaaaaaattaccttgaagatcagattctatggtttcatttgtaaattttacaatgcatctgagggttaattgatctagtcaatattaaaatattctgtataacatgtttatagctgactcatttttgcagttctacaagagtttctgtgccaagctcgaaaatattatttggaaaccagcagaaggtatggctaattccagtctacttaaatccatgaattgctgatccatatggcagagtaatatagtaatgtctctatgtagcagaaacaccatcaagacactgtaaaacatgaaatttgtatctatacgtgtaatttaactttccgtaataatggagaatccttattgtaaatagcgtgccagaaattgtctcggaatgtagttaagaaaaaaaagaggtattgactgattgtgcttattgctcataactaacatttctctccatctctctctctctctatcttattatataaatatttatataacgttatttcttaagtttgacagaatttgttgttagaacttgttgtgcatattaacagaatatattaaactaacgacgtatttggaaaggttgcaatagttgtaatgaaaaggcagagaacttcaatttttctttttattgaagtatatactgttcctcaaacagagtacccctgccctacgagatcaccgagattttgatataaatatatacatatagggagcttacattacatatatatacccactgtgttctttagtttaaaagatctaagtcatttgatcaacaggatatcacaatatcacaatcgcattgttcaatatgtatatataccagaaaaaaattataaagatcgaaacacaagaaaaaatacaaataatcaagagaccatacactgctcattaccgttccaaatccataactgtggtgatgaacccttattttattaccaaatgacctatccttaccagccctgcatttaaacgagattcctcattcgggttgattagatatttgcataattgagaggaagaggttgtggtaagaataagagagatgagatttaggacctaggtttgagtaacaaaaaagaaaaaaaaatacttgtgccgtgatttgagtaagagagatgagaggtcgtgtccctctactacgacaaagaaggatgtcagttttttggttttatgatattagtaatgaaaacccaataaaatgagttttcttgaatatcttacattgggctttttaattattattattattttttgggtaaataccattttggaccctgtgttttacaaaagttacagattggaccctgtgttt

SEQ ID NO: 390065 - DNA, 592 bp, Cannabis indica
tacaagaaccttcagaagagagagattcaggtaataaatctattatataatattttaaagtgtgtcaattatagagtaattaattcaatatcataaactctgaattgagtttgattgaagaagacgatataatagtaaaaattagtagttgtttggtgataatgataattaatgtttggttggttgggatatatatagcttggattagcaaatccatgtacaactgtgatggagaagctataccaatcagaatttgcagatgagattggggagagcaacatctttccctccgtcggagatgctattcacacatttcaacccaaaactatcatcaccgaagaaccttgacaccataaatttcattatttctcaagttctgtaaatgtcatctgtattttaatacgaattaatggtctttttttaccgtagggaattgtcataaatatggagctttgtcctttttttcacacttctgtaagaatattgttgcagtggtcgaaaaactaaaaagttaataattatataaagtgaaacatgaaatatgggattttataaaaaaaaaaaattacaaaaatatgacatttttaggttt

SEQ ID NO: 390066 - DNA, 782 bp, Cannabis indica
gtacacgcattacacacagaaagccacataaaccaaaaacaacaaaacaactactaattaaagcacttataaacaagagagatgtattgatgttaaaagagaggacaattaagataactagaccatcaaactttagtagatccaaattataatgaatgtctagataaactaagcttaaagaagacgagtccaaagaaacattattgttgaacttattaaccacattaagatagtctcaaattgaacattatccaacaacttaagcctgaaaaaaccaaccatgtgctaaatagttgaggcatagacaaccccatgaatatctcagataaacatatatataccacaacaacatatatataccacaacaacctcccaccacatctaatgctgcatcaatgttaaccttgaagaaaccaaccataggaagtacccatcaagacaaaaggatagaagaggaagaagattcgatctaccttgaatttctcaagcaattaagatcctttgacttcaaaagagacttttcgtaatcactcataaaatcacgagcccagttaaccaccaactcaggagacatcaaaaaattattatgcaccattttatttttcctgtatcgaattctccacataataactagtgctaattcaacttgagagattgatagcgggtatataaaaaggtagataaaagtaataaaatcaatacatgttattcgtgattctagatggaggacatgtgtaattctaagtgttatcctaatttttatcctcatgacgtggcatgct

SEQ ID NO: 390067 - DNA, 814 bp, Cannabis indica
aaaattaaataaaattatttttagatgtcgaaccagttagagtacaaatacacctattttaatggggtacattataaaagtacgcaacaacaacaacaacaacaagaataataataataataataataataataataataataataataataataaagtgcttgatttactccctaaaagtaattatttagttgcattaaaaaagattttttatttattttttaagaaataatatatcatctataaaagaattaataaggtgcttttattggtacactaatgcaccttttatatttttgatatgtgaatagttaaaatctcttttttttatgatcatacatattgctgttttttaaaatattttataaagttttaagaaattcaaaataatttataattcagaaagtaagatttaaacggtttgtttcacatttagataaaattaaaaatgcacttgtgtaacatatttttcgaaccttacttttagcaggttaaactattataaattttttgaaaattcataaaatgtcttatatacctacaatatacattatcttttaaaaaataaaaataaaaattatttaaatattaaaaacacgaaatagatggatcgatacactcatttaaaaagtttacaatgaattaggaaatgaaataatacatactactctctattagaactgttgcccctgatttcacccaatacacgtggaccaacctaacagggacacgtggatcagataacttataaatatttgctaaaatctttgtatgccacaaggaagcaccttgggcataggtcccggaggaggca

SEQ ID NO: 390068 - DNA, 1237 bp, Cannabis indica
taaataacacgtcaaaacctaatatgggaaactaaactcacaactacaagttttgctatcgataattaacattaatgatcgaggaaacaacaaactaaggctctaaaaataacacgaatcgacaaaatagattttttagaaatcttaccattgatccggttaaccggttctacaagtcctatagaaccggttaactggtttgcaccagaaaaccccaaaaatgccacaacaacctcaattcgtacccaaacctcaccaaaactttgagatcacctgtaccaacctcaaacaaattttttcaagcaataacaacaagaaaaatactcagaatccaaaagtgccattaatgactcaagtttgagttttcaaactcaaacttgctcaatctccacaaaaatcattaaagccaactacaagaaatcagttttaacttaaaatgaactcaaaaactgaaccacaatcatttttaaccctaacagccacaaactcccaagattgcatgctagaactaaacttaaagcttaaataactaaaagattaaagtgctagggtttaccttcaattggaaacacttaattccttgctgaatttctagaaaaatggaggtttggagttggggttttctctggtttgtgtgggagccgagcaagaaagagagagagaaagggaggttccaattgtttcttgatttttgatttttttcttaattgattaactttaaaaatcaataagtcaaaactgagttaatttgtggccagctgtcaatctaaaaaccaaacaccacattcaaggtaaaatacctaaaatgcccttacttacattttcagtaacctataggcttaggggcaaaatggttcaaaaccatggccctgcctaaacttggtattctaaatatctcaaatgtttttcccgctaataattaggttctaaacttacccatatgactctaacagccatccatcgtattttccatcatcgcggagcaaaaatcataaaaattttagaattcatatttagtataaataatactcttagagtccaaaattaagaaattacaactctaatgcccagttctaaaaatggggcccacaacatataaaatcatatataattataaatgtcaataattaatactaattgcctttactaattcataatctaacatgcggtcattacaattatcacctgttaaaaggattttgtcctcgaaatctaacctgaataactctggatattg

SEQ ID NO: 390069 - DNA, 1512 bp, Cannabis indica
cttatggtcaaagagcagttcttcagttcgctcagtacactagtgctcatgccattgctagaatacctgtaagctaaaacactcgtccgtgtccaaggtgagatgcctcgagtgagacatccttcaaaggaattttccatctgttagtgttgaccactttaaagacagtttcaatcatagctatgtgatttattaatattattcacaggtatttaaatgggacgtaattaaagcccataattttgtgaaatatcgttacgcaatttaaattcaaatgtaattaactaccaacctatattactataaataggggaagattatacaagagaggggatgaaaaatctttgagagaaaaaaccctgattctgtatccaaaaatatctgagtaagatagactcgtggactatgcagagttaactacaaaaccacgcaaaaacctggtgccattatcgttttttattgcttttctaaaatctcttataatttatatggaaaatttattacgaaaagggtttgttaattggttaaaaaaaatctacgttaacattttggttctctcattgagagcctacgtgataaaagcttagaagaatccctcctaaaaaattaaattttcctccatggctgaccacaataaaaacgataacaattgtcatgaagagactaatcatcgtcctgaaaaagagcgaatgggctcacggaggctgcccacctcaggtacaatgcgttccacatgatcaacacgttcgagaagaagccaacgtaatcaggatcaaaacctagaaactaggaatgaggaacacaatgctgaattcggtggttatgtacctatgggtgaggatgtctatgatcccactaggtacatgccattggttgaattagaaaatcgttaactccggcaacgactgaccgaggctaaccaacaaaatgctgaattagagagagaggcaatcgcagccaaggcaactcaagaaaacgcagcacaaaatcaacctgatcttgcagtgagaaggccacggggtagacctggaggttcaagaaccaagaggcagaagacggctcaggaaaatccccagaacacccaggaggagaaacctggggaaactagggatgtttcagaagatgaacaacaaaataattaggcccctcgataagaagtgcctcgaaaaacccagggatctacggatcaagggaatgaaaacaatgatttaccagagccttctcgtagaaaagagagcagaaggaaaaccatgactacggaataggaaatccatcatggtaacgaaagaaatcctggaactcaacctaggatttgcagtaggttgctacgtgtgacttcatcagcaaccagggaatgttgtttggaatgatttatactcttctttaatctaattaaccttatatatcaaattctagtcaaattattataagacactaacacttaacaatttttttggtaggcacatctgggagagcatcaatggtatgagaaaaattttcaagttttacgac

SEQ ID NO: 390070 - DNA, 1993 bp, Cannabis indica
gtgctgccatttattaagtgcttattggtttcaaaaccaccagttattctaagcttctaaattctcgtgtaggataaaagctatggatactgaaactattgcacttacagtacaacaataaactagattgtatctctcttcctgctaggccaccatttcattggttagcaaaatggaatataataaaataaaatataaatgcccaaaggtaaaattaaaagttataaagtttgcttggtaactaaagggtactcccaacagtttatgataggtcacttaaaaagttttgtcccggtagcaaagcttaacactctaaaaattcttcttgcacttgttgccattaacaattggccattatatcaaatggacattaacaatgctttcttccatggaaatctcactgagaaagtttacatggcgcttcccccaggctacaaacatcaaggagaactcccttctaatgttgtatgtaaactacataagaacatctatggccttaaacaagcatcccgatagtggtatgctaaactaagttccaccttggtaactgaagggttcaaacaatccttttcggatcactccttgtttattcgatcttctaacatcattttccttcctattttagtttatgttttgaaattttaattgctagcaataactctaatgatgctgaattgttcaaaagacaacttgcctccaaatttaaactcaaagatcttggtcctttgagtctcttccttggactagaaattggcaggtccaccgatggtatttcagtctctcaaagaccctttatttaataacttttaactgacacatgttatattggtgccaaacctgcttccactctaatggaacccaatacacctaagcaaggatacatgggagttactttctgacccaagctatagaagtttgattggaaagatcattaattacttagccataactagacctgatatttcttatgttgttaacaggttaagtcaattccttttggcttcgcgacaacttcatcttcacgccgcttaacacatccttcaatacctgaagggctctctgggccaaggactgatctttcactccacttcttctacacaactcaaggcctatattgagagtaatctgtccgtcaatgaggtacaacttaaagtcttttttaatgctgactagagcacatgccctgatactcgacgctttttcacaagttactattattccttagtttcttggaagtctaagaagcaaaacattgtctcttggtcttctatagaagcagaatactgtgctatggccaacacaacttgtgaattgctataattacttgccatactgaaagactttagggtcaatcattcacacccagtccttacgtattgtgaccacaaagctaccattcatatttcttaaaacccagttttttattgaacgtaccaaacatgtcgacattgattgtcatatcgtccgtgaacgggtgcaaagtggtcagttgaagttccttcacgtcaacaccaaacacaaccttaccgatctccgtaccaagtctctttttccattccatttcaaggatttattttccaagatgaatatcacaaatttgtacacttcatcttgaggggacatattaggtattaaataattatgtttattgtttgggatatagagattgggatattcctagttgagtttggtgtgtattctaaggttggatatctccccctatataaagtcacttttattgtaacattaattaattttcatttttcagataataaaagaattttttctctattagaaagtaggggtgtccattcgatctgattcacataattttgctcatagtgcatctgatccgcactaagtgcgaatttcatattttggatctaatccaatccgcatatcccctcaaatccaatccaatctaatcctcaaaagtgcggattaaatcaattattttttatttgttactttttagtattaaattatttaatat

SEQ ID NO: 390071 - DNA, 1745 bp, Cannabis indica
agcatttgatgtggaagtggattcagatacaatagcttgaggattatcaccatttgaggaagaggaagtagatctattgttggcactagtgtaagtgatatcaaatctatgatagcacttaatatttgtgtgaccaacacgtccatagagtaaacatactggtctattgccacgtccacctctgttactgttgtaggatcatccttctctgtttgagcctctgaacccacgattggaagaagagcctctggtttggctaggttggcttgcacattatgaagagatttagttgtgtttgttgaattctcatttcttggctctgcaacatgaactgtacttctagagaatgagaggttcagttcttgatgtcaaattgacaaccacggcttcgtactctattcctaatccaccaagaatgtacaacaccaaatcatcattagtgattggctggccaactgctgcaagttgatcagcatgctgcttcattttgagaatgaactcctcgatcaacagagatcctttcttggtggtttgcaatagatttcgaagttttaggaggcaagctcaagatctggttccaaagagttgagcaaaggttttctagatctcgtgagaggttcgacaatggatgacatgacccaacatatgttcagaaacaaaattcattagctagtgcatcaagaactgatcaagttggatccaattttgaaaggctgggttaggtacattacctgtaagaaattctggtggttgaggaagaaatccaagaacatagccattaagaacatacgctcgaataccaacaaggataagagatctccaaattgtgtagttcgatctttcaagtcgaagattgagggggaggagatgatttttggggaatggaattggatttggagcatcaggagctggatctacaactcgaccttgttgtggttcgactctttctcctattggtggttcaactcgaatgccaggacacttgcattgttgccatgattcgacatggctctcataccatgtaagagtactgaatttgcaatactcgagcttgagcaagaaagaaacaatgagggagagagaaaaagagagaagaagatgatgatagatgaataatattgctcaactgaaaacagttggcttaatcttgacatttatatatggagagccaatacaaagaagctgaagaaaaacattaattaacttctaacaacttctaactaactcaagaaatgtacaggtaagaaaagcaaaactagcagtagcaacaacatgttgcttaaccattttctattctaacaccttctttcacaattaattctttgtaccaaatacaatataataaaataaaccaaattaatttcaaactaaatattttcaattaaaaatatatttaattatttagttaaaaatattaatcaaaacttaatttagtttagcgtttgagatcaataaatgtacatttttcatcactaatcaagactcgtcctctttttcggaccttattaatcatgatttgtgcttgttattcaacaacatagttaatgtgttcataggtggataagctcatttgtaggtgttgagacctaagacatatacaagtaagtcgtgacctatgcctcagtcttatggtggtaattaggtctagctatgttggttgccatgataggtatctgaagttgggggatagtatttaaagggacctatatatgttgatctcgtaaaaagattatcgaataaattaa

SEQ ID NO: 390072 - DNA, 675 bp, Cannabis indica
accaaatttagtcttataaagttctttggttttttaaatagctcattttgtgcgggctttaattaatataatataatttcactttggcgggcgagattattggcaaaaatttatcaaatttatcgtttgggttcataataaattaaaaattgctctagcacgcgtaatccattatcttctagaaggagttgccataatatgagtagtaaaaattattgcataggataatttgaaagctgaatatgaaagagctttcttactaggtaaaagaaaaatgttaaaatttgttattctaatctaattaattaattaaatatggatttgatcaacagggaattggtactgcaatatcattttttgttcaagcatggtgcatacaactaaggggtccggtctttgttgcaatgttcagccctctatgcactgtcattacagctattatagcttctttgtttctacatgagaacttatatgttggaaggtatataattattaactttcttagtttttcttttaacttttaaaataaattgaaaaatatttttaaaagggatattttttaataagaatacgattgcaataaaattgtaaaataatatacttttgttgtcacttttttaattacaactatatatttaataattataaatgttaaaaggatttaaaggtaaatat

SEQ ID NO: 390073 - DNA, 1603 bp, Cannabis indica
cttggtaaaataatccccaataaaacattcatgataacaatgtgttaatacaggagatcatctattcgttcaaacaaaagaaaggaaaggaaggcttggttgtaataaaaatagatcttgttaagacctatgataaattaagttggcgattcattaatcacgtcctccaaagcttcaaagctccagaattattctgcaattgggtataccagagtatatctactacttccttcaacatttgtcttaatagaggcatagtggggaaaattgaccctaagtgtggtattagacaaggggaccccttttctccttatctcttccctcgtattttggaggatgctttagataaaggagaaattaagggtatcaagctgagtagaaatgggctcgtatttctcatcttttttttttttgcagatgacctcattctcgtgggacgagcaaacatactaatgtgaaaggtttttgggagagtcttgagaaattctgcgagtggttcagccaacatatcaataaattaaaaacatttatcttttttagcaacaataccagtgttgggataagtaaacggttgaaggagattttggggattgagggttgtactagtaacattaactatttgggactccctctcttcataacccaacaaaaggatgcatacttcaattttgttttggataatctagtttcaaagctctagtgtgggaaagtgaaaaccctctctaaagctggacgtgccactatgaaaaatcagttggcctcgctctcccaatctacacaatgcaaatgacaaaactctctaaaagaatggcatccatggtcgatgggttgattaaggatttctggtaggtctataagaaaggtaatcgaggtatttacctgaaggcatgggacaaagtgtgcctccccaaatctaggggttgtttaggctttcaaaaagttgcagagatgaattaagcttttttagctaaatggggttggcttctgacaaatgagaatcaatcgcgttgctgtagagttcttacggccaaatatatgaaaggtaatctcatttctaaaaatgagaaagataatccttatattttggtcccttgagccttcccaccgccctttaccctctctctaaccctttttgcatgaagttctttaattttgagaaaaaatggtgcaatttgaggaggatttaattgtggtgttgttcgtaagctttggaaaagattacttgaggtatttaaatctcttttctattaaattaatctcttaaaatcaatatgtgtaagttgaaatgcatgatattcttaaaatattatagttacgatgatcttagttgattcttcgatgttatatttgtaacgtccccgcttcaagcctccattgggcccttacacccacggaatgaatgactcttacacacgagtacgtcactctggctgcttcatggattgatgaatagggtgttcaaggagtacctagataagtttgttgttgtattcattgatgacattcttatctactccaaaattgtggaggaacatgaggaacacctgaggatgactctaaaccgacttaaggagaatcaacacgagtgtttccagcatgcttt

SEQ ID NO: 390074 - DNA, 1124 bp, Cannabis indica
gagttgagagagcgaggaaatccaaatacccatactaaaactatcgcatggattcaagctcaaacaccaatgactggaggtatttcgatccttttgttgtatatacagtttttcatatgtttacagtttattccgcattacatatcatttatatatgttttatattcatattatattatatatagtctaacagtttgtatgagagtgatttttatctttgtcttgtttttatttgatttttgtttatatatatacggtgatctcgtttatataattatatataaactttcatattatattttttaatttaatctatatatgcatatttataatattatattattgatttatatatatactatttacgtattgttctatatgcatgtatatatatttcattcatatatgtttatatatattatatgttgaatatatgattttattgtataataatgtttacaatactttctttcatatatttataatatttttatgggatatatacattaaatacatatatacaaacatgaaaattttagttttcggttcgtgcctcgtaaatttttcgtcttcactttcagtttttattttgaatcttttatgcatcaatacattcatatagtagtatagattgttctaagcatgaaaacctattttgaaaaacaaagaaatctaaaaatatttctagaaaattttcttcgaactcgaatttttttggtgagtttaaaatctttattttacgtgttttcgatgtatgaaatctatatgaatgtcttaatttttacatttatattcatttgaaattgatttgggcctttttggtcgtcggaattaagagtttcgatcgagttcaggtcgggtccaccgtgacccgcgtatagaaaaacgagtgaaaacgtcccggtcggctaaagagacgacccaaaacgacgtgtcattttttcgtgtgtgagcgacccttcaattgataaatgatttgtcgttttgccttcaatctatcaaccactcggccatctcttcaaaagataatttctatttttttctcattgaataagacatagcgacataaattgatacctttagtatatgcaaaaacgacatgtcgtttctggcagtatcatttt

SEQ ID NO: 390075 - DNA, 2302 bp, Cannabis indica
acatcaagaggctaactgtaggttcaatgggggaatttctagactgagaagatggattttataaagattgaagaagcagtcaggcaagtggacaatgtttaccagggtaaagttgacctaagtcacacacccacctcgattgtagcaaatatatccgccagcccatccaaaccttccaacctcagactagaaataacaataatggtggcaaaaggtccaatactgggaataaccaggggaacagaaagaaggggaaattcaacaattttgggattagtctttgatcaaatttctaagatcaaatctcaaaaaattttcctggtcgcatggagacatggtcgggattgatttatcaataatttcccacgccttaaacattgatcctaatgtctgaccagtctaacaaaagcgaagatttttagaaaaagaaagggcacaagaactaaaggagaagtagtaaagctccaaaccgacaagttcttcatagagccttctaccttttctaggtagccaacctagttttactaccgaagcccaataaaaagtggcatatatgcatcgattttaccgacctcaataagccatgtccaaaggatttttcctacttccaaggatcaaccatcttgtagatgctactgccggtcatgagaccccaagctttatggatgcctactcgagatataattagataaaaatacatcctcccaacaaagaacatacaagctttcggactgatgttagcttatgctgctacaatgttatgacattcagattgaagaatgtcagatccacctaccaacaattggtctattggatgttcgaagatcaaataagacataacatgtatatgtggacaacatgctcatcaaatccaaaatggataggggcatataaaggacctgaattagtgcttcaaaatccttaagaaatacaacatgaagctcaatcccctcaagtgttcatttggagtcagttggggaaaatttctatgctttattgttaatgcctaaggaattggagctaacccagagaaaatctaagcccttttggatatgaagttgccaacaaaaattaaggaagtataaagcctcattgatcgaatagccaccctgagcacttttgtgtcaaaatctactgacaagtgttttctctttttaatatcctccgaagaaataagaaatttgaatggatcgaggaaagtgaggtagcctttcaggaactaaagaaggaatttgcacaacctcctatcgtattaaaacatctagacagtgaacaattaagaatatacctagtagtgaccgaatctacaataagtgttgtactgatcagggaggagagtagcgcacaacacccaatctattatgtcagtaagaaattaatcgacgctaaaagtcggtatactccaattgaaaagctgacatatttcttgctcctcacttcacgctgtttgatttcccatagattacaactccccaggtttaaatagccatatatatatatacaatcttcacccgagctttcgactcagcgctattcaactttagtcttttctttacctacatatagtaaagtaactgtgcgtctacagacttgacaacgaaaacacgcataacagaacataattatttgatttgtaaatgagcacccatacactcagttaacataaataaactaatttagatttaaacgttcatacctatagtatgattaaccataatgcaaatttaatttcagtaccctagttgtattgaaattggtagctatataaaaatataatacatatatactaaacatgtgcatatgtgtaacttggaattcagttcaagtgtgtccgccaatctaagtggaattccgttcagtcatcagagaccttaagtcacattagcagtaaattgataagtgtctatttaaaacactttctattacttggatacaaaatttagagtttccctatcgactatacagtggaaatacctaaatactcctgacaaacaaaaattaagtcactcccaaaaaggtccaacctaacaaactagaattacaaaccgtatatcaaaattacgaaactagcagaccgaattcatagagctggtagaccaatttacgactgaaactaaactcgactttttctcaaattttcataccctaaacctgttcaatactatccatgttagacatttatatgtataaactgaaatatatgtatgcgtatataaagtgcggaattaagtcaacatatatacactatgaataaggatcgaaatacctccaaccattgattcttgagcttcaaacccacata

SEQ ID NO: 390076 - DNA, 1463 bp, Cannabis indica
aagctatatcatcaaataaaaagtgctttcagtgtattgttctcatggctggttagtccttttttttttttttttatttttgtccaagtttagccacttttaatgcaagctcaaattccttggctctctctaatctctactccagaaaaatcaataatgcataataaaaagaatgtgcaaaattgatatttgaaataagatgtaattgatagttagattctgcatctctattagtttatagaatgtactacagtgctatcaatgtacaaactagatcgataagaaagatttgagatatttaaccttacccacctgaatttctagaacaagaaagagtacacaacagcacaccttgaaaccagcagtgacttgttacaatgggatatactaatcaatcttgtatggtatatgcctcagttctcaccatatttccaattcattgagctgaaccactcaaatcacaaagcacaaattttaccaacaaattaacaaaccagatcatttaattacatttcagaactgaaatctaggaggaaaaagttaagatattctctaatccccataataatcagaacataaatttatcctaattgttttaatgagttttgtgtgatcattagtttttgcaaacttagcaagcatccaaaacattgcaaaagcacaaaaagtaaatattaataatagagagattgggagatccaaaacaatgtatgtctcaagttgtcaaaaccatgagatttgaaaagcttcaacctacgcagtgaaggaacgaaatatccatctgaagtttttaggcatgatgagagatccatgttcagataaaataaaatgcataaaagaaataagtacagtaatctaagcagccatagaatagaggcatccagattccctacccccaataatcattgtttaagtagcccttttcgctatagatattgtcttcaaagaaggaaaaatccaccgcaaagcatctctcaattctgattctttctctggtttgcatttagtaagaactctaagatgctcccaattaaccaaaggaagaggagatatgatcttcaagtttattagaccgatgagaggcttcaatgaatgcaaagagttaagaaaatgaataaaatatcaaattgaaataacaccacataatgaaataagacaagtaatgaacatacctcagctttgtcaacatgtagtgttaccatattccaggaacaattgagattcaaaagaaactctatcatgctgataaaccaatcatcctcaaagttgttctcaatcttaagaatttcgaatgttccattcaaaaaattggatgactccattgttatacaaaagttgatattacctgtataactaaatgacgccaattttggagcccattcaataacaacagtcatttcgccatcataacgattattcacattgaaacttttcatgttctgactcaagattttaatgtcctt

SEQ ID NO: 390077 - DNA, 621 bp, Cannabis indica
gcaccttcctccctcgtgatttagatcctttcacaacacaaaatcagcataaatccacaaaacttgtatcttggttagtgagaatagagagaggtttttggagatctcaggaacgcaaagaatatcattcaatattaaacaaccagaagtgtttcgaattgacttgagccagatctagtcacggctaatggaaaaccattgccgactagcagttgagtagtacctttcatatcagatttgtgctgaatgttggaaggttcagatgtggtgtgatttgtggctccgctatcaatgtaccaggagttgtcgacatgggcttctgtgctggtgaaataagcttgctgatcagtgttggaatgactgttgttagcattctgagatgatgattgctgattggaaccaggtgcttgaaaggagatgtcaaagcggtgatagcatttggatgctatgtgtcctggtttgccacagagttggcaaatcggtctattgttgttggatcgtcctctgcctcttccacggcctcttggattgaaggagcggccaccagaactgtaacgtccccgcttcaagcctccattgggtccttacacccacggactgaatggctcttatacacgagta

SEQ ID NO: 390078 - DNA, 754 bp, Cannabis indica
aggcaggccgcgacatgcctagaccatgccgcgacacgtgggtttcaaacccagaaatcagccatgaacaacacgaatttcagcaaccacaacaccattaattcatctcagaacacatccaaactctcaaatcactaaaaaaggttgttaccaattaaaagagagttaaaataacatattccatgcattaaaatccaacatggaacccccaatttcatattgcaatatcaacacaaaacatgctcaaacacacaactcatcaagctcaagaacttgagcttaaatcaataatctcatacattttccagcagcatatcattaaatgaaacttcattcccaacctagaaaatactcaaaacaactcatctaatactcaataatataatccttaacaacaactagcaatctcacacccaaaatcaccaaaatcaaccccaattctcaaaacatgcaagctcaagaacaccaacactttatcatgcttttcaaccaaagaaaatcaacaagaaactaaattaaaaactgtagagactacctcaagactttagccagaacaatccccacaataaagcttcaaagattagctcaaattcacaccaatttcttcaaattcaacttgaaaattaaagagggtttagagagagagaggggtcgggtaaggggtggagtaaaccaggaatttccttttgttttttcttcaaaatttcatcttttatcaaatatagaaaataaaggtcaaaagaccaatttgccc

SEQ ID NO: 390079 - DNA, 803 bp, Cannabis indica
ccatcatacaacaacagggcctggataatagcttgggagagtgtgtgttagccgaaggcagcaggaggcattggactcaaaaaaatagcagaatggaacttggcggctttgaaaaaatatgtttgggcaattgcaaacaaggaagacaatttgtggattaagtggatacattgtgtatatataaaaggggaggattggtgggactaccaagccccacaacaagcgagctggtattggaaaaaactggtatatgtcaaagagcaaatcaaggaaaaaatgagtatgcagcagtttactagttcaatctatacaatttctaatggctataatttacttttcccccctcaaaggaaggtaaattgaagtcatggagtttggaataggcaaaacattccaagacaaagcttcatcttgtggactgcagtgcaagatcgactcaaaactagatcgagattgaagaaaatcaatgtcatctcagatgactgctgccttctctgcagtagccaacctgagacaaaagctcacttattcttctcttgttcgtttgcttctcaatgtttgctgcagattaaaacatggctgcattggaagattgaatcgatggacctggatgcaatattgaggtggattgaaagatcaaaagcaggcatatttcggaagagcttctggtttgctataattgcttcagccgtgtaccaaatttggaaaacaaggaacctactgctgtgggaatccaagaagccgagagtcattgaggtgactaggaatatcaaggaagaagtaaagagtagattcatttatgt

SEQ ID NO: 390080 - DNA, 1425 bp, Cannabis indica
aagaagaactttctattcaagaatatgagactatcccatactgtaaatatagagaaaggatgtaattttgcttttaataagactactcttgatttagataatgcacaataattaataattaatgcgtattatattagtttatgtaatttaagtgattcttaaataaaatttattatgtactcaaataataataataataataatttattataatataaaccatgcacttttataaacacgtggtcaaaataaaaaaaaatacttactccaaatggattctttttcaaattaacaaggtctaattttataatagataatggatgtaaattagttatttatacaagacagataaaataaaataaaaaaactacatgcaagtacttgtgaaatttcatgaaataatataattaccaaaaaaaatttaatgaaaaaaagaagttataaataattaagagaagacatttgtggcattcccaaagcaaaaacacaaaatattctgattcttatagaagagaaatgacttcatatgcaacttttttcatcatgaaataattccaaaaaaaaaaagtttaggtagtgggaaaggatattgagaatatagattgaataaaaatggctttattattttggtggagaaaactggcccatgccatgcatgacattaagatatggaatttttattgggaaagtgagtaacagccttttatttttatttaataattaattaatgttcaaataaataaatggagttttctaaaagagcttaattagtatctttctctttctctttcttcatcttattatttcttgatcactcttgtgtttttaatgttggttctctaattgctacttatatagtatcttgtcatttaaggatgtttgtttatatagtttaataactatataataggggaataaaattgtgtatgaaaggaaaaggaatcatgaatagtgtatttactatgggactatttatttagtcattcaataataattaatattagattatattccttaattaagtacattcctcattagtaacttgataattattatatttaggaatatttacttcacaaaaaggtgagcaagagcttaatatattaatatatttttattttaattaaaaatatttatattattttatgacatatatagtttggaatttatgtagtaaatccctaaagatttttctggtagattctttatttcttttggtatttaaaaaaaaaaaaattgtttaattttttttaatgattgtgtatattaagggcgtgtttggaaagccacttgagaattggaattggatgtaattggaggtaattacacagtttgacgtgtttgtgtggccacgtaattatatagtaactgtgtaattagaggtaattgggaggcctcaattactctctccaattctcatacccc

SEQ ID NO: 390081 - DNA, 1304 bp, Cannabis indica
agagtacagatgatcaaactcttcattgtcacaacttaaaaatggcagcaacaaacatagacatagacaaagacaataccaccttgcccaaacctccattactaccaccaatggcatccgagctgtcatccgacgtggcaggcccagtggtatcagcatcagtagcttttttcttactagccttaggtggagctggggcaggagctggtgggagaggccttggagcaaaaatcccaagtggttgaagaaccttatcaacttggtaaacagccaattggttatcagaataaactgttcctgaaattgttgtgttgactattccagttgttatgttgacttggcttcctgaggttgttatgttaagagggtactcataagtgtcactggcttgagtttgaacagggttgctcattgtttgaaaattggttattgaaatgaatgatgggactaagtgaaattgaaggagttggactttttgttggtcggttaggccgtttagggttccggttttgaggttcgaaaaggcgctatcggacggggcaaacatggttagttcactgtttgtgcttccgagttggttattgatttggttaccaacttgtgtgctcttgagtaggcgaattaggacggtgaattgcccggcttttgttaggattttgtagatgtctgttgagggcgggggaccgggtgggagagccggggccgcggtttgagctgaagattttgtgatgaaaatgaggaggagaatgagaacaagtgagggagtgttgatgagcatttttgatgtgttcatgttttggtgtagtgagtttttgttgttaggatttattggtttgtgtttttggttattttgcatggagtggtgttgaatgaggagagtgttagggggggtttttattgagggtggagaatgagtgttattaggtaaaatggttctatttttagttatgacttattgtgaaaactaagtggttaggttgtctcatgactttgttggaaagttgatggaattatttgaggaatgctaagttgtaatttaaggtaacatgaatcacaacaattatattggtattggtgcattttaatattcgattttatattttaatttaataaataataaaatcgctaattaattatagagtgttgttgagtgaggaggagaaatcttttaataaaaatgctccaaaattcggctttttcaaaataccattttctttatttttactactatttattaaaaaatatctattttctaaaaatatacataatttattttttaaaatattacatttaatattttatta

SEQ ID NO: 390082 - DNA, 612 bp, Cannabis indica
aaaaaaaaaaaaagaatattactcgaaaggtcccattgttttaggtcactcttagccttagggtgaccatactgcaaacacactacacatgccatttattggttttcttttctttcttctatttcaatcatttttatttatttattttcaatattgaaaaggacttttttgcccaactagcttccaaaaagtgactctgcttcccttaaaaaaaaaaatagtattaagaaaaggctttggctagataccaacttttttagctatagcttgcatgttattgtagtttaatgaaaattatctcataatatatagctcctaatattaaagataaatgacaaattttgtttgtgcccaaatcaatactttgttttgttatattttatctttccttaaaataagaataaataaattattaatatcgttatattttgagtatcccttattctctaccactaatctcttttataataataatgattttaaattaataattcataatttttacaatagcataattttatatataacctatagcaaatacgaaaattttgtgtcttgctaaaccatgatttatgcactatttattaagcttttacttaaaaaaaaaaaaac

SEQ ID NO: 390083 - DNA, 1061 bp, Cannabis indica
accctctcggtagggtcgaatcgcaaggcgagggcccccatggtgacaaggtagagacccctttgctgagggtcgagttgcgaggagaggggcccccagtgcaagtaaggtaagcactccgtcgttgtgggtcgggtcgcaaggaagaggccccctcgtagagggatgtgcgagggacccctcgttgggggttgtgacacgtggagcgaggagaagctttttgctgggtcttgggatctcctcttcgtcccatccaaactaaatttataggcaagttctctcatcttctcaacacatgtaatctaggacccttgttcgtattaatttgccttatttgtcgataattagaacgctaatttctcatatcaacacactgttatatatatatatatataattaaaactatttgaatgtcgaaaatatgaagggagtatatcagtacatccctttggggggaggtgcaccaaagaattttcctaattttttaataaacaaaagtaattacttttgttttaatgagtattaacttattattttttaatttattcattcatttataaatggaagggtagttttggtcatatttgaattttttttacttcaattttagttctaaattttaatttcatttttttgaaaattaaattctataaatttagtgccattatactaagatatatggtctatacgagtataattctatttaagaggatttctccccttctccctccccctccttttctaatttcgacatgtactagatcgtacccttaaactttttaagtcataaaaaaaaagtaaaaatctatataaaaaaactcgtaaaaatataaaaataaaaaattaataatccataaaaatgtataaggaattaggggtgttcacaaagtatccgatccaatccaatctgcacgatccaatccaatccaatccgcaaaatgcggatatccgcacttgtgcggattggattggattgaaaatctaaaatccgcacttgtgcggattggatgttgtttgacctcaaaagtaaccgatccaatccaatccgtacttattaatat

SEQ ID NO: 390084 - DNA, 911 bp, Cannabis indica
cagtcattttaggacataaaccccaacatacatgtggtcccaaaagcataaaacacaccctgacttgtaccgaaggaatcaacactacaattggatagtaaaggtagtggtggtcaggtatcagttcgtacggacacctacgaattatgtttccactaccctttgtagtccactacttgcacaggtcttgtagtggcgtggaggctcttttagctggtcccccacacgtacatggtacaagacgtcctttgtgtttcatcttcatggcttgcgtccttaagtttgtcatgcttaaaagtgtggaaatcttggtatatgtcccttggtgagtagttaatagaaagagatgtgattcttcttgattcatctgctcttgttgttacgtattaaacaagaacctttcttcaatgagggtcttcgtgtgatgggacctctcgtgtgagtgaggccctcgtgagattatgttgtgcgagacaaggaggctccccattggagccttgacgagcaaggtggagaccctctcgttacgggtcgaatcgtaaggcgagggcccccatggtgacaaggtagagacccctttgctgagggtcgagtttcgaggagaggggcccccaatgaaagtaaggtaagcactccgtcgttgtgggtcgggtcgcaaggaagaggccccctcgtagagggatgtgcaagggaccccttgttgggggttgtgacacgtggagcgaggagaagctttttgctgggtctcgggatctcctcttcgtcccatccaaactaaatttataggcaagttctctcatctgctcaacacatgtaatctaggacccttgttcgtattaatttgccttatttgtcgataattagaacgctaatttctcatatcaacacactgttatatatatatatatata

SEQ ID NO: 390085 - DNA, 744 bp, Cannabis indica
cattaatattcatatattttatatagtgaaattggatttgacagatttgcttttgtttgtttttgacgtgggaacacaaatcctctttaccatatgagtttgtggtagggttcacttgcttttatccatcatatatggatctacttaattgtattagcaatttggataataaattaatcatccctaaaacaaaagaacattcaccctttttttattcttttttccaatctattagtatgcatgataaaataattataagaattaatcctgctaaaatatataatttgcattaagtttctatcacaggtaatattattgtgcaatgtacatgcaaattaagctcacaaatttgtgacaattacataattagtgtttcaaatgtattgtttcatttgcatatgtaatatatattatattaagagagggttaaattggatatgatcattaattcttctcaaaaatttaattacaaaaaaggagaaattaaaaattattggatatatattcattaaaggatatatattattaagaacatatatatatatatatattaacagaaggttaaagaatatccaataattctctttaattagatcatataaaaattaaaaaaagtgtaactgttatctctcaatcactttctatcaaaacaaaagcaattagtatataattatttggtttaaatgctatttggtgtgattaaatttataaaaaataatatgatatatatagatatctattcta

SEQ ID NO: 390086 - DNA, 1636 bp, Cannabis indica
aaatttgatcatactcaatttcattacgtataccacaaattcactcttgaatattagaatgtctaacaacatttttgttaattcatgtgtaagtgtaacatcctgagtgcataacattttatgttatttaaaaacaacgaataaagctgcctttttgcctttgattaagttaattaatacgtaaaaggcactatacgcatatacattgaaattaatacctgggctctactactactagagataaagaagcaaacacgagagagtctggagatatacagtttaaggaggaatgatgttttgaatgttttacttaataatgaagccataacgtacgatgatttagcttcctaatgatgaacctttcttgcagtactggcacaccgttagcctctcatttgtggttttatagttataaatatggaaatattgtacttaacgagttacgtgttagaaacgagagagaccagcgaacgaagaagaatttattaggtgactcacacacatcatgcatgtcctttggggacacgtaggcgccacaacatttttttttctcttctaaacgaatgtagattagaaaattaaagaaatacaaagcgcaaaaagaaattgcagcatttatcacaacaacgcctaatgcacatttggtctgtaagagcttcaaaatttaatttttcattactacatattaaatatttttttaattaaaaaaatagaaaaatagaaattgaaaattaatctattgatctcttaaaagtaatatcctttattactacattaaataatttttattatatattttatctatatatatagaaaatgatacactttataaaaaaactctgcatatatatatttacaaagtagtttataaaaaacacaaatgtattcttaaactaaagtatatatgcacataatcatttagcatgatgacatcttaaactataaagtaacaacccattgttttatctttaactatttgtacaacataatctataaataaacctactaatttattagtgtatacatatcataataaatcttataaaatataaatgcgcccattcttaaaatagtatatatatctacataataatgtagtatattaatattttattattttataaactactttgtaaatatatatgcatatatttcatttaatcaacttattggtttatttgatgcatatcgacaaataatacattaatgcatgagagtatacgatgtagggttgtacaaaaaaaaattgtaaactgcccaaatcgaataacccgtccaaactgaaccgaaaaaaccgataaaaattacaaaccgaaataacctgaaaaattacaacccgcccaatctgtttcaacccgtccaattaaaccgaataacccgaccaacccgactttggctttttttttttttttttttttttttttttttactttttagtttttattatatataataatataaaattatgtacttaattgttagtttcaaagtcatatatattgtgttgtgctttggtggaatttgatatttttaatttatctttttaatttttattgactttgaaaccaaaaaaaaaaataaaaaaagtttggccggtttgggcaagttaacccgaccaaaccgcccaaaccgttag

SEQ ID NO: 390087 - DNA, 752 bp, Cannabis indica
agatgagatgtgattaatttttgagcttgtattttaaaaaacttatatatgaagtttacaattctttctgttttgcattgcttcataatttattttgaacttggctgctgttagtattgacaaagaggctgttagtaggaatgtcaatcgggttgggcccgacccgccacaaacttggccaagcttgacatcactttggcccggaccgatttggcccgactccttcctttggcctagcgggtcatgcccgatctgagataattgggacgggttaggcccgatctgtattttttttttaagaaaaaaaaatcaatttatttattttttaaaaaaatagttgaattaattaggtaaaagaatttaaataaaaatagaagacatgtttgaaaatgtgttaaattttccataaattgattttgaattgtggaggatgttgtttttaaattttaagtaatttttagataaataatttgattcatttggtagtaaaattcattaggtaaagaaatttctaactaaaaatagaagacatattttaatttctgtcaagttattgcattttcaatatatatttttaaaaaaatttagtgtgagacttatggactttttttattgaacatttttatggatggtttatttattgtttgaaatgtggagtttttcaatttaaatttagagtaatttattatgttggattaaaaatccttttgtgggcatgtataatgtatatgctattataaagtgtgatacaa

SEQ ID NO: 390088 - DNA, 717 bp, Cannabis indica
ttaatagggtatattcataactttctgactgtgtgtagtcttaggtgaggtaaggatacacaaactattaattcctgtattgacgagagaccatcttacctcagaaggcatagtcttgagaacaagagtcatttttaaataaaattattcgaactagttacgggcaatgtattgcaagacatctacctcactacacataagaaaatattaacgagacgaatcagttgttgaaacacttagggtatgttccacattataataactaagtgtaacaacttgaaaacatttaggacatgattgtccagtctgcgaggccttatggtcaaagagcagttctgaagtttgctcagtaaacaagagcccatgccattgctagaaggaatatgattaatccaagtcattattggtcatctgtatgcgaagcgagataccactatccaagtcctcatcaatcgccttaaagataagaatgataagcagttatgcgggcttctattattatccacacgtgttaatatgaaacgtgatcattcccacgtttcattagacggatatgtatttcaaattttaaatgtaaatagctatcaacctatattcatatcaataggggcagattctacagaaaaaagagacaaaaaatctttgagagaaaaataccactaattgtaatattgtatcaaatactcaaaaatatcttgaataagatagactcgtgga

SEQ ID NO: 390089 - DNA, 1627 bp, Cannabis indica
ttaaaatttaatataaattactattaaatttttttgttctccaaaattttaggagggccatgcccccttagagctctctcccgcagtaatattttagctttatccttcaaaatatattaccatgatattatttcactacaatttttttttttaatttttatgtcacaataaaatttgtgattaaaagtaaaaatgttgagactaattataaattataattcttatgttatgattaaaaagtttgtggctaaatgtattagtcataaaaattacaatttgttgtgactaaatgtatttttaatcacattatatacttcttgtaactaaaactaatttagtaacaacttgtatctaaatactatgtttagtcacaagtaactttttgttgtaactaaaaatcacatttagttacaaaaaatttatgttgtgactaaaaagttgttactaatttttttttatagtgcttttctaatattctgaacgatgtcatctctatccttaatatcctgggggcagggccggccctatgcataagcgggttaggcccgcgcctagggcccactcattttagaggcctaaataaaaaaattgccttttaaaaaatatacaaattttttaataatttttaaaaatactatttatctttatagtaaaggtccaattttttttttcctatgacccatttcaactcatggtcagccctgcctaggggaccacctccccctcttagacaaacttatttggtatcatgatcagtctaatcatattgttcgcatagttactagcatgcatggaatctgaatgaatgggattgggcagactttgggctctaatgagggacatatagtctaaattgtggaagatgacctgtgaaaactggttgcctacttatttcaatttggcccataggtttcagatttgttaagtttgaagattgttcatcatgctcttcgctatcttgtgattccatgaggcatatttacgactctttggctagctttatgtgcatgttcccgtgcgtctctctaggtttaaatttttgtgagttgtatctctaggatagtttcccttccttaatccttaagaagttgtttgtatgtatctagagagtttgatatcataatatgcttgttaatgagaaataactgattttgttaagtggagtcttgaatatattgattgccttttcatcaactctctttctttgaatctcctataaacttaatgtttccttgacttctgtcatggtgagtgaatccttcccatacagaatagtgccaataaaatgttcataggcttttggtagagaacttaacagaatgatagtttgatcttcatcatcgatttcgacgccaatattgcataggtccaggataatcttgttgtagtcatcaagatgtcttctcaacttcttgtactcatccattctcaatgtgtaaagttttttcttgaggtataatttgctggccagagactttttcatgtaaatcttagagagcttgttccataaccctaatgctttctcctcacttgaagcttctctcaatacttcatctcccaaactcaacaagatagcattgtgtgttggaagttattttaccaggaacttagatctactcacaagtat

SEQ ID NO: 390090 - DNA, 1846 bp, Cannabis indica
acttggggagaaaactacaaacttaagcacttggaaacaaggcccagtgcctaggttgacaattaacctggtgctctagtttcgatcactcaaatgccaaatttgatttgaccaatgaatctcgaatggtcaaatacagggtaggagacctcatcctcaaattcaagaaccttggtagtattaaaataacaacccgggagctcgggaacaagatacccaaggcccaagttgataaatggtctgatacactggcttctgcttatctgattatgattcagttacgaccgtttgtctagtttttcacaataactaagatccatgaagtcagaagtcaaattcacaacttcacatttctcatttccaacatgggaaactcactcagaagtgaagagttttgagtcttccattgagaagagcaataacatctccgagaactggtgaccaacattgtcagaacaaagaaacagactaagtgatgtcaaaatatcacttaggcattttaaagtacatcccttggacctttttttcacttacttaacgtccaggctgacatcatatgtcaacatgggcgctaggtcatgaattgtgttcagtaaaacaaccataactcactcgatattgatccaatttttgagattcaacttgcgttttgaagttaattcaatgctctatcaattaatttgtcacacttcaattaaaattgtgaagctatcgacctcaaatttcaccccatggatgttacgaaaataagttttgggttacccgtaatgggtccgttacgggtcccgctaggctccaaaaaatggctatcaccatcagaagctaatttttaacattagatcatcatctacgctaaataacatctaatttctattttctcctatttttttgggcctcattcaactataaaaagagaactcccttagctcatttttcaccttcataaaacttcacacaaggtcagagcttctctctctaaaaattagagcttctgacattcagcctattttgtaataccatctcgtgagaaataaaaaattgaagtagacgtagttgtattactatcgcgatacagggagtgaactactatatttttgatgttctctcttataattagttaacaactatttcattctcaccaatctagcaagcaggtgtggtgttagggttattttttatgtaatttttatagtctaatttagggtgtgttttagtatttttattattttattgtacataattatgcttaatttttgttttaatttatgtttaggaaaattatttggggtcaattttaataattttggtgatctgaatttttgagcaatgatgagcaaatttattgaagaaaaaaaaacttctttagcgttgagtaatttcctatttcttaaaaaatgggtcaaaaataatattttcacctctcaactttgtggtcaagagtcaacaacgatcactttccaagtttaaggtggaaaattgaagaaaaatggaaactgacctgtaaggctgtggcttggtaagcaaggctgcgaccttgcctgtgttcgtcgaaaaaaatgtgaattgaagaatcaacaaagatcgaaaaaaagagaaactcatttgtaaggccacgaccttggtgattttttggcaacttgaaaatttcactataaaaagggggctgatggttagctttttggaccactcaaacattaagaggaatctagagtgtagaaggagagtaaggagcagaaggcgccgatggaggactccaaatagtattttttttctcttccatttccatcttttatgtttttcattgaatttctttgttttagaatgccttttagtagctaagttcttt

SEQ ID NO: 390091 - DNA, 791 bp, Cannabis indica
gcaagaaagggaaattcaataattcccctagaaagtaacaccctcgagaaaaggaggagaagttcacatgcttctctatactggtggacactcccaatgaccatcctaatggccacacaagccattgtttcatacaagaagccacctctaatgaagaaaggcatcagtaagagggatccaacaaaattctgtgaattccataagaatttcatccatgacactaatgagtgtaagcacttgaaggaagagatagagttcctaattaaaacgaacgaccgtcacctacattggtatgtccaagccatctttaaccttgcataggtccaacagaataataacccattgcccccacaagttgctggccatttataggtcatcattggtggaccccacatagttggggatcaaactaagtgttagatagatatgctcaaaacttcgtcatgagcaaagaaataaagtcctagctgtagaggaaagaaatctaaaataaccatgaatagaagagcctgccatcacattcaatgaagaagatgttgctcatgttaggttcccccataatcctttggccataacaacacaaatagggaatatgaaggcggtacgctacatggtggatgatgaggcctcctccaacatcatcttcaagattgtttatgaaaatatggggcttaacctgaaagacctaataccctgtacacaactcatgtacaggttcttaggccatggattggcccctctagggtacatccaattgtcgcttaccattggtgaaagtgttgggttttatg

SEQ ID NO: 390092 - DNA, 1012 bp, Cannabis indica
ttttactttttcttttttcttttcttatatatgctttttctttctttcttttttttctttttttttttgaaaattgtttatctaggaatcttgtttaccataatactagatctacaaattgatctttcctttgggtactgcttctctttttactattctaattctatttctgcacatatttatcggtaattcactatagctattttaggaagtgggataatagtattgaatttgactattcatttattattgatgaatattgagcaccacattttctatattgtgaattgtgatgttttcaacgttagtacttatgtttgcttacatcaaatattgtttgttacttctttatgtttgtggactaataccttcccaggtagaagaagtggtgtctcgtgctgctgatgggacttctttggagctagatcttgatttttcatctttacgcacccaattaggtcctttggctgctgtaagttcttgtatttattttctttatttcctctgcaagttgcagagtgttttgatattgttagaacttccagtttctactttttttttttcctgaaagagaacttagttatagtaaattgtatgtttttcctgccagattcttctttgtatcgatattgctgctacttctgcacggtcggcaaagatctctcagcagcttctgaatcaggtagttactatatatttcatagagggggtcataataattatactcgtttaaaattagaaaaacaaatgttttttaacaaaataatttgttttatttgtcttggttttcttttgatataaaatatctacatataggagaatctctcactcagtattttttttttcttgtgtcttttgaaatttcttattttcttatgtatactattatccaaatggatccacataccttgacagaaaactgattagtaatttcctccaagtaatcattgattaatgataaagcttaacaatattctctatactatttcaactatctttgatgcaatgctcc

SEQ ID NO: 390093 - DNA, 600 bp, Cannabis indica
aaaaaatactaaaatcaacaaaacaaaaaattcaaaaaaataataaaaatattatttacagtaaattaaattataaaaatattatttattacatataattaaaaaaaatactatcattctacataaaattataaacatatttattcactactacaaaaatacataacaaacctaaatactcaaattaaatcaattatataaagaaaactatagtccaacacttgatcaaatgacaaatcataattcaatacagttctagaaagctacgactaactttccaagcaattcctgctcaaatgccatgactcctttcattttacccctaagcgagccacgctcatggctaactttccacacatggagagggatcattccaaagatctggcttattcaactctgctgatagcaaattcagcctaaccagaaacttcttccactgccaccattaatgtcaagttatatgtacatcataataggcttaaataactcataaaagatcaactaatcaaaagatgattcagcatacataaaaaagtattaattagtcatgctttgagattagcataataagatatttttaacaactactagctagttctt

SEQ ID NO: 390094 - DNA, 2046 bp, Cannabis indica
aaatcagtatgaatcaattcaagtaccttagaggctctataggaagacagtttaaagggtaatgcatgagatttgcctaactgacaagcttcacaaaaattttccatttcattctttggaatttttacattgttcaattcacacacaagcttaagaactctagtagatggatgacctagacgtctatgccacaaatccttcttggaatgataaaaactagctgtattaacagcatttgattttgacagactcgaaacaccagtaaagaactgagactgactttgattgggacatggtttgttggcgaattgatagagaccatctctaagcactccttccagcagcaccttctttgtgatgtgtccttcacaaaacaacaattaggatgaaattcaacaaacacaccattatcagaagttaaacttgacacactcaataagttctttgcaatatcaggaacaagaagcatgttattcagcaatagagatgcaaacttagtattggtatttagttttccataaccaagatgggagatatgcaaaccattaccattaccaatgattagattttcctaaccaccgtattcctgtttctgcaccatgttgttttcatcagctgtcacatgattacttgctccactatccacaaaccaagcctcactgtcgattgtttctggagtagctgtgtatgctgctggtgcttgattttgtttttgatttgtttggccatgaagctttggatcagatcccatgtaggcttcatcatatctgttgtaacagatagctgcagaatgaccataacgaccacaaacctgacaagttggtttaggtccattcgaacgaccaccacgtcctcttccactgttaccacctccacgattgtagctacttcgacctcctcctgactgattttggtgttgatgacttccctgatttgaataagaatggtttccacggcctctgttgttgggaaaagaacgattggctagatttgcatttggagaaacactgggatgagtcgttttgttgctgctgttgagactcagattctgaagcctttccatcttgttgtcaaaggcaaggagaataccttgcagctcctgccatgttgttgaaggtcgagcttcgatttgaagaacaatgggcaaatactcgatatccaaaccagaggtaacattggatacaagttgattttttgggtaaggctcaccagcaagagccaaggaatcagaccacgctttcttctgcttcaggtaatcttccattgatgtagagccttttcgagttgtctggattagggtacgagtatcatcgattcgagatcttgagtgagctccatacaagttttcgagtgatttccacagagctgcagcagtatcacatcccatcacctcagtagctataccttcggtcattgaactgtacaaccagcccattagtagctggtcactgactatccagtgttcatactctggattaatggtgagatcaacaccagattcaccttcagttgctgttggtgttgtgatgaattcagtcggacatggtcgactaccattgatgaagccatcaagatgatgacctctgataaccgttgagaccattgtcttccataggacatagttcttacgatccaattttagaggaaagggttgattgagagtattgaaaggctgtgtgtatgttgagtgggtaacagggacagaagagctagcagcacctgctgcagcagtggtggttccctaaggagtctgagaattaacagacattggcacgggccttcgtgctctgataccaagttaaagaatgcactgaaagcaattacacaaaactcagctcaaaagtgaggctgagaagaaaggttttcatttatactctgatgaagaatacaagcactaataacaaagtgacatgtggccctagtgttggtgccaagggaacaaccaaaacagaaaaaagaaaaataaggaaacaatactaacaatatctgatagtgacattaaacagagtattaatactaagcatgaattaattaactttcttaaca

SEQ ID NO: 390095 - DNA, 1342 bp, Cannabis indica
caagtggttaattttgccaagtcttcagtcttttttagtactaatacaagtagagatgatagagatagactttgtttacgtctgaatgtccaagaagctgatgctaacagcttttatttaggactcccttgctggtcgaaataaaaaagccatcttaggcttcttgaaagataagatgcagaaacgagttcaacaatgggaaagccgctttctctccaaatctggtaaagaaatactcttaaaatcaatagcacaagctctcccaagctttgctatgtcagtttttttgcttccagttgaaacttgcaaatcaatggagagtattataagtaaattctggtggaagtcttcgaatcagaatcaaggagttacttgggccagttggaacagacttagcaaacacaagaatgaaggaggattgggttttagagacttgagagactataacttagcaatgcttggtaaacaagcatggagattgattactaatgaaggttctatagtctcaagagtttataaagcaagatactatccccaagactcttttttctctgcctccctaggatgtaacccaagctttatttggaagagtctttttgaaaccaaagatcttgttaaagctggagctattattcatatagggaatgggttaaacacaagcatcacttctgatccatggctgcctgatttgaataacccgaaggttatctcaacacaccctgctttaattggccaaaaagtagctagtcttatgtgtgttggtgaacctagctgggacactgagatcatagatgatctgttcgatgtcagggataaagctttaattttgggcacccctcttagtcatgctagtcgtgaggattgttggagttggttgctggaaaaatcaggtacttactctgtcaaaagtgcctatagatttttacaacaatcaaaaaataatggccaacaaaactctgatctttggaaagatttttggaaaattcaagttccttctaaagtttttcacttcggctggaaggctatcactggctgtctccctacaaaagtccaactccaaatcaagcatgttcctgtcgacaatctttgccccttctgcaatattgctgctgagactattattcacgtgctggtgaattgttcttttgctaattcttgttggatcagatcaagcatcaacatttctactgagacgcatgccactttcgacacctggttcgaagcacaagttgctgggaaaaaatggcagtttgctgaaggagattttgatgatcacgtgggctatttggaacgcaagaaacaagctggcttgggataaaaagagtatgctagctgctgacgt

SEQ ID NO: 390096 - DNA, 651 bp, Cannabis indica
aaaaattagaattacaagtcaatagacacatactatccaacatatacgactatatagagataaactcagtaccttctctttataggaggctgcttatgctctccaatccaaaacccaccacttaaaactctttgaacacttattcaagctatataaatcatagcaaaaatacgttcacagaaaaaataaagaaaaagtatatatcttagatatagaagatacttttatatatttatgtttctgtgaatacaatttgttcttattgttttttactttccctatttctctctccaaagataaatcaaaatcaaacaataagtattgaaattccataaaaattgaaagcactttagcacaatcatataaaaatccacatttacaagaaatatataatagaatttagattgattgttacttattcttacccagctcaaggatcttaaacaattcattggagacgtttaacaacttcaaagttgtgtgcaaatatatataatcctgagtggaccaaattgtccacaacagtcaagtcagccctaaaattagaagttaaacactcaacaatgatttcagactttacattctggaaaaaaaaaaaattatgtaagccataaaaataactctcctcattccaatctcgtaattcaatat

SEQ ID NO: 390097 - DNA, 1011 bp, Cannabis indica
gtagatacagaaaaaataaagataaaatcatcatgaagaacgatcaggtgcgattaaatgtgagtaacaatgcctctcatcggcttaggtacttattacctaccaaaacgataggaaaacaacagaatcagccattcatatggccctcaaggtacgtataaatatatatatatatatatatatatatatactagcactggtatagcagaagcatatctaatataatatatatttatatgagtactactactaatatcaatcaatcaaaccagtagtacttaagtactaataagagcattatattagctttgtttttttgttcttgatgctaattgcatatattgcatataatttaattgcagatgggttacaggcattttgacactgcaaagatatatgggtctgaaccagctgtgggaaatgctttaatggaagcaatttcggatagaagagtagaaagggaggacctttttgtcacttccaaactttggggaagtgatcaccatgacccagtttctggactcaaacaaactctaaggtataatatcaaaccatgcatatatatatactcatcatccacatatatcatcatgagtttgaaccatcatcttattcaagtttatctatatataaatattattgttatattgggaaaatctacaaaaatagatcgtaccatataaatcgtatataggaaaaaagagcatgtgggtgaatcgtctcgagttttatgcatgggaaaatcttgaacaggatctctcttgagattcacattgttgaggaagttgtttttaggttctttttaagagaataatggtgagaacaaaagtacagtactggaaacgcacgggaaagaattaattaatattgtaacatccatatatataaataatattattgtcataaccttgtttttctaagattttgagaatctcacacaaaaagaaaaaggtatatatatatataataaatagccagacatacttgtttgttgctgtgttactacataac

SEQ ID NO: 390098 - DNA, 591 bp, Cannabis indica
tccatatcaacctaaactaacacaaaatgaaatagatgtgacctttcagcaaacaaaaataaaaaatatttgtaagagaattgctaaatactattattaatatctcgcatattttttttaattatattattattggtgtaattaagtatcagattttacataatttaagaaaatagtttttaaaaaatatcgttaaccaatcttagaatgtcatctataaaaaatgttaaatactattagttcccaatagcaatgctcaatatgtaaacacagaaatatcaattaataacacaaacctttacctattctgggaataattttctagtctaattatttttttcatctttgtgtatgttatagtttgaaattgcacctaaatctcttactatgggaattaggactcttttggatcacgaattcaaatagtcacatgtgtaacataatatttgaaccttgattacaatgcattccattaaaataggtgcactaattcaatccctaactgtttctgtatctataagaattttttagccttaagtttttcatagtcgtccacattataattatttaagacatcttataaaattttga

SEQ ID NO: 390099 - DNA, 552 bp, Cannabis indica
atttctgaacagatagcaaactcccctgagcttttgatgtgtgggtgctcactttctcccaaagtgagcctttgacaaatcttcttctgaaaatttcttctcttattcaatgaagctctttaacctattctaataatagagaaagaacaatattatagaaaccaaaacctaatataacactctagattcttacacaagaaaccctcttcttacaaagatgaaaatgtaaaacaataagattagaaaagattaaatatttggttactttctaagttttatttatagatcttaaaaactctaaaaatagtcacaaacaagtttacaagtataagatactttcctaaaataaacttcaatacagcaatagaatcgcaatctgcagtgacaaatcagataagatcttccaatctttccaataaaggcaaaatcaagattttgtcattaattcctgtcataaaaagatcacaaaatctgctttcaaaaccaattataccatataaagaccatttattcaatatttcataaaaagaattttttctcttttatgaaaat

SEQ ID NO: 390100 - DNA, 692 bp, Cannabis indica
agatagacaatttcgctgcaagctgtaaagtatatctattaatataattgtgcattgtaatttatctttatttatttatttattattaaaaattttatttatagtttttctttagttgaattttgctagatagcttttgttttttcgattgtcacatttacaaggttgttgtgctatgaatcttaatctatagtacatattttgataaacaaagaaaatatgggatatagagaagtaaatatttctaatttttactatgcttacaaaaaagaaatgtcaaccaaaatatttattagtaaccaatatgcttttgacacctatttttacataaaaaaaataattaaatttattgatacataaaagaattaattaaatatattgatatataaaatgaattaattaaatattagtattaaatataagagtgacacataatgaaaaaaaatatctgtatgtacagacgttttttgtgattctgccataagtgtttttcataaatattatatataactcatttattagtttatgaaataaaaaaacatacatttaacaattttccttaaataatattatttactgatacttttattataatttaactaaatacatgtaatatatatactttttatgagtaaataccattttagattttgtcttgcaaaagttatcaattgaactatctattttgttaa

SEQ ID NO: 390101 - DNA, 1111 bp, Cannabis indica
ggtatgacacgtcttcaaccctcgttcctaaaagagaaggactgcatgaagtctttcacacagctagtgatgtttcacctctttgcctttttatgcaaagtcatttttcaaatttatgtacacctttagtctttctttgcaaaagccaaagttttccactacaaaattcaacatgactctctcttattgaaactgaccttagcataggataattgctcatgcaaggatgcaggcccagctttccctccgataaaccaaaagcctgacattctgtaaaagtttgtgctctcccttacgaggtccttgtcatggcaaaggacacattacaagcatagtgatggaaacactgcttggaagaaggaaccttttggagccagccatccaacttgggttcaaccttcaatcctacagttctcccccatggaagccaggagagtactaccaactttagcttagactctccaaactttcgacaattcccttccaagtaatcatggagaggaaaggcacgacctagatggttagggtaaaatacgcttctccgagtaaggattggcgaaagcaaaactacacctcgacctcttccttgaaaaccaaaaaaaggtacgagttagggctcaaaaggtacacccaattgctgatgactacagtttcttacttccattttccaaggttattagcttagtgtaaatatgcaaccaaaagcaagaaacattttcaaccaagtcttcctgagggaaacgcccttgtattctttcctcaaaagctaaattgaagtaaaaatctagagataggatgcgtattcagccaaagttcttgaaaggaaaactctacctgaattccttcttacagatctcggcagctttcgtaaaagtttagtttatcgggttgcataatttgctaaaacttcatcctggcaaggatcaaaataagaaaagtgcttaaggtctaagatagttgtgggggttactcctagaacccaacctttctaaaaagaggtaaagcctaaggagatgtgtgaaaaagtgaaagctcctttcggtgaaggaaaccatcttcaagctaaaactgttgggttttgtgccctaaataaaacccattacaatctgat

SEQ ID NO: 390102 - DNA, 826 bp, Cannabis indica
ataaccaataactaaaatactctaataagaaaaaactaatacctttaatagtaataataaaatctacgtcatatgtatttaatataatatagtacaacgaaaattaaaaccaacactataaaaagatagaaaatcattataaatttttcaaataactaattaaaaattaatttataaaagagaaagcatagaaaaaaaaaatcaaaatcaaatataacaaaaacattagccacatctttgaatctttgaatatttagtaagtgtcatggttgaatatttttttttattagaattctttcattcaacaaagattacataagataaggaaagtttcactagaaagagcatttcactttatatttaaactttgacctttgtattcatttattttaaaggtttttccatttctatactctaaagtaatttttttagcatttttataaaaattcatataacaattagcagagtaacttgcatcgcaattaaaatttatatagcaacccatatagaaactactagagcaacctaaactgtaaattaaaaaaaaaattaaaaaatagcatataagcctgaaaaacgtaaaagagcaattcttaagtttagtatatagtaaccttataaaagaccagttcttaagtttgctcaaagctatagtatatagtaaccctatggtcaaagagcagttcttaagtttgcttagtacactgttgtattaagttttaccaagatctagatttactaccatgtatgttgtttaatatcctaaatatgaatttctaaaataatgtaattgaaacacatataaagtttgaaaaaccttacattg

SEQ ID NO: 390103 - DNA, 683 bp, Cannabis indica
cctaataatatacgtatctccaggtagtctgatgcatcggacattctaagtttaactaaaattgcctatttacctgtaccttagatgaaatggaccttgtctcctataccaatattaattgcataggttctatcttatctgtgaatactggcttaaacatctctagcctcaatttcttttccttgcttctatttgtataagtagaccagatacatgggaatcggaggctgctggtttgagctgaggaggatgctcactactatgtggagctccccttggtgcgtggagatctccttggatacatggaagagctagtgcatagagctctccttggtacgtggagctccccttggtgggtggagcttcccttgttgtgtggagctccccttggtgcatggagctccccttcctgtgtggagctttccttgtagcctggaggagctagaatgtggagctccccttggtgaactttcaagcataacactaatgactccacatatttcacttagtaacttttgggggtcaacagttggcaaggtgtggttcacttttggccatagtagactgttaggttatttttagtattaaaattaggttaattttagcacatttttctatttagtttaaatcatgtttggagcatttttacgcttttatgttttaattttgcagatttaaaatag

SEQ ID NO: 390104 - DNA, 2855 bp, Cannabis indica
aaattaaaaattagaaactaaaactaaaaactataaaaaaattgtttttatgactttgaggaacggaaggaccagcatgccaatcacgtgatttttcacacgagtttcgcgtctgaatttgacacgtgttttcgcagaagaggacactggacagagtttaatttttttgtttcaaagtgttaaggtttacgtggcaggttggtcatttatttatttttaatttaaacacaattatttgtatttattttttttaaaaaaaaaaaatcgttctattgtcttatttaaaggaaaattaaatttttttttttaagtaatttgaaatataaataccttaatgggtacagtcattattcacgttttatttatttattgttatacttcaattaactttaaaagttaaaaaataaaaattatcatctaaaccaattaaagtttatcacgtgataatttacttaacatttaatagttatatactcacaaaaattttaaaattataaattaaaatattatttattatcgttaaatagtaaatttaaatatttatttataattaaaaattaattttttttaaatgaattaaaaattaaatttaaatatttatatcataagttattttttttatatatatacactataaagataatttaaataaataagaaattctttgcttgattcaattgaaaagaaaatataacaaagcatctctctcgaatgtatcatccaaaaaaaagtgttcaattttttttctctatgaaataaaaagaaataaaagtgttcaatttgctaaaacaaaagaatttttttaaatcaactcatctattactttatttattttttttgttgtcgttggtattatgttactatatgttttcttttttggttttgtctcatctatttgttttttttttcttttttgttattggtattatttattaattttatttttatttgaaaaaaaaaaagaagaaatcacgcggtgcagatctctttctcactccttcgattattttgacaatttcagagatcacgtgttagatataagagtgttatacctcagcgtatcttaattaagtcatcgatagttacctcaagagttctcatcacacaaatgaaaccacctccagcaaggaccaagcctttttccctttagttcctttcaagaagggcttaggtaggtttcaaacccttgacccaagcgaaggaggatgcccgtaaaggcaattcctaccattacactacacaattcgtggtaaagggatgtaattaaatgtattatttattaattcttgtgagtctcactatttaactttgatttatagcattttcaacgaatgcatcatttatgagaaatgctaaagggcactagtagtttttagtatcttcttacgtatttatattgttattagtccaattaagtatcggggctcatacatttaaatgtaataatttttaaagagtattgctatccaatcacaatgcgacatgtctagaaggtcttaggcattattagtgcctaataataatgttcaccatttatagttgtcgaaattacacacatcatttaaaaaatattattttttttttatttttctctcatccacataagatttagaaaattatacacatcatctatcatcttaaaatatcaattttttattttctctctcatctatataagatttgacacattttcttacaaaaatacttcactagtagacaactctaaaagttgctcacttgtgttgtaacgctctttatacgtgtgcccgtgcttttgcatcttctagatgtcctctttgtaagaagcgacaacatctttcacagcagactgcaacctctttttgacttggcaattcaccagctccttcgcttggttttggacttctttcaatttagccatagcttcagccctctgtgtctgaagcttctcgtttagctctaagattctccagctccagggacattttgaacaatgcttctgaacagcgctttgccaacaaatttacctaaaaagaataaagtaaaaacagacattagtaaaaagtgttaagtaaaaatggtgttgagattgagttaaaatatttaccccaacaagtttatggttgttgcccctgattttgcccaatatacgtggaccaaccagacaaggacacgtggacacaaagggtttagcacttaaattaatagctaagtctttgtaaagaaaggcattatcttggatatgcctcccggagaaggcatgcaaggttttctatgctcccggagagcaaggtagcatcacagcatctccgggtggtgtcaggctccctctgagcagtcatctcgcatttaatgccgcatgggaggaggcgtgttggaactgccacacgcaataaagtctgacgacacaacccccgatctgcacctacaaggctatgaccaataaagtctaatgacggctactctgtgaagaatcacatcagtcaaaagggaataaggacagccctcataaaatccctaaggcacctagggatttgaccatgcattacccatggtatattcattgggaatgcacaactttattgatagttacagaaatacatgtaccttaattctggggatcaccccacgaaaacactataaataccccctcaaagctcattaatgggggtcgagaattctgggttgcataagtgcaagaagagtaaatactcaccaagaacattctctgtattaaatacaatcataaatatacagactcgtggactaaggctcattaacgccccaaccacgtaaaaatctctctcttaatttcttacagctctctaaactcttattattttattggttgccgaaaactgttggaaattatttta

SEQ ID NO: 390105 - DNA, 1869 bp, Cannabis indica
gtaagtttgttttctcgtcctttttctcgtttggcatggtttagctttgtattatgcatttcttctttgtttattttagtctttacttgtctatggagttgaatattaccaagttgcatctcaactgttcctcatctcttacgtaaagcttacctttttgctaatgtcgttgcagggatgttaaagatgaagaaatggaagaatagaaatccacagataatgaaattcactgtcttcgatttcctcgtccccaaaatattgagggttaggcggggactctagtttcagaaaaaacaaaaacaaagagtcactgtcttcgattgacacaatcacttgggaaatttcaataacctttgtcaagataatagctatacaaaacttttgtcaatcacttggttggaagttgcatgaagctactgatgccattgtctgtaaagcccgtttgtcacaaaaatgacctcaaaaagaatgcttcttttactaaacaggtgccaatacttgtagtaagcagagacaaatatcatagaatctttatgatacatagggctaatttttcttgtgcatttgtgtatggtttagctgtctgatcttgttggtacctatgaacacttttttccttggaacattctctcttactgaagaggcttgacaagttggtattctggaaagagaaaaaaattgaatgggagttttgttttaacttgagtgtacagtttacggtatgctctttgtttctgttcagtttatgctcgttggtctagactcttgtatgttatgtaaagggagcacacaaatgaagttttttgctttcccaaatttcacagtgagaatttagaaaaacaaaaaaagaagaattaattcacttttacatgttttgctaatttatttttgtgaacttgttattttcagttgcactcacccgtaatagattatcattgattcataatatgatttcgtggtctattaaaattagatgtgtaattgaaaggattgagtaaattattgaaaaagttacataaattattaaaaatttgaaaaaaattacaaaaatacctcaaacacagaaaaaaatttaattaaattttttacttttttatttacaaaaatgtattttataaaaataataatttttttaatttatttatagttatattatagttgtggttaggttgtttttttaattgtaatatagtttttttttttttggacaattgtaacttagaggatacacaactaagactcaagttacaaagagaaagtttggccaattttctttccaaactaattcctcatcaagccctaaagctcttttttgccatataatgtgcatggatgttgctgtccccttggagtgtgacaaaccgtagcattagggaaatgtgacaaggaactcttgatgtccgaaatgacatccgccagagcagaaagctctctcctgtgactataaactttgctgaccagctgcttgcaatctgtgagaatagtagagagtggaaaccttacagtgtaacaccattgtaaacccagcctaagggccatagcttcagccataacaggagcaatcttagctgaaagaggcacagagactctagctacaacctgcccattccagtctttaaccactgcaccaagcccaatcttaccgttcctatcttgaatagctgcatctgtgtataattggtaagatccttcccttgcttgggagaccaaaacagaggcacgcacttgactagctgaatcaacatgtatgttcttgacctgtgcttccctgtattgagataaataagtggtagtccattgaaccaaatttcctgcatctggattagcattcctgaaaagttttttatttctaaattcccaaatagacca

SEQ ID NO: 390106 - DNA, 535 bp, Cannabis indica
taaaaatttaatacaaaatatatacatgaacaattgactatggcacttaagtgaggtttttaaacaaaaatgtaatgaacaagacataagtgagattgagaagattttaccattaaaaattaaatttgtaagatttaagtgtaattaaatgtgtagtttagatagtattgctcccaatattataattatgtttatgggtttaaattgacatttataatgtatataaagttacataaaaaaatttaaaatcgtttacagaccaactgtcaacataacacctgaacagtgcatggcgcattgcataaaattggactcattccaatcaacatatctcaaggcctgggcgacacgtcgcttagaccattaaatgatagtttctagctttacctttaaatgtgttttggctccaatagttgagtcttaggatgacttttacaccatacataatagggtttatgagaaaagaaatatgatgatcacatattcactatctctatggtgatcacattctctctctctctctctctctctcttc

SEQ ID NO: 390107 - DNA, 551 bp, Cannabis indica
atgtgtcaatatcgggataaacgaaaatttcatacggttttaaaaagacagtataaaagtatacaataaaattgtaataaatactgtgtggcagtataaaagtaacaaaatatgaaactacagtataccatataaaaatctcatacataatagtataattgtaaaaatgatattctcggcatatattccaaaagtttaagtttctaacttgtacaaacttgatgtttttgttcttatcgagtaaagtatatctagtattattagaattgtaattttgtaggactcaaattttaaattaatgagtcttaaaacaaaaatgtgtaggatgaatatactttcaaaatttcttttaacaaattcaaaaatcaaatttggttacaaatttaatatatatactaacagagctcaaacgtaataacagaattggacaaaaattataatttatactaacactaagaattttagtttctaaaaaaaatcattaagtctatgtttgttacaaattttaaaattttaagtatttatgttgcatatatttttttttaaaaaaa

SEQ ID NO: 390108 - DNA, 1289 bp, Cannabis indica
tttatcacgcagtttaggaaacattacaaactgtaactacactataaaaaatttcaatctctattttttttttacaatacgagcaatttgagcgatttaatgaacactcctaaaattgtctgatgctatgatttattggcacgtgaggtagtgagagtgggtttggtaaaggtctttatcaactaagaaacgagaatctgaatgtgatgctttgttttgaagaaataaataattaattctaaaactttcctttattgttaacgaaaacaataataattaaaattatgtcatttatgttaaaaaaaattatgtctagttttttgtgcacgtctttttttttttttcttttttttttttctaatttattctatttttaacttttttcattaagtttgatatttacatttgtctatgagcatattatatgaactttaaaattttgttttagattacttacattaatttttatcaattttattaaaatttagattgattgaataattttttattgtgttagttatattattagtgatgaattttaataggttttaactatgtataaagtttagttgaaacagaaataacagaagtgtgatgtgagtttttttaactaactgaaacatttgatgataatgtttgataaaactttgtaaacagattgataatgttttcttttatcatattaatcggtctgttaactatattgctgatgccttagttgcttgggcccgttgtgccaaggtgaatgcgaagggtcgtcttcgggaggtagcccccgttgaggctactactatgttctaattttctttcgtaatatatcattcttaattattaaaaaaaaaattttaacatttaatgtagttaagtctcatccctaactttataaatatatattgttatcataattgtatattttttgatcattagataaataatattgtagtttcgatttagagatctaaaaagaaaatttatttgatagtattgcattaataaattgtaattattaagaattaattaaattcgtatatttaattattatctaattattattgtattttaaattatatacaaattaatatcttgggtatatttaattttttaacatttgtatccaacttatatttgcaaaattcatataattttaaattagagttgatttttagattatgaggtgaaattagtttatgttatgtgtaaaaaagtatatatatatatatatggaacacttcttaatgggtaatacccattgatgggaactaaaaaaattaataaggtaataatctaat

SEQ ID NO: 390109 - DNA, 1101 bp, Cannabis indica
gagacttgataaaaaataaaacatatatatttcatttaataaaataaaatgaatttggcattataaaaattactatatagccctcacgaaataatttgaaaaaaaggagttgtaaggtctattaagttggaggtgaataagaaacttattatatactagtggcaaagcacatccaaagggttgtgctgccaattttttttaacaatttttttaatttttttaaaaataatcatatatatttattttttaaatttaaataataaattttaaatacgtaacactatgtatacattaattttaaataataaaattgagcaatacatatagaatctattagatcatacataatttttactatgaaaaaatagttgtaatatttatttaataaaaatttatattatgttcaaaagactttaaatttttagttaaaaggtattattagttagttttaattttatattaactttacactatgtatactgttatttaaataatttatttaaaattgtataataagggaagaaaaaatgttaagtaaaaatttttatttttaaggatgttaattagattattaaattaggtgtgtttggtaacattttgtctgaggtcgggaccgggggcgggtccgggttaatttctaaggtttaaattaggtttggagttcaaaatattaattaaaataactgtttaaaaaaaattgaaaatgattttttttttttttaaatttagattcttcattaaaaaattgaaaagtaaaaatagttttatagaatatgattttggaaaatatttttctttttctaattttaaaaattaattaaaaaagtattactaaacgcaactataattaagctgcacaaacatcaaacatgttagttatactaagttttgttcaattatacaagtttagggtaagtattcgccgaaacgatattgtgattgaattggtaaaaattaaatctcttcaatataatcaactgacctatgaacatttgtagtattatgatgaacatttatttcttttacagattttggttctaaagaagaaataaaacataagaattgaattatattagcatattttcttcttgtaaccatgct

SEQ ID NO: 390110 - DNA, 907 bp, Cannabis indica
tatatttttataattattaatatatatttatacgtacaagtgtgtgatgatgtgatgaagagtgatccaccaattaagttggtggaattcattgactctgcaattaattaataaataaataaataaaataattattcaactaaatctaataattaattaattaagatttaagattattctgtaattggttacataattctaaacacaggaattaaagaaaaagccatgacgtccagcaacagagcatctctctctacattaatccatatatataataataataataataataataatagtactattattactatatatataatatattacatgttgatcagatgcatgtatatgtactactatccatatatatatatatttatatgtgtgtgtgaagaataataacaaattacagatcgaattttcactatatcaaactttggtaatatgttttattattaataatatatacaagttttgttaactcgggttactatcttatggttatagttagaatgtctcgtttataagttaattatatatttttgagtctaatctttttgatattgctcacattgttgaggctgagttaggctagttaaataaaatttataattaaaaataataataatatatatacgtttttaaattgggaatattaaagatcgagtacttgaattttttcctcgatcaaggaaagaagaattttttttattgataggattttcgtaattaaataaaaattatatctattctaattaaatatattaataaagaaattaccaattaattttgccaaaagtaatataatttaatatatgagaatttaaaactaaaataataaatataacataaatgttataaatattaataattatgtggatgtacaaatcttttatttattacc

SEQ ID NO: 390111 - DNA, 781 bp, Cannabis indica
tttatttttttttttttttctcatgtaatttgagtgtttaaataagaaggggcagcactaaaaaggtggtttatagttttattttagtagacttaaccaaaattattacttcgtgttttaaattgtattaaatttaacacatgttaaaattgttgtcatttaagattttattttgttttccggtgttgtgagcctttttggttaatgaaaggaatttttttaataaaaaagtaaatgctaatttttttatttattataataccactaattattataatttattaatttttactaaacttaacattttttatttaccatattaatattatttaaacaataaaaataataaattttgtatattctcaataaattatcaatataattaattatttatatattctcaataaattatctaatgactattaatataattaattatttgttacttattttccatcttgtacattgaagcataattataaatagtgagctaaatataatataaaattattttttatactaaatttagtataaattttacatgcattagagataatctaaaaatactaaatttattattgatgtatttcaattaaatttaatttaataaataatataaaaatttactaatcaattataatatacacatagtgttagacaactttgtctttgtccaaaagtaaaactttcatattaaatggaaccattttgtgagtgaataagcagccaaatctaattaaggtggtctgtcaaaagcagggccggccctaggcataggcgg

SEQ ID NO: 390112 - DNA, 1266 bp, Cannabis indica
agctatttttgagattaatccccagttgttttcattttaaattaaatgggttgtgattcttgaatatttaatatcaattcaaatattaataggatttgttttattattattttattatatataaataatattttattattttattaaataaaaattaaaagtcacccatgaatttctcataaagtaagaatttcagttatataggcacactttatatagaaatagatatttttattcctcccaacgctattggaatatttgattctcattaatatgtaaaaggaagattatagcctttttaagtagacaaagttctacaacagaaaatttaaaaaactatgggctttattggtttgtgattaaaaaattgagttttctaacaaagatttaggaacaaaaatttaacgattgtaggtaaataattatttttaaaaatgtgattaattgggaatcttaaatttacaaaaaagtttccttaggtaatgttcaaagtgatctggctaataataggcttacttactgtgatgtggtgaagagatacactagttttttaatacagcagagcaagattatttgaatcaattgtggtgatgagaatactcaattttttcatgcttgtatgaagaagagaaggctagaaaacataataacaacatacattgagaatgatatggttatcgatgactattctaaaatcgtggatcattttttaaaccattttaaaaatataatgggaaggaaaagttctacttcgaagaatgtcaacttgaattgtcttgaacaacagctccttttagtgagacctttcaaaaagagtgattgaagaaagctttgtttggaatacataataccaaaattcgggtttacatggctttggtaaggattttttcaaaaggctttgggaagacataggagatgagattactcaagctattttgaactttttcaatgaacgtaatttacttccagaccttaatgaaactgttatctctcttactcctaaaattgagaatcctactaatgctagtgattatagacatatagcttgttgtaacactcttcataaactgtcatctctctcttgaagatgctctgctctaggttatttgatgtgttacctcgcatgattaataataatcaaggagctttaatcaaaaacagattattaactcataacattattatttttcaagatcttttgaagggctatgttacgaaaattatgtttattacgcaagtatacgcaatcaagtagtatctcacgca

SEQ ID NO: 390113 - DNA, 1544 bp, Cannabis indica
catctttcatttcttttgtcgcccagtggggaggcatggataagatcaagtatctaaaggatgaggtccagaacttgataggccagcgcgaggttgtggccaagcaatggaatgatgcctaactagagattactttccctactaaagatgtcgaaaggatgaagaagaatcttgaagctgccaagaaggaggcaaaggacaagaccgatgcatgcaagaagctccaaggggaacttgatgctgccaaggtaacacttgatagaaaagaggttgaaactcttgaacgatgcaacgtcattggcctccgtaccatttaccaagcttcgatggaaaatctggatacaagtttgttggaagaatctgaggaggaaatcatggccttctgttagaagactaataaggaggaagaagatgtcgaggcaacagcagaagaagaactgtctaaatttcctactatgtaggcttggtttttattaattttattttatttaggcaaatgaccttaaggacgagacaatggttttccccttgtggcacttttttaaagagaactttacaaggttggatggccaactttgttattattttatctatagtgaatgcttcgtactcttatatttgaacttaatatatatgtttgtttgcttatgttttcaatcacaacttaaacatttatattttgatcaaatgcaaaatactttaagaattcccattgctcatatttccctttgatattatttgagtagttagtgatctactatgtgcacgagcagttataatctgttctgctttagatttgcgagcagttatcaattcagctttgcataaatagttataattttttttttgataattgaatgagatgtattgtataaaaccaatcatttgtacatcctaagagcacctcaagaagaggcctcaatattcaaagctatttacaaacatgaatcccctttaaaaaaaaaattgctatgccgtttttcctctctttttttagtgcaaagattgtatccattctttatcatggttgcttattctcttaggttggtacattgtgagtctcatcttcaatttcctttctatcttttcacttatcctccttgccactggctgctcccctttccaaatcacagcatttcttgctgtccaaatatgataaaccaacgaagctacagcagcagcaagaacttgttttttacctcagctgagtttagatttttcgatccatttgatgatgtggggcaagctaacactgcttacactccatcccaaccactcttttagcctgttaaaacattcacctacatatttacattcaaaaaataagtgatcgattgtttcttgtccatcttggcataggcagcaatccccatccacctgtaatccaatcttcaacagcctatcctttattttcaatctcccatgcattgctagccaaagaataaagcaatgtttaggcaagcttagccttgcccaaacctctctactccaattaactttactcaaagaaggagaaagggttttgtgttggatatttattttac

SEQ ID NO: 390114 - DNA, 915 bp, Cannabis indica
acgacttgctgtctttcgatctaattatcagttgatatattgtatgaaaataataagttcaccctaacttttacctatatgtgctgtgatttgtactgttggtgtggaaatggtttactattgcagctatatattatatttatatatatacacataatgttattattccatagcagatcgagatattcaatataaattaagcatggttattgattatatgtttgagtttgagtgtaacgacccaggactgatctcaacaacacaatcataatatatatatatatatatatatatatttatatatatgaagaacaaaaaatagaaaatttctataatctatatgatatttcataaaataaaaataaatactgacaatcatgaattatatatctataggtagataataagatcaataaaacatattctggtgtttgagtttcactagtgaactacaaaaaaaagaattcattccatgtctcttttctatatgtcaagcaaatatagtgttagacataaaaaaaaaattaatgagattttatgtccaacattaatgaacataaaaaaatttaattatatatccaatgctgctgaacatatataataaaagcataaattggcgttaaatatattgatttttatatattaattgttattaatttttacgtccaacaaaactgaacatgacatctatatttgtcatgtccaatataattagacgtacccttatttatatatatatatattaaatgataaatatgtaaatcgtgtgtttatttttttttctaatcttttttatatagaatagatatatactaggtgatcgttacgtgccaagccacgtactgttatagttttatttaatattttaattttttattttaattaataattaaaatagtataattatttgaacga

SEQ ID NO: 390115 - DNA, 984 bp, Cannabis indica
atcagaccaccatcgggcctgaataggaactagtattatatgttacttccaactcttctttcaacaaacttaaaaactaagtgtagctataaatttaagacattaatagagtttttattgacaaaattagacaaaaattatagtattactaacatttggtatttatactactacgaaaattattagatctatgtcgcttacgaacgtaaaattttaggtattaatgctacgtacaaactcaaaacttgaaagatttgtgctgcatatattcttctgtatacctatgattagtgattatatttttttttcttccaatcttgatattttagttcatattatgaatatatgatgtcttgttcactactacaaaaaaagtttttacgtgagtcaatgcgtctggtcaaaattattgattgacgtagaagtcaactctcattttttaacttgggttagtaaccgacgcaaataatgattaatttgcgttgattataactttgacactaaaataaaaaccaacactaaagattaatttttttaatataataataagcatccatttagggttggttagcatttgaagcaaaagtatttaacttctattgctaaccaacactaaagacgtcttattttacaaaattccaatttgaattaggtttccttaatatataagattataacctaaccatgtatacacagtcgcccaccccttccaatcttctctctctctctctaagcatgtcactaagaccctaaagcttaatccctcctgcaccatatcgccacgagacaaatggagcccatgtcgcacgtacgcccctcccgcaccaaattgcctgagcaaacagagcccgcactagggatagaaattatacacgcggtgtaaagcccgcttagttaatttggaaattagcagttaatcatgattatttgtgaaattatttatagctatttaaataatttgttatactgttatttatggaattc

SEQ ID NO: 390116 - DNA, 1294 bp, Cannabis indica
gagttagactgacaagttattattcgaaagctgctttccagtgcttaggaggatttcaatcttggcaacatcatatctgaaattataacagcttgttttgcttttgatgttttatctttttaaattattcatgaatcattaatggtgttgtcatgacttagctaaatataattatgtttaactccatctcaagccttacttgaggctgagccctcttattaattaaatcacttggccatttatttaatgaaattctttcaaaaaacaaaatgtagagtgcatcatgttgtgttctctaaattttgtttgtgtactttgattaaagtggaatatactcagaaattttcatttttatgattactaacttaattctttaaattaaataattaattgtagtattgttacagaaatgtttaaacagacactaaaattgtttaaacagaaacacgatatatttgaacagtttattgccaaaagataaaaataaatattattagggtttacgttttgagaagcctgcaaaaaaattgtaattataaattgttatctcaatttttgtactctgacgtggcaccacacgatggtgacacgtggaatcaactttgcatatttgctcgcaagagatatgccgaacagagcaccatagatattcgcacggacgaagccttcttaaccgagcagtgagcagtccgaacagcacgccaacacttagcagtttcagcactcgcatcgtgaatctcaaaagaaatccttataattttgggatcatatcacagagatatggcgagctgtccaaatcccttgatcagtgtattctgtatttaatgtgtaatcttgccaattatatcaattgtagaccgaaaggaaacttttttcctaaagcttatagccctataaatagtgatctattctcactgggcaaaaggtcaaaaacttatttaagaatacatattcagagatattattgtaagagctctaagaaaaagaattattgcattccttgttcttaagtcaatgcaaatcaaggggagtaggctattaccgaactactcggggccgaacctctataaaaactcttgtgtctttacttatttcattatattacatctatattatactatactacttgtcgcttacaataaagactcactatcgttggccaaaaagtgaggtcaatattttggtgctttcattgagagcgagaatcacaagatcgctctttattttaaatctaatcataaacacgatggtggtacagactcatagaggcatagttgatccaacaaatccacag

SEQ ID NO: 390117 - DNA, 671 bp, Cannabis indica
tttttatagcagtattcgttatacttataacaatttttataaatttttgaaaaatttcgaatagtttatcgtgtcgaaaatacatttaaaattttttgaactttcgtggtaaactggatcatgaactctgttttcggtattctaaactactcaaaaaaattcaaaattttatagggatgatactgtaactataacgaataatgttaacgaaaaaaaaaatcaaaaaaaaatatttcaacacgtgattttagacataaaaattaactaactaaaatgttgtaataagaaattataattaacgctcctattaaataaataattcaatttgaatgagtcctaaattatgtggccttcattcaatcacccttttttttctatcatcattgactattccaataacataagacaaattttattgacacgaaagtctttcaatgaaactagaaaagtagaaaatctcatatcactactcatgttatgctactctagtaatcccagtaaccaaaaatctcataaaatattattatagcaaaaatggctctgttttttgagttctgttttcttatttttcttcttattcttctaccaaacacagtcttatctcaaacaaccaacaacataacagtaggcacaacactcacagcaacagacaactcatcaccatggctctc

SEQ ID NO: 390118 - DNA, 682 bp, Cannabis indica
aatgaaagtggtagtagtagtgtttgtttatcttatactaaatcccattacatcatcatcatcaatgagaatggatcctaattattctccaatagcttcttcttcttcttcttcttcatcaaaattctcagttggtagaaatatatttaagggactcaagtgtacaaattttgtgaaagaagaaatggtggacaaaatacttgaccatgtaaatgctacaaaagcagtgaagattacattaatgaaaagtgctgattttgggatttgtgtagccaataacttctgtgattgtttgagtttaccatatccacctgtgatgtatggttgtatgggtgttcttggcttgaaatgcatgaatgatgctgtcttaaaatcaccttatctctattcatgtgcccttgcttgtgtcacctccatcatcaccacagctactcacactcccaaacttggtatgtacaatttaattttgtttattcaattactctattagaatctctattgtttttcttgtttgggttctcacatttaatcaaagaaaaataacataagataattttgaatttttccatcttaaaatttaaagtacaagagataatatagatgtttaatgagagtgaactttgaaaaatcatgggaacagcttataatacatatatgttttttctattttttttcttctttt

SEQ ID NO: 390119 - DNA, 1057 bp, Cannabis indica
aaaagaacagtataaaatctgcaaatgccttctgacaagtaacagaaaaatcaaaagcaagtactaaaagtacagcataaatggattcacatttacctaatagtccaaataatgaatttaaattaactgaatatacggcataaatgggtgtacatcaatactttttctcgtttttttttttttttgaagaaaatggagtgagtaggtagggacggatccaggatttaactttagggtgcacaaaatataattttttttgaaaacataaaacataaaaattcaagatatttaaatagctttgtaacaatttatattaatatataaaagtgtttgaccatatatcatcatcataaagaaacaatttattctaccaaacccaaaagagtcccaaatcaaatccaataaaaagttagggtccaaaaaaatgctccataaaagaaaacaaagaatgacacatcacgatggggagatcataagtaaaaaattgcaattgtataattgtaatttgatgtgtcatttgtcttttggtttttcttttggacttttttctgttgtcaattttttttaataaatggacccaaattcagttgggccactacatcactaaaactactactttctttttcgtttttaagtaattctaccatttgtttttgttaatcaggtatatatacaatgatatatatgtacatattataaaaggagaaaaaatgaaacccctgcatgtaggtccaggaatggcatttacattttgctagaaatctcgaagacagagatataacagctttaatcaagttgttgcagaaattggaaggagttaatacttgcagaagagtctgattaagggatagtagtgaagtgttttcgtgaaagtcattctttggaaggcttgctagctgacgatggatgaatcttcagaattaagtgatagagaaactttaagaaagaactcagtcccaaataaagttaagatatttgtttaattgcaatctttgaatcacattaatgtcaatgattacatggagcaaaaaaacagaccctataagtgtttgtcctc

SEQ ID NO: 390120 - DNA, 1014 bp, Cannabis indica
aaagcaaataaataaatataaaaaaatgattaaatagtatttagctcgctttctctctctcttcttaagtaaatgtaaatacaatttttcttagaccacgagcgtagctattatagctaattatacattttctagagtctattttttttttgacaatttaacttttttttttttcatttttcgagagttatgaggtgtttacctcttctcttgatttgtgctctaaaactttattctacaaaaagttttgttttcccatttaaaatcatgtacaactaacaaaaaaattaatattttcccacctttaaatttagagaaagtttacaataatatatatatatattatttaatttataataatatcgttactattattactaacgtgcacgtcaactaaatttgatatttttcgatttgttttttaattttttctgcatttttaaaagtaattttttagttactaatagtgttgataagaaagcattagttacctttatataaaaacatcatgtttatatcatataatttgtgatacattttagctacttctaaaacttatttgtatacatcctaataattaattagttatttttacgttacactatggtaggttataatttaaactacatttaggtaaccttaaaaattatttttaaaacaaatgagttattatgagatataacaagccatcatttttatatactaattattttatatacttttttgttattttgaaagctaattagttatcgtataatataataattaaattcacacaattctaaaatgaatgttaactaagatttaaaaaaaaaaataataaaacagtatttatcactatattagtaaccaaatggtttcttttctggaaatagcaaaaaactatatgcttcccacattttgaaatgttcacattaaaaagtaaatcacaatggtatttttataggctcctccgagtaatgagaagaccataaattatttttaaattttgagagaagagagagaaataagaaa

SEQ ID NO: 390121 - DNA, 1542 bp, Cannabis indica
gtcctttggtggagcattctctctaatgctctacccttgagggtcctgcttgctaagagaatgaccattgatgagatctcttgccccatttgtggggatggagatgagactatggagcacctctttctctattgcaattttgcttcccacctctggcggtcctccccgtggggtatcatgccgattagggattcgggagctcgcatgtaggactaggttagttttatctggaatcttaagtcaagaggggtggacactgatgagttgtttctctatgcttcgatagtggttgacacgatatggagagctcgtaatgacaaagtccataacaacactatgggtagcctaatgcattatattgactctatctcttgttgctacgaaaattataggtcatgtttgtccaggccgctccaggatgctgattctcctgtttggtcccctccaccggaagattggattaaaatcaactgtgacgtcagggtcggaggtgattctatgtgtgctgtggcgattgcgagggatcatacggagtctatcctgtgggtggcgactaaggaatttcagtttgctgactctcttattggggaagcggcggcttgtttattagctttggagacggcgggctcaagacttcatccttttgttatagtggagagcgattctgagaatctaatcaaagacctaaaaggtgatgacaccttatgggggattgagaactatactagacaatgtaaaattctctctgcttttatgtcttgctgtaatttttcttttatcactagaaactgtaattttgtgacccataatgtggctaaatgggcatttgccaacaacattaacggtatggtagatgtatctaccatcccgaatgctatcctttgtaacgaccatgaggtctaactctttcttttatatataaacgcttttattcaaaaaaaaatataaacctaactctgcactctttttgtttctcttaaagaagaagaagcttgtaggagtttttgcagaggttcggctagtttaaaattttcacccattgtacataagaagtgagggtatttataggcttacatgtgggtaaaggcattccttttacccacttaggatttcataccacaacccattgcaagggcaggaagatacaacttcaaatctaactgtccaacattgaagaaccttcttgatcatgaggtgtacagggaaggtaagtgtaccgtctagatcagggacacatgttgcccaaaggtttttcctttatacattattctctagacaaaccgtcaagcaaaaagggtatgtccaaaggtgcgtacacacactaccatagtctgacatgagagaacatcttattctgtgtcagaaaaaggtatagccatctgtaggtagatttccatataaatctgatgtggccattttcattcgcctaggagtcctcgtctgcgatcgatttagaaagtccttactcagacattaggtagtcaaactgttgttctaagacttcttggagttcggggatgagtttgtgttggaaattatttt

SEQ ID NO: 390122 - DNA, 2760 bp, Cannabis indica
aatactcatttttcttgtagtgttgtggttttagaatttttgtaattttgtacgccattgtgtaattttttgtgcgattccaactgaaattagaggttagggataagctttagtctttttggcgacattaaacgatgtcattgcgattttgtgcaattttcataattttacaacttgtatgcgatatctttacaacatcatgcgatatattttttgttttgttattattttcttgttgtgtttcttgtgcgatattatgcgatattattttgtgcttgtgcaattattgtgggatattgttttgttttgttattatttttttgttgtgtttcttatgcaatattatctctttcttgtgcgattgttgcacgatattgttttgttttttattattttcttgttgccttttgtgtgcgacattatgtgatatgttttttttttgtgtgatatattatgctacttttttatgtttatttttgtatttatttgtggtttttcttggacagattcaactgtatttgtgcatgtattgtatgatggcatttgggctgtagagggtttcaattggttattcgattccccaataagtaagacaatgatattgacattgacactacactgaaaaatgtgcgtgaagtttagcatgaagagtttgatgtggaccctttactctatgaactaaaattagaattttggtacatgtacatgaaaggcaccaagtttccacttaaggtttaagtgaaacagctatgagtgttcttgagcatgaaggcaaaaatgagtgtggacaacttgtggtcgctatttttgactaaggtgaggacgaatgtgaatttggagtctactcccccaactgtaacccttcgaagtgtggttgggacctttttctcagaaactgatcaggggttggcttgaatgagaaactccctactaatatagatgaccacagagccgacatcgcatttgatcattcagatgagtttgatgctccctattacaataatgatcttatactaggtttggatggagatgatgatgtggctataaaggtacctcccctgaggatggaactaactccaagcaaccaaggagagcgacaaagaagaccccctcgtagtgagaatcgccaaacaccaggaactagtagcagtcggccaggtccttctattagtactactgcatttgaatttaaagtttgtataaaattcaaacctcttatgtggataaggaagacataaaggaaaataatacgtatacaacatctcttagtggtacgccttcaggggagatatatcttggcaagttgtacataaataagaaagaattgaagaatgtagtgggaaggtatgcactgaaaagaattttgagtggatggtaagtaagtttggcactgatgtgttacacattacttgcaaggataaaaattgtaaatggagattaaggggaaaaaagaaggcatgttgtgacatgtttgaggttaatctgttctacaacaaacacacatgtaacctggattctagaaattttgatcaccatcaagtagcactgtgggttattgggcacattattaagaataagtacacatcagatggaacaaactataaggcaaaagacatacagagagatatgtttgatgagtatgacattaatatgagttatgagaagacttgtaggtacagagagaaggaagttatgtatgtgaggggtacactagtagaatcttgtacaaagttatatggttacttgtacatgctggaatagaagaatttgggtactattactggcattggtactagtactatttctggtcactcgatacttgtaggagggaatttaagttttttcgtcctgtgattagtatggacaaaaaattcctgaagacgaagtatgggggcacacttttagttgatgttgcatacgatgcagtcaaccaattttctggtagcctttgtaattgtcgacagtgagacgactcttagaagtatttcttgtggaagttaagggaagccattggagtagttgaaaaccttttgttcatatcagataggcataaaagcattgaacatgtttttgaggttgttctcctaaaagcatgccattgggcatgcttcaaacatattactatcacaagttcaagactgatgtatgtaacaagcaaatatggcttgtagtttacgcatggaacaagacggaatgtgattgacattttgaggggctcaaacagatggatcctaccactgctacatacatcaagcaaatagggtttgaaaagtgggcttgtcctcattgtctaggcgattggtacaacatattgacaagcaactgccaaaagctccaacaaagtgatagaagaattcagaaaatatccaataactattttggttgaattcattaggttcacacttctaaattggtttgttgatcatctcgaaaaagcaagtaagtgcactacccctttggcaactacttttaaagatgacttaatagcacaacaaaaagatgataggtgtaggagtttccattgtaatggtgcacaatcgtttaaattggtatgggtttggaaggtgagagaggtggtgatgtgaacttagtggagagaacatgcacttgcagactattccaatcactcaaaatcccttgtccccatccatgtgccgcaaaaattagttagaatgcgagcatgtacgcactttgctccctgtattacacaaaagacatgtggaagaagacctacgatgaaactgttagaaatattttacc

SEQ ID NO: 390123 - DNA, 1005 bp, Cannabis indica
atttttttcttaataaataatttgtacgtactccaactccaacttggatttcgggatccggactccggtctcggccctagtcctgtacatggaccacgaccccattcccaaaccagacctgacttataataaaatcaaaaaataaaaaataaaaataaaagttatagagaaaacacttaaaaaaaaacaaaagtagttatagaatatatttttattttaaaaatacaaattttactttttatttttgtgactaaaaaaatttaaaaaaaatttaccaaacttcccttagtaaacaaattgtaaattttataataattcaatttttgctgttacattagttagtagtttagtttttttcaaggctaattgtatatacgtggtcttaagaatatatcaacgatcaaccaacatgtaaaattaatattagttaatgaaaatataatgtttctatataatagattataaatgtacatataagaacgtaattacgtacgtagtagactataactacatcttattttcattcattcatgtgtaactgtaagatttacagttaaatatctgcagtttttatggttagtcaaagggtgtggcttatatattcagaaatattctcttttcaaaaccaacggaataaactaatacccatatatgctaatattaataaccaccttatcctacccatattagtcattatcaaaacctttaagaaaaggtctatattgccctctacgtatacgttcaacgcccttctaagattgcatttcattattagtactgcacccctcaaaatagaaatattgatctacccctatctgttttagtatccgaaataattttttagtcaaattttttctcatggtcatgtaagttataattatttaagacatcctgtaaaattttaagaaatttggaaatgtttaacataccgaaaactatgttcaaacagtgtgttgcacgcgtaactattttattttatacgcgtgtaaaatggactgtttgaac

SEQ ID NO: 390124 - DNA, 1464 bp, Cannabis indica
tttaacttagtcttaagatcttctcctacccagggcctgtcctatcaaacacagaatccttgggccttgggtcaaaacgtgtttgagcattctggggaagaacgtcgctattgcgcccataattattattagtcctccaattagtacgctcatcaatagggtggcttgtggcaccatcctcattggggtaagattccccactgtgagatctactttggccttgcttgggtgggatatcttcccctttccttcatccctgggaaggtcttagaactggttggtcccaccatatgccctttcaggtaggatttgttcatcattcggttgaatgggatgtggccttgtttgggaaatagttaggtctactgggttcaaagtttgcccacaatccttggggagttgagtttcctccaagacatagggaccttttccctaaagagggtcccttatgagtggtggctcttccactatggacccagctcttttattgaaccgtctaatgagttcatttgcctccctatttcggaggtttagctctgcctgatggcttgaaggatcgtggcatgtcgatccatccattcctagaattcgtatctctactaagcaaaagcatcactcataacaatgcgtgtttctttttattaatgatggaggatgtttgtatgaccgtaaacttgccatatgacctctcttagcctggctagctcggaatcatcctccaagtcaacatggggttcattgatgctaggttggctaaccccaagcccaatttctccagcatatacctggagggtaggccttgttacaggaacccccgtggtactttgggcaagttgtccagcattgaccgggacttaccagatacttgttagatcttgctcgacattgactgggcctttgggtctgaaccctgaagatggatttgtccaaggtggtcaggcaaggttagaagggttgtcaccagttgtggaacttggacattaggatccatagccattggatctcggggctcagtggacatgcttctccttgtcaggaccatggtgaatactgggtgaaaaaagatgagatttttataagaatgttgaagctctcaataaaagcactaaaaatgttgactggaaaagtagccaactcacttagagtcaaataatcacttattaatcaccaataaggagttaagaataaaaagtaaataagaacacacaataattatagaggttcaacccccttgtatatgggtaatgacctactctctttttagtgtattgattgtgagataatgtcgtgcagatcactaagatagacaaagtgaattctagctacaactctcaaagtgtttacggagaatatctttcaacaaagtgctcttagatgcgtgagtatgattttaggtcctttccccttgcgaattcattcactatttatagagaaaaagttgttacaattggctccgtaaaagga

SEQ ID NO: 390125 - DNA, 1430 bp, Cannabis indica
ttattttgacaaaaagttagttctgagtcctatttgtatcgttttgaaaaatacagtatctattttattatttaataaaatagagggttcaattgttaatttttacaaaatacaagtccaaaataatatttaccgtttgatatccgtatatattattattttttatttttgacgtgatatccgtatatattattaattgccttacatctttgactttttcggtctaaataagagaaaaagaaaaaaaatacttgagagcacttgtaatgttgattaagactcagaaaacattgtattgtgccctgaattattaatatatcggaagtttctcccacaaagattacaaattaaaatcatatttacaaatggtccaacatttttatcaccatcgatcgacattcgacgcgtaaaagtatatagccaagaatcaagaaggacagggccaaactgccattttcaaaataaaaatataaataaaattttaaaatcaatatttcggctcatatatattaatttctacgtgtgctatactagtaagccattaaaacaattacattaatcaattaagcaccttctaaaattcgtttttatatgttctttgcttttttttttttttcatatatgtacaattttagataagctaggtaattctcttttgtatttgttattgtagcttgtgattatctaagaatgataaattcatcttgaatgtgtaattaatgtttaatctagacgagcaaaactaaaaacttctgttgtttttcctttagctttcatttgagatctttcagccaatatgtgacagttccagtattagaatctttgacctgttacaaaatccacaactttcccgtgagcacctataaatttctcaatattttgtcttgtgggattctttcaaatgtcacgttcgctcctgtaatctcttaaagatcgttcgttatacccatacttctaggcctacacgtggggagagtgtattagagttattcccacattgttaatgtgtgaaaataaaataacatatataagatgaatggactattcctcctattgccaattaattttgagatggaacatcattcaccttaatcacaccttaatctcaaattctaagactagttactgctagctagttgttgggttttgtggcctaactaaaactctattacaatgtaatcttgaatatttatttatcaataaagaaacaaatttatttcagtacttgtttaatgtattatttgcttcacatatttatttcatgattatttgtttgatttataaatttatctagatccttatcacattgatattcttaattactgtgttgtcaatacagttcttatgattaaggtttcattgatatgataatcaacaatgtagtttacttggtaaagtaagcttggattggatgtatggagtatatacat

SEQ ID NO: 390126 - DNA, 1876 bp, Cannabis indica
cgtgctacaatgtaaatttccctaataatgttggattttgaattttcactgatttggtgtacaattttgttttacattttaactcttattttattttatcttaaaatataatattacactttagtcctcaaattaaaatttatcacaaaaataataattgattttaaaaaactaacatatttgaaaatacaaagtaacaaaaaaaaatatattattaagctcagttgtaaggtgtagtgttgttgagttagttacaaattcactattgacagtgagaactcgtcaaccaactggtggtcataaaaccaacttatgcttcaagtttagaaatgagatgaagaggaatatgaaatataaactcaaattgttatcttgaaatggagagaataatggaggattttctattgcttttaatatggtttcacaagtatgatttttcaacccctcacatctaggatggggtgtatttgtatgctctagtggcctggtgtacaaagtggtcccatggggacaaaatatcactttctcggtgcatgttgcaggtgttggaggtagtctagcgccccgtacccttgtctggtgtcaggcggtgcccaattgtaagttgtaggaggatggttgcagtgtgtggtctccgggtacacgtgcatggtccccagttgcatgtcgggtggtccccagatacaggttgtaagagagtggttgcatcgtacccttggtcgggtcatcaggcctcgcatgtccgtattcgctgctacttatacctcctttctttcaattttcagaaagcgtggttttacgctttttccttgcacgtcttgtcctttgattccttttcgaatgtcattattgtcatcatgcattcacctctctccttatcctcatactcctccaaaacaccttcacccaatgcacacaacagctcgcatgcgaggccccccatgggctcgcatgcgagcccccaactcccaacactcaacagacacgacttgcatgcgagcccacatcccttcgcatcatgccaagctcacaccccttccccctcacctacggctcgcacaccctttatcactcacacacgactcgcatgcgagccccctaagggttcgcatgtgagccctcatgcactcgctctgacactcccctgcacatgacgtcaatccaaacatgtatagcctctccttcttttgcccgcactctcgtcattagatcactaaaggactaatagtgaatagcacgggtgctccatcgcgggtcgaacagatgctccaccacttgcataaaggtttcacgactcacccaaatgcccccgactcacccaacggctcatggactcgcacaacatcccatgggctcgcacaagagccatgggctcgcacaacaacccatgggctcgcacaacaacccatgggcttgcacaatagccataggctcgcatgccaagttgttacaatttagaagccttagtgtttttgccataactctctcgatatatattaaaattggacgattcaagaggcattggaaagatgagaaagatacatatcaatcttatgtttatgacaagatctatttctgaacacatcactatgaaaatcctccaacaatcgtaacttagtaagttgatcttactaactctactcatgagttgttgcggggttgacctttgaattgcacgaatataccccgagacttgcaagcatggattcttaagattaacaagccttaggccatatatagtgattcaatcattctttgtccgactcttatagtcgatgtctgttgttcgctaggactaattgtttgtaaatacaatatttggttcttataaaaaaaaaattatatatagtgttgaccgagattttcggcaactatt

SEQ ID NO: 390127 - DNA, 854 bp, Cannabis indica
gctaattaagatctcttaaatattattaaattactaaatatagtaaattataattaattacacctaaaaatggaaattttacctattggtaaccttctattataaggtaaaaaaaaaatgtaaccatatggttacgataaaaaatgtaaccattgaatagtcacccatatatatttatatgtataataaaacccaagtgagatatctttatgaatcattatgtgccaaactaacaatattttaagtattaaattaatttttttatataatatttatataatttttctctttattttagttcaaaattaaattaataaagctaaaaatatagttaaaatatctacaatattttatgcattttatataatttcaataacttaattatattattaatattgccatttatataattaattacacaatatttttatttatcaaaatagtacacacattacataatattattagtttttttttttttatctttttgtaatattatttacaaattctaattttcttttttaactcattacaaattctaatttagatgaatatatatagttatttagttgaaaacttatgtacgttattgagtatattaattttatgcccttaattcaacaaagaaaaaaaaagactaatttttatagtaaaataggttaaaatgggtgcaaatattattactcacaagtcattaatattaattaattctggtgaaagtttagataaatttttacaattttgtttgataagttggttgttcataaaaatcagtgttaatacttaggtgtcgtttggtaacacttttgttttttaattttttaatcacaaaatgaaagtggaatttttgtttt

SEQ ID NO: 390128 - DNA, 1387 bp, Cannabis indica
aagtgattttttttaatttcttttggtaatattatttatctttcgagaatagaattttgtaactattattggatttattatgaatttgaacaaacaactaaaaataataaaaataatttttatttttaaacttaaaaataatctcaaacaacttattaattttcttaatttattatttattctaactaatgccttttttaaatgctcaccaaccctctgatttttttttttcatgcaacttttttcccacgtattctcatatgatagtatccacaccctttctccatctataattacttttttatttttctaatttttgttaataattattaagaaaaattatttaatcttatttttcctaagttttttttattttattataataacgagtactgtgatataacgaaacaatatgtgagacacagtaaaacaacgcgtaagatacggtagcaataaccaatggaatataatgatgaccacaactttaaataatcgtgatatacaaataatatatactaaaagtcaaggtaagtatttgcttaaataataataataataataacactataattttccacaacagtaccactctatttctttaattttgtaataatttttttttaatgaaagcaatttaaagtataaattttaatcctcctaattataattaattaattaatctataatatataattattaatactaacatagatttagatgatatcatttcataaattactaatttttgttatttaaagtgagttactatttattattatataattattttttattataatttcatgaaaaattaaaatagccgcgcaaagagcggttatattgcctagttataagtaaaataatattataaataaaacattcagttctcaacataactcataagtttttcccaacacattttttcccaaaatgacctgttttacaaaagttcccaaaggtctgctttcagtttacatgcatttgcctacaatgaaaaacaactaagtcttatatagtaagtcaaccttatagacaaaatataaataatatataatcaattcattactagaaaataattacagagaaatcacaataaaggtcagacaattcatcgatcttatcatttacttggattaacattaagacatgaacaatttctacacctatacataaaaagcgcaccacctaacaattttacggatttggtgaccatgagagcttccgagctcctctactccataacctaaattacctataccattgcattacaacatagcctgggaaactcccgttaccttaaccttcactaccaaaaaaaaagacttatctcggcagctctatctcagcggactcgcgtgtgggtatcgagataggcctgaattttttt

SEQ ID NO: 390129 - DNA, 651 bp, Cannabis indica
cgcccccacgcgccatacaatttgttttttttaatcagggctgaaaacgacgtgtcattttggatatacgacagtcgtttgcaatgacgacaggaccccctttgcgccaaacgacgcgtcgttcgttgggggtcgttcagccttctccttcgcctgactagccacgattcgagtcctcatgacccggttacatacccgctcaaaaaaccagcccccaggggcaattttcatcgccgattagagagcttttcatcctcttttaatttctgttaaatctcaaacacgaaaaacatctggaaataacccagaaattgattgcacggatcacatcggacccgatttagacccatttgaaaatgaacaaaccgaccataattttggccatcgtttatggggcttttcatccccgaatcatttccgatcagcttcgagcttcatttgccagaaaacatttcgaaaaaaaaaaaacatatgaaaacaaacaatccttagcaaaaataaataaatttcctccagaaccattcttcccaaaaagtgccttaatactcgaaggaattaaacaaaaaatttgagtatctccaaacaattgatacaccacttgtaataatagtaaataataatttgagctttaaaattagatgaccaagctca

SEQ ID NO: 390130 - DNA, 2571 bp, Cannabis indica
atttcttggacaaaagatgagctgagacttcattaaatgtggtgacaatttttgagatgaagtgacattctaggagtcgctgctggggcaaatacttggagaggctagatttatgacatgtgtagggtttatgttgggaaaaggatacaaaacctaagattttcttttgaagagggcgtcctccattgtgagaaaaagaaagaagtaaagaaaagaagaatttctacaatagaggaccagatcatacagaagaagaaaagaagagaaaagaggagaaggacaagaaaatttcatcatctacctttggagaaaattttcttccattgttgtttgttatttctttcttttttctcttctctaactctatctttctaactccatggatgaattttatattgtaatggtggtttctaaattagctatgagctaagctttctacagtttgaactgttgaagaaacctatgtcttagtttagtaattttcttatacaaatattttagtaaaaaatctcatgttcattcaagtgtgttttatgctaatttgttgttattgattggccaccaatagcttgatgttgagttatgtttaatgatagagaggttaaatgtaatggatttaacttggatgacacaagttcttaatcttattagattaggttagtgataatataggaatatgttatttcattgtgtaacatttgagaattgtgcttggaaacggtattcttgagctcgattggcatcggaatatgtttgattaggttcaataaattgactgcatagaatttaaaagatttttatggacgtttatgaagttcttattaacctggaatttttgctaaaattttactgtagcaaaacgcacagttctgctagacatggaggaattcaatagttcaagcttttcacagtttaatagtttgcaactcatttttattttcattgtttagccacttttgagttaatttacttcttactagtttatttagttaaagcattaatcattccaatttgatttttgggcattttgcttggtaatttacttttgcaataaaattatattttccttgtggagatgatatccgttactcatcattgtattacttgtttgtgactatgtgcacttgcgtatatataatttttacaacactggctagccttacaatgtctaaaggctggctatagggccggccaacggtggccgaccaacccccttagggtggctggtttgtcattttttcctccctcctaagtactcggacctcttgtcagctgaagtgttgagtagatgacttggctttcttgttgacaagttgtactcccacatgtcattgatcttagccacgtgaacatgccacattaggtgggtaaaaataggataacaagattgatatttatatatttataaaattaactctaactgttaaatttaacaaaatatttttatattagtttaagaatataaaattgaacacactctcaatattaaaaataacaataaaaaataataatgttacaaataatatattaatatttttatatattcaaattagtctaaattgatataagttcaattaacctaaaacaaataatattaatatttatatatatttaaattaatcaaaaataaataatattaatattataaaagagtaatctgcagcataaatacctaaatttaactcctagttgcaaataaatacctaaattttatttttggcagtaataatatctaagttataatttcagaacttttgtaggtacctggctcttaagtgttaagtaaattgccacgtgacaatccttaattggtccaagtcattaaatttttatttttttaaaaaatattagtttaaatataccaataaaaaaatgacacgtcgataatgacttaacatttaacgtttaggtacttacagagttccgaaaatataaattaagtattatttttgccaaaaattgaacttaagtattattttgcaactaggagttaaatttaggtatttatgccacaaattactctatataaaactaattctttttgcgttaaatttaacggaatattctattagactaataaaaactgttagatagctacattttatatagagtttttagtggttaaaccctcccaactatagtttcacttgcacttaaccttccaaggtcaaattttgactgtaaaacctttaaaactactaatttattagtaaattttaggtgtcattcggttgactgtcatcatggactgcttatgtatacactcttgtacacgtgacacatttatattagtccacataatattattatttcaaaatttattttaaaattaaacaaaattataaaaataaaagatagaatattaaaataattaaaaatattataaattttgaaatatgattttataatttttaaataatagcattaggtgtaccaatatacacatgccacgtgtataaaagtgtacacataaaccgtccatgttagcagttaactgtaaaaatagatgttgtaaagaccgcttactttaatttggaaattagcagttaatcacgtttaattatgaaatta

SEQ ID NO: 390131 - DNA, 1002 bp, Cannabis indica
tatatatatataattgtaagaataaattctttttattaagctcaagtattacaccgaaataagttacaaaccctgtctgaaagcttcagattacatctcaacagaaataaaatcatatccactcaaactaaaatagttacaactacttattccagctcagcaacctttcacacgaacaaactttacaatatttatataaactagatcacggccaaaaatttcatagtactatagctagaagaaaccaatcatccagagtaagagagagactagggtgcgagagttaagctccattcgtgtttgttttgaggaaaaacgaaagaaaagttaggggaaatctttgtaagagaaacagagagaaactcaaagcttgaatctttgattatcaatcaaatcaatgtgacttgaaatcaaaaaaaaaatgtaaacatacttgatttgatagtgaaatatcgagtatctcagtggcgagctcgaaaaggacattgcccatttttttaggggtgaatcttaagaaaaatccttgtgttcttcttatgtgtttgaatatctaaaccctaatatctctactttcgatttcgtgtaaatttcttgtttgaattgtgtgtgaatctctaaccctagcgggtgcgaagtctcctagggtttcttgaagtggttcgaaccttagtatctaagagtgactgatttttttagggttgttattggatcaagggttgttagaccggtatttgagttattaaaacttatggcactacaaaaaaaaattatcattaggggcgaacttattaccgacagaatagatctgcccctaataataaggattattaccagtagagtacactttctgctggtaatagtcaaaaaatgtaattttttagttaaaaatcagttttctttagtaatagcggcgggaaacaaagtattacttgcaacgcctgactattgaaaacttgctaattcaaaattaatcatattatattataattatataatattata

SEQ ID NO: 390132 - DNA, 1454 bp, Cannabis indica
gtggaaaccaatgaatagagaataataataattgatgataatgacaataattaataggtggtccaaaaataaaatggaaattaagatcatcaatttcatctataaaaggaaaattgtaattgaagcaattaaaattattgttcctaattttcatcacttgttttaatatcattatttgtcttgttttaatttcttgtttacttaaattagtctcccaacaaattattattgccaaatagaacaaaagattcatttaattagtaattagctacaattcttatgagaacgatcttagttaattgaataattacttaaaaatgatacatatactcgtgtgtttcacaacactagatcagtcactaattacttaacattttcatatatgaattatgatatagtaaaataattagggtaatcctataatagattacatctataataatatttttatagctctctattagggctaaacacgagtcgaaacccactgggaattaatgggttctcggtgcaaacaaggtgtactcatacttgtcgtgtgataacagagtttgactgaatttacgggtcatgggtggatgggtctactgtcataattctctctttctttctaaaaaaacaagtgtcaaacctctactagcaagaggaaaaaaaaacaaccaatggaacacaataacccccaatctgagacccactgccacctatcctataaaatttcaaaactcacaacgagccactaccatcaaccatgccaaaagatagagtcgagattaaggatggacaaggggcaggaaattagcagggattgctctcccgtcctcatctccgtaaaagattttcattcccatatccccatcacatccccgcatattggcaggaaattccctaataggatgggtacgggacagggtcctctagtagggtaggtacggggtaggaaattccataatataaattataaaatttatataaaaaatttaaatatataaaaatattaaattatataaaaattaaatattacacattatttattattcaatatactacttataatccaaaatataacttaaaatttataaaaaaaaagatactgataattaaaaagaaatacaaaaatattttataaatattattataaagataataaaaatattaaacgtgtccccgtcagggcagaagtatcatccctgtctccgcaccatttaacattcgaggaaagaaatgaactccctatcctatcctctatttagatggggaattcctgccccattaggggaagattcctgcagggccccattctcatgagaaaaatgtgcatccctggtcgagatctacgaaaaaaaaagcagagggtgaagagaacaatattgagacaatagatgaagataaataaagagatctaaagacaaaggggtagagagattaagaaagaaaggggaagagagaggttcaat

SEQ ID NO: 390133 - DNA, 750 bp, Cannabis indica
tatataatgtgttttttaagattggcttctcctattcatgatgatgatttatcgatcatgatatacaattaatatatatatatatatatatatacattatatattgatcttgatgctagttgccccagcatctttaagagatgttactaagtgttggttctgtcaattaatgttgatatacatgtatgtacacacattgaactcgtgcaatgaatttcgattatggtcaagtactactttcgttttcatataattatacaacaacaaaaatgctagaaaaataacatttatcttatatattattatctcagtttattttttatttttaaatatatttgctaccgaaatcgttttgaggcaaaaatataagttctaaaaatattgaaacgtaaaagagataggtaaaactgattctcaaaatcatgtgagggtaggccctatgtcttcagttattacataataataataaccgaagacataaagcatttatatcttcgattattttgtaataaccgaagacgtgaggcttgttttttttaaaaaaaaaaaaattgtatttatttaattaattctaaattatatattgtaaagtgccaactaagagatttgttttggtaaggaaaaatattgacaaagtaactcataaaatggtataaagcttataattacttttttaatgtgtttttctaaactcttaagtatggagcttacccccttgacctgctgcatcattttattatcattatcctt

SEQ ID NO: 390134 - DNA, 568 bp, Cannabis indica
cgcttagtaagtcgcatatatttccacacttaatacaaagacgaattaaatagttcttcgtatattctttgacgtttattctgatttaatacagtatttattgtaaaaagattttaaaaccgatcatttatatatatcctaaaggtcacttgctttctatacaaaagagtgacccgaatcaaataaactaagctaaaatctttgcaacagtggactaagcaaaccaagttttgactgaaccactatacttcctttgtgttcttgttattttttgctttttgttctgtttcttagtagccaattctttgagtacttgctactttaagtgagtagtcacaagttttatccaagtgttcttaatagcatcaaatactcgcacgaattttgtcccccttgcttcatacttaagcaacctataagtctaggggtaaagtggtccaaaaccacaacctcgcctaaccccgatactctaaatatctcaaatatttattccactaagaaatagattctatacttactcatgtgacacggccatccgtcgcattttccgtcgttgccgagcaaaaat

SEQ ID NO: 390135 - DNA, 1747 bp, Cannabis indica
gatgagtaactttaagcattttctacatatcaaaggcaatagtggctttctcgatatttttaaacacatctctatccaaacaacatataaatgcatatttagttctaatatttttagaaagtattttcttatcattcttattatatgcctcataagtcttaataacttctacatcaaaatgtaaggaccattacatactatatgacatgtttgggaatgtaaggaccattacacactatatgacacaaatcataatccatagactgaaagtaagtttccattctaatcttccaataaagaaagtctactctattgaagtatggtgctctatttgagcttacaccttctaacatgttattttgtgaattacatggaaacatcatgctctagattatgaaatctaatcaaataaatgagccatcaccctgataccaattgttaacccaagatataattttaagagtggggtgaattggaaatgtaagctaatattaaaaaattaaaacttaacaccaaatatttttttttgataaatcaatgagttgtattgcacaatcaaaattacaagctaagagcacccaaacacaaggatctcaatctatacaattctctttttccatttttacaattcacctatgctttacaattgaattctttgtttaactataaagcaaaaaaccactctttatctacctttgagagattctttggaaggaaattctgaactcgagtccttagactccatttaacctcttcaatcattcggttgatatccacttgtgcaccctgccaaatgacagcatttctcaatttccagcctgtgtaaaccatggaagcaactgcaacacaatacacagccttcctgaattttgagatctttgccctcccaatccatttaacaagttgctgcacattggaagttagagctttccaacccagccaagactttatctccttcaaacagtgactggtgttcctgcaatcaaagaataagtgttgtatgttctcattgtgttcaccacacaaactacatttctcttgcactaggataccaattttgatcaacctgtccttggtcttcagtttgttcaacatcacaagccaaagaatcatacaatgtttgggtgtattcagtcgtgaccatacctctttcctccaatgtgttttcggttttggagtgctgaacagtttgtaacctgctttgataacatatttcttactctggaactcagcactatcaatcaaggagaggatctggtttttgagagaaacaagcctcttccagtaccaactggagtggatagaggcattgcaactccaccagttttgtcccttgatgtatacactattcacccatcttagccataagctctcttggttgtttgagattgcccaaatgtatttggacatggctgccttgttccaactttcaagctttgtgatacctaatccccctgtagatttagactggcacacattatcccaggccacaacacctgctccataaaatacagcttgccctttccataagaaagctctacagatagcttctacggaattcaaaattcttttaggcatgattatgatttggctcaagtatgtctggatagaaatcagaactgagttgatgagagtagttctctctgcaaatgatagattccttgagctccaggttctgattcttgatgtcatttttgttgggttttatgccctaaataaaactccatttcaatgtaatctattttat

SEQ ID NO: 390136 - DNA, 908 bp, Cannabis indica
cggttgcagggcacctccttaaggcatagcaccgccaccatccccaatccgatggccaaacggaggtagtcaaccgttgtctcgagacttatttacgttgctttgtaagcgccaaacccaaccaatgggtgaagtggcttccttggtctgaatattggtataacacctcccatcatacatccaccggaatgactcctttccaagctgtctaccaaagagatcaccccctttgctccgtttcgaacctgctagtactaaagtttctacggtggatcaagaactccagtagcgagacaccatcctccaactactgaaacaaaacttgctccgggcacaacagaagatgaaaactcaagttgaccgcaggcgtcgagatgttcaatttcaggtgggtgacatggtttatgtcaagctacgtccttacaggcagcgtactgtggcttgacggcctaatgaaaagctgtcccctaggttcttcgggccattttcagtgctggcacgtgtgggtacagcagcataccgcctgcagctaccacctgacgcctccattcatcctgtttttcatgtgtccttgttgcaagctgccttgggaccacaccagcgagtgtctcctcttcccccgggactcacagcgaacttgaaatggttcttggaacctgaagcattgctggctatccgtcctggaactcataagatcagtccccaagctctcgtcaaatggaaacacttgcccgattttgaggccacttgggaggacttcgacaccatccgtgagcaatttcctcaattccaccttcaggacaaggtgaaacttcaggccgacggtattgataggcctacgttgacttacgtttatgctaggagaaacaagaaaagtaatgtggggagtggtgtaggggatacagccc

SEQ ID NO: 390137 - DNA, 693 bp, Cannabis indica
aaaaaaaatgatttttcttgtttgttgggaaaaaaagttacaaacaaaatgaattaagtttgtattaaaaaaataaaaactaacccatgaaagtaataaaagtcatgccttctggtatgtgatttgtctctctttctagagtgtgttgagtgtttgagttttattgtcgttcatggcgtcaacaagtggtgttaataaaaatttagagcaaaagtggaagaacatatgtttgggtgatgaggaagataaagagatcgtttatgaagaggaggatgtcaaagacattgagtttgatgatcgatggtgcctcgttgggagattgttgacagggaaagtctccgatttcatgatttttcaaaatataatggcggacttatggaaatccaggaaaggaatgtatgtcaagattatagagcaaaaccgatttttatttcaattttttcacgaaattgatattcaacgagttctcacgggaagtccatggacatacgaccgaaaacaattgatcctagaaaggctgaagaaaggcggtaacccaagaacaattgctctaaacagtctcgacttatgggtgcaaattcatgatctacaatctggcttcaaaacagcaagggcggtccaacaagcaggcaactacattggtcaatttcttggaaccgatctgaataatttccaaggcgtttggcgtgagta

SEQ ID NO: 390138 - DNA, 699 bp, Cannabis indica
actgtttatatattgagattatgatctcaagtatagaaagtcatccaaagtttcaaatattaaatatcactatagtcatccgaagttttaagattatagaaattttttaccaattatcattgggtgaagcttataggatgttagaatttagaagacatagcaacatacgacgagtggggttgtaattatccaatcaatgatcaaatttaggaggacaactacaacaattcagaaccaacttttgacacacactcaaggaacaaatgaagagattttagaagatttttaagagttcaacattgaagaagtacctcatcaaatagcttaaccaagttcgttggaagtgttgatgatggagttcatggctaaaaacgatgttttaattcacagtcaagcttcatctttgaagaaattggtgttgagattttatgcattaaataaaacttaatttcaatataatcttatttactatcaataaagataacaaattatttcttaaccttatcatatgctttgctcacatatttattttatggttatatgtttaacatatgagtaatattaaatcttgaacatatagttatatatagttatttataattatagtgatgtcataatactagaaaataattattttaaagttctttttggcaagttagttgacaaatatttttatttaatggtaagatatttttgcat

SEQ ID NO: 390139 - DNA, 703 bp, Cannabis indica
aaaatatattatttgacatcttaaaattccaacaccactacttgatgtgtcataggtgcaaatcaatatgccgaatcccaatttatttataatttaaaatatatgatatattcaaacctaatattttttattaaaaaagtaatgttgaacactagctaccaacaaatatggtggaatgaaggttatgaggaatcctaaaaaagcacaagtcatatgatggtttcatctatgaaaatagtgtcttgctatattagtttagctcacttaaaaaataagctccaatagggatataaaatatatgttatatttaacacattctaaaagtgagtcaaattttgcacgagtgaaatttgcataacagtaaatattactccttttatttagtcatttaaataattatttattatataatttcaataaaaatttattattcactatgttgagttgacggttaatttacactttgtgtattaaaataagattgtttgcaatacgggtagtacattttttgatcattttttttaaatcaatctgtacatgcagtttttctaatttctcaaattacacctgcactacgaaattaaaaaatcacaaaaaccgtactgcaaaaaatggtatggtgcagtacagtttctgtgatttctgtaatttggactatcaccaaataattaattatcacaaatataataaagcttgagcaaca

SEQ ID NO: 390140 - DNA, 790 bp, Cannabis indica
ataatattatattatatcatataaattaaatatgataatatttgatactcacttgataagaaaatattaatactaaaataaatttttataattttaaaaattattaattaaatgaatttgatttttttagggccggccttaaaatataatagaccattggaaaaaaaatattggactcttattttgacaaaaatgtgatatttttaaaattaataaaaaaattgtataataaaaaagattttttttgttaggaccctagattaggtgggctctaagtatagatctaacctagcctatgtcgaagcttaattaattcttgcctattacttcacttcacattttttttgatgacaaataaagaatatcactatatatattttagaagtattgagaatattttggtctagtatgtaatggagatatatacttctaaaagtttttaggcaaaaagatatattgctctaaaaattttgatattctagaaatttagaaatatgaatgaaaaatgtgaatatttaattctttggttatcacaatctatttggaagtttgataattatatttttattaagtagtcttttgtagaaaattattttttttaaatgacttttattatgtatttatattattaattttctccaaatgttaactatactaattaaatgctaatttaattatactaattatagactaatggtattttaaaaaagattatatacactaaaggtacttttttatataaaaatatataaaataaaaataaaagaaaaatatattatttgacatctta

SEQ ID NO: 390141 - DNA, 1189 bp, Cannabis indica
agaatgcaggagcaacttaccaatggttggttaaccagatattcaaaaaccagctaggaagaaatatggaggtttacgtggatggcatgcttgtcaagtccaagaccattgggaaccattccgatgatctcaaagaatgtttcaaagagtgagaaagtacgggatgaagctcaatccaaataagtgtacttttggagtaaaatcaagcaagttcatgggattcatagtcagccaacgagaagtagaggctaatcccagaaagatacaagctttgctagatatgccttctcccataagcataaggatgtacagagcttgacgggaaaaataactgccttgagccatttcatctctaagtccactgacaagtatatctcgttctttaatattttaaagaaatgtcaaacattcaagtggactcaagaatgcgaggaagcacttaaaaaactaaaagagcacatggccaagcctctgattttgtccaaaccagtgcaaggagaggacctgtacctttatttgggtgtctctgagaatgcagtcagcgcggtcttggtccgtgaggaagcaaaatcccaacatcttgtttattacattagcaagaggataataggggcaaaagtctgatatcctttgatagagaagttgacctctatttactaatagcatctcaaaagctacgaccctacttacactctcatttgatcaaggtattcaataatcattcactccagcaagtattgcaaaagccataattctcaagaagactactcaaatagtgttagtttttatggtccatatcaaagttagaaaagcaaaagcaaatttgttaaaaaagtttttatccaatatgaaccataagctcaaagatctcaacataatatatatagattaaatataaaccaatgaaaagaaaacaatacctcttgaagactatcagggtacccttgctctcttttagtacaactaacgatcatccaatccaagaaattttgttgaagaattcacaccttaatcttccaagaaaccctcaacactcaggaatagagtgggctattagatcttatttggatgaattaattaggtattacagtgtgtactcaactcatgagatactataatgagacaatgttgttcaatctcacatacacctgtaatggtgtatgtgtgtgagatgaagagagagagagag

SEQ ID NO: 390142 - DNA, 1223 bp, Cannabis indica
  modified_base (78)..(78): a, c, t, g, unknown or other
attaggaaaataaaaaataataacgtttaaaacaactttaaaaagatataaaatccccgagaaaaaaagggatcttanactaactacgcaagttctttattcatatgaactgcataccgaactaatccatgaacttaagatcattgcagaaagaagattgcttagaaaaagttttaacaagcgctaaatatcgaaataattgttacaaagaaagaaactaaccataatcactaattggaaaatccttaaagaatccacaaggaatttttgtgacattgctttgatcaaaatatgaaaacctctcttgtgcactaaattttccaccaaaagtctcagcctttctttgcatatatttcaaagatgagataggtgaataatcttgtgtagacaaaacttgaatctccttcaatacatgtaaataatctgaacaaaacccattaatcaaaatccataattaagatgacccaaataaagaatttttggatatagaaattatatatgtacctgaaaaaaacacaggtgatgaacaagtggaacgaagggttgagattgcatacttgtgttgtccataggaagaagggtaggtaaaaagtggtgtgtgaagaggttcaaaaggtgaagatctaaagagacatttggtattggagagagaagtgtagagagctaagaagagagatgttaaaagatagagcagagaaaaacagagcaattttgattcgaaaaacaaacctcttctacatgttgttgattttcccattatcatcaatcaacctcatttttcgtttgtttgtttgttttcatcatatatcattctcaacaacaacaacaacaacaatataaataaataaatatttgttattgtaaagttaggatcttttccaacaaactacaaaaacagttactaagttttattaaaacatttttattttaaaaagagaaattatttcatattttattttttactttttttttaaaaaatttaccgtctgattgctctgatagtttctatatgactttctatatggatttcttaaaaataataataaaaaaaaattattttaagttgtaaaaataaaaaaatctccaaatatatattagataagaaataacataggaaaattctacaatacaacccctaaaatggatatattgatgcacccttatgtgttttagcatccgaaataatttttagtcaaatttttctcatggtcatgtatgttata

SEQ ID NO: 390143 - DNA, 537 bp, Cannabis indica
gtgcggatcacaagggaatattctctcctccaatccggatatgcccttttcgaaaccctactgccattaaggcaatatataaacctatttttcttttattgaaaccctagcaaaccacttttcctttattcaaaacatagcagccgcccattcaacttctctttttctcttttctttgaacagcaacacctcttccttcaagctttgaaaaaacgcagcggcctaagtttcttcttttcttccttttcttcttgctgcaaagcaacccagccgagcttcttcttctccttccttcaaccttcttgttgcatatcaacaccagccgagagagagacatattgtttctcttcttctccttcaagctcttcaagagctttcacacaagaacctacacacaaaatagacaaccaaaagatggtaataacaaagataaaatgatctttgtttgttaatgagaggagacccgaaactaagtgcagaaaaataaatgcaaaagacaaagagattgatttcggagttcccctcaaatcaagggta

SEQ ID NO: 390144 - DNA, 956 bp, Cannabis indica
gtttatgccttccccactcatatatatctatatcttgattaatcttaaaagttatatgtttgccatttattatggtagccgcagtacattatatttgatctgttctgaaagtttctctttcacatattctcagtggttcaggatctccctgtttcaggctctcactgtttcagggagcactaagtgaatgaatgtaattcctagtaatcaagtggtataattaatttaaatagatgaatatatctcttagcattttaatgttataaataagtttaaatatggttgttactttattgtcttacacaatgcactatttcaatccaacttggagtttgttcttttggatttttcaatcatccaaaggcaacctataattctgatgttacctagtgacaaacaattatcatgtactactacagatgttccatgctattcattaactcattttattataattggattatccatttatatatacacatgtatatgtgtgtatgtatgcaaaagaaaaagatatggtcattcaataggatggaacatggaagcactgaatttggccgaggaatgttgtctctgctagtttccatggtagttatatatatatatatgccttcacttcacagttgggtgtgattgtcatgattcttctctttgtttcaatgatgagcctattatttatcaagaccaccactatgacctgtcttttccgggacacatgtgctccatatgtatcccacttctacagacaaggccatttatataaatatatatctagatctgatagatagatcagaagtttgatccatccaacatagtaaatgacagtatcttttgcatatgagtactatgctatgatctctctctctctctctctctctctctctctctctctcttgtgcaaataagtcagcatcatatcactataaatgaatgaattaatgttgcttacactagct

SEQ ID NO: 390145 - DNA, 1852 bp, Cannabis indica
tatcacctgtttaattatgaatccaagacaaaagatcacaaataagtaacatattagtacctcttaaaaatttcacccagaaaatcattttgcaactaatttagtcaacaatggaccctgatatttttttttttttttgttaagaatacataagattgtattactgaaaatggaacacattacaaaaagaatgatagccagccaagcaagaactttgaggcatgaacctctcaaccatacaattaattggtcaatattgttaatgacaacatatatagaccttgtaacaatattgtgaatcacacatatatatatgtgtgtgtatgatatgatgaagcttaagtttgtaagggattagacaggaatcagggatatattttttacgtgggtttgtatgaatagaaatatatttcaaagatgagaatgtttgttcctgaaatcctttctcaaatagttaatgaataaatgaaaaattcaaagctgagtgtgagggtttcaactcgtcatttgtctgttttgtactgcagcatatgcattgagtaatttcttttatgctaacgaaggcggtaaaatgaaaccatactactttcacattatatatatttgatacattataattataattacatatactaaacattcaccatgaatttattattatgaacaaaataaatattagttaacgtagaggtagaggagtaaaaatgagagaaaaatacagctagggacaaatagtgggagaaaagtaatataaaacagcagcaacaaataaagatattccaagcatatgttctctcattcattcccacaatgccaagttatgttttataaactatatatatacaaagtagaacaaaatcaagaaacttgctatggatcacaaaatcaaaacaaagcctcatgaaaaaagtctgtcattcttctcataaggtatggaaatatggaacaatgaaccccactatttgtaggtacacatgcataaaatcactacaataataacacaacaacacccaactataaattttaaagattctcactctttctcacaaatcccaaaacatataacttctttatgtgtaaaatttctaattttttaattgcaaaataatctcatcaactcagaatagattaataaatattcacactcaatattgccaaaaaaatagaatattttttaatatattttaaaagccacaaattcctaacatggaacccaccaatgaataccatcattatcacacgctcaattcttccaaaaaaaaaaaagactattacataacagccacaattttataggtatcaaactcctttctaaccttaattattgaacccaacaaaataaatatcacaaaaaacccacacattttagaagcaactcacaatttttgggccaaaaatcttaccgtaattaggggatcaccaccagccctaaaaaacaccataatctactgctcccgtcgatggctacttcccatggtcagagaagagggtctcgccactttatctctccctgacgctaatggctggttgccgtggtcggagaagaaggtcacaccaaaaaattcttgggtcgtggtcggagaatatcgtccagcgccctacctttctctctccccgattctggttccacagttttagggttggtttttgttttttttttttaagaacaataaacattttttttaagaatatatgtttttttaggtaacatttgattttgtaataattatttaatatcagattatattatataaatttattaaattaattttatgtaaatatttttttaaaagtaaattaattttttaactttaatagttaatattaagtggctattttataagatgatgtg

SEQ ID NO: 390146 - DNA, 1075 bp, Cannabis indica
agccaatgtttgatttgattttagaaataggtctgatttgggatttttgtaccttatctagttattaatgtggttattatgaattgagtagaagcaaacaaaattttggggaaattggtgatgtaggttatttcgtggtgctgtctttattaaggccattcactgatcattcctatgtgtttgactcttttcaatcgtgtaaataggttaggactgtagttaggggattttgtttccctatgagtaaactaactacaaatggtaattgaagctttggattctgtttacaagttttcacctcttctaggttgtatgtgtgcctgcactaatatctttgaatctatatctcgaattcacatataccttacactttaactggtgctgagctatttgaatggcagatacctgggcttgtaaatgtggattttgctgatgtgcgggctataatggctagtgctggctcttcactgatgggaataggaactgcaacaggtaactttgtgctacacgtaatgttacaattctaatataatgacgagtttacttgattttataattttcttttctagaaccaaatttattaaaacaaaaattatcttgagttctcattatagcaacttcattgtacactttctcttgggtagtatttagaaatgaatagaacttctcgaaagttatatagttgaaatatcatgtatgagtggacactggacaggatgaaaactaaattggttacacaattccataatgtatgccaaatgtcacttggaccgtggacctttgtttacagaaatataagaataagttgttttatgactttgcttaccttattaaagattttcaaaatgctcatatgaagagatattaatcttgttgtggtgcttatttttgagtagggaagactagggccagagatgctgcattaaatgccattcaatctcctttactagacattgggattgagagggcaaccggaattgtgtggaacataaccggaggaagcgatttgaccctatttgaggtgctaatacctgccccccaccctccccacccctttatctctctctctctctct

SEQ ID NO: 390147 - DNA, 805 bp, Cannabis indica
cattcactttgcccaaagaattgctttagaaccgaaagctagcaagcaacgagtatgtctcgtggctattttttcagtggtttgatgagcccaaagtacctatagaaattcatctacctgtattccctttaacgcgtcaagtttcttctatcttttagggtcttgttgactgctttgacttgtccattaacctgaggtcgcaagaatgatgaattgttttaatgattttgtttctcttgcagaactcaatgaacaaatcacttttaaattgtgtcccattatctgatactatcttaatggaaatgccgaagcaacacactatattattgattacaaaatctaactttttttgaggtgatcgttactaagggtttagcctcagtccatttagtgaagaaaccaactgcatactttgctcctcctctacctgtgggtaatgacctgattattagatctatcccctaaatggcgaatgggtagggcaaggtcatcatgcgaagctctgttggtaaaattctcaaaatgtgtgagaatcttcgacatttgtcaaatctttttaaaaactcatctgtatctttattgatagttggccaataatattcttggcgaattatcttttttgataaactttgccaacatgcatggtccccacaaaagccttcgcgaatttcttttatgatactcttaacttttactaataagacacatcaaagcagaggcatagagtatcctctccaatgtaactttcctttaacaattgtgtacctgcgtattttatacatgaatttgttggaaattattttac

SEQ ID NO: 390148 - DNA, 3012 bp, Cannabis indica
tacaaaacacaggtctaaaatatcatttatccttattataatcaaactttttctttttatttctctcccctttggagggagaaatatataatgcattttattacaccaaaagaagatattacttacttatttttctcttttatatttcttttttgagttatgatatgcctacttaaattgcaaattaaaatattacaaagagagactaactctatttttaacaattatctaaaattctcaatgtcacatttttgtaagtttattagtcatttttctaattgatatgttagatactaataagataccacatgtcaattttttattatttaaaattataattttaattaaaactaatttaaaactaaaattattattttaaaatcattaaaaaaaatacttttttcttctttgtcctcttcaagcctcatcttctccctctcattcccatttcaccaagctcgaagacaccatccacacaactaatcacacaaccaaactagggatgacaattatactcacaggtttgggtacccgcccctaatgggacgcgagcgagacgggtatgagtttaaattttcatactcgagtcgaaaacaaggcggagaaatccattttattgtcgagtaattttcgctctcccatcactttaatttaaacgggtattagaacagatatgtggtgaatttaagaagaaggtatggagatagaggagcaatccccgcacccaccccgccccgtttacatccatatggccaactcccaaccacaatggtccattttaaccgcaaaatcaacataattagaataacaactctctataaccaaaaatttacaaaattgtaaaagatctataattcactacggtaatcttgagaggacctaaataactaataaatcaggaaaaaaaaaagaccataaaagcaaaacccaaatgccaaatttgacttaataacacttctaatcaaccaaaaaacaagaacatccaaatcaatcccaaaaggaagaatcaacaagttaaattaagaaatctcaactctacacacacagttactccaacacttagttggttcacaataaccgttcaacaccaaaattagaagaagaataaagcattagaagaaaaataatcgaaaagattatgattttgttgagtttcgctggttttgttcaacacccaactcagacattgatttctctatttctctttacctctctcttcaacgccattatttgtctccctctctttctcaataatttcatacttacagatctgaaaaaataaattgaactaattgattgggaaaaaataattgggtcttcggttgttcaaaaaacactattacaaaatgacaaatacaatacacataattgactctttaaaagagaaaccttgaagatatatgaattgaaggcaatagctaggtggttttatatatgaaaaaaagacgacttattagaatattatgaagtatagggctttgattatagatattatacattttagaattttaatcacacccgaaattcaaaattctcaaatctaatatcaaaactcgatccaaaaatgcatcaaattaggcagactctaatttagattaagtttagcttcaaccgatcgattagcttctcaatggtaggaagtaggaggtaatgtttgaaaaattattactatgactatgagtagtttcacatgaaatttcccaaggaaacataacatgctttatggtactcaagaataggagacttgctacacaagttttgtttattagaatgaagacaagtagtaaccactagccattttttaaaactatatactatacgttctagactatatagtgaaaaaaggcttattaagctattctttccttattaatgaccatgttctgccaatgatggaagtttcctaacaagatctatgtatgacgatttagatttgtttataaatttatagattttgaacctaataattattacctaatcataaatcacattacaattttgttattttttaagacaatcattcataatgctatattataatgctgttttgtttgtatgttgtttgattctttaccggtagtattactgttcttcgatcaaaagttaaaacttttgtcttgctaactagactaaattgggctcatttgtgtaggattctcctatataagcggttaaatctgattctctctctgtagttatggccatcaataacaggaaggtattcgcaaatgagatgtgtgtgctgttagagggtaacatagctttattgtttaaatttctaatgacagttttgtctcatgtgtcctgcaaaaataacactgcgactcatggtttggctaataaacacgtccttatgcaagacaatgagttatgctgatttaaaaaaattccaacactgattgttgaagtcttctcaaaaatgtcctaatatgattcagatcacgttgttttttaaaaaaaatcataatgctacattttgcattaattatttattaataatatgttgagaaactaagaatagtgaagttttacaaaatttaattaaaatattttgaaatttttacattgacgttacaaaacgttcatgtttgtaactttttttgctttttataagctaatataatggccaaaccttttattttcggtttttcattttctctctgctggaagaattttttatgcaattcattcctaacctgccccactccaaaaaaaaaaaaattaaaagagtaataacatatgcacctaaaagtgtaaaaatacgtgtatatgtatatatatttatataacaaaatattacacacactttttgtattagtagctagtttaatgaaaaacaaaaaaatagattgaaactttcgatagtccatcaccattccttcaagaggcgaaactatggtgatgttacttcggataacttggacaattgagagacaatcgaactcgagttcaatataccattcatgatccttaatccaacttaacgcctttttaatggctaaagctttagcc

SEQ ID NO: 390149 - DNA, 874 bp, Cannabis indica
aagctgaaaggagcatctcgaagtaatcaatgtggatggtcactcactatgcttagggcagaacgtacctcgctagtaacctttcaagatagccattataacttttatatttggaatcttttcttagtagattgcataacccataagtttgatagttggtacccatcattttgtgttcaacttagttgtactaactcgtactatgggattgtcaaacaatatggaaccaatttagatagagcaagccatccagattcagattgggatttagatccaattaacccctacgacgtattcatgatcacaagatctaaggaatttagtaattactatagtcatccttcttcatcttctgatgattatggtagcttcccttaagtgggagtttatttcccatttttccatttagctattttgaataagtgttaatgtattttatttttgtctagcagatatggatttagaaaatcttctccacacctcgagcaaaaaggggaaaaagaggattgctgcttcggagacttcttcagaagttaaagtggaaccctttaagagatccaggaagacaaatgcaaataaaaaacgtgtctcgcaatccataaatctcaaatcttctaaagatcaagttcaggttcacactcctaccatcgtgaatgttgaggagccaattcgagaaacccccaggccaccacttcctcgagtaaggtgattgagacattacccatcgaagctgggggcattggctcagagtattgcttgcaatttgttgcgtcctattggcgccatttccaatccttccaatccagtgactgggatttggttaataatggaagcccaacagagatgtgtcgggttttgtgccctaaaaaaaccc

SEQ ID NO: 390150 - DNA, 1371 bp, Cannabis indica
ctgtcttttctaccaaaatatggcataggtcggtcatgccatggggaatggccttcttgcggattcttgactttatagttcaaagttttagccttttatgactaaatagagtcaaggccttattgatttccttgttgaatagatgcccctaggatgaaaactcttgtgcggccccataaatcttaggttgggcacatttgggtgtgagtctgacactaaatggttagttagtgttcttatgagtttcctaaaattgccatagtgccatcaaataagatatcttaactaatttggcctttacaagtattggtcaaaatcataaaattgatttcttttatttattcaaaattaggtataacaaaatattaaatatgtataatttcaaattaatccgtgccaaaatgagtattattaaaaacataaacgccaatctattgtgagctcttagattaataatcataattctattattatgtttaaaccaattgttgaggagattaaatctcttttagctgctagtggtggtggttcttgctatactatctcgagtgatgcgaatggcgtggtccatgcactagtaaagtctgttactacttcgataggagttcaattgtggacggatgcttgtcttatatttattagtactcctgtaccagctgattttatttaattaaatacatgctttctctacaaaagaaaaaaaaaaaaaacataaagccaatcaatattttgataaggcatatgataccatatgagtatttagtggtccattttacttatgcttctatttttattataatatgatcattcctattaatggttctttggttgagaataaagaaactaaaagaagaaaaaaaaaatgaaaacaatagtaaaattaggattaaactaaaatttaatataaaattaattaatttttaatttttcctccttaggaataattattttataaacaatgataaaaaaaacactttcaactatagagaatgaaattaaatccaaatttatttattttgtttattcaactaaactaacacataataacaaccaaatataatttgaatttattttcaaattcttttgatttttttatcatgcttttttttcttgttattataattttataaaagcgatatttgcagcaaaactctcttaatatttctaattgttatacatataattctaataaaaagtgacagtaaaagtattttatcttacaattttttgtaatcgtatccttttttggttgttaagtactaattaagttcgttaagtgtcagcttagcatgcaacgacatatttctttaatttatttaattcgtggtctaataatatgtcgcgaattaacacttgatgataaaaaaaaag

SEQ ID NO: 390151 - DNA, 1154 bp, Cannabis indica
aataccaaacatgctctaaatctgcatactaaaattattagatgcttctctataatttttgcaagatttcatgcttctttcaaaatcccataataaacatgtcaaataagaaatatccacttctaaaatattatttcatcaaaaacagtatataattcatttaaataaataattaataagagaaatacattaatagaagaagaaaagaaaaatgaaaaagtagaaaaaaccaggtgctagagcacatgatgatgatgatgatgatccagtgggctttagctgattcgaatacaatgatggagagtgaatcagaatcttcacactgcgcttgccacgaacacagaaaatccaaatcagtggcaccaataatgaaatatccttttaacgagccgaaattagaaaactttatatttaaaaatagatatagtttgggtggtgggtctgggcccaggcccaccagactctatattggccacataaaattttgtttcctagccagcaaccacctgtcaaaaccatcacccagtacctggccctccctcaccctactctggagtctggagcattctttattgtgtaattgattttttgtagcgtggaataacggtattttacaattatatattagtttaatagtttaaagatcttaagttcgaactcatgatctctccctttttttccatccatccctcaccaataagctagccttagtggcttgtaattgatgcttatacaccttcttatctctttttatacatataaaaaaaatcaatcaattttttaattagaaaaatatcaaattaattttacataaaaatatccaatcttttaaagttttttgtgaggctgaaaattgagttgagagatgaaaattgcctttaacaatattgaggatcctaatttatctacaatatagtattgatagttgacttgttgaaactatatttaaatttttctttattaaattgtactcgttcaacttggaatacgtcattgtcataaatttatctcaatccctaatcatacctaatgaagattcaaatcctcactggtaataaaataaaaactatatataactatttatttagtttagaaaatatttacttaaataaaaattcttcctaaaatacaataattacataattatgccgctt

SEQ ID NO: 390152 - DNA, 1051 bp, Cannabis indica
atcatgttaaccaatctttggtatgtcgtacttgcatttattagtccaaatggaattactttataatagtacaaacctcgatcagtgataaaggaggtgtgctcctggtctggttcttacattgggatttgattatacctcgagtacgcatccatgaagttgaggagctcatgacctttggtggcatcaataagttggtcaatgctaggtagcggaaagctttctttgggataggctttatttaaatctgtaaagtggatgtatgtgcgccacaagacatttggctttggtaataaattaggattggctaaccagtttgggtaaaatgactcctttatgaagtcgagtgccagtaggcggtctatttcttccttaagtgcttagtaccttgcgaggtccattttacaacacttttgtcgtactcctcgcacatcagggtcaatgttcaagcaatgacacatgaccttaggtgaaattctgaccatgattgaatgcttccatacaaaaacatccagatttttcttgagaaatgttacaagcctttcttgttgctaaaaagttagttaagaactaatttttaatactttatagttatcagatgaatcaattggtaccttaactgtttcctctacggcttgcacagtgctggtatagagagaactcttgcgtccaaatcgggtttctccacatgtggcacctcttcatttctgaatgactcatgtcgaggtggaggggcctcaagcaaataagttacattcactgactttttcttttttgcgatctttaacgcagtgttaacattccctcaaattagcttgcactcctcgtactgatcctacacctacgggtgttgggaatttcatagtgatgtgataaatcaaggtgactatcttcatctccttcaaaatagggtgacctattatcgcattatatgcagaatgttgattaattactgtgaagtctgccatgcacttggcggcgataggtgtcgttcctagttttatgggtagcttaatcatccctttcaattcaattgtatctccagtgaaac

SEQ ID NO: 390153 - DNA, 634 bp, Cannabis indica
ttggcaaaacatactctttggttggacaacgaactatactgattcgaggagacataaattactacaatattaattatgtataatttaatcagcacgtcaacaaaaaaaaatatacgtatctattctttaaaaacgttataaagtattagtattaaaataggtaagtcacatctgtaaattaggtgtaaataagggtgagaggtgtaaattttcttttaaagaaaatgtataatattaaaagattctcttttttatatgaaatgtttttttaacacgcatgcagatggtttgtctttgtgcaaaatcccaattgggtttcttattagactttcctttttaaagaataagtggagaccaattctatttttatagtacctacctagtgtcatttaatggactcattgctatatgaaacccaaggattttacattacatatttaaatttttaactttttttttttgacgcggtgatccagatcacacatgattaacaaagtagcaatccacaatcggcagcggcacctcctcgaaccagaatagctcattgtcgggtgaaattttttttctgtaatgtgttaaattttatctgttattttattgttattttttagttattttactgttatttttaatt

SEQ ID NO: 390154 - DNA, 1015 bp, Cannabis indica
tgttttagtaaatgttccaattttgagatcaatggggtagaagggaccgtttccaatatgggggattggaaatcgaaatggttctatgcattcaaaatgcttggaattaggatagacttcaatcgttgacctcgcacattgcatatctctatacttgaatcaatttgttattttattttatgaatgctaacacttatctgtactcgcatgtagaccagctcaagctgtgttggctagagattgtggggaatcgtagaggttttgagcagtgttccagtccaggatcgcgattggcgtcttttgtgcacctttgcaaaattgcgagaacgcaaattaattccagtgtcgaaacttgttttatcagaatctagatttactaacatgtatgttgattataaatctacaatctaacatcctaaatatgaattcctaaaataatgaattaaacatatgtaaagttatagaaaaccttacattgatggtagtggaatcatatgactctttctgtttagatctctaacccttgatcctttctattgccgagttttgacctcaaaaagtagccaactgacagcagggtcatatgaatctgatgcttttcacgtgttacacagttaaaactaaaaaataaagaacataaagaaattcacagaggtttggcccccttagttagcgggtaatgacctactccccttttaattgtattgataccgagggataatactattcagattactgtaggtgggatatgatatagctctcttaaggttacaaagtaggaatcaaagatggaatgtttcgagtgttgagaatgctatggtggtcgtgtagatgagagagagagagagttatcagacttagagacttagaatgaggcgtaacactaaggttttctagggttgaattaaggccctttatatagaagagcttaaaccctaattcaacaataaaataagtagataattgtatattaaattgattaaatacaaaagactaaaatgcccttaaacataga

SEQ ID NO: 390155 - DNA, 662 bp, Cannabis indica
agtattgaagcagctgatgactgctgattctgctcgtatccatggaccataagccattactgcttctccttcaggtggaaaagcaaaaattgtttccctcaagcaagaactgttatcgtggccgatatgaccacatttatagcaaaacttggaaagacaaaaatattggaattttatccattcttttctccccctcgatatatccagaaaaaaaccaggagtcaattgatgttttgttgataactccacctggaacttcaaaaatccactatgtgtcagggcccgttgattcactacatcacagtctttgtattcgcccgttttcgccgcaatcatagtgaggtttgaagcattcaggtatggcattggcaatcctgtagctttaacccaaaaaatggccttcgtcatatccacatgactccaatcacccgactccggccattcttgaataatgagaagcttcccatttataagccatggcctattttccaggatggatacacaatcttcttcattatcaaagaaaataccccacataccaggcttcaaagttctaaacctccaatgtcccttcagtttccatttctgttccagaatctctttgagccttgttcttaagacacctttaccttcgaaaaaactagctaagtgttgggttttat

SEQ ID NO: 390156 - DNA, 728 bp, Cannabis indica
tttttgtaaatatcaaaagattttaaatcttttatcttatttaaattctcctctagttgatttaaagcatataatagatcctgaaaatagaacaaagtgcaacccttaattttattataaataataataatagtgataaaacaaaaaccgattacagttagtcatcaaacctcatcactccatgtttgtaattttaaacttcgaacaagttctgataaatcaagttctatcatttgtgaatcaaatatccctttggggagcatgttttcaaaagtcaggatgacaattctaacaacctgccacacatttttcataccattacaaatatgaattttaaaaaaataagcaaataacaaacatggtgcttggaaatacaagattaagaaatcaaaaaacaaaattcattaagtaggggtgtagaattttagtgtaaaaaatgtgtgcacgtatcattactcaattttaaaattacgaattcgataactacataactaaccacaacaaactataaagtgatgcgtgattactcaatacaagagaacataaaaattgtttctcaccttttccgctgtggagttcttcgcaacatccatgagtcgaggaagagctttagaggtagccaagtgctgaatggcgggttcatagtaagataaaagccacacacaaaagcatgtttcatagacaagctgtttcaaagtagtataattaaactcaagtcaaatgcttgt

SEQ ID NO: 390157 - DNA, 892 bp, Cannabis indica
tctcaatgatttccaagcaagtactcttcacattctctactcactcactgcatgaatgtaacatagttatttattacagatgcagaggctaaaaccactcttgctctctcgcttgctcgtgtgcttctctagctgttggaacagtcatctctttcaatgccacatcctcctaatcactcttagtcgataccttcattcttgcttgctcttcttcttcttcttcttctcgatcactcttccttctgcagtaatgaataatttagaatcgatcaaataaacaaataaatatacaagggactacagatttcagtaacatatgctaacttagctcttagatagccatgggactgactgatcattacttcataattattttgtaatacatgatgtaagaaatcaaaaagcaatgcagaaagactatctcatgtagaagagaaacacattgttttgacagccccgataagttattaggcagcactgcagaagaatagcaagtatagccattataagtaagttcatcttgcatctcaaggtactcctttctgatacagagtcctctaatccaatgacaatataaaaaactatcttcacctttaaataagaatcatatttatatcagtacatgatactagagtgagacttctgagctaaaaaacactaataacttttcatgtttttctttggatattacattttgctaattcaaccatttaaaacattaaatttaataactacattgccaaacacaccaaattaagagggccacttggccatattccatccaagtaaaaaacccaacagaaaagaaatcttcaagtaagtgattgaacaccaaaatagtcatttaaaattatccttatattttttttgtttcctcttctaatttagtaaa

SEQ ID NO: 390158 - DNA, 904 bp, Cannabis indica
atgtcttccaggcttagtttgttgaaggcggaagactttgtgaaggtagaactgcaacatgttcttggaaggtatcacccagatgggcttggccgattttgtcttaaatgagggtcccactgataggtcctgaaagttgatctgcagtccccgtgtccaatactgaaaatgcaaataagaatctcgaatatacttaatggcttctgaaatcccattgtgtaccactaaagccttcatcttgattatctataataaaaaatcattgactccgttaaacttctcaatctcaaactttccagccaacatcttcttggtgattcttgaaccttcaaacttgaatctttatttagttaatcccatactctagtacaactttttatgattggatcgttcatgacgatcaagattcacttaatctgttgagctttgttaaacacagtaacattaaaaataatgaacactaaaaatgaacatgaaataataagctttattggtgtactcaattcggattacaagaattatgtaaaacaatcttggagagaaaaataaactcaaaatctcaagctataagctatagaaggcattaactaaaagaatgagtctacaagagctacttatgggcttttggataaaattgaaaggctaccaattttaactatcaacctaattagtcagtgatgtggtatgagtgagatcatacataacatatgattgtgtagatagaagatcgatgcagtttcttgtgaataccctatgattaaaaagatacaagggttagagaaactaaatgaaactaaatgaacgagatattttttcacaacatacaatgtaaggtttcatttatgttaaatattgtgaaaattatattgatttataattgcgcaagtgtacacaattacaaaca

SEQ ID NO: 390159 - DNA, 544 bp, Cannabis indica
tgggcggtgggtggtggtttttcgaaatggggattaaataggttggattgtgctaggatttcacaagttaatttcgaaatggaaaagaaatgagcttcaacgtagagaaaatatggggttattatatatatatatataaatatatatacaaaaattaattctttttgcttcggtggataacagtcgcaaatgttttaacgtctgtttgcaaccgaagctaaaaaaaattagcgtctttttttcactgaagcaaaatataaaacaatttttcaaattttcactttttttctcggtttctcttttagcgtcagagtaacagctgacgctaattggtttctttcagcttcggttatcctctgaagcataaaatctccgccaattatttgtgtcggtcaaccattttgggcagaagcgttgaccgacgcaaattaggtcttttgtagtagtaatcagagtaggggcggacccacatgtaggcgaggcgggacagtcgccctccctgaaaaaaaaaaattgggaaaaatgtatatgcaatttagttagt

SEQ ID NO: 390160 - DNA, 616 bp, Cannabis indica
cacttttgttacaaaaagaaaaaaacaaacaataactctagctatatgagtacactacggattgttatctgtcatcgatataaaaactatggatattcaagaaagtagaaggaaaatgcttgaaatgaacgaaaacataagaagttttatctttttttatgtatatatattaatacaccaaaaaatatatttagtgctagagtacgtgatgtttactaagcctatatgtggttgtgccaagttttcagtcatttgattcccattttgttttctaagtttacaattttcgcaattttttacagggaaaaaaacgtaaatacaaatgcatgtatatatgcatatcatgttttccatgtagcttaattcttcagaaaaggaaacgatctatatgaattgattaatcgaagacgtccaaactctttttcatatctttagcaaataagaaaacgcacaagcaaactctatctatatataataacctaaactttcctgaaaactaactcaatgcatttaatcagccaataagtgagtagtatatttttatatcatttaaatttgatatttaacaaagataggtaatttatttacatgctcatatatataaataaatatatat

SEQ ID NO: 390161 - DNA, 523 bp, Cannabis indica
aaataaagatgacgattttcattacatataaaatttggagaatgctaagggcaccttctcaaacaaacatatattattattattgatctattttaattagagataataaaatgagtttggacacaacttaaatttaaacaccataccacaagttagagtcaagcaaattaatgaattgaaatgaaatgaaaatagatcaaacagacataactcacttaatatgaatttgatataatttttttcaaataaaataaaataaaaattattaattataatttaaatgaaaatatatatttaataattcaacctgaataattttttaaatattagtaggacttgtatgtctctttttgtactaagttttctccttatttaatttgttgtaatttttcaaatattaataggacttgtaactttgcggcccataatgtgactaaatgagaattttacccaccagatgtacggatctattctgatcaactctttaccagagaacattttgtgtaatgaccatgaggtctaa

SEQ ID NO: 390162 - DNA, 953 bp, Cannabis indica
aaaatttttgattcaaagagcttcttgtactcgtacaataagttgttcgcattttccatcctaattcttacattctaaatttgttagaattttttcaaaaattaggtgtaactatattatacactattatgtaatatgaaaaaataaatttgtagtttactataagtataaatatacatatttacttaattaatatgatgatcattaggtgggatatatctgctactgaaaatttaccagagtacatgaaagtatgttacaagaaatttttagaatttttcaatgaaattgaagaatttacaaaggaaaatccatactgtgcgagctatgttaagaaaggggtaaaaaaatttcctatctttttttctttatataataaatatttatttattttgtgaagagagaaatgaactttcatcattaacatatatgaatttattgattttattttttccagttgcaatgtatggttagagcttatagtaaggaagcccaatggttacacaataaatatatgccaacatttgatgaatattatccaattggacttgataatgctggatctgatgagctaatatcaatggccttttgtggaatgggaaatgttgtaacaaaagaatctatggattggatattttctcagccccaacctaagattatacgaactatgtcaattgttggaagacttatgaatgacattggctaccacaaggtataataataagttatttataatgattgtgaggtctaaattttattattaatttatgaatattatttaaaaaaaaataaaaaattaatacatatattgtacttaatatataggattagttgcatcaaaaatttaaaagtaattgtcataatattgttggtcaattaattggcatatatatcgttacacgcttatcggtaaaacatgtttattttttcttacacctgacactgacgcacac

SEQ ID NO: 390163 - DNA, 887 bp, Cannabis indica
aagggtatgatttggtacatgtcaaaattcgaggaaaaaaattgctaattagcctattatttatttttagagtgcttctacccaaaaaaaaaaaagaaagaaagaaatgcaccccttaatattttcaacattcatagttttaattttaatttttatatataacagtataaattatagttattcaatatattacaattttattttagcatattaaattatactaaatttcttaaaatattgcataatattttaaatgactacaatatatatttttattaaaaattaattaaatgtcaaaaatatgaagagaatgtatcattataaggggtgtttgtggtgcaaacagtatgaattttggctatattttcaaaccaaaccactcacgtgatttttaaaatttcttaaactgtaattgcactggaagacttcaaaattgtaaaattcataccataaaatatagtgtcgtacggtgaaatatgaacagtgtacactatctctatataaacaataatataataaaattttatcatcataaattaaaaaaaaaaaaagaaaaaagaaaatttgctggagataataaaaataagattaattagtaattttttctcctgaactttgacatgtaccgaatcatgtctttgaacttttttggtcgttaaaaatttcccttgaactattgagattgttagatttaagaacttttgtttaattttaataaaaaaattctaacatggatgaaagttcaaaggccatgatttagaacatatcaaagtttgaggggcatgatttagtagatatcaaagtctagggagcatggtttagtacataaataatcactgaaatagtaaaattaaatgaaattagacaaaagtccttaaatttaacaa

SEQ ID NO: 390164 - DNA, 508 bp, Cannabis indica
atatttttgggaggtgtgctgataggttgggggcttggaataagtgtaagtttgggtcgcttcctagattggtgagagaaacgcaaaaacagttggatggtcttctcagtgtgactcctccgttggtgcgaatggatgaggtaaaaaggcttgaaactaaacttaatgatctcttgtctcgggaggagtgttattggaagttgaggtcgcgggcggattggttggctctcagtgataggaacactaaatattttcacaataaagcgacggggaggaagaaaaagaatgctattgtggagatgatgactgaggatggccgaaaattgagtcttgaggaagatattgtcagtgaaattgagcggtattttggtacagtgttctcttcggcttctccttctgtacaacaagtggagaatgggattactcatattgaaggccgagtttcttctgaggaatgtgaaatattggtagctccctttacaaatgatgatgtgttgtgtgcggttcg

SEQ ID NO: 390165 - DNA, 609 bp, Cannabis indica
cgggagtaagtacctagcccctaggttgataaatggcctaatgcgttgggtgctgcttatccgattttgttgtcatttcgaccgtctatctagttattcataataactaagattcatgaagtcatgaaagttaaattcataactttgcgtttctgattttcggctcactctgaaataaagagtttcgtgtgtcttattctgcagaacatcaacatcttcgagaactattgaccagtttcgtcgaaacacagaaactgactaagtgatatcaaaatatcacttagtcatcttaaaatacatcacttggatatttttacacttaaccagcattcaggtttacgtcatatgtcaacttgggcgctgggtcatgaacgacttttagtaaaacaaccataactcactctattttgatctaatatatgcaattcaacttccgtttcaaagctaattcaattctctatcaagtcatgtctcaaactccagacataattatgaagctatcatcgtcaaatttcacccaagggagttacgaaaataagctctgagttacccaccaggcttcgaaaaatggtcatcaccactaaaagctaatttttaccgttatatcat

SEQ ID NO: 390166 - DNA, 627 bp, Cannabis indica
cttgtttgtaatacttcaaagctaactaaaagagataatgatgtactagctttgatttctactttttgataggtgggttgctactttgcattgtgtattgttcagtgattattttgaataaaaagttttcctttgtttaaaaaataaaataaaattgagcctcttaaacctaacacacttttaacttatgactgatatatcaaaatggttatattttaagggattgaatagttactactaataaagatatataatccttattagtttgctagctttgaaatctataacccttataattatttaaaaattttacacttcacacctttttttttatctaattatcaaaaatgacttggtcaattatcaataacgtttttattgttgtgtatgttttaatactcttattaatacatttctttctctctcccctttctctctctcctttctctctttcttcgttcttatttttttatttatctctcttctcttaaactttacaaataatttctggtcaagtcattactcgtaagggtgttcatcaaatcgcttaaactgcccgcaccgcaccacactataaaaaaaaatacggtttaaaattctttatggtgcgattgcagtttgaatttt

SEQ ID NO: 390167 - DNA, 602 bp, Cannabis indica
aatagtctcaaaatatcattttcttcataaatgttattatattttgtcgttttcatatcaagtgtctcatttggtggtacagtatatatagtagtgtttaatcatctaatttcttcctagttttgctaattaatgaatatagatgtatatatattagtttttaaattttaatttaatttttgttttcttgtgtacatattctttttgttgaataataaataaattatctatatctttatatagatataaccaaatagtaatatagtactatactatacaactgtgtttagggttaactagggtttgggaccattgggctgaacactgtataacccatatgttatatatatatatatatatatatatttatatatgaaaaattcaaaatgtaatgggcaagttatatagccttggattgagagtccattaattgaattattagtttcatcacccttatatgggttggtagctagggttcaattttggaagaaatgccaaagaatatttacaacatatatatacatatgtgttatatatgtaggcagccgattttgttgcccaaatgtgcaaaacacggaatggaatccgtgtacggcaggtag

SEQ ID NO: 390168 - DNA, 908 bp, Cannabis indica
atacaataacattgcctcgatccccagtagtcggtggttgctcacagtacaaaaataatttcgaaaaaactctaaaatgattttttttttaactttagagagagattcgaatttgaaactttcacgttgtaaagaaatctaaaactactaacctatgtttatcactactaaattctaaaatgaattaatctagttagttaaacctaatttatatatattatctcaaaaaaaattaatttatattgctgttttcttcatttagacaaatatattaattaggcaagaaacagaatctcatattgcgttttcaatgtggcgtgtgaaaacagcataaaatactttctaaaattggaaactatataagagagattgtatctaattaaaatattaagcaaaaaagaaaactaaaactttagcattaacagaagtacagccccagaaaaaattacttgactatcttgcaaaattgggagaggacataatggaaaaactccacttttaggagttattttaaaataattaaatttatttttattgggagaaaaattaattaattattctacacgtccaaattgtcacatttaaagtacctttaaaactaactgtgtaattacactatattttttttaaaaaaaaaatgtatttgaatatgatacagtaattatataaatttttaataaaataattagtaattacacagtaaaataatattttttagtagttaatatttaaaataaaaggttttatatatgctaaaatgtgctaaaatgtataattatctcaaattaattcaattatattagtattctgttacttaatccaacataaatctcatttgtttagtaatatgaattagaagtaattttaacatcacaaatcatttagatctggtggcaactatttattat

SEQ ID NO: 390169 - DNA, 773 bp, Cannabis indica
ccgatattttatggtactcgttagtatttttttttatacaagtggtatacaactatttacatatttatatatttatgggtatatatattaatgcaactgtttacatactcattaatgcggatttcttattaaactcaaacctttatagttcttacgtttacaggcaagatcccaagaagctagatgcatcttactagtattacttttcatactttacaaaaaatctatgcataatctatcaacattcttgattactttctacggaagcataaaaatactcattcaataacaacgaatgcccaataatattaattgaatcaagtgcactctacctacaaacaagaaatgctgctagctcatttgtgaagcttcaattaaatctcttaaaaaaacaattaccatccacagctttccattttattagtctcattatcacactgagatacttgagagggaaatgaccattttcataaggaaccagattagtttacttacataactacatacttaatctaaaacattagcaaatttattttgtaatagtatttaaattttattttgataaaaaaaaatatttctagatattatactaaaatcttgggtttgacgtctaatttattacatatcaaggccggctatgaccctgtgcaagctgtgcaattgcacagggcccaatcttgcacagggcccaattaaataaatgctaaaatatttattatttttaaatttaaattcttttcagttttttttttattatttttttaattaatgac

SEQ ID NO: 390170 - DNA, 1323 bp, Cannabis indica
gcttataacataacagactttattatttttctaataaatgacatacataattcataatattagtttaggataggtttaagaaagttatatttattaaatactcaaaattgtttagctctgtttataaattatttagaactaaataatttccataaattaatcttctttttacttattgtaatttaatgtaatagtaaaattataatttcgaactatgaatacagacctaattatgtaagtatttccaaactaaatacttaaatcaagaaaaataaatctagaaaaataattatcagtatttattacaaaatcactaaattttaaaccatctagcttattaaaaggtcctgttaatttttcttaaagtcaaacattataacgactgcaaaatagacgtttccatttttcaaagccggtgtaaaacacaataataaacatttcaataatttttaacagatcaatccaaaataaattacaaccaaaagtgctctatcaaatacaatccctgatacataatttacacgtcaaaatatgaattcctaacccatattttaatttacagtaatatacacatcaaatcgagttaagaatttatacctattgtccgcgttttcgagcatgtgacacatggcgtatgaaggaagggattaacctcataatctcgctaatcaatatcctctattacaattctatcacggaatcgagaacaagtcaagactaatagataagcgaaaattcaccctaccttgtcctagcttacaggacacggaagacataatgtctctcccggatccaacagctgatactcggatggatacttgaagggtctattacggatgtcgaccgcctaagagtgtcccggacatctacctttggtgcaattcggatccccagtgacagttatactttttctgacagaggatcaaatcttgtcccctgtgtccaggcatggtagtgcgcgcgcttcctccatctttttgccagacgaatattccaggcctctacttttgaaggtggaacctttggatgacacgtgccctctgcttttaaaggttaaacctttgaccgacatgtgtccactgagtacaaatggtccccaattgtctagttccagcaccacggacacaattatttctaagggatccagtagtcagctctcatttgcatgtaatttaccccattagtgggctttgagcagaaaccttaagcgggtcatgggcatgtccatacttaccacatagcctattgttgaccgaggttttcggcaactagtaaaatatgaatgtaatgatgagctgtaagaaagcgagatgaagacttttt

SEQ ID NO: 390171 - DNA, 1633 bp, Cannabis indica
ttttaaaaaatatttttttgagccactggctggatggccttaggcgcaagcctaactcgctttaggccagaccaatcctacactctactcttaataaatatataaaaattaataatgactataataaatttaccacactaaagtatttccaacaatttttttactctattttttgaaatgcattactaaaattttactttctctattttaaattaattttttacattattacactatacaacaatttctttattttattctctacttcaaataaaatattttatctttacatatttaattacttaaattaataaacaaaatagaaaaattactaaaaataattagtaggagagaaaaataaacaaaaagataaaaaagtatttttaaaaaatacataaagaagctttaaagcttctctatacgtagtagagataagttaaaatatctctattttgaagaatatgtgatggagctactttttatacggttgttatataattttaaaaaatgtaagagtttaaaaaaattgttgggagtgttctaaattggtaaatattatttaagaatgtaatatttataaattatgaatgtataaaaataaaaaaaaaataaaaaattaagagttttattctctaattaaaaaagtaatataggttgatccacgaacaaaaagacaactgctccgtgaatgcaaactcaagtttctgtcatcacctttagcatctgcgaattcccctaaaagtcaagaacttcttgtggagagtgatgattagttcacttccaacttattttcaacttgatactaagtatgttaatatttcagctagttgccctatttgtaagtttcattctgaaactatcaaccgtgctcttctatttcctttttgcatacatttgctagcagaaactcgatgcctccttcatttttgatcccggtatcacttttgaaagttggctggatcacatgttcactaatattgcagacgatatagtctgtaacactgccataatttgttaggcaatatggaaagctaggaacaatgttgtttagaagaaaaaacgtacatctgttactgaagttcttgcatcaacacaagtagctcttgatcattggaagaaaacttaagataaaatctcactttcacctatatgtttcagcaacaatggtgattgttctgagtattggataaaactgattgaaaatacaatcaagttaaatgtggatgcaacggtctttgatagagataaaaagtatggttttgacattctggctagagatcatctagacaatcttgttattagaagtgttcatcaaatcgcccaaactgctcaaaccgtccgtatcgcaccacaccgcaaaaaaatacagtttaaaattctttgcggtgccgtcgcgatttgaatctttcctaaaccgcgcggtgtggtgcggtttgcaattttgaattgttaatatgcagttcaaaccgcaccgtaccgcacattataaaaatactaatttttatatttatttaggtccaatatgtgaatgtttaactcacagtccactaattattgtattgttgacacttaatttttttttttcatatttatttttaagccttatggtatttggtgggttttgtgccctaaa

SEQ ID NO: 390172 - DNA, 767 bp, Cannabis indica
ttttattaattaaaatgaatattaatatatattttatcaccatgctatttatttgtgtttattatgttatttatgtacactattcgtataaaatttatgtatgatacatatatatgttatagctatataataatataaaaaaatactcaattaaaataaaccgatctcataaactaattaaatatacatcataatattttgtttataataaatatataaaacaatcattttaatattgtgccataaaatattatagtgtattgaatcaaaatataacatttgttttatttttgtagcaaatttggcaatatatatttatatatatattttacatatagttacaatttctaaaacttgctaacatattaaaatttgattgatattatacgtagtaagtacatcaatattaagtaataactgtcactttataaatatattattatagtatatgttttttttcatctatattagtatgtttttatatatttttgcgtgccagtttgagccacaaatggcagtaaattaaaattgtggggatctaaatctaattaagttttggtgattaagttataataattagtaggtatatgtctatatataactctactacaagaattaattgtaggacctgttataattattataaatactaagtgtggtttagtaacacttttgtttttcaattttttaattacaaaatgaaagtaaaatttttgtttttaaaaaaatttatttttaaaaaacaaaaatgcgttctgtaacaactt

SEQ ID NO: 390173 - DNA, 1829 bp, Cannabis indica
tcctcgtgaagtatttgtaacaattcttcatctacttggtttttacctctacagaaatcatttgggttcatctacaaaagagggaaggggaggtgaaaactaggcagggccacaagattgaaaacatctataatactctgacttgaatagttaaaagatcaaagtgaagaaattttatcccgatgacgagaactctaatttaaaggtgctcaagaatacgagactaacacagaattcacaagaaggaccttgcaaaacatatttaaaggaatttcttcagaaaaataagggaattcatgggaatttaacaattatagtatgtgcacatatattcagtatcaaaatctaaattctaatccctagaaatcaagaacaacctagtttaaaacctaaatattcccaaaaatattcactgaagcaattcaaagtaaaatgaaataaattaagaagatactgcataaaagctcaagaacttattcactattggaaaattatcgactagaagtgttgtacaaagacagatggtgacttaaaaatccattgaagcttcgataaatgcctaaagatttgaaagagaagtgaatttcactatgatattctcaagtttcaaaatgcctaaaagagaatgaatgggttctataaaaccttttataggttgtgaaagggcatctttgtaattatttcaaatttggatcccccctaaaaagtacaatcaatacgcttgagtagtacaactgtaagcacacgacccaaggatgttattctcgagataaggatactcaatgcattaggatatgaaaggacaacttaaagatttgaaatgatgtttttgttcaaccacttcgtaggctgagcacatgtcaccctttatacctatcacgtgggtcgagcaagtccacatgccaacaaatagttcccatgtggacttggaaggtaaatgttatcctaaaatatactagtgatgatgtggcacttctatgggtgatacgaaagtcattcttagtgatgtacaaatgaaactctcatcaacatatcgttcataaagtcattcttagagatgtacagatcaaagtgatactaagatgagttttgcactaaagttgtgctcattggaggattcatccccataaacattccaggaaggtccaatgccccctgagctacaatctcaagcatgtgggcttgattctcatagatcatggggtcgtcttctttgaggccagtgcattcagtactgaagtctactaatgtctgtcctttgattattgtgtgatgctgatagatgatctcaaactgacctagctctactgcccacttgagtagacgtcctaaggcttctggtttcatcaaaacttgtcttagtgattagtctgttaacatcttgactgaatgagcttggaagtatggccttatttttcttgaagccaataccaagcaataagccagcttctcaatgggggaatacctagacttggccccaacgagatgcttgatgatgtagtaaaccaagttttgtatcccttttacctcataccctagaacagtactggtcacatgtccggtgatagtcaaatagatgaataattctttcccttctatcggtttggctaggataggaggtctgactaggtgatgtttgagagcttggaaggcttgctcacattcatgagtccattaaaacctcttgtttgctttccctttttagtagtactttaaaagaaaggaactacacgttgtcggtgggacttggagcgaatttgctaagtcaccatttgcctggtaaggctttgcacgtctataacttatgattggtgactttcatgtcatgc

SEQ ID NO: 390174 - DNA, 1158 bp, Cannabis indica
ggtgtttctctttgtggtgtaagctgagctggtcgtgaagaagcgcaccaacttgtgttgcaaaatactgacgtggtcaaactgtacattgagtaagtttaagttaactttccatagttaaaacaaaataataatattaaattgtaaccaaaattaatccatcgaatacttgaagggaacattttaattggatcaagaccactaatctgactaaggcacggaatcaaaaatgggtacaagatgaacattatcaaaatttcagtacatggttagaaaacaaggtactattaatattattgacttgttacgcatcatatattgatttacctttgcttactaatcaacatatatgttgataggtatatgtggaattgtgtgaatctccaagcaatgtatccaacacactacttttcatatcacgaggtcattcgtgtgacgtacacaagtaccaatcgtactatataaatagtactcaattttgtacaaatctagaaaaatacaaaatagcggtgttatgatagtttctaagactttccaagtaactagttgaaacgaaaaaaaaatcatgttgaatttgatattttatggtgaattctctacatatttctcagatttttgtttgttcctttctttagatctcttaatgttaggtattttctgtaaagaccgcttagctttaatttggaaattagcagataattagggtttaattatggaaattgtttattaactttggattattaatttacaataatttatttgaatttataatgcattttatatgtcgtatatgaaatttcataaatcttgcatgttttgtgcctgacaacattagaacacggtgtttggctattagaatcacatcttggtatttttagtatagcggggcaatatagttagacattgggaatgtcgggaatagtagaaattttagaggtgaccaacatacccctaagtgaccttttatgttggttattgtgggaagggtaaaatagtctttttgcctatttgtgttttgtcctttagtggactttgttttagtttaataatctgatttttattagttaaattagctgagattaattttaataaaacacctttttattcatttatacaaaagttggataattcatgaaaaagcaaaaactctctctctct

SEQ ID NO: 390175 - DNA, 1036 bp, Cannabis indica
ttactatacaatagaaaaatattactaatatttcctaagagaaaattagagactcattacaaaatagttataaaagtgaaatagcttatgaaaatatttaaagtaattttttttacatttttaaaatattttttttttttgattttttacgaaaattcacataataatctacatagcaaatataaaattgtaacaaaaatctaacttactaactacataaaaattaagaaataactgacggaacaacccaaaccgtaatttaaaaaaaaattaaaaaataacatataatataattctctacatttaaattaagaatatataagaaaagatatgtattatttatgatgtgatatttgtgctatgtgatatgtgattttttttttcgaacttatagcccacatgacaaattattcttaagattaatatgataagtataataataataattttcagaaaaaaaatttcgtgaaaggcaattccaatagtaaaatcaactcatatttcatcttggcatagcataaaaaaaatataatttcaatactaaattttttctatttcaatcacaatatcaaaaattatactacaaatatatttttttttatataattatattaatttacatatataatatattcctcaaaacttaattattaaattattatttaaacattaaaaataaaaaaaaaaacctctaccgcctgccgtgccaccaaaatttagtaaagtactagagacatacttatatttgggttaatttttacaagggaaacttacaaaaatactgtttttttcccaagttttacaataatactgccacacggcaataatttcttttttactgtccaagcctctttttttttttctttcatactgtccagacctaaaatatttacttttatactgttaacagtaataaagcacaaacggcacctccttcgtggttggggacggacaaatcaacaccagaatcatagaaacaccaggaaaaaaccataaaatctggcaaagagaaaaaaaattactaaatcaacaacaa

SEQ ID NO: 390176 - DNA, 1167 bp, Cannabis indica
taattaatttcaggttaatttctcatatttctggagaaagaaatgaatcaggctgataatatagttgcgtctaagcttttaaagattttatgtgttagatctcatgttgtacttttcttaaagcgtggcactcctttccatcttttgaggttttacccactcatgtggttttactctttagaagtttcgacgaggcttcgatatatatcataatttatttagtaattttgtttttgcacaatcaattatgtaatcctttttgggtgtttagtagtttcgatcatattattttataacccaaactgtactctgtattagttcttatatgataattgaatagtaaggtgtagacgatggctttagagttgggtgccgacctagttgggatgcttctttattagcctgattatgcatctctattcacatttctttaaaagtattatttgtaatttttcaaaaattagtattatattttcctatgacaacttatgaagatatatgctttttatgtagcattaaaaaacaactgttttagtgacaaatttttagttacaatataatttttctgtgattaaatataacttttagttacaataaaaaagttacatgtgactaaaatatatagtatatattaattagatacaagttatcactaatttagttttagtcacaaaaattattgtgactaaaaatacattgagtcacaatagaatgtaatttttgtgactaatatctataagtcaccatattagaataatgatttataatgggaaatttgacaatctatgcttaaagcgggatgtgggactcttaatatatttcacttaacaatgttgatgatgatgattgattttttagatgggggtagagatggcatatttgagtttcacattagcaaaggaacaataaaacaatgcagattagatggtttgacatataaaagtaaccgatctaattcaattcacacatatttatttattttttaaaaaattattgtaaaatgtgtttgtttataaagtaattgtcaggtatacataagaccaattttgtggtccatttatattttatatagccaatattattttgtaatttctattatctactgctacataaaatgatatttttgatttccttaacaaaaaaaaaaaataaacaaaatctttttga

SEQ ID NO: 390177 - DNA, 2462 bp, Cannabis indica
ggaaattggagtttttagagctgaaaaatacttcaataaagtaatagacgaagataccaattccagaatttcaagcattagttctgtaagaagctttaatattaaccaccagtacaagaataatggtgatgattgtcaaattcatcagtgagtccctgatatttagcaaattcaatcaaaaattcatctcttaactcctagtgttcgttccaaatcgagctgaaatagtcaaagcaagttactacaaagtagtgaaagaaaataaactcctcaagaagtaaatctagtaagatgaatagaatgaagtttcttgctagttttgggtgttcttgcactcataaagactctattgctagtaaagacgctggtgaaatatgttaggtttggtaccctaactgaaatttcattttagtgtaacttcattttcattatcaataaaaagaatgtgaatttattacttgtttagtttaatttttggctcacatgtttatttcatgatcatatgtttgatatatataaattctagtaaattctcatcacattgctattcatgattattgtgttgtctacacaatagaaaatagtcaaaattatgtgattaaactaattagtcccatgatttgtcagtacactggatttacactgatatgattatatcaacaatttagtttacttacacttgtatagtggaatgtcttttctaaggcattggcaaagtaagcttgtattgcatatatacttatacatcagactggatagatattcatagtggaaaagatatcataaacttaccgtaatatcttttctaagtaaatatcacttagttgatcttaaatcaatgatctcaatccttagatggttaggttttggcttatgtgtattacatgtgctctttgacttgtttgttaaagctaactaattagattggcccaatacttacataggaacacgatagtacaattgagtgggagcgctaattatagatatggaatctatagcttctataaatacataaaagttaaatgatagtttccttagaacttagctaaacgagtttaaacggtggagtactcatttcaataattatatttgtttactgaaatatcatttacaagtagctaagtattttttggataaaatacattaaagggtaaaatggtaaaattctccctactcgatttaaatgatcaaaagaggataattgcttatttggattgaaataatagataatttatagcgtatttgtacttggtatagagcgttctttataatcaggggtgtaatttcgaatctatagtggagtaaagaggaattaataaaatagaaaatttactactgtaaattttaaaactaattattgtatgtagactcaattaattgattttattaatcgattagaattctcaataagactatgccttgtttacgagtttcactaagcaaggacttctttgagaagaaaaagagaattttttgtttgtttattaattaagagacattgaaaggtctaataaaaaaataacttaagtagcaactttattttataattaattaattatttaacagatagaattgacatttatagagttagaattaaaatatggcatttgtgaatgagttatttcccacacaattcaagacaatactgaagatagtgtggaagattgtgtagaattttttcacttgaacaagaatctaagtttaggttttgatcatactctgcaacagaaaatatcaaagattagagatctgaacaaaatgagtcatattattttgctcccattaatgtaaggttttctgtaactttatgtgtttaattcattgattttaggaaattcatttttaggatgttaaattatagaattataatcaaatatacatgtttagtaaaatattttcaacaagcctcagagccatgttaatgatttattttcatgaaaaatggatttaaaacaatttttaatttatttggatgtgttcatgttggtttatgtatttttgatgattgattgtgatattacaaaatcttctatgaaaaataattttattttcgatcagatattattttatttggatagctggttaaaaattaagcaaactagccttttatagaactaaattttgattaaaactgaaaaagttatgatattttaaaattttgaaaatttttgttagggttttccctattgaaaatattttagtaggatctagatttactaccacgtatgtttcattaaaatcataatatgaattctaaaacaatgaaataaacacataatagtttaagaaaatcttacattgggtgcagcggaatataatgactccttctgttcagatctctagcccttgattcctttctgtagcagagtatcaccaagatttgaacctggatctctttctctccttcctttgatgttgaatctccttcttgttgattggattcttcacaatcttccacacta

SEQ ID NO: 390178 - DNA, 1038 bp, Cannabis indica
tttttgattttttttcaaatggatcaaagtaatattcactaaaaaaattgagttgattaaaataattttatatataagattaattattacattctatgctataaaaaataaatgggcattttttatttttacagttcaaaacagtttttttttttgcatttttgcagaattctacatagaaacccctattgcaactagcgctgcaacttaaattgcaacaaaaaatcgcatagaaacttaaattgtaaatttaaaaagaaaattaaaaaaataatatatgaagtaatttctcaaaataaatttagagaatggaaaggaaagaaaaagtgattggagaagaaaaaattataattaaattagtttggctaaaattgtgtaactattttaatcaactttttaaagtaggggatctcaaatataatttatgattatttatttatttttgaacaaagaaaattattatctattgttgtgttaaattacatcattttcaatttgtttgtgtaaatctgagtgtggattatggaaagtttgtccgaaactatgtgacttgggttggttttgttgttataaaatggggaaattatgtattaatatttattataatatcatatttctggagatttgaaagctaatttggttttttgcacacgtattaaggcctactttaaggaaagagatcctacgagataaaataattacaaaccgactaccaacttaccaagcgatacaactccaatcctcttccaattaatgccatactttctggggaattttacaaaaatactgtttttggaccaaaactttacaattatactgggacacggcaaaaataacatttttactgccccagcccaatttcattacttttgtactgcccaagcccaacagcataacatttatactgtgtgtgtggggaaacaacgttcttcgtgtgtggggagacgccggagacggaaatcaccaagaaaaaacaattaaaaccggcaagaataaacaaaagcagtaaaatcgacgtcaataaataatcatggcaaa

SEQ ID NO: 390179 - DNA, 1294 bp, Cannabis indica
tttacgtatttttggatcggtatcatccatctaatatattggattggtatcatccatctaattattttaaatgtaatatattggattggtatatactttatggacaataatattagtttgattagatctatttgcatttttggatacgttatttttatctgtttagtaaataacttaatacaatattatttctgttttatagtttaaatggattttttttttattgattattttgatttcaattgtagtttaataagcgtgtttatatcacttactatattataacataataaaaaaaaattattttatttacatgaaagatgagaatatttttacgttagttttctagttattttggtattaatttttaattatttgtatattattttttatattattttaatattttttattattatttttatgttgttttcttattaattttataattttttttatgtttttataaaataccataaaaatatataaaaaaaaataaaaataagtgaatataaatatatatctattttgtaattatccctttaatgaaacctatagtgtccaacaaatttaatggattgggtagagctctttgtttggatcgcaagtttgaatctttgcctgagttttgcaagtcataaattttgcgggctaatggggtatgttattaccctgactatcttaagaaaaggtggaattacatcttctatggcttttttaaaatagttatggtttttatgggttttgtctaaaattgtttatcaatatgtataacatatataatagaggatggttcaaatgaatatttaccttccgcttcatttcttttttattcattcagcaaaatatcttctttctcatttggagcccttttttagtttatgattcttcccttgaatatttgagtatttcttttttccacttttggatatttatttgggctaagatacaaaatggccctaaatctaacaattaagttaataaatgtcatttttttttaaaaaaattaacaaaatgtccattcagttaaaaatttaatgataaaattacaattataaccttgaataattaagtgtttggtatagttattttggacaatagtatatccgttttatgtgcaataatatattaaaaaaactgaaaggtagtatatacatgtattttttttaaaataactgaaaggtagtatattagtttaagattgtagtatattattttatttgctatggtatataatgaacgaaagacggaaattaaaaaatatagaatattagtttaagtttgaggtatagtt

SEQ ID NO: 390180 - DNA, 997 bp, Cannabis indica
gcaaaacaaacaacacaatgagtgagaaatggatcctaaaaactcctaattctaaacaatatagagaaattcacagaatgcatccataaatgggtttgttacccctgtccggcgaagagaagagttgaagagagagagaggagaggcggcagagagaaagagagagagagatatgtggttaaaggttgttagggtttaaaacacagacagagacagagacagagaaaggacttggctctaatgtttgtttgcccaatgggcctatataggcccatattgtatgaaaaaacatataataagaaaaggggttcatttttcataaatacctaaaatgacaaaagctttatagaaatatagattttacagtttttttttaataaaatacaagggaaagcaacgtgaaaataacgtttaaatagaagtgaaaaacttgtaaaaatatatataaaaaaaaatgtgattttagctattttgtataaatttttatttttaatatcagttgattaattttattttatgtcaagcaattaaacgataaattagatcatatatttatgggtaaaatggtttaattttttaatagtaaaattgtttttatgggtaaataatattttaaaccttgaagtttacaaaaattactaatggaattgttttgttaaataataaattagaccctaaatttgtaacgtaagcttgttcatcattcttcttaatttgcatagtaagaacaaagaatagacatttcaaaaattctatcatattcatttgattactatgatattgatagcatagtttagtttcttctttaaattcttacatagcataatacttgtaagatcttggattttctttttacttcatcttaatttttggagctgaagtaatgtacaatatttctatgttgttatctaacattgtataatgaaatgctcagtgtctctttttagttttaaacttataattgtaaagtgattttaattttagatgaatgaggttg

SEQ ID NO: 390181 - DNA, 948 bp, Cannabis indica
ttattcatttttatttattcattattatatattttaattttaatttattattatatatttaattttaattaaaaaaattttctaaaaagaataaataaaatagtccaatctattcttaaaccaaacacaggattactttcagcataatccaatcttgtccagtccagtccaatcctttttagtccaatccactccaatcctgcgtaccaaatgggcccatagggaattaagcgaggcgggggcaggaatggggggcataaatacaaaatggggatagagttgagaggtgcattacccatttattaaccgcccaatttccactcctaaatacaaatgaagctcaagattaagtcgtttgtcatcacgcttgtaattactctacgttacattttcgtaatcttttaaaaatgttgtaatttttctttttttttcttctgaaaaataacctcattaaaacttcaagagtaaattcaatgggagaaacctcaagaggaaaaagagtgttagacaataacataaatcataagaatctgtctgcaaagcagcaacaatgcaatctgggtgggcaagccacaaaacatctgggacatgaattagacatgtcacgaacatatttaaggcatcagaatcagattcaaagcaactttaaatttgagttggtgccccagccccaggcacctaaggccaaggttgacatattgttaacctgtgatgcttccaatcatcaaactaaagaactatcccaagtatttttttcgtcttcatccaatatggagaaacaagagcttttgagagaaaaatggatcaacctagaggccgaagcggggaccttgtaacgccctaatgccaaggcagctctttcaattatagtgcaatctttgctaatcaaagaattttatcgaaaaacgtgtcaaattaaaacttttgcattaaatattaaactttgta

SEQ ID NO: 390182 - DNA, 1032 bp, Cannabis indica
ttggatgctaatcttgacaatgtcagttgtgaggagcttcaaaaaattgagaaagagcctaatgttcttcaggaaaaagaagagaaatattagacttctcaggctaaaaataattagctcaaattgagagacaagaagtcagatatttgcacaagtgtgcttcaggtagatgggccaaaaatataatcagaataggaatggctttgaggtctcgagtcaaggtgaaattggagcagtctttgaagattttttgctgcttttttacttcagatttcccctcagaggatgcttttgccaaagtcattcatttgattcctaggaagatctcggaggattttaatgctcgtctaattcagattttttgtgccaaggatattagaaaagccttctttgaaatggacccatctaaaagccagagagaggatgggttcacggctggttttaatcaaaaaaattgaaatacggtggggcatgacattatattttcatcattgacttttcaaaatgggatttctagcttaaaaggtatcaataaaactcttatctatttgattcaaaaaattgatgatcccattagtgttgttgattttcatctaattagtcattgtattgtattttacaagattattaataagataatcaaaaaacggtatgtatgtgtgacgtcctggttcatatcatatctcatgagcaaactgcattctttcctgggcatcttatcactgataatgtatctatcgggtttgaatgcatcaatgtgttaaagaaaaagaagagaggtgatcatttctgtgctcttaagttggacatgtcgaaagcttatggtcgggttgagtggtgtttcttggagaaatttatgggaaaactcgattttcatagtgtgtggatgaaaaaaaattattgattgtatctcttctctggagtgctccatgctgcttaatggtgaggtccatggcactattatacctcaacggggtcttagacaaggtgagcttatgtctcatttgttagaattaattttaccaggatctt

SEQ ID NO: 390183 - DNA, 1388 bp, Cannabis indica
attaggcggtctttacaccatgaatgatttttcttgcttatttcagtcatatgaatgataaaaaattactttagtcacattagttcttggctaattgcttaggagagcactaccactatttttgccaaaacaatggttcagttaatagagagtaagaggatttgatggttaggagtggcatggctcgagtctggcgaagctaagatggtgtgacagtgaagctcaggtccgacaacgactctgtatagtatcaaaataaaaatatcaaattagtaggaaaaagtttagagctgaagagaagtcaagattcaaccacaaatttttaaccgtttggcttcctagtgcaaaccccaccgtgaaactcatattcgtgttttgaaaattatcaccaatgaattgagccacccttaagtcaacatcccagagtgaaaaatcgtgtcccaaagataaggcggagatagttccttttccatgaagaggaggaaaatggctcatgattagaaaaaatatatgtatacatacatatatattattttattactaaaaagaccatgtctaaccaacattatcttaacacaaacatgttaagatacattaaacataatctgaggggaaatttggaacttttctagagcccttgctatgcgtcgtgaataatctgaggggaacatttcccatggggcatcatcttctattcttggccaaatttctggtggaatagtctgatttttctcaaagataatcttttggagatctctgtactctgcatcttgctctctgaaaggtgcttcctgggatccgtatagttcaaaagtgggattgcaaactattttcttgttctcgtccaattttgcattaagactgataaagaagaccgtatagcaatccatcatgttggctacatgtggtcctgatggataaacaaagacgtgtcgattgttgcgaaccttttcccattcatcccagagtattttttgccactcctctagaggagcgtaccaagacaaaatgtccatttggatttcgtaggctggtttatttttttcttgttcgaggaacgactgtatagcagtgtgaagagccatagtttggacttcgatagccattgtacagaggcatgttaggtaccaaaaaagatgggctatggactttggagtgaaaagtgcagtccgaaaggggacgagatgggcaaaaggatactttgggtgaatcaaaaaatcgtattgaaaatagggtccaagtttggagagaatctgttcgtgagtataaatagccctgtgagaggccttttccttgctgaccttttggatttgaaaggatgagctttgcatctcggggaaatgagcagggaaatgagcaatcttttgcgatgatgatgatgatgccat

SEQ ID NO: 390184 - DNA, 574 bp, Cannabis indica
taatttggaatgttgaaaataatcttatatgcttcttgcaaaatcctataaagcacgctttcattttatttagatcaagggggccgaagaattgatatttatattttcaatgaatattagtataaaatgacaactcattataaaatgaactaggatcaaacaaatttatactaaccctcgtgaagcgaggcaattgcagttttagagctgatacagttgtactgtagagaaaagttgttgtagctctgttagtgagaaaaaatgtgttatggagaaaaatagttgtagctgtgctagactgctagtgagaaaaaataacagcagcaaaattgtgaaaagaagttaaacgaaatcatcaatcatcaatatatatgaaggaaaagaataaaacggcggcatgacactctaaaatctcttaaaagttatttttttttctctttaattctctcattttaatatttcataaaaacataaatttacaaattaatattttactattattttaataattttttcataaaaatatccatcataaattaattattttttttaaaacaacatataataataaata

SEQ ID NO: 390185 - DNA, 1800 bp, Cannabis indica
agtacagactagatttatctgattaacaatctccatcagttcctttgaagtttgatgttcttgaaagagtatggacaaagagagatgtgtcatattcatatttgaagatgtttggatgcaaggcatttgtgcacatgccaaaggaacaatggtccaaaattgatgataaagcagtttcgtgtatctttatcggttatggagatgaagaattggggtataggctttaagatcctattaaaaaggtcataagaatcagagacttggtctttaatgaagatcaaacaattgaaggcttgagagaagaaaagagtacaccagaaaaggctaaaactaagttgattcctccagaacaacaatgttcagacaatgaattgcaagaagttgttgagatgacccatggtgatgatagtgatgttgaagaagatgtattgacacaagaagatatcattcaggtggagaagtaccagcaaccagatgagaaatctcgtagaaggtcagctagagtactaattctatacaaaagatatccacagtcagagtatatccttttaattaaaaagggggagccaaagaactaccaggaagcatcggctcataaaaatgaagataagtggatatattctatggatgaggagatgaattcccttacgaagaacaacatacatatgagttggtgaaacttccaaaaggtaggaaggctctgaggaataaatgggtctttagattaaaggatgatggacatgaaaacctgacaaagtacgaagcctgattagttcttaagggttttgatgaaatatttttgccagtggtgaaaatgtcatcaatcggaataatctttggactagcaacaagtctagatctcgagattgagcatatggatgtaagggctacatttcttcatcgagatttagaagaggaaatttatatgtagcaacctgaaggttttaaggagaaaggaaaggagcatcttgtctgtagattgcgtaagagtttttatgtatggtttaaaataggatctacgataatggtataagaagtttgattcattcatggttgatcgaagttataagagattagttgtagattcacgtgtctacatcaagaaatttcctaatgataaatttgtcatcttattactatacgtcgatgacatgttaatagtcggctaggatggtaagatgataaattagctgaagaaagaactatcatgagtcttcgagatgaaagacttggggatagccaaacaaatcctaggaatggaaatcatccatgatagaccttcttgaaggttatgtttgtcacaagagaactatgttgaacgaatacttgagaggttcagcatggaagatgcaaatccaatttctttgacacttggtggccagttcagactcattaagaagtcatgtccatcattgaaagaagaaaataggacgatgttggctattccttaatcttcagtggttggaagcttgatgtatgcaatggtttgtacaagactagatatcacttatgcagcgggagtcgtaagtcgtttccttacacatccaagcaaacaatattgcgaagctataaaaatgatattcagatatctaagagggcatcaaaaatgtgcctaagcaaggagaaccaatcttggaaggatatgcagatgcagatatggccagtgagcttgacggtagaaagtctacatctgggtatatgtttacatttgcagggggagctgtgtatggcactctatgttgcaaaaatatgttgctttatctaccacagaagcagggtatattgctcttacagaagctg

SEQ ID NO: 390186 - DNA, 579 bp, Cannabis indica
ggctccatccaagtggtgacaaaagaggccaagttgagccttggagtaccgtccagcatgagctcatcgtttatgatctgatacgcagcttccttgggtattgtctgcaccggcatcctccacttgggtattggcccttgcatgtaccgagatccgaacgtcgagtgtacgtaatcgctgctacgatattcatccccatcaccgccaccgccaccgcttgctcttgttaccaccatttttatatatgttgagctatctctctttcttttttcttttctttcttctttttaatattatgatatatatatcaacactaccacacttcacacatgacccatctacatatctctattaaatattataataatatatttgttaattctaatttttaatacgtttatggtgataaaaatattttataatttattatttttttaatgatataatttattatttgatttggctgtaataattaaattaatttttatattaattaatttatttttaaaaagaaaattgtctagtatttttattaaaaataaagtaaaaataataaatttggttacttatttttttttt

SEQ ID NO: 390187 - DNA, 545 bp, Cannabis indica
cattgtgtgattaatatatgaagaatggtttcagtttttttgatgtgatctgtatttttaaacaggtgacacatggcataaaaactgagagatagtctcataatctcactaattaaaatctctcaataagatccagtcacggagaaacttcatacatctggacacacgtcaagattgagagatatgtgaaagtctacctctccttaatttagcttcccaaacacgaaagatatattaccactctggaacctggactggtccaagctcacagacggtctaaataatgcctagacgagtactcaaagggcctattgcggacgttgatagtccaaaaggatcgcgaatgtataccttggatacaaacccggattgcccatcaacagttatgctttttctgacacagaattagatcaagtctcctgtgtctagacatggtagtgcgcgcatctcacaccttttttctagatgattattccaggcatttacttttcaaggttaaaacttttggcaacatgcatccagtacgtacagtggtcccctattgt

SEQ ID NO: 390188 - DNA, 1148 bp, Cannabis indica
taatatataaagatatatacatgggcggactacatagaggcgagagaggaccgtcgttttctttgaagaaaaattaaaatatatatatatagattttgattagttgcagcatatttataattaagtgtaataaatataaatataataataactttagtatattagttagactatttcacaaatgttatagggatcaaaattttaaatcctaataaaagcacgattccaataggttcattaatattttgtcctaaaattaataagggtctaccacttgaaggtttcattgcaacttgcaagtagtgttttaagttcgaatttatatatctgttagatcgatcaactggtcaagcgcttgaaatatttattagtaagctgaagcatctttaatgaataaattgtctagaaaaaacagctcaggaacacttttctaataaaggccacctatcttagccatataataaggtaattttcaaaaaacataataacaaatatatcaatgaaaatttgactatagcacacagctaataaatgaaattgaattaatctctttcatttgaccaagatattatatgacggtaccctatttttcttttctttgaagggagggtccgtagactaatttataatgattaattgtttcgttagggtgctaatttgaaagtagattagttgtagtggcagcctaaacattgaactgtactgatcagcctattacatattcctaaccaagagagacacggcccgcaagagagtgaagcatcgttcacctaggctctaggctcataattttagatgactccgaaaatttaaatttatatattatatataaataaaatataacacaaattttaattttataccatactattataaaattgtggtaataacgaatctggtgtttcttgccaaatagggttggaaattgctaaaaggctctcaatctttatgttgcaaaattttggaagccaagtatctaaaagggaaggagtttctcagctgtagctacaaagactccgactcctaattctggaagaatgtcgtgaaagccaaatccattttacggaagggggcttgtaaagtggtaacaaatggaagggcgactagcatttggagggatccctggattcctcacctgaaaggtttta

SEQ ID NO: 390189 - DNA, 1162 bp, Cannabis indica
cccaagaattgctttcccttgccaaggattgactagattgctgatgccacctccgaacacgacttattatccttcatggaatcctactccaggtataactaaattaaaatacacatggaagatcaagaatacacaagtttctgaaatgataagggaatgtattgttacctggtcatgccatccagattaaagaatgcaagagcaacctacaaacggttagtaaattgcatgttcttaaatttattgggcagaaatatggaagtttatgtggatgatatgctggtcaaaatcgaaaaactgctaaaaaccatttagatgacctcaatgattgctttgatatggtgtaaaagtatgggatgaagcttaaaccgtaagaaatgcacatttagtatcaaaatcaagtaaaattctgggctttattattagccaacaaaggatagaagccaatcttgaaaagatacaagccccattagacatgtcatccccaaagaagcttaagaatgtgcaaagtctgactgggaaagtggcaactttgagttgtttcatttctaggttaaaagataaatgcgtccattcttcaacattttgagaaaaagtcaaaaattcaaatggatcgatgagtgttgttatcctgtttttttgctcattgacgtggcaatgggaccgagcgacacgtgtcttatatttttgatacctgggtagaggtaaatgtccctggcagcctgtacataatttgtcagtgtcgattacccgagtagagctgtagagaagacatctgacttggtagaagcttgttatgccgagcaacttataagagattaaaacttcagaatgatctcgttatgtccagacacgaagagaatccctacaatcgtgggattgagttagagaaatatggcaacttattctatgctggaatatcttttaccaggatctagatttactaacaagtatgtttttaacaacctaaatatgaatttctaaaacgataaaaataaacacataaaaggtacgagaaaccttacattggttgcagcgaaattaaatgactcattctgctcagatctctaacccttgtatcctttctgtcgcagagtatcaccaagatctcagcccgaaactccttctgttgtttggattcttcacagtcttacacactatg

SEQ ID NO: 390190 - DNA, 1635 bp, Cannabis indica
aaaagatcaaaaattgatcaaatgggtatttctctaattcatcaaaaaaatatcaaaatttgggatatacggtttgttagagagatatgtggttaagatatttttttaatttaaaaaaagattgtttaattttttgggtttaattattgggtttatttattaacgggagatgaaacctcgttaaatttaaaagaatattcttttatttttaaggaatattctgttagccgttagataggcacttttaatatataaagatatatcaaatatgaacacttctggttaataatactctaatttatcattacaaaatgaaagtaaatgtattaatttgaagttactactaattaggtactcacatatatatttttttaaggaagctagaaaaaaattgcctctaaaatataattatacacctaactagattatattttcaattataccattatatggaggttattcattggaatttcgatgaacctaatcgggctcctgggcttgggtacttgcacgggcctcattctttctgggccttcaaattttcttattttggtattgcattaaaagacattattttacaaatatacaaaaacaacgaaaaaaaattacaaaaatacggtggtataaaattttaaatatttttataattttatttacagaaaatacagtcttttaatatatttttatgttgtattcttgttaatttttttattatttgtatattactttttgttattgtttagatattattttcttgtaacttttatgtagttttcttgttgtttttgtgttatttttatataacaccgtaaaaatgtaaaaaaaatctttgaacgtaaaaatgtaaaaattacaaaaatagtgctttacgtaattattttttttatatatataatttttatttttatggttttaaagtgcaagtttgcaaaaatataaattttttattaaaaaagttattttatgagcaaaattttagaaaaaagttaaataaaaaaaatatgaaaaaaacagtataagatacttggtttctctcttatggtaactggttactcatctggttctcataagtgtacttattatccttacttgattttttcattattttttaattttttttctttaatttttctataaaatgaccttttgaaaaaaaaaaaagatcatattttttcatagaaaatataaaattcataaaatttgtaattttttttaagattatactatatactcttgttattggttaaattattttgtcacataagtatgcaagattttagtattgaaaataaatagtattattccaattaatacttgcacatattttattctatatttagtaaaaataattatagatatatacaaaatattcaccaaaacattacacccaataacatagcaatatttttaatatattggtgttgtttttactttcttttttcagtgaagcaagggaaacaaaatattattgaaaatataaaataaagggtaaatatcattttggaccctctgttttacaaaagttaccaattggatcttgtgttttgttaaatgacaaaatggaccctgtattttctaaaatactacaaataggaccctgaactgatttttatcaaaataaagtttaattataat

SEQ ID NO: 390191 - DNA, 922 bp, Cannabis indica
aagcaaaatgctttttgcaaggttattttttcagctactattctagttgtgatttggtgaactaaaattaatattattttttgggaacataaggtgattaatatagagattattattagggatgtcaagcatatatcttgtacataatagggtaagcaaatttactcccacaaaaatcaaaattatagtattaagtggttttaggctttgaaccatgtgtaaattgtttgactcctattttggggctttttgttggctatcttttgcttgcatttggcttatttggggattcttcacttgttttgtacagtattttgaaatcaatgaaatttattaccaaaaaaaagtaatcaaacaaaagtttattatgaatgcatatttatatatttataggatatttctcaatagtttattaataaataaatttaactataaatattatgagaatttaaaatgaaagaggctaagataaatgaagtttcatctcaaaattaattggcaataagaggagtagtctattccttatatatgataatttatttccacacattagtaatgtatgactaactccaatacaccttcctcacgtttaggcctagaaagtgtgggtataataaacgatatttaagagactataggaccgaacgtgacatttgaaagaatcacataaggccaaatatcgagaaatttataggtatacacacgttgaaaaatttgtgggtgtacacattggccgaaaagtcccaaatagaagttaaagaggaaacatcgatcgaaagttttttgtttgactcgtctttttggacactttgagctcacgacgaatcacaagctgctctgataccatgttaaaatttagaatgaaagtagctaagatgaatggagttccatttcaaaatcaattggcaatgagagaagtagc

SEQ ID NO: 390192 - DNA, 974 bp, Cannabis indica
accaaataatactagccagcatttttttaaaattaagtactcatattaaatcagatttaactatatgtataaatatatttttggtccccctaaaatttaattctggctccgcccctgatgttaggcgaatatcaggatttcgttttctcttctttctgatcatattggttcttttaactaaaatggcgattcttcgatcatccagttctccttctctgttgcctctctctgactgtggtagaactggaaaagatttatcaatgtgtgtccctggtggttccaaggcttcgagttcaggaaagagtaaaggtttagttgcaaagaaaaaacgagataaggagaagatagtcgagaaaggaaaggtttctgaagatgattgtgttgtcaaaagaaaagagttaggaaatgtactatgtggattctcattctgaggatgagttagatatggatatcttcaatgaagctaaggttagtttgtttcattttagctttttgattttcattttttagttactttttcatgttttagatttgttctccatgtggtttattcttttcctattttgttgatttttttataagttttttaatacgtgatcttatttggtatttgttgaccgaggttttcggcaactattaaaatataattataataaggagctgtaagaaagtgagatgaagactttttacgtggttggggcgttaatgagccttagtccacgagccactgctattaatggatgtatttaatacagattctacacttgagagaatgtttttctcttaaatacagagaatgttcttggtgagttttttctcttcttgctcttttgcaaccaagattctcgaccccattaaatgagctttgagggggtatttatagtgttttggtggggcaatccctagaattattcttacacatgtgtctgtaagtatccataaagttgggcatttccgatgaatataccatgggt

SEQ ID NO: 390193 - DNA, 978 bp, Cannabis indica
tttttttttttttttgaaggatggtgtaggtagtttttaattttgggctattagtttttttagagttgaggtaatgggccttcaaatttgaggcttattgttggatttttgtgtcccttttatttcattgaatttcaatacctctatatgatttgttcagtaaaaattttgaggaaattacactctataccctttttatattgtcctcctttatttttaccttcttttttaaaatctatcatttttacctctttttttaaacattgtaccaattttgcccctgtcacttcaagatactctcaatgtgattctcttatgtaagaatattttgggtacaatacatataaaaagaggtatgtttcaaataaatataaaattataggtaaatttgattaattgatgaataaaagaggcattttcaacttaccccaaaaatttttggtattaagtgattttttatttggataagaatagaaggtcctttctttgaaatttaagtggataattttgagattatattgtgtgtgtgtgtgtgtgtatagtgggttgtgatagttgtattatataatgtatgtattgtaaaattatttggcagtgacatatatgattggtattattgaaaaataactatatatttttgttgaagcaaaggacaaccaaggccttgtagttggcacattctcttatagctaaaattttcaatgtgagtacaagaaagtaatggcctttgtcaatcaagtcttataatgcaaatagaatttgactttatttattatttaaattttagcttttatcacataatttattataattaactcgtgcaatattttttattttagcacggtagaaaaatctcttatataaaggatgagaataatgaagtgctcgaagaacaaacacaatacatcattaaattgatgaagtctagataagtctataagtttagaactttaagttattctttctaatataaagatt

SEQ ID NO: 390194 - DNA, 1202 bp, Cannabis indica
taatatatattatatgtatatatctgatatctccttcctaattaataataatgtactttaataatattacatgatatttaggtagctcctatgtatttatatataaaacattgattaatatttctataaatttcttttatttatctttgaaaaatcccccgagtccaatattaatgcatgcatggttgcgtggcaagcataatacacacgagatcaaatttacaagggtatatatgtttatataatctcctaaatacatgatatatatatgtgtcctaattggttgaacttgatatcatcgactgatatttatatagtacagtcactaatcgtatataatttgtcacccaaagtttcggatcaagatctccggttaaaaattggtatctcatattatgttaaactaattaaaatttaatgcatcaattaatttttatttataaaaaattaaatctctaataaaatcaataaaaatagttaatacaaaaatatgctgacaaagtgacatttcttgtagtgatataggtttaacatagtatatgacactaatttttaacagaagattttgattctaaagtttcatataccatcatattacagcaaaaaaaatatatatatatatatatatcatatatcccatcataaaacactacaaaaaattttactttagtcacaacaaaacacgtgaaacaaaaagtaaaaaaattgtaactaattataaattattattcttatggtgtgactaaaaggtacgtggctaaaagtattagtaacaaaaattataatttgttgtgactaaatgtatttttaatcacaatacttgttgtgattaaaactaatacaatagctcatgtaatagctaagaatgctctgtacatatggaaatagctccagtttcaggatcgagggttttcccgtgactctctcttatatgtaattggagatctatctctctctatttgaagtgtttatgtaattaatgtgatttcctttcaaaaaaatattattattattatttttaaaataatctacttgaattgtggaaataattataaaattaccctatttattgcattgtgttattttttaagataatttatggatgtaaccacgagccacgagtcacgcatataattacaatatatacatatgagagcctatttatgtatcgtttgaaacgctgtattaggtcgtattgtatt

SEQ ID NO: 390195 - DNA, 1717 bp, Cannabis indica
gggataatggttgtaagatatcagtcagctatgtaattaactacctggttatgtaattataaatagaggcaagtcagaatgaaaaagggacaaaaaaattcataagagaaaagatcctagaactctatcagaaatttaacaagattgactcgtggactatgcagaattataattttaaaaccacgtaaaaaacctttgtgatcatacaaatctagttaacgaaaatctgcgttaacattttggtgctttcattgagagcctttgtgtaaaagctccgaaaaaaccctccttacatacaaagaacaatcttcttcatggctgacaacacagagaacgttgacacgccacatgaagaaactcatcaccgtcctggaaaagagccaatgggctccagaaggtcttccaactcacagtctaaacggaccactcgctccaggaagactcaacctgacggtggccctagcactcagaccactcgctccagaggacccaacctgagggtggccccagcactcaaaccactcgttctaggttgacccaaccagagtttggttccagcacacgaacgatacgttcgagcagggctcaacatggaaatggccagaatcctagaatgagagatgaaggacccaatcttgggggtgctcagcccatggatgagggtgcttacgaccctatgagatacatacctatcgtcgaaatggaaaactaccatcttaggcaccgcatggaggagacaaatcagtggaatgctgaattagcgcgtgatacagctgccgctaggacggaacaggggaataacactcaaaatcaacctgaccctggagtgagaagaccacgaggtagacctcgtggctcacgaaccaggacacaggaaactgctcaagaagaacaacttggggaaaatgaggttccccctgaaaatccaaatgatcagcccgaaccatctcatagaaatgagaatgggaggcaaccaaaaactaacaaacaggaaattcctcgtggaaacaaggaagaccttgggacacaacctggggaacgtaggtcaccagcacaaaatccccaacgttcttcttgaacccatatggagagggctcatacaaaccctagtaagggaaacgcaacgaaccatgcccagggggaagaacagggtgcgaagaagcaagtgtgacctcagggtgctcaaggacccatagtcaacaaacccgaggaggagagagtgctcgtcgcgctaatgaccaagaaagcacgagaaccagtaaatttgcaagtcactcaaggacgaggtccatgagtaagacaaggtccgtaagtaggacacaatctgtgagtagaatgaggtctgctagtaattattcctaaccagatctgcgagagcacttgaatacctgatcttcgccaacaactcggcccaaagtaagagcattctatccaattgcgaatagacaagttggaggataagtttaggaggtatcaagtaggggaattaggaaaaaaaatctagttacaacttagacgaggaactcaagccgtaccatctagatatcataattactccttttccctagggatttaaaaaccctcacgtctcatcgtatgatgggaccaccgatccagtcttgcatttgaataacttcaacacaataatgcgacccagtaatgttataaacaatttatgttgtattttgtttcccaccttgctagttggagcagcaag

SEQ ID NO: 390196 - DNA, 832 bp, Cannabis indica
ttttattttattttaaataaaaagagaaatgtttttgcttcttaacttgtacttacaattaatagtataccaattttaaccattattatattcttattaacttcgtttgatttacatattaatggatatttctataaggctaattagtcatttttttcccctgaactttgacatgtattaaattgtgttccctgaatttttttggctgttaaaaattctctcaaattattgagattgttggagtgtaattatgtatttcgagtcatgtggtattacctattacgtgagtcccttatttgtttttatcataatgacatccttaactagttcgatattataaggctaatcttaataccaagaaagatttagaggagagattgaaaaatgaaaactcacacttaaacttttcattttatttttatttttctcgagggacacaatattacaacatttattaaactagttcaacaaattaaattaaccaataataataataataataataataatataatacaaaagagacttaaaaaattaagaacaaaaaaaaaacaacaacaaaactgactaaaaaaagagccatagatcaccctatctttacaactctctatacaaaacaacaaaaccatttcacaaaacacactctttaataatcatattgatataacacaagactctcataaataaatgttcatcatatccataaccaaattatccatcatactcactgccgcagcctcagaacatcgcttattcattttgcttacactcgaagcaacaacatcatcagcaacatcaacattggtgacgggtttgaacttgttgagaggac

SEQ ID NO: 390197 - DNA, 1355 bp, Cannabis indica
ttataaaataacagtggaacacataaattagaattggtgggtgtttctaatcaaaaaaggtatggtcttttgacctgtgtttttctctgtttgctgtcaaactgttaaactgtaaagtggtcttttggtttctagtggttattttgttgctttgatctgaacatggcggataatgagcggatggatatggagaatgaaagtgattttatcactttaacaagtggagaggatgatgatggaggcctcttatacgataccaatgatagggaattattggactttgatgaccgatggtgtgttgtcggacgtttccttacaaaaagatctctggatttcatggctatgcaacacaagatggcgtcgttgtcgagacccggcagaggtatgtttgtgaaagaattggatgagaatttatacttatttcaattttatcatcagatagatgtggatagagttgtggagggtagcccctggacgttcgacagggttcccctgattttctcaaaactgaaagagggtgagaacccacgggcagtggttcttaacaaactggacttctggattcagcttcatggtttatcaactggttttatgtcggcaaaagtggtcaaggatgtcggaaactacattggcactttcgtggaagcggataagaataacttcatgggaatatggcgtgactaccttagggtacatgtttctgttcgtattgatttacctttaaaaagaagaatgaaattagaaaagaaaggaggtgagatatgttatgccaattttaagtatgaggatctcccaacattttgttttatctgtggaatccttggacattcagaaaagttttgttctaagttattcgataccccacttcatctgataaggaaaccatataacctggaattaaaagctatgccaagaaggagacaacatacgattggtaccaaatggcttcggcaaggtttaatggtgcgaggggatagctccggtgacggattaggaggcagttcgactgtaagagaaacggtgcctgggagttctaatggtggcgacaatcaagggatgtatcaatctgctcctcgatcagggggattggatggaggaattagaggagttgacttgggcatcaatgctaataactccctggttgattctttgggatttccaactgaatatggtataaaagataataacatgagggaggacataaatgatgatattgatggtgatttactggtccttgaatcaaaaaggaaaagagttgctgaatccaaatcaaatgggccgaatgggggtactggtgaaattcttgctaattcagtagggacaaaaaacttagttggggcgggttctgtgtcaca

SEQ ID NO: 390198 - DNA, 540 bp, Cannabis indica
tgtaaaaatgaaaaagcctctaactttttttgaatttgattgtagatttaatttctacgttctctaacttcatcttacacataagttaagagttcatgcacttaaagtagatgacgaagttaaaatatatatattttttaatatttttttatataatatataaatttgattattttcttcatagtttagagaaaaatcttaatatatattttattagtggaagataaaaaaagtaatatttgttataataagttgtagcatgataattgcatccctcgttaaaattggaaggatgtatgaaggactataattgcttggaattcaaataaacaaatagtcaaatactcattcgatgataaggcatgttttagcaaatgcctttagtatccccacaaaaaatatacatctgcctagttttgcttttgtatatgcagcatcaactttggtaatctaattaggaggcgtttggttgggaggaataaaaatataggaataggaataggaatgagaataggaatgaaatagaataaaatttaaaat

SEQ ID NO: 390199 - DNA, 1445 bp, Cannabis indica
gaaatgccgttagatagacacttttaatatataaagatatataatatattaaacgagaattaaatttcttcccgacatatacacacggccatgtcaccgagtttcttactttaaagcatttatctttcttgtaagctgtactcatcattttttatatatttattataaattataaatgtatttgtatacgtataagtatatattatacgttttgtgggaaggctaagaagatcgaagtatatatatatatgtattgaggcccatatatcatgtgggagtgtatgggggtccatgtacatctagactaatatagtttatcttctaggactttgattttcatatataaatataaatattctattttataatatatgtgtgttccttcaaaaaaaataaataaataaataaatatgtgtgtgatgataggtaacacctattatgttatgtctccatcaaacattttggaatcatttcaggactttcttctgtatttttcttaaaatatttgctgatagctctgcgaagtagtgtttgggcatggaaaagaaaacttttcttttgaagatctcaagtgaaattttttcccttttcattggttttacatgtagtacgtaaatgcctgtacattattaatttattcagaaaatgatcataataaatcatgatcaaatgataggtaacatgcattttcatccatcaatatagttttcacgttatgatatatataaaatttacttcaatataactagaagtagcttcttttgctgtgtaaagaacaagtatatatatatcttctagataacaacatcaattgatttaatcaataaaacatatatatgtgtgtgttatttaatgggacataaataaaaacgtacgtcaatcactagctatatatatatttcaatatttgtcactttccttataaaagagatgtccttagcttttttgtacataatggacaaattgtcaaattatatatcgtacactactcaaaactattaaaatcctagctgtatagctatagcccacccctccacttcttcaaaattacgaaacaaaaatatcatgaaaaaggagaagaagaaaaaaattgcaacttgatgattcacacttaatgaaaccatcgtttttttttttctctttcttttcaatggaatgaaatgatcactttttattatagtttttatattattacttttttttttccttttctttttttgcatgcatgcatatggatgagacggtataataaaggatagctgggtcactactattctttccttagaatacatgctcagagagattgtaaactgcaactaaaatccaaaagaaaaaagaacattaataataataggagggagggagaacaaaaagtgataaataacaataccaaaattgggttgcttttgttatgtgtgtatatatgtatatatattatatgtatt

SEQ ID NO: 390200 - DNA, 1439 bp, Cannabis indica
agacaacactataatcattaacaaattgatatgttctggactaaatagaattcatgcattatgtacatataatcatgaaataaatcatgtgaaccatgcaacataaaatattatttctgaactttattaataagtaaatctgattatattgaaatgagttttatttagggcataaaacccaacagatgtagcaacccgtttgaagttagcatttagttgagagaggcgccacacttctttggctcttgtgcagaaaaagagtgcatgattgatggtttctttctggattttgcataatggacaaaaaggagtttcagcaatgtgttttcacttcagttcagcagctactggtaaggcattatgaaacactttccaaacaaagatgcgaagcttcgtaggtaactttaatttccagaatttgtccaccaattttcaaattattggtactgcttgcatttgaagatcagcaacgaaagcagcaaagtggtatcctgacttcaccgtgtaattccctgagttgttaccattccaaatgagaacatcatccgtaggaaaaatgctgagaggaatggagagtattcgatcaatatcagcctatccaaagttagtagtaatagccgtcgaatcccaacttctatgttgatcaattagatcagcaacctggagagagctatcagctcctatgaaactgaatggtgtgaaatcagtgtgtccagggagccatgaatccattttgcaattgattcgtgaaccagtacccactctccatcgtaggcattttactagaagttcctttcaccaaacaatgcttcgccatgttaaagaaggacaggcacccaaaccagctgtaagaaaatagccatttaaaaaatatatgtgatgcaaaatacgacttaggagagaattaggtgattccaataaaagccaggcttgtttagctaggagagcttggttgaaatgtatgaaattccgaaagcctaaacccccatgaatcttagccttacaaagagaattctaatttttccaatgacttgcattgccagatgatgtcgatccccatcagaaattagccatcatgctctcgatttgattacacaacgtaatgtatatattttttattattattattatttgattgtgaaggaacaaacacattataaatcatctaaataaattaattacaaagaaaactcaaagtttaaaggattaattacacgaaaagacctaaattacattttatttacagatatatgatcacttattaaatttgagcatataccgaataccatttatttggtattcataatcggtatacttgatacattcaaagcaatatgttttctttttaatcactgcctctctccttttttttaacatttgttgtttgttggtgttggtgttctattttttttttttttatttttctttaacttttttta

SEQ ID NO: 390201 - DNA, 719 bp, Cannabis indica
attaaaaaaataaccaaacgcaccctaaattaagattaaagtacaagtttaaaaaacacaatataaattttaaaatttcctaagcaatatacatagttaaaaaaaattacccatagtttttcttaatttttcatatcacaaaataaaattttccaattcaaatccataaaaaataataatacaagttgagtcgatttcatatagagctgaactcgttgatgtgtccgaagatgaatcggagaatcatgatcacattttcttcaaatatattatgtctcagataggcatggacttgatctttgcttagatgggattcaaaggttggcccttagatctgttggctggactgggtggattgcttcgaaaggtcaaaactagattcagaggttcaatatcccaattctggcagcattgatttataacctttggctcgaaaatatgtgtattttaatggatattctagattagtttttggtgttgtaaatgatgtaaagaatattataaagaatagattacaaatagttaacaacaataacaaagcaagagagattatttgttgaggttgcaatgtatttagaaataagcaagcataactgacggaattttcttagctttccaaaaccccgagcattccagcctataacattcatggcgaatggcgggcttgtggagcaattaggaccggcccaaactttaggcagcttgggccattgcacaag

SEQ ID NO: 390202 - DNA, 1011 bp, Cannabis indica
aaggtcaaacaaataatttaagagatattagagattgataccccatgcaaaatagatctttatacaagaaaacaaaacacacaacggctctccctcccctcctttcaactcctatacaaacctccttttatgttaacttgaaattataaaccagccttgatgtttgactttaatgcttttctttctgtaaggcaggttttgtcttttattgaagaaggcatgaattccgggatgtaaaatcattcctcattttctagtagtatatgcacatggacgggaatgaaaactgtattattactttatataaatatattgtaaatgcagcctaaagatgcttctcattgcaggtagacttgcttagcatgttgcactctccatacttagtggagttgcttggctattatgctgaccaacatcataggctccttatatttggatatatgcccagtggaactctccaccactatcttcacaatgaacatcagccgttggattggggaactcgattgatgatagcccttgattgtgccatggcccttgagactcttcatgagcatgctatcccaccaatcatccatcgtgatttcaattgtagcaatgttctcatggatactaatttcagggcaaaagtatcagattttggattggccaaaatggggtcggacaagatcaacagtcagatttcaacgcgtgtgttggggaccacaggatacctggcaccagagtgagagcctactgtctttctcattagtatcattataatataaagaatgcaatgttctaaaactaaaaccatgcacatgggttggcataggtcgctctgttagataaattaacaattaacccaagatctatttgtatataacatagaacacaataataaaatataataattaggtatgtgtacctgattgatccatagcaattatctctgattgatccacagcagttactccaatttgatagtgcaatactatcaactaagtcttcctccctagatctctaaatcag

SEQ ID NO: 390203 - DNA, 1720 bp, Cannabis indica
ttttaaggaagaaaaagaaaaagctctaatatcacctttcttaataacaaaatttctactaacccttaattcaaattaacattttaataacgttgtgaagagaatagtgcctcaatccccaaatgtaaatattgaaaaaattactttttaaaaaaactaaatttcaaagcaattgttcattaatattatcacagaacttccaagaagaaaaaaaacagccttgtgttgtgagcacagtatttctttaattaattccctgcaaaagtaaacaccaatggtccccagtactgaactagctccttctctattattggtgagaaacaaatcaagatgcatcgactagttttctttcttttttatctttttctttttcaaataaataaaagctatcaagaagtgtttccggggatagtgtacattgctattaagtactagtaacacttagaagtagtattttgcgattagtattctataaaggacattcttgtgaagtgtaatattttattggtgtaatttaatatcgaattccatttattttattttattaaaaattataaaaaaaaccaagtgtcccatagcaatgtttttctataattattacattcaattatataagaacccgatacaatataattataaagataatcaactgtttaaacattatttttattttaaattattctgaatttctagaaaatttacaatcttaaatgaaacacaaatgagttacgtcggtatacccattattcctttattccccaaaaattattcctttaatttgataaaaataacataaacaaattcaccaaatagtgataccaactttctccaattttttcatagcattaatttttttctcatttaattaattaaaaaaatcaaaatcaaacaaacaagatccaaataaaaaaattcccaattctactttaattttttttcccactctattctcagattcttaatctttctccaaccaaccaaacagaggaatcaagctccatcaacagaatcaatcaaatcaaatcaaatcaaataaaaagaaaagaaaaagcgaattaattaccgagaataagcatggcatcaggaagagcaccgagtatgggaagaaacaatccaccaatgagaccagggccaaggatctcaagcaaaagctcactgccattagagaggtatgtagcggaagtgaacatgagaaagccatagacgagtatgagaaacatattacccaaagcagtggtggtacacggtaagaaaccgtatgactgttcacatgtggattcaacttcctccgccgttgaaaacgacgtcgttaaagtattaagacggataatattggattcatcatcatcatcagatactaccggattaagaaccgaggattggtcagtgattaaacgggtacagtgtactcgaccacagaggatcaaaacaagaaaagaaaagaacaagaacaagaagagtttgttaacaaacatgattattgggattattattacatgaaattgagattgagagattggttatgggttcttgttcttctggttctttatagagagagaaagcgaggagagagagaggtaatgagcgtttgagacgtgttggtgtgttgattgggatttttgggtatggtatggtagctaagctacacagtcttggatctgacccttttattatttgttattattatttttttaataaagttgatttttttaaaaaaaaa

SEQ ID NO: 390204 - DNA, 1105 bp, Cannabis indica
agattaaattttaattaattttgttatattttatcaatttgattttagttttccatttttataagtgtaatctcaatgttgtgtatttttgtaaaaagattaaatgtacattttggacttattattcaaattgagagaaatgatgttaaagtccataaactcactaaagcccaagtattctacacttaattcactaatggatgttatatttattgggccttactttactagttgaaaagtcaaaaaaaaaaagggctatttacaaaaatatgggaaaataaagataagttttgatatatatggcataaaaacttaattacactaaatatggcatttttttaaaaaaacttacaaatatgggaaaaagtcttgaggaatgccataaaaaactttaaatttgtgtttctttttatttattttttttttttaaaaaaataaaatactaaaataaataaaaaatgaatctcaactatagatattatttttttttactagaaattaaacttgtttttttttatttatttatttaaactataactttcttaaaatgatattgttagtgcttaataataatactattctaagattcaaactagatggtacaattatgtaacatatcagcagagcataaagtcccactaatcatttcatggggaaaccaagaaaaacatcccataatatttatatatatggtatcatataccaaaaaaaaaaaagaaagagagagaggaagaatgattgcttttttttttttggttgatagaagaatgattactaattagggtatgagatatataggactcacatgaatatatattatttgggcactgatagtaaaccaacctaaccctataccaactattctttcaccttcacctaattcatttggtgtaccttatcattatatactatccttaataactttacccaggtgcccgttccttaataggaatgttaactggactttacttatatataaaaaataaataaagaaataattatcatgtaattttcaataaaaataatttttcaccagaaaaataaaaaagaaattatctcatatactatttttattaattttttttcttttaaatttacggtttaa

SEQ ID NO: 390205 - DNA, 713 bp, Cannabis indica
gaaaattgtgcatggaattctgacaagaaggcattctgtgagttaaaccttcctagaggcagtttgaaataccattggtgggcagcctctacgagcgtggggagaaaaattatgcaccgtacatcaccttgtaccccctacaagtccatttacatctcaaaatacttcaggtgtgataagggatcttctttccctgtatacatcttctaggttggcattttgaactttgggggtagctcaagaccttcactttgaggggtgaaaggtgattctcatgcccggtcgagttcgatatcagtgagttttaggccgatcaagccttttaccatgattttaagttgttcgatttgtgcttgcacaagtggatgaacttgttcggcttgttgaccagcttgtgtcacattgggatcccttagaactggatcttaggtgcagattcatggttggacagttggcgaaacgtattgtttatccaagccccttctgtgatttagatcagttctgagatcatgtgcaatacccaacctatcaaacactaaggtacgaggtggccttggtgtctgacttgtttggctgataggttggcctgaaacttctgtagtagcgaagttattggtatgtgtaactgtttagttttatgccctaaataaaactcatttcatataatcagatttacttattaataaaaatcagaaataacattttatgttgca

SEQ ID NO: 390206 - DNA, 1188 bp, Cannabis indica
gagaacgtttcactcccctcaaccccgcgagtaggtaacttggaatcttcacccatttccacgacctctgcgtctaggacaactcgtggataaatgaagttgccttgagtagataccgtgaattcacttttccacacctctagagtaatcgatggtccttctaattcttggacgacgtggttaatctcactggtagatagtgaaccttctcgagctcctcccgcacgaacctcgtcttccaatagcaatgtggaataaaactttcatttttttgagattcatcggccaaagccttatctccagaatagtacccttggttgtccgataaatcgctcatctgaaagataaaagatctttttagcatggtgtaagtgcgatttaaataaagaagtgttctcacccaaacaataaatttcaagtgcgacaaaactgactattatctcaaatagtggctgggagttcccagtatcttaaggttcatgcagctatgggacaccccccaccacttcgagactcggttggttctaatcaaaaacttgaatgcatatgcataaaaataaaacgaccaactccaaagaagaacggagtgttgggggtttcacagtgacgtaaggttacccaaaaaattaagcattaaatctctacaaaactcccaatcactaccaaattttgacttgaaggcgaataaatctaaatatgcgagtatgcacaaagttctatcataaaaatacgaatattcaaagtttttcataaaacccgcgagtattcaaattttaggcaattattttctagagaaaatgctttattttgcctaaattttttattctatcaataagctctattaatctcatgcaccatattctatccctaaaaacccggtaggcgtacgaacattcagaaaagcaaattcatagaagctacgagaaagaaattactaaccttctgtgtaaaaatcctttctcttgaattcgtgatcactctacaaagatccctcaaccttcgagaaatcatctcaggagaatggggattcgaagcttcaagaaatttttgaagtttgaaattctgaagaaatgagagagtgaaattcaaaaatgagagggaaaataaaatgagaatcaatttgtatttgaggaggttaaatactatactccttatttattgagatggagactgttggaaattatttta

SEQ ID NO: 390207 - DNA, 984 bp, Cannabis indica
tgtaccactctttatgtaagcacttgaagctactagcgttgttttaccgatgaccttattccattctgtaagggtactattcaagcagtaaaacatccaaaaaatgccttaaatgacttcagtaaggcttcaagtttagagattaacaaagctaactctcacatatatatggcaggggtgtctaatgatgttaaaagggctattttgcaagaaattcaaattgaagaaggtagcttccctctaaagtaccttggagttcctctaaggcctactaagtggagaatgaaagattgtgacatcatcttaaggaagatcaaacttaaactccaaacttgggctacaaaacatctttcttttgctggtagggtctaacttatccattcggttcttttggggttcgggaactatgagcatatctgtccttcctcagagtattgtcaaggaaattgaaaagctttgccgtggatttctgtggggagtcaaaaggaacataagttaagttcaagttgcctcttggggaaaagtctgcctccctaaagagtttggtggtcttagttttagagaagggcctttatggaacaaaacaactttggccaagtacatatgggctattatggagaatcatgagagcttatgggtcaaatggatcaatgctatacaccttataggtaacgaattttagcactacacattaaagcaaaatacaagttggtattggagaaaactttgcaacttaaggcatattttcagtgaagaaaacataaaggaagctagctacaagggaaaaaatttaaggctgtcaagctttataacagcaaaataaataccctagtagtggagtatttaaagaatgtttggaataggaagagcctccctaaacatcggtttattatttggtaagccttgaactcttaactacttacccgagatatccttctgaggttcggtatctgttgctaaatttataatcactacgcaagtata

SEQ ID NO: 390208 - DNA, 2382 bp, Cannabis indica
gtataataatatatatttatgtctcccattcccatcaacaactactgaactacataaaaattaaataataactcaaccacgtataatttagttcgtgataatgttttccctcttgagtaggaaaatattaatttaattgtacccaacaaaagtgtacatgttttcttcttaaaaaacagagcctgaaatataataaggcagagagaaatataaatatataaagaaagagagaaaaaaaaatagatggatcagaatttataatatactattcatgactaagttttaatttaagtatgtgaataaattaatggttcttgtatttatatttttgaattgagttttcaacgtgccatacacttggcaaacaactatcaagacgacaacataattgaaggaaacgacagtaagttcaaaacaacatattcatgaaacgacaacataatgggttagacgacaattaacaacaaatcttatctaactatgttcaacaactaatgataacggacaccgacaatatttttacaaaccacattattccgaacgacctcaaattgctttactcatctagcaagaaaagaaaaggaaaaaaaaccagcaacattatatcttagaagagttaaaaaaaacaaaatggcaatagtactatcaaacacagtattgaaaattacacatttgttgtgtttttatataatttgtgaattttttttttctttcaagaaagttatttaataagaacaataaaaaaaaaaataaatagtataagacagttggttgctcttaaaaaagtaatcgttacccataataacttgtgactctaaccacgtgttgtgtggtgtagtggtaggaaagttttaccgacattcttctttgtttgggtcaagggttcgaatcccaccatagtccctcattgtgagagattataactggccatttgggaggctagcttgttgtgaacgtatcatctttaataggatgaaaactctcatgatgtgcataccgatgacccaattaaaacaagatgaggtataaggcccttataactggcatgtagtcctcgagattgtcaaaattactgaaagagtgggtaagagtgggtaaaagatctgcatcatatgatctccttttgtttataaatttattaaaaaaaattggttactctaaattatgtttatcgtgttcttaaactttattttttactttttgaatttttttcatgaaatatttatgtaactttgccaaaaaaaaaaactataaaaatgaaattttcccattgaaatagcataattaaggctcgttgaaccaaccaatgcgaaaaaaatcataccgatttaataatcataagaattaaccaaaacgtatgcagcattcagcccattaaaagaatgaaaaattacatgttttaccattctttaaaagaccgttttactatttacataaatatatggtggtttaagaataaatttgtattagtttagatttgaataggtagatacaaggaataagtgtttaatggttgttatggtaaagtagtgaaatattggtgttattgagtagctaatggtttagtatatgagaatgacttggcttagaagagaagattgtatgagaaggtagtaagcgttattgatagtttggatgttggagaatagttgataagagtagttgtataaatggaagagtgagtagtatctttggcagtgaaagacttgatttatttttcaagcttggttactatatggaatcttgatggggtatttataattgtatgcccctacaattgtggctagaataactcatctagattgttctagttccataaggttcacaattactctagatttttcttaaataactacttctaaactcttctaaatattttaggcttctctttatttattttttctacaaatgtgtagaaatttctagagtatttgctattgtagaaatgtgtagcaatttttaatacttctccttagtacacatttgggtaactctgatcatgtcgcaaaagatctttatcgcctcttcttgtaatgctcccatatctttcagaattcttatgagccatatagcttggcttgtattcattgctgttgcaatatattttgcttcagctgaggattgcgcaactgttgcttgtttctttgatgcctaagaaaatattcttgatttaagtgtgaaggcatatcctgatatacttttcatgtcgtctatggatcttgcccaatcactatctatgtagccaatcagctttgactcattcgtgaattcgtaccatattctataaagttttgttcctcgcaagtatctgaggatttgcttggctactgtaacaccctaactaccataggcgtattatgtgatttttaaacgtactgtgca

SEQ ID NO: 390209 - DNA, 1382 bp, Cannabis indica
aaaaagaaatgtactcttattacaagtagacattagtaatatttaacaaagcattgataatctttatcaattcaccaataataatattgatacgtaaaataatactagataccattagtatttttcaatatttttttatctaataaaaatatttattaaactgtccatctcacagaaatcgctcgcattgtgtaaaaaatacgatttaaaatcttttgcggtgcgatttctatttgtatttttgccaaactgcacaatgtagtgcaatctacaaatttgaatttaataattgcagttaaaattgcaccgcattgtatattacaaagttacctatttttataatatgatttttattttttcataaataaatatatataatatatgcgtatattatattatttttagagacgatttaataaaataacttgatgaatagtatatttgttataatgttcaagttttaataagattttttttggtattgttaaaattttattactttaatttttaaattttcatcataatatttgataatgatgatagtataaatcgctcaaatagcacaatactataccacatatttttgcaatgtgatttttgtgattttaaaatcttgcagtgcagttacaatttaaaaaattacaaaaatcgcatatatgatttggtttgaaagaaatgttataacctgcactatctgcaccgcgaatactcctactatctaatattaccatgaaatatatttgtttatttacttttaccatgagttgatgctttgcctattagttaataatttttttaataataattaaattaaaatatatgagatttgatatttaattacgctaattaataataatttatagtggtgtgataaatcactagtaccttcataaataaaattacaagattaatatattataaaatttaacgcacaaattatatcaatatttgactattatgtttagtatgaggtttttattttcttttatttgagtactagaaatttaagactcaaaatagaattatccattagtgtattcttaactctattctaaaatatagcttctaaacattgtatcaaatacttcctcaaagtacataaaagagattgataaaatttgtaggtcagacttacaaacacatattatttatattaggtcagaggggtgtacatcaaaccgctcaaaccgctcaaaccgcccgcaccgcaaaaaaaaatgcggtttgtaaattcttcgcggtgcgcttagccggtttgaactttttccaaaaccgtcgcggtagcggtgcggttttgcggtttggaattattaaaccgcgattcaaaccgcaccgcaccgcatgttttaaaattttaatttttatatttatttaattaagcc

SEQ ID NO: 390210 - DNA, 1139 bp, Cannabis indica
ttcattgagagcgtggatatcgtctctgatcaaacggaatggtttacacagaagaaatcttgtcgcaccatctgcatctttgggtctccctcaagacccacagattgtaagtccaaatactcaagttccaatcacaactggaatcacgatgaacgctgcaaagatggtgaataatgtcacaataacaggcaccacgagtttggcctcctcttggcagggctatagtgaccttccacatcttgtagcccttgtccagccagatctggtaggccttatcctaccaggtcttgcaggccttgacctgcaagatcttgcacaccttgggtggctagatcctacataccttgggcggccaggcctcccctgtaggtctatgggtagccaggattacttggcaggactctatagtggccaaactaatgcaggcatcctggtggatccaagtggcacgcccatgcctccaagaatagacccaccattggtgcccttgagtgaaggaagaatccctaaagggcaccccacaagaacaacaaccgggtttctcccccgatactatccaggagaaactagactaagaatcggtgagcctcacctaggcttaggaaaagaccttgagttgggcagactcagggaagttgtaggtcgtgcatgcctaattaaagaaccacgcgctactgactgcgatgtatttgctcagcaaagacgtgaattccttgaagaaccacgcgttgctgactttgatgtattggcttaggagagatggaattccttgaagaaccatgcgctgctgattatgatgtactcgctcagcagagacgcgaattcctgagatggatggatgaccaagaggacatccttcaatctcaccaagcagagttagatctccataacaaagaggctagcgatataataagatagttcaaccagagaaccgatagaaaaggcaaggatctcatcagagatccacttaaaggaagacttgttgatagatcaaggagtgtctattgatatgttgatcaacctagtcctcaagatctaagcagatctctctgctagaggaggcagaccttactcaaaggtcaaacggcaaaaaaatctaaaatctcgcaaaccagtggcatggggggccagccagggat

SEQ ID NO: 390211 - DNA, 1020 bp, Cannabis indica
gtggggctccatgtaaggtgtgccttctaacacattagagaaaagtacactagttggtggagagtggacatattggagatcttatttggtgccttgtgttgaaagtctttctagcaatgaaggtcaggtggcgtgttttatttggtgatagcagcggtgcaagatggaagatcatttgaggaaaggctatgtgctcctatgtttgaggggatgattgttgggaatgtaaacaaagttccacattggctagaaatgggaaggatcatggatatataaggatatggacatatctctattcatatgaggcattttggaaacgtgcccaagaacaaaaccttgagggtttagcctcaaagcggacaatatcatacctaaagtggaggtagatggtgtccggcatccttcacaccaattttagtgcctttcaagcaaggaaaatcaatttcatggaaaattacagctctttttattatgattttgaaactcccttgatctcttacccaaagcctatagcctttgacacatttacggtaaacaaggaagacacattttatggccctagctctaacttccatatactttagtgtgcatatgctccaacaccaaacacactcttaagtgtaacaaatctgatggtcttccagaccatctttcgtttggggtcttaaggtttcactacaagaaaactatgtatcaatgacgccattatcaatgacgacaaaaggagagctccatggctagctcattttacacattcaaaaaagtccctacaaggttaaagaatctctctctatttcctctctctagaaatctgagctttccttagtcaattctcttgtaattctcgtaaaaaaataaaaactcaaagtagacgtagcttcataatcgtcgcgacacgaggagtgaactactataaatcttgtgtatctctcttattaattacttaactcatatctcatatcgtcaatctagcaagcaggtgttggtcaattttctatggtggcgtttggtaatattttt

SEQ ID NO: 390212 - DNA, 568 bp, Cannabis indica
ccgagaccaggaagaatgaagtgctatgtggactttgcttctgataatgaagtaggtgttgttgctggtgttatttatgattgggagggctctgtcaagagctttggtgctaagaaggtgactgcttcctcttcttttcaaggggagctggaggcgcttgcttttggcgtggaaatggctcggtcgtttgcagccgtgggggtggactttcattcggacaattggcaactggtgaactctctgtccacaggtcgatgtctttggtggaatgcaagcttttctttcaataaaattcttagtgagttagaaggttttaactgttcggtttcttggatttctcgcggttttaatgcttctgcccatgctctcgctaggtggggtttgttccacaattgtaatggtgttcttcgtttctgggaggtgagtccccatgtgctcaccaaactgttatttttggcttaatgaagttgtttttctcagcaaaaagaaaatgaaaactcaaaagtacaagaatttcaatgtgtactatattaaagaagcaaaataagaggaagttgctaaatcttca

SEQ ID NO: 390213 - DNA, 1328 bp, Cannabis indica
gacatagtaaaaaacacgaaaaaaagatagagaaataaagataaaatagacaactagacaaattgcatcactgactacggttttttacaattttttacaaaaattggtaatactacaaccaaaattcgaaaaagaaaacccaaaaaagaaaaacgaacaacacatcatagtaattaatgataattatacatagatagtaatattatatatgttctaataccttgttttgtcaatttttgtaaactaccttttaatttgttgaaaaagagaaaacttaattgttccaatatatctttgctttttcatgttctacctttggattaaaacaattgattaacttttcttattatacgttgggctaatgggtctgaagagcaattatatctcaataaccaaatcatgttgtaaccactaataatttttctctttaatttaattattctctttttttcgtttatctgcaatgatttttctcttttgtcccaccccctttcttttcaatttatcttttatgcatgctttgtggatttgggatttagacactaagaacaacgaattaaattccttattattattatagttggtccaactcaagggaataagatcaaaaaattagaacaaaatcatattacagtgagataaaagttaatcaaacctgagagaataaggaggaaacacaagtcacactgagagaagcttgacggcaggataagcttgatgacgacatttagacttcaaagggaaatcggagcgaatgatctgtaaagaataagaagaagaaaacaatttagggtaaaaaagaattcttagtttttttttttagggaaagaggagccaatgatctgtgaaaatgatgtattttcattattttttcctttaatctattgacacataatcttaaggtatacacatgtctaataaattacaggatgaaatgtcattttttatccacgtgtgacatctccttcctatgttggcagacatgtcatttttatttaattaaaaaaaaatctaaaaaactattcaattgatcgacaacttgttttttttcataaaaatttgagcggaaatttttggctccaaatcaaaataacactcccacaattatatttgtatggaaagttaattagctacacatatattcatagaaagtaaatataactccacctgaaaataattctcagtaagtttacctacaaatattatgacgcataaattattggtatgtgaaacatatttttatgtacaaatatgtatttgtaggaaagatatttgtagataaaggtctgatttcttgtagtgtcttacctggattccgatttcaggtg

SEQ ID NO: 390214 - DNA, 1693 bp, Cannabis indica
caaagaagaataaatataagagggttaagtgtaaaaaattaaaatataagaatgtttcaccacaaataacctaatttaatataattgaacatgttcatatgaaaacaaattagatcaaatcattttatattttttttaaatgttattatgtatatgcagggtgtggtgtgttctggattagcttactatattcaaggaattataatgaaagacagaggccctgtttttgtgacagcttttagtcccctttgcatggttattgttgctatcttgggggctttcatattggctgagcaaatgtttctcggaaggtaaaattcagagatacccaaaaagaatttctttacattttttatttttttacggttgtttttaaaaaaacattatttacacattctcacatagaagaaacatagtataatattgtcagggtcggccctaagtataggcgtgctaggtccgcgcttagggcccactcattttaggggcccaaataaaaaaaatacgttttaaaaaatatatatatttttaataatttttaaaaaaaccatttatccttatagtaagggttctaagtttttttttttatggcccattttaacttagggccggtcctgaatattgtagaggcatgaaaacaatgttatttttcttataaattggtaaaaatatataaaaaaaaaattgctattgtagatactttttgtaaatttttctaaaatttgagtatagggcccatctgaaattatttgggccttagataaaaaaaagttaattattgggcccttattttaagaatatatgacattttagaaaattatcaaaactttttgtattactagttttaacttagaatacataattttagctcctttaacaaaactttatttgaatataattttttttattgtatatgttgttacagggtaattggagctgctatcataattattggattgtaccttgttgtgtggggcaagagcaaagattacaagtctacaacaaaagaaactattattgatgaccaaaaacaaatatcatcagaaataatttgcaatgaaaaagacaactctcacaaccttcaaatcattactattagtaaatctgaggaaggaacagaacagactattacgaccaaataattaatgttttaagacatttttaatatccaaactaattaattaagtagttttaatgtattatatttattataattaatctataccgaatgagagattgagtaactccatttggatattgggtttgtttatttagtactatatgacaaatgaattttccaactactattttcattgtaccatcttttggttttttcttgtacttcgattggctttttttttcttttttgatttaagcgtttatttattacacaatatataatttaggactcaaactcaagacctccaacatacacgcaccctcttatgactatttcagctaacctcaagtggttacttggattaactttagttaaactagtttttcctttaagtggcgtttggttggaggtaatgaaatagaatggaaaggaaaggaaacaatcttcattctatttttttgtttggttgcatattaaagtgttgaaatgacattccaatggagtgacctttccaccattttggtggatgattattctattttaaaatgaaaggaaagaccattccaatgcatg

SEQ ID NO: 390215 - DNA, 1140 bp, Cannabis indica
agcaccgttaaaacccaagacttgtgaattagataaccttaaaattcctagccctaaattattacttaaaattcatataaaaccctctctagcaaaaaatgatgcaaaaataaaagaaacatatataaaggaagaaaaacgaaaaaaaaaaaaaaaaatagtaaaacagaagccacttactagttagacgtaaaaacttgggtgtcaaagaattttttgatgaacactcgtgatgcaaaggacctgaacttaggcaattggggtgtgagagatgaaattgcacaaagctcaaaggaaaaatgtaagggatagtgagggtatgaatttcagggagaaaattagtttggggttatttcgaattctaagagctttgtggattataatagaaaaatagatgggatttcaggttttatacccaaaggatgaaaactttttgattgcattaatggctcatcgaacggatggaaactataggaaaagaaaggtcaatgtaataaatgctaaaatgatatatctcaacgtcttgactcgcgaaaataaggcatgcagttttataatgggaagaacactatcgtaccctcaaggcaattaaaaagtcctttttattttgaaaaagggcttcttatgggacaattgttatactcatatttcaagaactaatatggtgctgacacgtgtaatatagctggcatatgaatcagcccaaattatgcaataataaatgcattcagacaactcggctcgagaagtgcaatttgtaaaaatattcaaactcaccttttttgccgacaatgacgagcaacgaataatatctagcaatttatgagaccagcgagatgaacaaagaaagtccatcttgggatacatagaatagacagcataattgtttagaaagggtagataatgaattattcaaagaggttgtatcacattgacccacatactcgtgagtatattgaaagactaaagacaatagcattagcatgattcaccttgacattgtcatactatgataagcgtctcgcatatgcctcacttgaaattaatagaagaacgcaaggaatactacgacataatacttagatggttatttatgataaaactgtctagaagagtaccattgtattgcaagcaaagatg

SEQ ID NO: 390216 - DNA, 1952 bp, Cannabis indica
attattattattattatcaaaacctcacatttaagctaccaagcttgacaaaatatgaggtatttgacaaaatttgtttctataattattttatatacaatagcaaaatataaaatattttgtcagaaattctccacacaccatgaatttcaaacaaagagcacaattttgcaaaaaaaaaaaaaatatatcaaaataatgttatttaccaaatgatatataatcattttgcatacaatagtcttattttaacaattctttaaaaaatgatatttcaaacacttaataattctattaaaattatcgataccctatctacatcttatttagagactgtagacaaaatattttatacattaaaaaaaatccttaggatgcaattttcctacataatatattcaaatagtaattatataccttcaggagcgggatcggataagatttgattgagaatgttataagtattgatgataacgaagtgagaacccggcattagggttcttaattgtgccaccattgaagccaaattggtgttgaagagttagcagcttggtttaggagagtgacacaaaaatcacaattaggcatgtttagctttaccaatggataatttcccaatggaaatactcctgttaatacaaatttccttcctcctaaattgtacagcttctgcattaattcattattaattaataaaaattaaataattattatttaatagtagaaaaatgtactttgttaaataaagagtattgctattaggtaccagtggtgcctagcaatttctcgacatgtcgcgttgcgattggttagcgatactctctaaaacctattacattaaattatatgagactcgatatacgagggtgctaggcaccactggtgtccttttaacattttctctagaaataaacacatatattgtttaaaagagtttttcattgtgagcatttaattattatgtgttatttaacttattagtctaattagatatctttctacattattttaatttaattatttttttataaaatattattaataattaattattcttaaagtgccaaatgtgtgtctaagtaaacaatgctcatcaaatattctataatttatttattcatgatagaaatatcaacaacaattatacacaatctaattaattcattttcattagaaaaaaaacttagctgtcaatttctctattctattattatttgtttgatttgaattgataggattttattaaattaaaaaaaataactattttttccacacaattttgctttattatataaaatctaagatctaaaataataatcattaattaatatatagtagcatcccattttaataaatcaattatgtactttagattattttcaactttattataatatatatatatatatatatttgttataattatactaaactcttacttacctgaatatattgagctagaacaacagtgagatttttggtgaaggtttgaggatccatagtgagataagttttcctaagaaaataattgaaaacgatgtcgtttcctccaactccaaccacaaacaagtagtttggaagtgaatcattggttgtgcaacccaatacattttccaattctggtaaactctcctcttcaaagtcttttatttgttgcctcaagcttgttacattgccctaaaattaattatatatatataataagttaattaatataaatatatattcaattataggagtgcttggcaaaataattactttgtatatatatatatatatatgcacatacacttttgaaatatatgaatattgtaaaagctgtaattataggttagagattccatccaattcaatacttaaaaaatcaccatccttaattaaacctcaatcatccgatttaatttaattaaacttattatccaatttaatctaattaaacctcaaaatttaat

SEQ ID NO: 390217 - DNA, 353 bp, Cannabis indica
cattacctccaaccaaacgccaccttgagttggaaattgaaggtggggtaaaaatatattgtccctccaaatcattgcctattaccatattagtctattatcaataataatatatgtaagcaagaagaatttaggttagttgtcagtgatgaaattattcttttatcttttattctatagttttggcttttatctcatatgggttttggaatgacagattttgattctctaagatgaatgagtgtgagtaaagggaaacaaaatataatatggctaggctgtgtgggctggctcaactcactcattcattttatgataacttgattgacacattctaactccttttttttttt

SEQ ID NO: 390218 - DNA, 5426 bp, Cannabis indica
ttaaaatttttaaagttttttatggacgacgcaaagtcaaaaatagcagttgtaaatgagagttaactcataaaaataacactaagctacatgtaaagttggatatttaacggctcgtattttatcggaatatattaaacgaggtaccaagatgccttgaaaaaaatacataacctaatgtatgaatagaaggcttaactattcatgcaagcaatcaaaatatacaaagtaatctaaagtatgtttaagtttgcttaagtcagattataactctttacgcgaagtagaactaataaactgttcgcgaatagaaggcatggcagatcataactgctcgcatacatagtagattattaactacttaagcaatatcaaaaggaaaaataaggacagtggaaatgcttacttcaagtactttaaatttaatcaaagtatgattgcttaagttgtgaataaaaacgaaaataagcaaatatattaagttcaaatgtaaaagtacgaagcagaaaataaaagataaaataaaagcaaagttagccatccaacaatgcaaacttgtcttttcactacatagtaggagacttggatgattcttcttcttctcccgcagcctcggactcctcctctgcctttttaggttgctcgcagtaggcaaggacttcctccataccctttcccaagaagctcaagtccatttctggattcgccatccaagctcggtagatggagcgcttggcaatagcgttgcatcgctccttggtgttggcctcagccccctcgagctttgcaatagctacattgagttcttcctggagtttttagcacagctcagacttgtcctttgcatccttctgagttgcctcaagttcaactttgttagccctcttcacctcatctgtctctttatttaaacgagagatctccatctaagcctcgttccattccctagcaacggcctcgcattgcctaatgttcctttgaagctcaccctctagttgtttcatcctgtccagaccccgacgttgggcaacaaaggagatgaaggttttctgaaaataaatgaatgaaaaggcataagtattcttgagggttattggaataaaaaggaaaaacgaggagaaaaagaaactaaccgagagaccaaaggcgacgctcctttcaagcatctcgttcagactgccagtattgattagatcccaatcatttggaagaaaggatcgaagatggcgccagcaggccgcaacgtattgtgcagagtgttccaagtcagtgctcccagcctcgatgggtaaagtctcaggtacttggcttgaagaggctgcaacttgacttgttttaggaacgggctcttcggtatgtgcgagggcaagaggatgagtttgaacttggttctcaaaagccttgaggtctatggtctgcgaggctcgcttcttgttgatcattgtcttcttgggccttttgaggggctccacattgacatatgacgaggtttctgaggcagttaaccttttcttacctttttgcttgaagagtggaggagatcctctagatccatatcaacaatgtgttaacacttgtttataaacaaataaaggggaaaatgggaaattatttcccacttaaaggatttaccataaccataagaagacgaggaaggaggactatagtattcgctaaattctctagatcctgtgatcctgaatatgtcataggagttaattagttctaaatcccaactcgaatctatatgacctgacctatccagcatagtcccatactgctcgacaatcccatagtaggagctagtacagctaatctgaacgtggaattctgggtaccaactatcgaacctatgtgttatgcaatctatgagaaaggggttccatgtgaaaaaaattatactggctatctctaaaagacactaatttactatgctcggccctaagcactgtgggtgaccatccacattgataacctcgggatacttcttcttcagcttcccgagggactacattttggagataatgcacctgggctacgtagtcctgggattcctcgtcggctaggaacaaaacttgctgccacgacgtatacttgggatatttataataactagtatactcgttctcaccgaggaggcccacggaccttaggttggcctcgtttaaaagaaagttggatgatcgaagaccaaagggaagaccccataggagcctgcgtcactcggccatctctggagtatgatttggtcttttcgagaccactgtcaaaagaatgaaattacaagtcagcgaggccaaagttaaaaaacatggaataatttaaaaccaagtttggagcagaattacttgcgtattgtgcgaaatgtggttgtgttgattggagatagcccagttgtccagaagaagtcttctttgaaagggatcttgtttggcaacccaacaataatcttatgatcacctgtgtgagtcccaagataataaaagccccctacagcattcttcctcgcagggactgccttgaccgagtagaggtagactatctccagaggagtggggaactcccatcctaaaattttatacaaaacccttaaacttgcaaggatttcgtaagaaatgggaaccagctagaatgggataattccaaaatggttgaaaaagtccttaaagtaatctcgcagggggagaattgctctggcccagatatgttcgaggctccaagcgcctatccctatcaagccactagtactcgcctcgccactagtcccctcggatgcctcgcgagtaagtcgttctggtgggtaatagctaagctcgccaggggctacaaatcttactcggctttttcatttttggtcaatgccataagtccttaggatgctacctacacagtctctgatagctcgtaccctcgacttgataagttcaggttcgaaggtaacgttggggtcttggggagtctttgatttacgaggcttggaagtcattatttcgaagtccaggtcacctagtgaaaaagcaattgtgactgggtaaaaataagggcttagctaaaggaatagatgataaattgggaggttcaggccaagcagcatctcgcaagaaactacatttactctctattatttcttgtaagaaatgcctatgacgactagcaatatcatcctgatgggtttttattaaatggtctctaatttttgcatcatttatttctaatttggacttgggttttgaagttttgggtttgtatgggatggcaagttcactaggacactcgatttctaaggattctgggagataaacttctgaaccaaattgggacatttttacaaaaaaaaaaaaaaaggcaatcccaagtcttggatgaaatttatcaaactagaaacttacaaatatgagaaacttaaaaatctgtactttgcctaaaccctaaaaaattacccagatagttttagactaaaatcattaaaactaaatggaatagcaaaaatgtagactataaaaataatgatcaaacccaggaatgtaaagaaaaacacagagaatgatgggttacttactgtttgaaattaggttgtgatgcgatgaacgattctgcaactggggatggagcgaatgatgtgatgatctttgtgaatccttgaggtcgaacaatcaatccgaatatactcgtaaaaagaaactgagtgacagtgagggcatgcaaagcttcgtaaaactgggatggagtttttcgcagaaaggctcaagaaaattttttaaatggcaaaggtgttgaaaaggtggttcctaatgctcatgatgtgcctcaaaactacaaaaccgccaaaatcaaaggcatgcaatatttcaaaatggattgtcacaaatataccctctgtaatcatttaaaaagcacctttcactgaaaataactttttaaggggcaattgttatacgtgaaattcgattggtacttcagagggtgatatgtgtcaactttaaggaatatgaatcaacaaatatattgataattatatcaataagtattaaatggaataactcattaaatgtggagttaatagagtatatttgtaactcactgactgcacggtcttaagtgagataaggatgtgcaaactattggttggcgtattgatgggaaactattttgcgttcgaagggataatcccaaggaggacatagttaatgcatagcgagacatccaactcgctatgtatgggaaggcatactcctggtaagctccagctcgctgccagggttattgttgctattgagaactctcaggacatgattgtccagtctataaggccttatggtcagagagcagttcttaagtttgccagtacactagtgctcatgcaattgttggaagacttatgaatgaactaagttgttcatgtaccaagcgagatgccttgacgagatatgtttttcaatgtgtcttaatccacatcagcgttccctttaaaagcagtttaaatcacagctatgtgattttcaaataacaactgcatttatttacgtggagagtagttaaggcccacaattttgggaaaatatggttgtgggatttgaatttgaatgtaatcaactaccaacttatgttattataaataggggcagattatacagaaaaaaggaggaaaaatccttagagaaaataaaatacactgattgtaaagaatccttcacctgtatcagaaaaatctgaataagattgactcgtggactatgcagagttaactacaaaatcacgtaagaacctggtgttatttatgtttctattatttttcttaaatcacttataatttctgtgccaaatctattacgaaaataggctcataatcgttaacaaaaatctgcgttaatatatttgttaaaatacatgaaatttaatttaaatttatatttagaccaacattttaaacatacacttaaacatgtatatttaaatttaaattctatcatatatttttaattcttttttttttttgttgacggtactaattttagaggaaactgtacactcactttttattttctatttaatttttagttttcttttattgctttttaatttatatacaattttataagtcatatttttattatttgcgttaaagattctaattttgataagttatgtaaaattatatttaatactttgattataaagaagaaaatatatttatcaattaaaattattttacagttatatttaattaatgtgtaataaaaaatataattctcaaattattccttaattttaacgttaactttaatagaaaaataataaaaaattaacttaacaactttctttacataaccacactatatataaggaatacttcttagtgggtattacccatgaatggttattaaacaaatttaattataaatattaattttaaaaatatcaaacca

SEQ ID NO: 390219 - DNA, 513 bp, Cannabis indica
tcttgtttctttttgagacattgggagaatcccaatcggctcaaagtatatttgtgtttagtacgtagcatgactgtttttgtccatgtttagatatgagactttaagatttttattgacctcatggtttatggtgcgattgttatcgctatgcttgatcgtttgattactttcttttattctggattaaataatagttgttattatctaatttttattggaaaaactttgattgataatcattgatatgtgtgatttgttatatattcatttggattggatatctaatattcttcacacttttttggccttcaacgttggcgattattggtattttaattgaatgtggttttcattcctatttttgtaaacaacatgatttgcctatttgattgattttgttgtctgagtgatatattaacatgtaatgtatgtaagactataatatagtgtatgtaatatagaatatacaaacgatatgaaatgcggaaaaacaactgtaatcatatctat

SEQ ID NO: 390220 - DNA, 602 bp, Cannabis indica
cttttacttgtgatgtacatgttgccgcgcacatattgatgagtgatcttagctattgcggcgggggtcttttgatttttctcttttccaaagtgtaacattaacaacgattaaagggcaattttgtattctggggagagggagtggggagaaggggaaagagaggttcggtgtaaaatcttcatacatgataggcatatatataatacaagaaaatttgtttgattgattcatcataatgaggatgtttttacacttatattagtattatatggggaaatgttttattacaagttgtgttttcatttttggcacttggaatttttctgtgttttattataacagataatttattcttttttagtaaaattttaaataattttatggtactaaaaatatgattcaaacatgttttgttttgtctttttttttttttttttgttattttttaattcgtgtaattatttattgtgaattcttctttcaatgttaggatatttactataattatattgtagattgtaatattaagatattggttaaaatttatttaaatactgaaaattaagagtgtagtgttataaaataatataaagtagatg

SEQ ID NO: 390221 - DNA, 798 bp, Cannabis indica
tttttttttttttaaatattaaaccaaccaattggaaatggcaatgtcctaaagtttgtaacaaaacaaagcattctacttagtttttaaaatttatacatacaaataggtctatttccaaaactaccattttgagtcttaatgagcaaacattaagcattctgagatttgtatttttattttgggttgtccattcttatcttcattggaatcgttatatgcttgcttataatttactgagttatgcattatgcaatcgactgctactacgggtttgcgattgatatgactaacttttgtatgtaacaatgcttcggtgttcttcaatattgttccgtaattacagcatttaatctaaaacatttatctatataacatccgtacaagctagccaataacaaaagaaatctatagtccattagtaacaaacaaaccaagcaaacctaaaaaccaaaagaaaaagttatggaactcggttcaggtcaaacggccttcttccgttgggattaacgcagccggtacacatgcatcgctccccgcaccccctcccatcctactattttttttttttttaaattatatatagcataatatcaaaattacttaattaaaaaaattaattaaaaatttaaaatattagagaaaaagaaatataccttcttgcactgacatgtttggtcagtgcaattcatatcgttgtcgcatatacagaattctccactccggagaatttgctgaaattttagtaattgaattaatattacgagttaataaaatttaatcaaaaaaaaaaattat

SEQ ID NO: 390222 - DNA, 1292 bp, Cannabis indica
tagtaacatgtgtattcagaagctaaaggttttcgcttaacacttcaataaaaattaaaatacaagaaaaaagcagtctagtctcatattgttaggccatttaagagttagtgacgcttctcacaattggttactactggacttgattacttgaataacaacaagcgatgaagaatagaacatagacacttttatcatacctctgtttctgcattgtagaaagatgttttagtaccacatcgcagcatcgctcaacaaattcgtagcaagaagataggatcacctcgaccagaagtccctctgcctggttagatagaacaacaacacagtaatgtttcaatatacaaattttaaccagaatcacaagcttgcttcttaattttttctaaagactacaaatatatctttctttaaatattcaggagaacaaaacagaagaaagaaaattacatttccaacgaaattcggtcaactaaaaaacggtaagataagtgaatcaaaagcaaagcacaaaagatggaaacgaatcaaaatacccttccataagcgttgatatcaaggccattggcaagtagatcagcaacatctttcttcagaaatttctgagttgcgtttttctttctccttattacatcgattcgagtcttggtcaatttaatcaacgatttactgccaaaacaaaaaacaaataaaattaacaaaaacatacatatgcacctacaaaatccacaaatacatatattcagaaacaataataataataatcaatctgagatcgaatcgcaaaccatttggaagtaaaaccccgaccaagaagcccgtccaacatctccgatcctcgccttcgtaggactcggtgacctttatcaccacagctcaagaaaaacaaataaataaactcaaaatgcaacaacctccattaacgaagctcgcattgccaaacccataaaaatcgagcagcttcaacgggaagaagaagcgaagacgaagaagaagaagaaaaacttaaactttactatttctcgacattttgcaaaactccactaatcaactataacagacagagagagaagctaaaacaatatttctctgacggcaatgcccttgtcttttccgaatacgagattgacactccagtccagagcgggtcctcgtattttaaacgttaccaggggtattttgggaaatctagtagaaaaaatgtcagccgtaggattaagtgggatggtcattgagagagagagagagagagagagagagagagagagagagagagagtagtagttagtagt

SEQ ID NO: 390223 - DNA, 1065 bp, Cannabis indica
tttaaatatttaatttgtaggacctacacttcaaatgaatacccatcacgtattctctagtggttagtttctactatctcatttgtttgtctcttatttttatttttatttatttatttattttaatggaaagagtcaatgaactacttagcatattattttttgtactacttcaaaacttcttatatatattttggaaaattaaagggggtcaaggccacccttatcccaatgtacatccaccactgtatatgtatatgtatataggtaatatgcatgtatatcattaggttacttatgtgtgagtacatatatatttgatgctcgaatctatatatgcattctgacattttataatttcttaacgaagacaaatacaaatatcaaattataagcatacataactaatggggattggtttctctttataatgtgggattgcagtttcttattttatttagttggagaaaataataagtttttaagtgaaaattatcctgagtgcaaaaatgtccacatgtatgcatttttgtttcatgtagattgtattactataacaaataaagataaaaaatacaacaaagaataactaattataacaatatatattattttaagatagacaaaaataaattaaaaatgaaaaatataattacaaaaaattgtacatatccatattttcatcttcatcatcaattggagttaaaatattataaagatagggaatatccaatatttaatgataacattataactaacagaagtaaatttttgtattttaaattttttcaaatccatttaaggtaaattcaattttattattaaaaattagttataagtttataactattatatataatctaatttaggttgcaaaattctggatataagaaaagattgttatcataaatttatatcacaattattctactatatgtcatatcctgaatgtaacaaaggagctcaaaaaaaaaaaagggaggggggatcatttcacaaatacacaaaaacaacaaaaaaattaaaaaaatacgatttcacagaattttaaatatttttactatt

SEQ ID NO: 390224 - DNA, 884 bp, Cannabis indica
aaaaacaaacatgtggacagccatgaaagcaatgtgttacctgtcattatgtgcccgaaaccatgtgaggttgaattataccattccatttcttgtctctcccctttcattaacctaaaatttatctcatttttctcctattgaagcaaaatctaacaacttagtaatcaaaggacacagaaatcaacgattattatatcacatataacaacaacagtaaagacagaatccatacaaatacccttttctttttctttttacgagtgaaaaaagtacagcttccattgaaaagggatcactttttcttgttcttgcttttcccattggcgaacattgaacctattgcgaaaatgtttgccggaggaacattcaaaaccggattgattgaaactccatgtccactgccgtaagctccatgtcccttcttcaatggaggtttctgataactacagcttgaagcagtgttatgaggatgtaatgactgcaccttgttagaagcgttagaacttttctgggtattctgtttagagctgttggaactttcttttggtatcaatggggatcgtttgatgttaatgggtttggactcgtcagcagacccagtcgagttgcttcgagataacagaggcaaaggacatagagtccttccatagccagaaccacaactactactcctcttgaaaccccaaaaggacttggaactctgcctctcttcaccttcattattggtctctttcttggagcttttactgttctcctcacgcacacaaggtgtttgcactaatggtcgatcagcttgaggaggggaaatttgatctacgatctcttgtttcggcggtggagtagagacgatcttcttcttgatttcactgggaatcattttc

SEQ ID NO: 390225 - DNA, 1992 bp, Cannabis indica
ccgagttacgttctttttcgttttttttttttctagtctccttttctcatgtctccctttctctcttgaattttctatgatacgatcacctaattttttcttgtttgcgtagtagtttcttttattttcttgagtaatttcgttttttttgttaatatcattctggaatgttattaacgttttgattgtttgtgttaaatcatactttctttctctatattaattattcttcattagactgaaaataaataatatatatataaatacttatggcttcgattatttggctaataattaaagctatagtattattagggtttatgtcctaaaaataagtatttatgaataatatattagagtttatatgaaatacaaatatattataaatgaatatgaattataaaaataataattaataaataacaaaaaattccatatttatatagagagtgtatgatcttgtaagaataaaagaaaattaagattataccacataaataaaataagtcggtaaggtattaaaggatagaatctttaatatgaaattatcaagtacggtttactaagcattatatattagtggcatgtgactttgattcagatcacatatgtggatagatatttagtaaaagtattgtttataatttagttatacatattgtttatatatcaacatattgtttatcataaaagatttaatcatatcacaatgataatcgactgttagtagactagtttaaatcttaagaattcatgaactcttgtttctgttcattaggttctttaatttactcgttaaaatttctcaatagatgattcttacaacttctattttgggaacctaataacatggatagctgggacatgttatacaataactggaatccaagctttccgaaaagatcgaatattagtttccttaaagtattaattttggtagtgaataaagttgggccaaaatatatgaatagaattatagtttaggatctcgagttgtatctctcaataaaatcaccaaaatattgacgtagaagtgcttgtttcaacagttcttgatcttgttgcaaccatcttgattaggatctcgagttgtctctcttaataaaagtactaaaatattgacgcataaatctggcaaacactcactcgctagattggtgaaaggagaaatatgtttaataaataaatagagagactcaagaaatttataatagttcactccccgtgtcatgacagtaatagagctacgtctactttgagtttttatttctcatgagaattataagaaaattggctataatttctagagagagattctctgaccttatggggacttagaagaatgtgaaaaataaactaaggagctctccttttataggggaggggtcctattaaaatattattaaaataatacaaaaaaaatatatgaaaattcactttggactgatcttggccattgatgatgatcaaacggtaaacaattaaatcttggtaaaaataatcaatattcagagtttgaatctcgtccgtcggatcgcttttgagcaatctgcagaaaaaaaaattgcaactatcttgggtacgaattttggacttgaaatatttataattgcaatatgagtgtgagacataacttaatgtatatttgaaatagcttcgaaacacatgttaaaacgtgtcaatcagataaatattgagagagttatgatcgttttactaaaggttattttgtacccaacatcaggttgacaacccaatgcccaggttaacatcctgaagttaacctggacgctgggtaagtgagaaaatgtcccagaattttattttttgatgcccaagtgatatgttgacatcacctagtcaaattctttattctggtgaagttgttcagtagttctcaaagatttccctttttggtaaaatcggttagacccaaaacttcctttttttactgatattctaccttgttgaaagggtgaaatatcaaagtgt

SEQ ID NO: 390226 - DNA, 1547 bp, Cannabis indica
agtattatagaagtaatgtaattaaacgaaaacctacttaacggtttttactaagttgttaggttaagttaagtttttaaacgttttttctttacatatatatatttttctttttatgtgtattttttatttatggaaccaattattttttaatcatgtttttgttattcttttgctgttagttatttttttttcatttgttgcattgtctaaatctttttataactggttattttgcagaatgtttacttgaaaatgaaaccagaacatcgttttgcaagtaaactacaaatttggaataaccattgagttattgatgagctaaatggaaatctgaccacttctcaaaagacattatttatgacgatgcctttttctcatttctaaagatgggcagtattaagtggatgattttcttacctcaccttgctttagtgagggtggttcatcaagagagggaggatattgagaagtggtttctcattcgtgatcgagttgtacgctttgggttggaggagtttgttttgattactgggttaagtccggaagggccttccgatttgaatgaatttaagcagaagatgtcattcaagaagaatatgtttcatcacctgactattaaggttgttcaagaagaggttaggggtaggtttttgtgtggcgattttgatgatgatgttgatgcggtgaagataggtattgtttttcttttaagtcattatttatatggttatgagaatgggaagaaagttggtaatgagttgtttggttttgttgatggggagctgtcaaatttaaaaaatattgcatttggaaaactgttgtaggacaggacttttcatcacatgaacttggcttttaaggatggtgaaaatatcttctttaagattgagaaggccaaagatgaaaaggataagtgtcattcttttaaatttcaagattttccaattgcttttcttatttgtttgtttgagatactgccaagccttagtcctaagtactgcaagaggattgctaatacatatctcgattgctgaactaggagagtataaacaagaagaaaattggaggttatttcgaacttgtgtcggagatttttaacaatcctgaggtacttttaaattttataactggttttttttttccttattgatttataattggtttttaatttttttttcctattttatcaggtcactgtgaaggatttctatcctgttggtcatgagcttaagaaatctgcaatgtaaaaccttaagttcgaaccagtttatctaccaaagaaacctccaggtttcgatgggaatgtatgttttctttgtgtttgtgtttatgttttgtgctttttagtttgttgattttttttgtttattttatttttagttagtttttcttgatttttttaattttgttatgttttttggttgtttgttttctgtttgctaaggtagagtctgcttggtttgtatccaagaagaccagaagaagattatgttgtattaaaagtttgagcgatgagtttagtattaagtttgatgaagttattg

SEQ ID NO: 390227 - DNA, 945 bp, Cannabis indica
tttgattaattgtttgctaatagttaattggtacatgcatgttaattgccagtataccgcggattatgtcgctctctttaaaatctttcgcggctctgctcgtactgtgcatgataattagtttttattattatattagtttttgaacaattaataactttcccactttcaaatccacattccttgtgtttacatgaacttgcaatctctctctcgctcatatgtatgtcaaaagccaaaatggtgaaaaaagacgactttttgtatgtgcaatttgatttcccatttagacttttgaagttattggcttagcagagaacacattttgtagtcctttgccttgagataaacctttctaatttgtagttatgattaaaaaacagaattttccaactaatttagttatatttatatacttgaattagtgatcagtgaaatgaaagctgagtactatcaaagaaagtagaaacatccagtaaaatcagtgtcttcatttttgcagcaaattattggttataaatttatattacaaacaatgtttgagtgatgtttattgttgaagttgattctaaattcttctcagtgagctttgaagttaggaaagacagaaaagagaacaagtggtaatcaaataagtaatttctatttactagtttctcaactagtcagaaaaagggtaaaagtatatgattacaaaatttgttatgtgaatacctatgtcagtgctacatattacaattatcaattcaactgggaagtgatatcaatgaagatgtcttctctgcatggaattgtgagtccgcccatgggatgctcatatccgaattcttcttctgccatactaagcaagtcttgaaatgaaggctcatttaggtaggaaagaggtactacatgacgcttcttctgatctctccaacatacactgcaaagtagccttttggaatg

SEQ ID NO: 390228 - DNA, 555 bp, Cannabis indica
ggtttatatgaattagcctagtttatattgtttgacttgaatgccatttgatattggttttgttttctcttgctctatcttcaattcagttgtatagaataagtagtctatctgttgttcaagttttgttttgttttgtgtttttagtgtatagattgataaaaaaaaaattaagatatataataacatttgattaaatcttaatataatcagacaaaaaggttaatataacagaatattcattccaacaaaaattatcatgatgtgagaacatattttgtagatctataaaagaatttgcatctaaattgactgtacaggtaattatcatgataaaattaggtaaatttcattgaatattttaccaagaacaaaagaaaaaggattgaaaagatccaaactattagtacaaatcccattcttaaacaaattacatatttctacaagaaccaaaacccaaaaagaaaaaggaactttaaagacctaaattcaggcttttttgggagatttgggtgatttggttgcaggtttctcagattcagcagacttagtctt

SEQ ID NO: 390229 - DNA, 471 bp, Cannabis indica
gataagaatgccagaaagataatgtcatgcaagggaatcattttcgtactccttaaaagtatatatgagatattttactgttgccaataaactgagactaaaatttttactgaccatagtataataatgatatgaatcataaaacgagaagatatacttaactgtataatttttcattcgttccctgaaactgtctgagaggattaattatggttaaaagagtagaaaggacaaacacataatcaacaaactatagtcagataatcaatttagtaataaaatgttacaacatgcatttttgcagcaatcttaagttttcctcgacgtagatttaagatctattatgatatgaaaagttaaacaaaaaaaatatctttataacaatttcttttgcataggcgggctaggcctttgccaagggcccacctagtccaggggcccagaaaaatttctccttttaaaattatacaa

SEQ ID NO: 390230 - DNA, 1427 bp, Cannabis indica
catcataccatgacatgaacttacgtccgggttcgggtatggttccagatctaggattcgagtatgcgagacaaaaatataaaatataatatattagaacaaaaaaaaatatttttgaaaattgaaaacaaatgtttctgttttctagtttttaaaacctaattttaataaattatttttaaataaatttgtcaaacggttcttattaatttttaaaaattgttttcaattttaaaaaatagaaatcattttttaaattaggaagccaaacaagctcttaatttacaagtgtattcattctattgtctatcttaatacttaatttcatttcagatttctttgacgtgggcatcgcatcccatgactgtacttatatttacaaagctaaagtcacctccggtagatcttgtgtgtgaagatatggttaggtgtgtttggatactgagaaatatcctttgttttcttctcgcattcttcgtattaatgctgtagtgatgggttctttgaagttaaaggtgtcctatgaataaaacactctattacaccctcatttgcattttatttataggttttgttagttaaactctcttaattatatcattttaattgcatttttaaaaggaattgttagtagatttaaagtgtcatctcattaactatctcattaactgttactataaactgcttattgtatatttttatacacatgatatatatatatattgctatactaatatgtttttaggaagattttactattaaaatttcaacttaaagaataaagtacaagtaaaatcaatgtagttgaatatttagaagcaacaaaaactttttcctttttttttttaatgaaatcaatgtaactttacactctcattcgtttcatcatatatatgcagatggttgaaggattataaaaacttggagatttatgtggaaccacgtgtgagaaaatatcttctagaaaaatcaccttacttcgaatttgttcatacctggagagatggtgatggtgaggaataaatgataatatacaaatgctttcacttcacttcgatcggtcgtatgcagcttaattgtatgttaatatatttttggctattttcttgacagatactgaaattacactgcttcataaagaagttgatttcgttgtcactttaggtggtgatggaactgttctttgggtatgtgattcaatacttttggaacaatttccccttgactttctatcttaaacaattaatgtcattactatctttcaaaaacattcctacctactttatttagaaaatctataaaggataattgagaaatagtcaggaattggtaatgaagacttgttccctaattttaaaaaatctatggagattgatagaccaagaaaagcatacacttatgctgacacattgtatatttatagagct

SEQ ID NO: 390231 - DNA, 943 bp, Cannabis indica
atgcttttagtggagggtttatattttagatcccatctttaagtttatttttaagtaatctcaaacttttaaagtttgaaattctcttaatctcaatctttctcaactaaattaaactaatagtaaaacttgtacaccaaacatctcatttgtgtataatcaatactgattcagctatgttatttttcacatcataaaatggtggaaagaaacaacaatttaatgaaaaaagaaaaaagagcatgaggaatatctagctattagtggcactacttaaggtgaagaaaatgaattaaaatctcaattagactcttagtaaggggggtgattttttaacattttttttttctatctagccagctaaagattatacaaaattataatatgagtccatggaaaacaaaaccactcgtacaagtccaattgcaaattatctccaaaactctcaattgactcgtccgaactgcttgaatactatacagctagtttatttgcatacttattttagaaatgttaccacacagactaattataaattaccatatacattcatactagtgtagaaaggacacttagacacccatttttaagagctacacatctcatatttacataggggcaggctcggctcaagcagtttggtgagtgaatttgggcaaaaaattaaaattgagcctaatgcatgtttaattttatgaatatttattatgtatattatcttatgagaaataatatttattatattatatatatttatatctttatatattaaaagtgcgtatctaacggcaattcttggtttaacgattcttattttatttagccttttacacgattaacttaacagactgttaacattaaacgttaacaaataaataaatccaataattaaactcaaaaaattaaacaatcttttttaaattaaaaaaaaatatcttaccca

SEQ ID NO: 390232 - DNA, 692 bp, Cannabis indica
aaaaaaaaattaattaatatatactattaaaataaaatttagaataatgaattgcacgagtataaaaaaaataataaattgaattctatttttgacactaaaatactctttaacttttgtaaaaatatacagaatttatactatataaaaaaatctaaatcacaaaattttctaaatacgaaacatattgaattccttcaaatagaaacaaaaataatatcctaactataaaatatttgtgctgcaactttcttcttctatttactaataaaataaatatatatatatctacaagaaaattaaataaacattatgactgttttcaaaaataaataaataaataaatatatgactagctaataatcaaatatattaagaattcacgtacacgttattatctacagttattgtcagatagagcaatttttgttaagaataatcagatcgatctaacgttcaatcttactataaaacgactctgttttatcgtgaagtaatatataacatcaattagtttcttactgtaattgagtactaagagcactcccaatagatgagctaaaatagctcaatctttaaattataaagaaaaaattacaaaattgagcttccaacaagtgaggtaaatcttagctattttacatattttttagttcaataaatagtgcatagctaaatgtaaagataactat

SEQ ID NO: 390233 - DNA, 654 bp, Cannabis indica
atttggttcgttttagtcatcatatgttttaattttttttttttaaatgagtttaattttattttaagtcaatatatctatggtactatcaattatttgttcttttatagggttaaataactaactatgtctataattttcttataattaattaatttgtatcattaaatgtatttttgtttccaatttttatatatgtcaaaaattactaaaagtaagttcgttttttttttggttttaaaaaaaaaaggttatttgtttataatatatattgtgattgtgtggtgtgtgtgtgaacaaagaaacacataatttttatccatacatataatttgaaataataataagtggttaggtttgtgggtctttgtgttcacattattgaaatagaaacaagcaaacaaacaaaactttctttaactattcaccctttcactctttttctttaatggttggttatataaatatatataataattatagtagggtttatatttctttaatcgtgggtagtaaattttactaaaatcgatgttaagtttcaaaaaatcacttctaaaactcatttttttagtagtgattattatatattttcgatattaaaaaaattataacctttaccacctaggtcttgactttagttgtttggccgag

SEQ ID NO: 390234 - DNA, 859 bp, Cannabis indica
ttaaattttattacatttcattcataaatctatatgttcattactcccaaccaaacgccaccttagttaatcaaagtatttctaccatcaaaaaatagatgtcttgaactccatacccatattctcttaattatttttttaccaaactttcacattcaaaagttgatagccttcttgcacagataagtatgcctaggtaccgaaatggaagcttgtcttttgtaaaactagaaacatccacagcaagttgaatttcttgatttttcacaataaatgtttggtttttattaattagcctgcaaactagaggattgtgagaagagtttaaaccccaacaatagcaagcaggtggacttacgatctccaagatagaacataagtacaatatctgcaaagcagggatgatttaatttgaaatctttacatcactaatgaaatttaaaatcacctttctgtctagctcaagccaagattctggagatatttgttaagatttatgtcataaatgcaagtaatttaatagataatatattactgataagactataaccatatggataaaacttgtcggagtattaaagtaaagaatttttaatatggaattaccaagtacgactcgcaaatccaccaaataatagtgacatgtgattttgattcggatcacatatgtagatagatattatatataattcaattatgcataatttggcttatataaataaacatcttgtatcaacatgacgtttatcacaaaaaagttatatatatcataatgatgatcattagtaaatctgtctaaatcatgagtattcatgaaccctatttgtgttcattaggttttttgattcactcgttaaag

SEQ ID NO: 390235 - DNA, 1675 bp, Cannabis indica
ttagcatttttctatatatttataatgaatggtttaatgtagggtgttggcttcttttgatttcttctgactgttcctactctaacgaagtgggtaagaaattttaggtacaagtgtcgaacaaatgttatggctctaaaatctactagttgcgaacgaccaaatatagtgttgtatgctgtcaaacagtcaacgaccacaaaagtacaatacttaaaaggtgctctaaggtatattaggacaaagggtgatggggagacgtacttttcccatgggaatgagataaccctcattgaaattagtgagttgggaactgcatggggccagatcttggttagtaagactaaattctaagaattcagcctcgaacaagatgttaactgagctttcattatctattagaatgcgggctacaattttgttggcaactggagtctttgtgactaagggatcatgatgaggaaaatatatagatcttacatccttctgtgaaagttatgacttagtccataaatctaggtctttgagcatgcaactgatttgattctcacacctcatcattgtgatccaatgctttgacatactattttttttatctctttgaggagttctttcgatatatggacctatggagattatggctatttgccagtttggcctaggaggaagactcgattgtccgataggttgcccaggacctaatgctagcgggactgctgctagaggtgcttgtatggctctcaaaggaacctgagctcctggtgcatgtaaaaaccttcttggatgccttgctaacgcttgtagtcttataggtcctcacatttacgccaaatgattccttacccattcatggaggtggcctagcttgatcaagtttttaatctcgtcctttgaggacttgcattcgttggtatcatatcaattatcatcacgatactcgcatctcttattggggtcctcttgaagcagtctcaaaacaatggcggaggttgaggtagtagacattttggtgagtcgccaagtagacgctctcttgggtgtctattaattctgtacattgggtatactttgcttataactaggtgtcttcctccttttcttgttatcggttcgtgtgcttcccttattcaatctcttacttctgatggtttatttagtggaagcaacactagtagttggagttatttttcggggcaggatactgggagagtgctccaaaagcaacattaaaagttgttggtaccccatattcaaaaaaaaaattgtgttgctaaaccaaatagaacatggggaacctacatagatttctccgacctgaataaagcatgtcagaaagattgctttccattgctaaggttgatcaatagtcaatgcaatagcaagacatgagctgatgacctttatagacgcatattttagatataaccagataaaaatgtgtaatatccagtttatatacatatattggtatttggtatattaagtgtgatacaattatattgttattattattactattattattattattattattatcattattattaatattctttttttttttttgttgtgcgtgtgagtgggtaggaaaaaagaaaaaaaaatgatatatatgtatatattaaatagtgagataaataaatagtgaggcattagattagttagtttaaaa

SEQ ID NO: 390236 - DNA, 1716 bp, Cannabis indica
gtaaaagtgaaaaaagaaaaaagaaggagagagatatatattaaaaaattttagagcccattacacatcattttcggaagaggtattaagtggcaaaaaatgaattaaaaaataaaaaatcaaaacccacttaatgatactagatctgaccgaatcagatcaagaggtctattaagaccaaacaaatgggccctaatactcactcattatattgacaagataaaatatgagtttagtaattaataagagaaaaacacaagatttataaatagttcactcccgtattctaacggtaattgagctacatctactgcgagtttttattcttcacaaaaattacaatagaatggctaaaataagagctcaaatttctagatctaatcttgtaggaacttttctaaatatagaaaaaaaaaaatattagagctcttctttataggcgatgagatttattaaaatattaataaaataatacaaaaatattagataatcattttgcaataatttagaccattgatgatgatctaatgtctaaaatgactctggatggtgatcgccaaatttcagggcttgttacgtgtctattggatcgttttcaggtgatcgatttgcaaaaaaaatcgttcttatcttgaagatgaaattttaacttgcaatcttcaaaattgcagtatgagtgtgaaacatttcttgaaagagcttgaaattagctttcaaatacaactagaatcgtatcaatcggatcaatattgattgagttatggtcattttactgaaggttgttcagcaattgtcgcccaggttaaacttctgacgtcaacctagaagcaatatgagtgggaaaacatgttggacttttattttttgtgcctaagtgatatcttgagattagttagccaatttcttaattcgggtgaagtcattcaccagttctcaaagatgccacttttttgcaaaatcgggtagaatcaaaacttcctaatttgcgactaatttgtcgatattccactttgccaaaaggttaaatatcaatgtgtgaatttaacttgtcacaagtcatagctcctgtttactacggaaaaatagtaagatgcttgagatgaaactggaattggataagcagattccagcgcaccaagctatatgtcaacatgggcgttgagtgctcttcggagaacttttcatgacactttttgttacttctatggcattcaagattgtgaatgagatctcttaccctatttttgagtaaatattttcccccaagttaaatttatacctgtgtgaggttggcttgataacatgaactaaacccattttatgcgaaactaccagttaggcatcaattttaacttctaccaattgttttctgtttgtcttcataataagaactttaaaaatagttattctcagatggactaggaattttgaattttgaaagaaaaaaaaaggcaaggaaagcaaaggaaaataaaagataatagatcttttactctcttatctttcttttaaattttaaatttaaaaagagttcttattgacttaggagtagaggattataattgttataaatacagaactcctcttcactctctcctcacttattccacaagccctcatagagagaaattgagagtctgagtattttgctttcaatcgcttttaagtgttctttagcttctccaggtagggatttttgaatttctttagtttttt

SEQ ID NO: 390237 - DNA, 908 bp, Cannabis indica
agagagagagagaaagtttagacttaggtcacgcttagtgacttagagcttaggacttcaattagctcttaacattttagggtttgtttaaggccctttatataggagagcttaaatccttttatcaagaaaaataagcagatatttacatattaaattagtaaaatacaaatgactaaaatgccccttaaaatagacattttccctctatttttgtgggttgttaaggtccaattcacaatgtagcttgctgaccacacatgaagctgtacatccaagtcctgccaggccaatgtcttactagccatgcatttgcaagatgccagctagctggcgttgtgttatcttgaagtaggatgtcctatgctagccatagggccagccaggagtggcctagccagcctctttaaggtggttggtctgtcattcgtcatcccatttgagtgtcgggaatccccattagttgaattgctaagtaaatggcgtggccttcttgtttgtgagttatattgccacgttgtgctgatatcgaccacatagatatgacacgtcaagtggataaaaattaggataatattttccctaagtccttgtgcgaacgtttgtgcatatagggactttctagcttagttgggattgatgtatctttaactgagtaaatattgctgcatttttactctttgaaataatgctcttgactatctaatctcatttgtttagtaagttaactgcattgtacttctatatactttttagttgaacactgtgtggcaagtgaggaagtggtcccatagaagctgtataagacttatggagggaaactccttttcacttttcacttttcattctctcactagaaaagtaactttaaaaagatcttctttctctctagaggctgaaacccacat

SEQ ID NO: 390238 - DNA, 966 bp, Cannabis indica
ttttttttttgttttttttaggtaccaaatatttatatctcaaatccacatggacgtctaatttgccatgttggctttttacattgacttggtcgagaacacataagcaactaacggtgtcaaagggaaaacaaatagtgcatttgcaaatagaataggacttaaggtagtttttctactaaaaaaattaaaggtaaagtgtattacaaatgaaatagatgaaggtttgactgtaaatttttctattatgttcgatttgtttaaaaagattaatataatattttttttttttttgaaaaaaagattaatataatattagtttagaaagaagagaattatattgtgttatgaatataatgatcgactatgagattggatgggttttaagaaaagaaaaaaatattagaccttttatcaaaagaaattagtggtttcttaaaaagtattaaaaattatacatactttcaaaagaaaaatatttaatttaaaccctaggtgcaagtatgccttaacttaagctcaacacacataatattaataaataataggattcataccaattttatacacatgttgtttaatgtttatcttatagttaaaatataagattaaaaatagtgtaaattaaggtataattactaatactttttatttgaatgtgtgtatcttcatgttattcaaattttgtaaatgtctcacattttcattatgtacaaaagagacaagttagaatattatggagtgcttagaaatattcggaagaattacgagggtcccactctcggtgtgcggactcactaatgaaggtgtggggactgtagccccaacaaaaaagttacattgaaaaaattaatattttcttttaatttgataagggaaatttcaatttttgaccctaataatacaacctatatcaaaatttatacccctttataatttgtacaaatttagtccattaattacatg

SEQ ID NO: 390239 - DNA, 1559 bp, Cannabis indica
caattaagttcttttaactattttttcacaagttttagtttagtacgattttttaaagtaatcaacacaactaaggacgaaggaggccgaaatgcaaaaaaaaaataataaataaggggggcaaaataatttttttaaaaaaaaaaataaaagagctaagatacaaatgttggggaggggagagggcccccaatataatgtataaaaatatttagaggtgtataatatttataaaattttaaattatctataaagaatattgcttaaaaattaactaaaagtaattaatttctataattttcaaaactcaaaaacttaactcccccaaaatgaaaaatcttaaggaccaaaccaaacctagtcgatctacttaattattatatgtccattgatgtttgttaggtgatctaattagggaccctacttaaaagtaaaatatattttgttggttattaataataagggaccaacaagtggtatgtgggcaccaaataatacaagttgcaccacatttaaatagtgtttagtctattatttataatatcaatacaatccaaaatgaaatgaaatgaagtaacatggttacacatttgttagagcattattattggatatcagtgtgcccagtatcttttataagcggcgtcttatgattagttaaggatattttttaagaattattttttaagttatatgagatctaatacttaattatactaatagtagtatgacaccgaagagagtgctaggcactaatggtgtctttagtatttttatcttttttatatgagcattactattgggcacctgtggtgcctagcactttctacacgtgtcgctttgtaattgactaatgatattttttaaaatctattacattaaattatatgagactcgatacttagttaagccaataacgatatcaacacgtaagatggtactggatactattggtattttttagtttttttcttattacattaaattatatgagtcagatccttagttaagtcaataacaatatcaatacgtaaaatagtattggacactattagtgccttttaatatttctctttttatataatcacaaatcatagcttggatagagctcaaaccaataatgtaggactatacttaaggatataatgtatgtactctacttcttaaatatcattgttaatgaatattaatgaattcaacctacttttaactattaaattaattaattaattaaattaagtggtcttatttagaattgttagtattcatcacatataaaaatgttactaattaagcactaagatattatatgtgatgagttagtattttctttttctttccttcttttaagtgggaccaagagactttaataggtaattattaagaatttcacatatgaatgtataaatttgaatggtttgaatggtatcaatttggtcttgaatttaggaaaataaatagtatgtgtatgaagcatttgttagagcactcacaacaagtgagttataatagctaaaagctaaaaaaaaaatagctaagagcttaaaattaagctccaa

SEQ ID NO: 390240 - DNA, 997 bp, Cannabis indica
gcttcattaattaacctatctagctagctagatattataatttacacttacatttaatgttacatagagtagagaaatgctacaatgaaaccaacttaattaaaattccacagtttaatccacattaaccgatccaatctatcgtttttataacatatatgtttaactgtttttcattcaacatgtatattcaagtgtaagttaaattaaaacaaaaaaagtaatgaatttatttttgaaataacaaaactctattaagataagtcctagatcattgttttaaattaatatacattttatgtataccataaaacatatgttagggattgttatttttttttttctatttcttaaaaagttaggtatgtattaattacaatagttgaatatgttgaaaaaagaaaacagtttacatatatgttaaaagaaaacggtagattatatggttaaagtgtattaaactgttaaaagtagatgttcaattttaattgagttgtaatgtttttgttggcatgggactagggatgcacacgggggaattagccgggagtactctctccgtcctcatccctattaaagattttaatctccatccccgtcccattccccgcttattctccattggggacggggcggggaatctcctattgtaaaaataaaatttattataaataattaattgtataaaattattaaattacataaaagataaaatattacatattatttactattcaatatagtatattatttactattcaatatagtaattattatacaaaaacacaacttcaaaaattgtaaaaataatattaatatactaaaaaaatacaaacgtatttataaaatataaaatattaataaaaaataattaataaattaaacgggtccccgtccctgccccgtttaacattcggggataaaatttgatcttcgtttctcgtttagacggggaatccccgccccattaagggcgggtccccgcggggcaccatcc

SEQ ID NO: 390241 - DNA, 790 bp, Cannabis indica
ttaaataaaaatttactagtactttatttttaattttatttttcatttaatttttttttaaaatctatgtattaactttttttttaataaactttattataattttttattttaatttttttgttgtaatatttaaaataatttatttttgtttgataagtatatttattaagaatatgagttaaaaaatatttttaataaactacctataattaaagatatatattttatataaaataaaaataattaaaatagagtacatttataaatgtttaaaattggaaataaaattctgcaaaaacaattttatgtatatataccattttcaaattataaactaggtactcgataattattatatggagacacagaaagaggtataccattgctacacaatgtatgaaatgtacgtacatgttcccatactcatttgacagttgaaacacattatttcttcttcttcttcttctttttttctgaaaggtgacaaacattatttctagttaattaagaattaaaacaatgaaatgttgattgttcaacaaaaaaaaaaaattgaattaaaacacttcaagcaaaatattttgttgcatgcataagtgatttcctaatataaattcgaaggtggggtagttagataaaaatagttatataatatgctagttttatacaattttggtgttattaataacagctacgtcactcactaactacatacattaatatagatataaagaaatcattcaactaatgatagctatagggagctttatacaaccttcatgtgcat

SEQ ID NO: 390242 - DNA, 925 bp, Cannabis indica
atttatattcacttttatattcgttttctccctttttttttgtcttttcttgtttttaagcaaagtaaataaagcattgaaagataactaatgcggtttttgttacattaatctcattttacaataaattggtcatattactaatttttacattgactccccaccttatttttatgttcgtttgtactaacaggtaaagtacatcccttaaaaaggtatttcggtagactttctatttatttcggtattcagaaaaactttttaatccaagtttttttataatcgtatacgttataattatttaagcgcacttgtaaatttttagaaaattctaaataattataatatcaaaaaataaagttaaaatatttttttacattcgcaacttgttaattcttatgtgtgtagtaagtaattttttgaaacttattttcagtactgtaaacttattttcgcagtggagtttatgtcttcaggttctcaatcagcaggagatgagcggagtttcaagattgtcacatatgtcaaggatcattatgctcttgatgatattttttctggtcttgtttctcctaaactcaaggcaaagtttgatgaatagattagcaaaggattgcttaaatatcctagataatgtttgtatattctatttatgtattgtattgtattagttttttttggtcaattcttttatattaagtttttgttcatattcatttgttttgtataaaggtcctttaatgtctacgagtatggggctaaaaaaaatctctcctggtttcaaattgggtgttgactttgttgatgataaaatttggttttatcatatttcttgctgtgacatgttcattaatgattcgataatatctattggaatttattttactaggatcttagatctactcacaagtatgttgtttaaaca

SEQ ID NO: 390243 - DNA, 1435 bp, Cannabis indica
agttttcattctttgtgagacaattagaaaattgaaagcctcctttgtattttgatttccttcttcttcatcatcaaatttgaagccattagtgatagagtaccatgctcactcatatcaagtcaagtactcaatcatagtgtggaagactttggtttaccaaactaaaagaaggaagatccatgcttcgattttgataatgctctactacagaaaggaattaagggctagagatctgaatgaaaagagtcattattattctgtttccatcaatgtaagattttctaaactttatatatgtttattttatcgtatgatgaaattcatatttagggtgtttgattatagaatcataatcaacatacatcttagtaaatctagatcctggtaaaataatttctaacagagtggaggtttcacttggattcatcagcttatgagtgttgtgggtgttgtctaatagaccctgtagggatttgatgagcttcccgaagatcactcctttgtatccattttgaagattcgatttccctcctcgacatggatgtactttttcgctctctcatagaagtcttctacgccatccaattcccttttcaacatcttctcccgtagtctacttccaaggcgtactccagcggctataacaaacgtaagttcgtcgtcggatatcctcccaactttggcaacttcgatgttaaagcgctggatgtatcttcgcaagctttctcgttccccttgcttcacatttgtgatacttatcacatgcataacgtgatcacttgctggccgatgttgttgaaggaattcctccaaaaattgcttccaatatgtaattgttactagcccaagccttttgaaccacttatatgtgactcctctaagtgtgaccttcattagctcgttaaaagctcctagatggtactttagaccaattgtatcatcatatggcgtcatacaaggctccttgaaatttggtggaagtagtttaacttgaatttcccttaagaaatgggattcttcatcaaacttgtcatcctccaaatttctctctcatgtggtagctatcttttgatgtagattttacatctttcttctaacatcttcattcttttgttcatcctttgttgagagtaggtaattagaacttaaattttcgttgtgatttgcatggggttctcggatgcaggaaataaaataaaaaagaagtaaacaaatacaataatagaagagaaaaataatttgaaaacatttgcttcccctagcaatggaaattccataaaatcaatttttaaaattaaaaaaaaaaaaagaagactataattcgtatttagtataaaaatcataattttgtaaattttagcaatttttatattacatattgaaatttttatttttattttagtatttttttactgtggggcagatttttttt

SEQ ID NO: 390244 - DNA, 920 bp, Cannabis indica
agttttgaaaaactgcttattcctctaccctttatatagagttgggttgcattttgactttgaattcaaattaagctgttttatatattccctcattttagttgtattgccataatttaatcaattaaaagcaattctttctgatgttttacaattaaattggttttataaaatagtttctattgatattttagatttctggctactaaatagtttgtgaaaatgagtgtttgtaataggtggaaattacatgatttattttatagcttcattcaatggcatgagttttgtgttctagggcttcactttaatttataaactcatcgtgatttgtttctttcaacatcatggtatattaaatttgggcaggattttttacatgtcacttaacccgaagatgcttacacacgattcgacatgaaaaatataggcttagacatgacacgatactataagcccaaaaatacagtatgtaagcatgaatagattagctcaaaatcataacacattaaaagaaactctataaaatgatagttgttaacctaagaactttttttggtgatgtgaacatcaatgtttgacacgtggcatgaaggatgacgtcatgaagttgagtagactcgagtcatagcagccgaccagggaggggaccttagccctgcgctcaggttgacttcggtatcttcgggataaaaatttagacttcgataacttgaatccaactcactttcttttagtattttgtactatgaaaacatggagcaacctaatttcattcaattttactattttagtgattatttatgtactaaatcatgctccccatactttgatatctatcaaaccacacccctcaaactttgatatgtactaaatcatacccctttgaactttcatccatgttagaatttttttactaa

SEQ ID NO: 390245 - DNA, 987 bp, Cannabis indica
ataataatttatagagtattgtattattgagtattagtagtgcttaatattttttaaaggtggagcttaatgattgattatcaatattttttaagagttattatagatattaaattatataagactcactttaattacattaatagtgatatgacaacgagtaaaaattggagtattaaggtgcctaacactaatatgaggtgtcgtcttataattcattagcgattatttataatttttattaaaataaaatatgtaagatttaatattaaattacactaatagtaatattacatatcacaataataataagcactatgtgtgccatttaatattttcccttttttaataaaaatatttaagaatctcttgaggatcatactattattaatgtattaaagtgtttcttttttgttaagaaaaatgtatttaaatattaaatcttatataattagtatttggtgtcactatgtccaataacattaatactcttctttaatttatgtagaataaagtaaaatatacttttatatgtgtgtgtaagttgctattttaaaatagtgtaaatttgattccaaacatagaaagaaagaaaaaaaataaaattacaagtttcgagaaatgtatggcaacaacatgcacatgcacgtggagattggagaattttacgcaaactcagtttttttttttttttttttttttttttttttttttaaattttaatctctattctaattcacacactatttttccctttttttcagtgctaaatacttttaaattatcgttttacttacacttaatctttaaagttcaaatagttcaaattttagcagtaaaatcttttaaattattgtactgctagtaaatttaaagtatcatatccgattaactgctatcatgaattacttatgtatacactcagggacggatatatagctcatactaacaaaaatattatctttttaaaaaattaaatataatttt

SEQ ID NO: 390246 - DNA, 773 bp, Cannabis indica
tttttttttttttttgagagagaaaagtttgagtagaaatgatttgagattgagtggtatttatagggggagagatgagcatgaatgatgactcggtgagtttggggtgttctgactcagtttcagtatccgagtcactaccgttacttgatgagcaagccttatacagtgtccttttatttatttatttatttatttattataatttgggttaacaaaaatgtaatttcccatgtggatcattttttattttcatattaatttatatgatttaataaatggatgtttttaattagaaaattaattaatgttcagtaatgtcgtggaaagtgaagacagttgtgtatgttgcatataattggcccaaacctattttcacttctaatattaattaattcatttttgcaacaacaacactaataaaaacaattatatagaaaaaggaaaaaatgttatatatatattttaattattatgaaaaattttgatttacaaatattatcattgttttgttttgttttttttttttttttattacattatcattgttttgttgttacacatgaaactgtgcaaatatactaattatttgaaattctaaaaaattactcaaataaaataaatatttgatgtaaataatgtttgtttatatttagtagagtaaatgtttttcttttcttaataattacaatgaattcacttttatgttttaatataatcttgatttatattcttacaaatcttgattcattttaattaaaattttaattttt

SEQ ID NO: 390247 - DNA, 1283 bp, Cannabis indica
ggtattttaatttagctgtcgtttgtctttgtttagtgtcgtttaagcttttaatagtcaaatcataggtcatttacttggatccaaacgctatcgttttaacttttaagtatttgtataatctttttgtaatgaaatgggcattaattaatattgaaataaaatatttttctattcaatttttcttggatctctcttctttaatccaatagatcatcatatacattagttatagatagacccatagtacataccatttaggcccactccaaacaataccccaaaaaaaaaaaaagttaacaacaaacaaaataataacaaaaaaaaccaaaccaatttaaggtagtgatacatttgatagcaataaattaatataatcataatcataatcatatcaataactgtgagaaaataggcgaataggaagtcctttagctggaatgggcatgggatcaaccacaatgttctcctcaggaagaatcttttcccacctataacgcttcaccaagtgatgcatgaacactaaaatctcaagcctagcatactctttcccagggcacatcctgggcccacccccgaatggtacaaacgtgtaaggggcgggcccattaccctcgaaccggctagggtcaaacttctctggttcagggaagtaatcagcattcttgtgtgtcgagttagcactccaataaagcttccacccttttggaatagtaaatccattgaaaacgaaatcggtcatggcttctcgaaaagccccttgaagtggcggcgcaaggcgcaacacttcttgagccacattccatgagtacttcatcttttgcaagtcatcccaattcaacatttctccttctttctttgattttgcaatttccatttgctctgttcattgattattataattagcatcataatcacgtcaagtaataataacatatttttgtttaatttcacacgtaaaaattaacactacttaatttgtatgcattaaattaataacttactatctaagttttagtactatgtgtctacccaccaacaaacttaaacacttaacttttttagaaaataatataaataaatcttacaaatcacatataccatatcccatcctaaatcaatgggtcttgagaaaataatagtaataataataataacctttttagaaaacaaattgggccatttaaaaaataataatagtattattatgataaatagtgataaaaatcttaacatggtatctttttttttgttttttgttctttttttttctgataaaagta

SEQ ID NO: 390248 - DNA, 567 bp, Cannabis indica
atttaatatttttttttaaataaagaggtgtaatttagaaaacaaaaattatcaaaatttaataaaatatttttatttttaaaaaaatatttaaaaaataaattcaaaatttcaagttttgacttgcaaaatgcaataatatgtgttgcattcatctaaaagattacagttaattgggcaagagtcatgaattacccatataactatgcaatattagttttagcacaaatcaaaattaaagaaatagtattgtatatatagtctctaagtacacatcacattacagaacttttctcaaaaaaaaaagtacacatcacattaatttctaaacaatgtaagattatttttaaaataacttgaaattcctaaaattttgaaaaataattatattgaatttgaaacttttttaacaggtcacatcacatgtttttttactttcttttatatttactaggtgaatgtacgtgccgagccacgtattgctagtttcatttaagattttggtctttttaaaattgtgaatgtattttatttttaaagattacaaattttttgtttgaaaaaatt

SEQ ID NO: 390249 - DNA, 511 bp, Cannabis indica
ataaattttgatatgacttgtattattaaggccaaaaagtgaaatttcccttcacatttttctcatttttttattctatacattgattttattaaatatctatatatatatattaaaaaaaaaaacatctcaacctagacctatactctaatttttttctctcagcgagtatacattcttgctcagtaaattttttccctaatttcttatttatatatgtcttacatattattgttgtcttcttttaattcatttgatggggttttctgacaatttagccttttctatttctcatcaacacaataatgctttatattttacaattttttttaataaaatttctataaaatatttactataaatcaattattaaaaaaaactatacatgtttataaatctatatcatgttttacttattattatatataaatcttcatatacatagttataatatctctattctcatcctaaaatctactcttcattctttgtagatattttatttttttgt

SEQ ID NO: 390250 - DNA, 1897 bp, Cannabis indica
aaagagtcgctaaaaggttatgcatgtgtctgccttttctaggcaactaacgaaccaagattgcagtgtgaacctgataaattcaatcaaagtagtttttagatatttcctaaactcttttgtcacattgttgaagctttcagctgcgttgctcgtcattatgttgtatcgattgtccagacaataaggtcgagcccacttctcaaaccatatactctccacatatgcaacaatggcaggttccatctgtctaagcttctcaaactgtctatcacaatcagtcttagaccacaagtaagctactttccatatctgcgtgtgaaaagcatcagtcttcaacttgtaattcacattcataataatgtggtgataacatgtacagtagactactttggggaacacaagctctatggcatggtcaatgctttgatgcatatccgacacaaatactaagttctcgaccacctatattgcttccctcaatttttgtaagaaataggtccaatagttgttgttctcactttcaacgataccaaacgcaatcagaaatagttggttgtttgcatcgtatgcaacgacaactgtaacgtcctaagaaataggcatgttacgacaaccagtaatataatctaatcctgctaaaccggaattactaaaaaataagagcgggaaatttaagactttgattacaatggaataaaaacataacatgtaataatttaaactttacaaccaatccaacaagacaacatgattcgggatcccataaaacttttctaaaatattacaagttattttacacgtacctaagcggcaaaatttgtaattacaaagtatatccactagtagacccaacccgcttggtctagtatggcccgaacatgtacaatctaccgccaagccctagaactcatggttgattacagacagatttactcttttctgcatagtagagcacccgtgagccaagcccaacaagacagtataaatatcaatatacacaataaacaaatatctcataactaatgatgccactgcactcattgtctacttgacatagacctgcgtgttacgctcacacgcctatttatgtctatgtggcatagactcacttgttacgctcacacgtctatttacaataaggccttagaacggtttatgtcatttttaattaccgagtctaacctaattatgacttgagcacataattctttacttcaacatatatagcatggtattgtattcaaaatcatttaatcactagggtaataaccctaggccatataaccgctcactttagggtaataaccctaatccctgttctcatttaatcaccattataatatcaaacatgagcaccaccgtgcttaactctacgcgctaactactgtcttacctgatgtcctaaatacgtggagattctaaatcctcgggtgctcctgaacaagtactggtaatcctagtcacattaatttctcgagattcacaaataggattaatccctaaatctattttcacataatcatataactagtatttcaaatttacacaaataaacagagctcggaatgagctttccaacgatatatggaacatcccgaacgaagttttgattggaaagttatgaacaaccaaagtttaacaagcaatctgcctaaaaatagttaaaacacaatttacccattataatagttgaataatttttgagggattgggatgtggttcgtttgttcactgtccaccacagatagagagggatcgagtgagagggtgagctgagactgcgtgagagagtgagagactaagtgagaaggtgagaccgagtgagagggtgagttgagagctgcgtgagagagtgagagaccaagtgagagggtgagaccgagtgagagggtga

SEQ ID NO: 390251 - DNA, 711 bp, Cannabis indica
gaactgcttcgccatcggatctggattttggaatcccgaaaattagggttttgaattggggatcaggcgagagagatgggattaagagaaaagtagagagagtgctgggattttgttcgagtgaaaatggagaataattttgtttgagaaatagaagttaagggtataattgaaatttcgtatatgtaaactctaatattgtttgagttggctgcttcatattggttctatgacgtttttaattttaattatgctctagttatttatttatttatttattttgaaagcatgctctagtaacattttttaattcaattctcgtctaaatttgtgtcttaatttggtgtaccttcttaaagtttgacacttgtaacacttgcgtttattagatcataattagagtgagaataatcaataaatatgataactaaatcagtttaaaatagaaaataaattggatgggaataaacttaaaatcatacttattttgtttacattaaaagtataattagaatacttaaaattgacaaaattactattattagaatatgtaattattttttatttataaatttttaaagaatatatttgtctttttcatttttgaactctattaattttcctctttctaaaatttagtaatatatattttaaaaaggtaaataccattttggaccatgtgttttgcaaaagttacagattggaccctgt

SEQ ID NO: 390252 - DNA, 2141 bp, Cannabis indica
ggagacctggtatactggacaactatggaacaggtaatccattgtttttgttttgtttttttttttttttcatttttctttttacctacttggttgttctgctcctacattttaaaattttgtacaatgtaaaaagtttgttcttgttagtaaacacattatgatagtgtgtattgaattggacagtttaagagaacatcccaaatttaaccagatagtaagtagccgccggaatagccatgaagacgttcttaatcttgcaaaagttctgtctaattcaagcattgggaggcaactgtaagtgtacttctttttcagtgtcttcattaaagcttcattcctttcttttgcttgctgagtcgagatcctagtttcaaaaaataaaaataaaataaatagtattttttctcaaagaaattgaaacctgttgtaactcaattctgtttgtcaatgtcacttccgcaattttctcatttatgctgatcccttgagctgaatcaagccctccaattctaaaaccagacttctcaggccaacaatcctgttaatctgtactactaatcatattaagaccttttaattggcttcccttaccaacttaaaaaaaacaatatatacagaaaagtgtgacaaataaaattaacatgtgtttatttgcataacaggcctttgtgggatgacttgaaccgcatcaaaacgccccttttgatcgttgttggagaaaaagatgagaaattcaagaaaatagctcaagatatgtgcatagctattgatggcagtaagaaaagtggtgacgacaacctgactgatgataatgttatgtgcgaaatggttgagatatctaattgtgggcatgcagttcacctagagaatcctctccctctcatcagtgcattagggcgattcttgcaaagacttgatcgataccgttcaagttcaaactgaaatgattgttcctaggcctccgatcgaatcatattttcatttaatgatttttaacaaatacattaaactttgcccgaaaaagaatgtacgatattatttaatgaatagtaatacttactataataggtaggggtggttatatttaccggtcggtgagggtaagataagatctattcgactaccaaatgtcccttcaactccctacgaataacattaaaatattagaagggaagtttaagtatctatgcttaaaagtagcacaaaaaaaaaaaagagcattactattaggcactagtagtgcctaccaccttttcgacatgtcgcgttgcgattggctagcgatactctttaaaagttattatattaaattatatgggacccgatacttaattagaccaatacgatattgacatatagaagggcgttagacattactggtgccctttagcatttctcccaaaaaaaaatgctcaagttaaactacgcttaaaagtaccacataaaaaaatgcacaagctaaaaaattgagaactttccaaattatgaaattttttaaatgaaacttgaaccataatattccagtataacttttactctacttttcgttctcattttctttttctttctcactcctatactcaaaaagttttacctcaattttatcccttcaacttcctacaaatatattttggcgtgtgatgctccctccctcttcccatggctaggaagaagaagatagtatcgaagcttctaaagaagatcgtagctgattcaatcgagctccccttgatccaagaagatgatcctgagctagttcaagtggaatgttgaaaattattttaccaggatcttagatctactcacaagtatgttgattaacactctaaatatgaacttctaaaacgattataacattaaacacatataaagtatgagaaaccttacattgggtgcatcggaataatatgtctccttccgttcagatctctaacccttgtattctttctgtcgtagagtattatcaagatctgaacctggatcatttctctccttcctttaatgctgaaactccttcttgttgaatgtctttcttcacgatcttcttcactatgattgaggtactacttgctgtgtgtgggcactactatatcactaaaaggttcgaaaattattcaaggaagaagaagaggtgaagg

SEQ ID NO: 390253 - DNA, 1498 bp, Cannabis indica
taatgtagggtgtccccattggattttttttttgagttaattaatcaaaagataaatattcatttaaatttgaatttgaaaaatagttgaaatattactctcaagtggttgagagattccctcaatcggttatagaaaataaatatctataatagaattcagttatattatttattcaaataattaattatgatttaataaaagatttgaatttaaataatttattaaataaaattttttatttggtttatttaatatataccgtacaaactaaatttagaataagaattttaacatgacttttatgatagcctaaataagattaatctgttaaccattctctccatcactacaacaaaattgctcttgctcatgtgttgagaatataagaacattatatacactttattctactaggccacactagtccatgtgtgtgggggaagatatgaaagatcaaggtgtgagttttgacatcaccgttctctggatacaacatacaaaaagacttgaagataccctgatagacttcaaaatgtgaataatattttcatgtttttactttcaaatttaatatatacatatggtgatcttggagatatgatacgataataatcagaaatatttattctgtttcgtacctgatttagtatcgtaaaactaacagttagtaccagagcagttctattatatatgtatatatattaaatgttgtgtgagtttaatgtatttatatttatattgtgaattgatggttatgtattatgaatgtgtgtgagatgatgaatcattaattttttgataaaaaatgggtgtaggtttcattatcatttttctagaaaataatttaagccaatattggggcataagaatttttatgtgattttaattttctgaaattaatttcttatgtaaaaatttgtttaccaatgcaatgctcaatttatggagcttggatatgagtttgaatcccagccatgaccaataaccaatgcatgcagctcgagttcacggtggaaccttggccatgcacgaactcaattatctcgggttccatgccccacgtccctggttcacatcaaagcatacatggacctttggtctagtcgcgcgatcgagagaatagacccaattgggtgttttgggtcctttgtgacctacttgagtgtccgcctagtttgcttggatccgtcatgatcaaggtcgtctatggccaccgtggccatggtggctcgtgtagccaccgtccacagtgggcctaggtggctagaccccatacccgaatataatataaatagtgaaaattacatgaaatatgggatttcataacaaagttagaaaaatatggcatttttaggtttgccacttttctatggcattttttcacatttaagttttttatggtatttgatatgccatatttttataaacttattatccaatcccatattttatgtttttgtttttagcttaattagttttatttatttttttaatt

SEQ ID NO: 390254 - DNA, 689 bp, Cannabis indica
cctctcaataccttgagacgaccatgggtattagttattaatggttactaaaattttaacttgctcatatgtgagtaattaatttgtgagatttatattaaactaattagttataaactcacccatgatagaattttagtattttgatagatactattttagtgtgattaaatttatcaaatatatatatttaattcaaattcaattttttttatcttttttttattggataacatttttatttttttccgccaatggaacaatccaatacctcatataatataaaatgagatattttttaagagaaattatccaatttactattttattaacttaaatttccacttttacgagatatattttttattttaagttttatatatcttcatttttttaaggataaataccgttttggaccctgtgttttgcaaaagttaccaattagaccttccgttttgttaaatgacaaaatggaccatgtatttcccaaaatgatacaaataggaccttgaactaattttttgtcaaaataaaatttaataattaataatccgatctaaatgtgttatgacaaaactgtttacatttttttgtatctgttcgtgttagaaattaccttcaagttggttttattaaaaaaaaagttgtcaaaaattaagctcaaggtcctatttttactattttgaaaa

SEQ ID NO: 390255 - DNA, 1026 bp, Cannabis indica
atgaccatacttggcggtgtcttaccgctgagtgaattctagaaagacatcaaaaggatcttaacaaacaacaggaaagagtaccttgaacaagctgatggtttcataaagttggaagaagttgttcgacaagcccagacacgaaggcaggttagtattggatagaatcaaagtggcgtacaaccccaagttcaccccaacatgccagctagcatgggaaatactgtccaaccctccaacaacaagaataatggaggcaaacacaacaacaacgatattggctgaaataatggcaaaagggggaaattcaataattcccccacaccatagaactcaagggagaaggaggagaagtatacatgcttcactttcctgttagaaactcttgaaacaatatacatggccacccaagatgttgtctcgcacaagaagcctcctcctatcaagaaggtcatcaataagagggacacctctaaattctgtcaatttcataatgattttggccttgacacaaacaagtgcaagtatttgaagatggagattgaaatcttgattaggaaaaacaatcctcatctgtgttgttatgtgctgaatgaccaaactcaggcacgagatacctataatggagacccaataccatcgccagtggcgggtcacctagaagtcataattggtgacccatatagcgtagccaaacaagcaaggtcgtagagcgctttgctcagtccttccatcttgagaaaaaaaagtaacattctggctatagaggaaagagattctaagcagcttaagcttagagagcctaccatctccttcacagagagagatgctgcccaggtcaggttccctcataatgaccttctggtcacaactagacaaataaggaacatgacaatttccaagttcatgcttgacaatgaagcttcttccaacattcttttcaactcaacttatgaaaatatggggctataattgacagatctagcaccctgtacacaactaatgtacgacttctttggccaaggc

SEQ ID NO: 390256 - DNA, 2429 bp, Cannabis indica
aataattaatataaaaaattaattcaaataacagccagttatttgagctgcttgcattgtctggcatgttgatggactacaattggactgaaattctcaaaagaagggagtcactcaggtaggcagattaataatatatctacttataatatttctccatatatattattatgtgagactaaagagattccccagttattttaattataacataacgaactagtactgtatataataagtacatatacttctattaaatgttataggattatataaaaaaaaaaatgatgctagcttattataaattcattggacattaatacttagagatcagctatgtatatattgatgtttgtaataaagtttattaatttaattgatggtgtgacatgtataaatatgatgaattttcagggaagctttttgtgggtttgatgtaagcagcgttggaaaaatgggtgaaaaggaaattgaagagatgtcatcaaacaaagcaatcatgttggctgaaagcagagtgagatgcattgtagacaatgccaaatgcatattaaaggcatggaattaattaattaaagagaaattaacaatttataaaactgtactataataataactatttattagttagtttatgtaaataattaaaatcataaaatgtatgtgtgtaggttgttggagaatttggaagtttcagcaactacatatggagttatgtgaatcataaaccaatgataaacagatacaagtacccaagaaatgttcctctaaggtcaccaaaagcagaggccataagcaaagacatgttgaaacgtgggtttcggtttgtgggtccagtcattgtgcattcctttatgcaagctgctggcctcactattgaccatcttgtcgactgttataggcattacgaatgtgttagccttgccgaaaggccttggaggcacatttaataacttacctctcacttctcatcctaaaaataatcatatattttcatgcataaatatatatatatgtgccagccagtattaagttttccaaatttcctagtaataatttaatccaccccccacacccacacacacagttattatacttcatcactagcttatacatatatacatatatgatatatcactcatattattatatgtgtatatatatatatgaattaataggaaaaaaaaagaaataattaattaattaatatatatgtaatataggatttaataatatattttttaaagcgataaagatgtacgtacaattgttttactgtacatttgtatgaatatgatcggccgtcatgtggtcctgctggtttgatcatttctagctttttgtctctttttggttgtccaatatatcatgaattcaagagttggtttttatatgagatatttgtaactaaaatatatatatatatatatgaacagagattattataattattctatatagtgatgttaaacaatgattggtttggtacataagttaattttgttggggaacaatttatcgaaatactcaaggccacaaatgttgtgtcaaataattcttcatttgacattatctaagaaatcattatatccacaataatgaaactaattaatataatagattaagaaatggttgcaattttataaacatttgttgaaaaaggttaagattattgaagtatcatgatatatattataacgtggatcgatcaggacatgtgtattgaataatttccaccataaataaattggccttaattaatttaataatgacacaaacttacgagcaaataacgaccaaggactagtgtttcttgttccaatgttcaattcaatcaatgaatttagaggtgttgataaattaaaaataaaaatctgctgccgcatttttactttctccttgctgtcgtactaataaaaagtagacatgtgtcatttgctcattacaaaaatcatgagcatcaatgagacaatgactacaatctcaatgaaatgtttcattagtaatgattattaatggcggacatatcgttagtaatagctcgtcgacgaaagtacgtagtatcaatgatgaaaattcaaatcgttagtgaaaatgagtaccaatgacgacattgttgtcattgataatgtaccatttctttttgttaaaagaattgaataacagaatgcactgaattctgctataaggaatatcctgtggtcccaggaatttggaggttgttagaattgagaatcctcaatgatttgctctgtattatgctgatgtcattattatgccttttgtattttctgttactacacgtgtaagacctggagtggtcatctttgattactgattgtatcagcttcttctataaatgaaaagtttcctgcacagactcctttgagctgtgatctttcatctttctgcatttttctaaatatttc

SEQ ID NO: 390257 - DNA, 851 bp, Cannabis indica
caattaaatgttgaagagcagtagggagtgtatcttcaaagagaatgtgacctgaccaaaaacaagagttacgtgccagacaatgcgcaattctgttagcagatcgcttaacaaaacaaatcttaacattaacaagagaagataaaagtaattggcaatcaagaaccaacaatccaaacaccaccgaaggcatacaaatggaactgtccactgcatgtaacaccaagagacaatcggtttcaacaattacattatgagcctccttctgcttgatccaacttaaagcctccttaacactgacaatctctgcaatctcaggttggaccccgccaacggagtacaccgaaaacgccttaaccaactcccctgcatcatttcgaaccacaacacctgagccaaaagcatttgcaccctcaaacacagccccatcaatatttattttcagttggtttggagctggtttttcccaccgctcaccaactaacaatgttctaggatgaagaagaagcagttcaaatctccttgaccgagcgtgattccattgagcatgaactactcttgtcgattgcaccacattagctgcaaagcagtatttcttgttccaaataacaacatttcaagcattctaaatagaccaacataccatagcagccttctcaactatcacagagcttctacgggacaccacctcatggaaccattggaaaaaactgatggcaggtgaagatgcaccatctaaaccagacctttcccaacaagatttagagaactaacagtgtaaaatatttttatttcacaaataacttacattatatccacatatttcagataaatctctgtaattaacaaat

SEQ ID NO: 390258 - DNA, 535 bp, Cannabis indica
gaataccctattatgttgttctgaaaagtttgatagcaattggagaagtttagagcaggttttgggggtttagaacttaaggatttttgagcaaaatctacccaaacaatcgaaattcctaatggtacaaggttgtaccaactagaagaccggttggacagttttgggaaaaatggatttttgtattttggccaaaactgctcacctagttgttcgttttagacgttctatatatatcgttagaaagctcgtgaaaaacactacaacatggtacataaattaaagccaaaatatatattttattttaggtgttttcaccacgtagttcggtaaaaaaaactctagattttatttacaggtattagaaagtgttttgttgtgaaaattatattgctttataattgcgcaagtgtacacaatcacaaacaagtaatacaatgataagtaatcaaagttcgtctccacagggactttttactaaataatgttaaatcaactaaaagtaattccaagaatttcaaataaaaataaaata

SEQ ID NO: 390259 - DNA, 815 bp, Cannabis indica
tacaaacaacatacaaaataataaatgaaaaataacatatagataaataaaaaatacaacaataaattaataaaagtataatataaatagaccgttattttagtaaataaaattttaaaatacgtaaaacttttaaaattatgtataattgtatttttataattttttttgttatttttatgtatttgtaaaataatctctaatatatatattaaggatttttgtttaaaaatcaactattttttttttcgtaattagagtcatatacttttttatcttttacattatatacatcactaataagcggttaaattaatataccaaaaggtaacgggaaatagtatattttcacaactaagataaattatggtttgttaaaaacacctttcataaaaatagtatatttttacagctatcattatattaaaagatgtttttaacaagccacatatcataaaaattatggagaatcatttaatggtgtgtttgtgtaagaatactaattattttcttaaatatatattatatttgcttatatgtatgttatataagttattttatttaggctaggtagttatgagtcggtatcactcaataggtggaaatgtgacaaagagaggaatctggctataggtctacgaaagtttataaaaatataaatattgtagacccaattacaagaaacttatgtgtatgtctaccttggaaatggggaattcataagtttcaactaagacttaagataattaagaattgcagttaatattagaatttttatttatggaaattatttctaattaaggaaatgattttct

SEQ ID NO: 390260 - DNA, 841 bp, Cannabis indica
attaattaagcttaattataattaaagtaagtcatagttatcccttaaaccaaaaattcaaaggaaatagaaaattctcaagtctttctctatttcttcctagtcgaccataagaggacccaacccaaaccagaattctccatcatttttagaccaaattcaaagagggttagctaggaaattcataaggttcgaaggatttcaactcaaagtaagcttctccttcactttcagtttgaattttctaattaaagattaggttttcatgcaacttttggagttaagttttgtatgacttgggattattttctaatgttattttaaagttaattatgttgttataagattgttgtgttggtgtttatagggtttgatcaaggtttgagctttcaagctcaagctttggtctttaatgccaaattttaattttgaactttgatgattacaattcttgttggttaatgtctattatgttgttttaggcattttggatctttatgtgtgatttggggtagatttgagttagaaatgagattttatgaaagtctgcagctataaacggcattccatttttacaaaattggtctaccatttttagtaggcaagacccaatagagtgccattttacagaaacaatttgccttattatgggggtattttcccgaagtctcatttttccgtgttttctcgatatttagggtgtcactactacaaaaagggccttctgcttcggttttaaagtgatacataaaaaaatttcttcagtttgtgtaactaatgttatagccgtagaagcaaatattgattttcttgcttcaattttgaaccgacgctaaatgtt

SEQ ID NO: 390261 - DNA, 1055 bp, Cannabis indica
gtgcaactaaaaaaaaaaaaaaaaaaaaaaaaaaagagacaaagggagtttcaacaaaggacaaccacttggaagatatgtcacattagtcgttggtcgttgcttaaataccagtagtcttcggtaattggtctacttgtagttaatatcaaaataacaaaaaaaaaaaaaaaaaaaaaaaaacctaccatgaatgatggcagacttgctgtgaaaactttaactaaaatattttagagtcaaactttttagtatattgataatttaagcaaatgggaaaacacaagattacaggaataatatttctataataaaggttaaactttatatatatacactactacaaaatgtgtctttagctgcttttttttttcaatctactttataaaaaaggaaactaaagagtgtaaaaatacttgtttattaaaaattgatctttagaggcaatttttttataaaaaccgtaggtatagaattgcattataccatttgaagttggttggaaattaaaagatattggattttatgaaataaccttatggtgttggttcttatataggaaccgacgacatagactacacgcttatttgacacgtgtaccctatgacattggttcttacataagaaccgacgccatagggtcgtcaaaaataaccctatctatatagcatcgtcttctttctcacaacccagcataactcaacgaacccagaaaccaaagaaccctaaacgttcgccaaccaccacttccgtcaccccctttctcctccatttctcaattatttgagacaattttttttttaaatcttccatatttcgatacttaatcccatacacctaaaaagttttcattttttaccttctttaagtgttatccaaacccaatagaaaattgtgggtttaacatccgatcaccattatttgttgagaaaacattgaatctcaacatcctttaaggtataaatatagtttctattcatttttataatgtacattgttttataaatatttatagttaaatttgtttggtaaccattcatagataatacccatta

SEQ ID NO: 390262 - DNA, 1582 bp, Cannabis indica
ttcaattttatagattttgaatatgagaagttgctaattaattattagtgcatattaatgtgttattgggtagcttaaggtactatttattatcttgttttgaaagaaaaatgatttttattattttcaggtttattttttatttaaaaattacgtgcacacatatattatacacaagtttcatctatacttattgtacaaaaatcacttcaacaagtgagatgattaacggttaaaattacttattattagacgtgttaaatttatgtgtaattgtttcaaacaaaaaataaattatacgtaatttatattacacgtaatattgcatctcaaaaataaattttattgtacttcaatcaaaataattatattaaaaataaacaataataattaattatacatatcactaattaaattattttaagttgttgaagaattggtacgcaacaagtttatttgcacaagctcgccctattcctgccttgctagtttgattgaatttgaaggttggcgtaaggggcttgaaatgggatttattcttctcctggagctagctgatccgataatagttctgatggtggtttgagtggacgtaattcttttcttagtggcttgatttagagttgagctcgaggtttagcttggggtgatagggttcgattatgatgttgtcactagggacggagctacatgatcatcgggtgccttggcccccaccctcgcccttgcaattttttttttccaattttttaatgataattcacaaaatatatatagttctttaaaaatttgcttaatggtccccttaaaatttgtttttatatattggctccccttacagcatttttctgcagtgtccactcttatatatagtcgctatttcaattcgatggatttttgagtagtgttgcctttctatttgtttgttctttttgttcttttattgtctatggtttaagttttgttattgtttctaatggtccaataatataataaaattgaattataatagccatttttgttgtatagtttgtttgtatttttgtttgtgattttatacgtactccttttaagaatatacaaattttcttattttttcaaaataataaaaataatttagaagttagaactttaattttatactacaaaatatcactatctcatatataacttatagttaggtacgtatctaagagcaaagatagatgaaaattacaattagatatatatgaaaaaaaaaaaagtaaaagttatctttaaattagtgtatttttcttgtcccactaattattttaatatacgtattatttatacatatttaatattttaacaaattttaaactattttttctaagagaaagacataattcattaagataaatctactgttacagtagaattcaaaagtcgtggaaaagtatttgtctaaatactatctcctaaactagtaacagagattgctagtgtgtggacaacaccatttgtcgaacgttgaatagcgctgcaagaactaccaccaacagcagctaataaagaatagatatctaataaaatatacaaaaaactaaaattaatgtgaagc

SEQ ID NO: 390263 - DNA, 1179 bp, Cannabis indica
tatcctaccaagtcgtaaataaattatgagaaccaatcaaatcaagagaatgctaagagaaaactaatcattgccgtaagacattaatactttttaagagtgtaagcatctctaataattacattaatttagtactgaatctacactaaattggtgtaaaatcttttatttttatgacatgtttacttaaagggaatgtgaatgaataatataatattgattaccataagaaacccacacaaattagggagaaaacaaaagaaaaaattctcccaatctttataagaataacattccctttcctaattattttaattttaataattaattaaaaatgaaaaagataaataaatcttttaaaagtctataaacaaaaaaaatgatctgacaattttttcaattaaattatcacgattacttttcctaattatgtaaataaaataatatgattctagttttctttctgaataatttaatatgtaaatagtataataaaatattgtttcaagttattttttttatttaaatctatcaatttctcccactgattattctgattccagttacaatttaataaaagcgcaaatgcttatgtatatgtatacgatatacattaatgtatttttattacttttcaagaatattaatctcgctaaaatattagttttaattttctttaatttctttcgcactgttttatattttatatttatgtgattttttttttctttaacttaattaattttgtattcacgaagttgaggtttgaaattaatattttataatttttatatgaattttgctgtacttagtagtgctatgttcattgcggtcattaattatttcatattttaggttgagtaataaaatgattatttttcaataagagtttaggtatattacttttgttacactaaggtactagtgggggtatatttttattattttggtcattaggaaaatttattatttgctcacattttttatttgttattaaaattatatatatagattgagatatttatttcttaatttgaaaagtgtatccattaatagaacttttgtgttataatatgactgtcattataattggccatatattctaatgtcactcccttttgttgaacttatagaaaatgatactaatttttgttcaataatcaattaatatacaaattt

SEQ ID NO: 390264 - DNA, 761 bp, Cannabis indica
gaggggggtagagaaagtcatatgtgggcctagtgcggttgttaaggagggttttagtgaagtgtttgttttgagtggtgggcctagtaggtgtgtgggattggagtactttataggtagtgggccgtgtgcttctctagggccgaaattgtttcattgtttgacgtttaatgtggtgtctttgggtggttgtgggccgagagatgagcttgggccgggttttttggagaaagggaatagtgctttgtgcccgtttctcattaatctcttggtggttttgggtgggtctcttgataaggttggccccacccttgggagtggagggtctttggtaggaaaggagattctttttgccaattctaatggaaaagaggtagagaaaaattatgaagaagagcggaggactttgtctcatttctttaaagctcttgaggagttgctttatgatcgtaaagttttttggaagttggtgctatatgagatcaagaatttgggtggtgtcattggagtggcacctacttctgaaatgtacgaacgcactaagcattttgtgattgaagtatctggctccagcttatctgttcactcggttacccctgtggaggagaatgtcaaatctcctccacaggcgccatgagaggtgttgcttggaactgtagagggttggggcagaactctacagttcaggagctgaagtccctgctcagggtgcactctcctgattttgtgtttttgactgagctcaaggtggatgccaatcc

SEQ ID NO: 390265 - DNA, 526 bp, Cannabis indica
ggcggcagcagcagcagcattctagcccaactcgaccttgtaacgccagcaactttcgacaaccagtattatgtgaacctcatctcaggagagggattgcttccatcagaccaggtgttggtgacaggagatgatcaaactcgtcaatttgtcgaaacatatgctcaagacacctttgccttcttcgatgactttcagaattctatgctgaaaatgggttccttaggtgtgttaacagggtcgaatggtgagattcgtaggaattgtcgtacaattaactaaatatttggtagcattacgatgaattgatgagtagtgtaaactttatattttaatatgattagctaaataaaattctaattttatgaccaaattattctatgatacaaagtgaatggaaaatatggcactatgatttattaaaggggaaatttcaatttttgaccctaataatacaacctatatcaaaatttatacccctttataatttgtacaaatttagtccattaattacatgaacttccca

SEQ ID NO: 390266 - DNA, 1074 bp, Cannabis indica
gtaaccatataatttgaatagaataggtatatggcaatttaacccaactaagaatgttggttaaagtaaagacaagagccatatttcatggatctaatcttcttatctttacagaattttttgtacctttcagtcctaatcagaatcagatttcaagtatattaaaatcaacccactctcactctctgaagcaaagaggcattagatagtgatggtctgctggccgcctggtcccctattatatatatatatatatttatatattattatcatataaatatatatgtatggatcataatagatctgtttaggtatgaaaaatcttgtcatgtcttcaaagaagtaaggatatagatcattaattgttatagcttcttttagatagctttattaagagaaaaccccacaataatatataaaaaatgattatttggtggttatgtttccacaaatatattgtgaccctaatatgccactttttgtgttcaagctatgaaaagatgtatatgtaaagcaacactactagtacaaaagaatgcatgctttccatgcaaaattcttgtttctcatcactcataatattaatttttatggtgagaattaaatatattaatatggacaagcattaagctggcttttttgtaggaaatgatctccaatttaacgcacctttcaatttggttggtgatctccaatctcaaatttgttgaatatataaatccagaacctctttaaaaaattagtattagtagtccattccaccttttcattcaatttttaagttaaaaatattagaatacttttgttcacactatgtataatcaattaattataattaattgatttaagatatcaaattaatattctcattgatgtttattattatgttaattacaaattcaatttttaattgattgttaaaatattctgataatatatatatatatatataaaaaggagagttttagggaagttgatgtggcaacttctatgtcatttttttccaatctctcttctctcaattttttagatttactcttattttcaaagatttaattatatatttagtctatt

SEQ ID NO: 390267 - DNA, 1770 bp, Cannabis indica
gtagagttgaattgaattagacaaaaattcttaaattcaataatcaaattatttcagcataaaattttaaagactttagaaatttgtgagcataaatttaggaaaaaaaatcatatatcctatcaattttatctccatataaaaactgccacacaaaatgtaccaataataataataattatataatacactattcttttatataaactttttatatttttaggtttaattttttcttttatatttttacattattttatgaaaataatagcaaaataataataacaaaaaataacattaaaataatatataaataataaaaaattaatagtaaattaacaagtgtacaatataaaaatacatcaaagtaccttatttcctgtaaataaaatcataaaaatcgtaaaaatatttaaaactccgtaacaatatttttgatatttttttttttgttattttgatatttcttttaaaattatccaataataataatctcattaattaccttaagccatttattattattattattaaaaaatgaaattatagtaagaaatagcatttaaatagaatgatataaatttttggtagggccacccaatagacttgtgttgggagttatatcaatattatcactatataaaaaaactgacaccattaacaaacaaacaaaaaaaaagtagccataaaaaccactcactcatattctctcaattcctcactttaactcttttttttttatttattttttggttctaaatatgagagtgagaaaaatcccatttccattactgatcttcttctttgtagttctattaatcagctacggtggtggtgcagtggatctcagtgaagacgcagcaacagtactttctgggcctgagagtaatgggcttaatagagcccagtttccgatgggctttgtgttcggaacagccacctctgcttaccaggtcgaaggtatggccttaaaacgatggccgtgggcccagtatttgggacgttttcattaataacactcctggttagttcatctaatacctatttttatttttaaattaattttattattcttttcaaaaaaaaaaataataataataattttattattctttcttagtcatgaattattattattattattattttttcattttattttttgaccaatgaatttcaggacttattgcaaataatgggacggctgacgtggcagtagaccagtaccaccgttacagagtaattcaatttgtttttgtctttttttattaatttcataaatactccatttattaatattctagttataaaaaagagagtattcttgttgggcaataggcaccagtagtagtcttttgattaactaacgatattttttaaaatttattatattaaactatatgaaatctgatatttaattgaattaataatgatattaacacgtaaatactaattaatttattaaattaataatgatattaactatattagtattttttaaaaaaggaatatattctcttttgtatttgtatggtaaattaatttgttaatcaagagcagttttggaattttacatgcatattaatatataattattattttttttttgtttgtaaatgaatataattattatccttaacctgaaatttttcaattatttgacataaaatggcattgaatatgaatactattagacactagtagtatttaatacatctatatatatcgctttgtgattgactagcaatactctttaaaatttattatatt

SEQ ID NO: 390268 - DNA, 816 bp, Cannabis indica
gtatatatcttggtttatcttctctcgtaataatatctctaacaaggctttcatatgttcacgggggcaagtttatgagaagtgtgtacatgtgatgcatatgtgagacaaccatagttcctgaggtgagcatactgtggtggtttgttgtgaagtaattcaaaaggttttttgtctttgagtatgacagaaggagtgtaattaatattatatgcagtagtgtgtaccatttgaggccagtattgtcatggtaagtttgattgaaaagccaaggcacgggcaacattgaggatgtgttgatgctttctttcagcaatagaattttattgtggtctacctacacaagcattaaaatttatcatacctttattggtgtagaagtttgttatttttaattctctagcattgccagttcttacagactttatgttgagtttgaactgaacattaacaaaagtaaatttttttgaatgatttaaggagcaaaaaattttgctcgaaggaagtatatccatgtatatcgtgagtgatcatccacaatagtcaagaaatatttgtacccttcaattgaagtggtgggataaggcccacaaatatccatatgtatgagaccaaatatagctgtagaaaactatcaaatataaaagtacgtttaaataatcttgaagaatttactaaatttaattggtccatcaacacaccaaatgtatcttctcacatttctacaattaatatagaaaatatgaaaattaaataagttatgacttcttttttaaactgcttaaaaattatgagagtttctttttttttttaaaa

SEQ ID NO: 390269 - DNA, 2496 bp, Cannabis indica
aaaaaataaattaattaaaaacatgctgcataaatgttgaaaattttacatgaaaattcaaaaaaaataatttttattaccaaaatacatttacatgggtatataaatttttatacatataaccattaacaatttgtaaaaatatattctcctcttgcctcacatcttctaccgctctctttttcaatggcagctacccccaacctcctactgtcagaaattttgtctccaatccttgtcgccgtaggtctcgtcttcaagccttgccgattcagatctcctctccaagctccagtgccatcgtcactagttactacctgtcaaaaatttatatattaaggtctcgaagtttttctttcgtttcttgtttaaattttatgaatagaatttttgaattgagtattttttttaaatcttgttgctgatgtatttgtttgttaataattgtgtttatttgtctacaaattttttgattttatctttttttataagttgagtttttgtctataaaggtacaactaccatatgtttgatcaaatgccttaaaaaaagaaagcatctccaattttgatttttctacttctttaagttgagtcgtttttttcttaatattatttttggtgatctttttatgttgatttggtttttaagatttagtatttcatttgtaaatttttcatagttatgttgatttatcgttgtttattagttgttttgtagtttcttattttatctttattgttgtgttttagctgtctataaattttacctgtctgactatttcaggtccaagtgttattctacttgcacttacaatgttattgaaaagattatgaaaaataaaagatgtgatgacaatgtttcataccactcaattcggtcattttttgggtattaagagcaaaaattatatcctcaagttgttcatagtcttttgttgagtacaacagggcaatcccaaggaagtgattgttgcagtgtcttgacagttattgttcttttttaattgttataaaccaagatgtttagacttttatttatttgatggttttattactttttcttattgaagaacatattctcaaaacaaaaaagacaatgtaatagcaaactatttggcactttgcattaacatatcaaataagatgttgataatactttatgactttgtttatatttatcatatgtgatacaactttaaatcaattgttgtgcaactattgaaaaaaaaaatacaatgtaatagtaaactatttggaactttgcattaatgtgtcacatataatgtctcacatgcattactattaaaagaacaatttctgtctaattgcttagttatgacatgtcttccgggggtgacctttttggccacatttattgcatctattcatgtgtaattaatcacaacaagagcatgggcacatgacatttcctttttttggtttatgttgaacgtgcatattttatcattcaggttcaccattcatgaccttttttattgtaccacttcaaacatattttcatttataaagtttacctatatgcttgagtattaaatgtaaataaaaccgaaaaacaatgataacaaacttgtataacaactaagatattaataagacaactattggacaatgcataacaacgtattgataattatgtatgaaccatgtatttagatatttcagatgcaattgagtattttcttggttgcattccagcacttgtttcaacttttgtactagttgttcatatttgtaattccttgagatgaattcgccactagctttgtaatttacataattcaatcttgtatcaacctgtccattgtaaaatatgagaaacggaattgggtccccttcttgacattttcaaatatcaattatggccaatcaactatgaaaaaactgtaaagaaatagaaatacaacatataactagaagtaatgcatgtgttgtaggcatctactttatgaatatgcaaattgaatttatgagaattagttttatgaaatttgattttaatttaaggttgaatttatgttctaaaccagtttttctacaaatttttgcatcagtcaataattattgttgtttgatttgattttgttcttcttctcaggtgacatcgtcggaattagtgttgtttcttgatctaatgaagttgattcatcgttgctgacctgttttaatcgcacgaatgttttgtttccataaagcatggattgtgtgtgttgaaggtgtgtgtaagagttaattttgtaatttttttattggactttataaatatttatttggccaacccacaatatttctgtaatattgttgcttttttttttttaattataactgaaaaaagttctaagatattttaaactcttctattttaaagattaaatattttttccttacaaaaaaaagattttattttttttatattgggttatgtatcaatatcaatattatatgtttgaaatgaataaaatatattaattttttt

SEQ ID NO: 390270 - DNA, 1987 bp, Cannabis indica
atattctatccagatggatttacactcaaaattggctaagtctatgtctttagcatgcatctaaggtagatctgtgcataatatttcgagcaacatgccattagctagcaaagcataatcttctacgtaaaataatgcggcaatgcatattccttaagatatttaccttaaatatctccacatttataatatagtcaaatccttacagttacatttatgggattaattttatacaaatgagaaattaaaggatttaacattttagtttcctatttatttttctattattttgggtagcaatatttattgtatcttttctataaatagtgaagccattttattgttgagtgatctaaattcatatttttgagaagagctcttatgctgtcagaatacttgtaagctttcaccaagattgttaagaaactcacttagttggctccttgtgatcttgataatcttcaaagtaatacaacaaaaaggagagtaggctattatcactatcatgggaccgaacatctataaaattcatcatgttcttatttctcattattattatttaattgttattattattcataatatcatcactttaaagactgagtgtcattgactaaaagagagatcaatattttagtgctttcattgagagttaaactcaagtcatgtgtgaagcttttatcctcaaacgatagttttgacgagaaggtcccaatccagtgaaccaactaatccattgttgatggatcccaatgttcaagtccccaccaattagggagatccaatagtgacggatcctaatccaaacacgtgactacctccaagggttccccactagcaagacttggagtgataatccctctgctgggttcactcctagcacgcaagagactagaaataccagctacgtatatactggagaaatcgaaccaaacaccagccaaccatttgtgggagaaccctaagttgatctaggggaaaataataatttggaaaccctcagagaagctgtgatacatgtcgaaactcacactaacgtccttcaccacaatcaggaagaaaaatgttgtgtgatgaactacgtgtttgaatagtagagaagtcaattcaaagagtggatggacaagcaggctgagtccatgtgtgtccaacagcaaaaaaaattaaccaccgaccaagggaggctatcaacctaatccgatgattcctttgacaaactgggggcaaatgctagaaaacccaccaataagaagagatcatactcggggcgaaatatccttatatcccctgtagaggacagtagtatggctcggaggagcgcctaaacaactatgtgcaaacaccccgacccgatagaccttccaattccaagccttaaaatcaaactgttggaagcctagaaaacaatcaagtcctatccggtcattatcttggaaataacaaattgttagggtttatttcctgaaaagctcgcaaagatatttttaatcataaataaaagttgaatattttcacatatacttgattgttaaattattaatatttaatattgaatcatttatatataaatatcaaaaaatttcttattcatacatgaggttgtgacttgaattgtacaaagaattaagatcacttagccatgaataaaacaatcagcaacatattaaagttatgaaatctttaatcaatggttgctactgcagttcactaatgcccgttatttggtacaagcaatctcaatttggattactgatgtagtatgacatctaagtgaatgtgttgtttataatagagattatctataacatggagcgatatgtaattaagatgtctttataaaacatgacgtttactataaagaactaattcatatcataaagatgattaaaagtagatcagcctaaatcttaagtaatcatgaactcatgttcatgttattagtttttttgatttcactcgttaaagtttctcagagaagatgattctt

SEQ ID NO: 390271 - DNA, 2352 bp, Cannabis indica
agaatattgttattagatgtggtggtgctttgtgaatggttagtaattttacataggctatttaaaatttttatctccaaactattataattatcaaattatgcttttaatttttttgttcgttaaaattttctctcatgctattcacaatattgtaatatagggtcattttggcacaatcgtgttgtggaaaaaaacagttgtagcagtcttacgagaaaaagcacctacaacaaaactgtagaaaaaaactaagctgcatgtttgataaattttaaattttaaagtacaatgagttattaagattttttataataataatgataatgttataatctagtttattataatcacaagtatatgaaacttattttatataatatttttattttttatatatttttaatttattttttaaagtatacatttatatacatttgataaaaataatttatagtatttttatattatattttatctaatgtgaaaaaacatcagaatctcaagtatataaaaaaaactttaagttaatgcagtttattaatattataataaaatataaatattttttaaaatattaaatataaatattattttttaaaaaagatatttaattattatttattttattataattaatttattttaaatatttttatttttctaatatataataaataagtaattacaattttagtacaaataaatttattatagtcttttaattaaaataatttttagtaaaagttgggttataccaattttagcttttagttgtaatttctttataaatttttcaaaaaaaattattttttaattacttaccaaataaatttttatcacaaatttttcaaaaagtactttttaacttttttaaaaggtatgccaaatggactcataacatttttattaagtttcatctcatgtgactaaccaattctgaagctcaacaaaaatcatatatttttttggtatcgtgaataatttgagagaatttttaacaagtaaaaaaattcagaagaaataatttaatagttataatagttagaaaggtaaaaatcacaaacagccaaataaaaatacatatttattgagcacctccaaaatttttggaattgataaagctaaaaaaaaattactgcaagtcaaaattaatatatgaaaaaaatttattttcataatgcccatccaaataatggagaattagacactataaactatgatactattgttttgtggcacctagcactattataaagtgataagttagcatttatttatagtatatgaaatttgatatttgaattgtacaataataaaattacacatcacaaactattttatcttattaattaaatgatgacgctggttttgaaaaaaaatatatattacacatcacaaaaatactaaataccataaatattatttaacatttctcatttatttatgcatgcatatagttattaggttgacctagctacttatattataataaaactagcaaagactaattcaacaagactaggtgaaaatgtatttgattattattgttatagtatgcattcaatatcaggagtcatgtgaatttatttgggattcatatttctaagagaattaaaataattaaattggccatcttattccaaatataatatatttggttaataacgatagttgcttgttggattgagatgcttaactatacttaagagccacaaaattatttagacataatttgaaatttgaacgaaataaatagattgagttcatgacaactagaccacatgtcttgtggtattggtaatttctattgtgtgaggggataatataagctagctcaaacattgtttttgaatatcccacactaactatatagaagttcattcttaacgaatgataattcttagggttacaatataatgagttatagacttataaaaaaaataaaattttgaactcttagaagaaaatgtgatattttccaaacttaataaaaatgtattgaagaggaaattacattctatacttactttttgtttcatattttaatttttactttcattttactactctttaatttatactcacttttataagttctattcctattatgtgcattaagaagtctaattttgataagttttgtgaagttatatttagtactttgatcataaaagatgatatttatcaattaaaattattttagagttatattttttaggcccatgaactaggtgggctctaaacacaaacctataccgcctatgtctagggtcggacttaagtacgttgatgacctaatcaaagaaaatataatgtaccttgatgcatctttttcatgtttttgacatc

SEQ ID NO: 390272 - DNA, 500 bp, Cannabis indica
aatatcccatctgacatgttaagtccaaaaggcataatacaccattaacgctgcccataattaataacaacggtggtttattcatctcaaaaaaaggaaacttgtgcagagaaatctcaacaaaattttcccaattacaaatagataaagttggatcgaaccttctattccttttgtggaggaaaacaacacgaggcagttgacggtgtaggtggagattgatgaaatatggtgttcgtagcagagagagccatgatttggagacacactcgcatcgtttgagtgatttggcatcgagtcttgagagaatgtcctcaagaaaatcacaagggatattgttgtaaagcactcctttttctggattagccattagaatcctgagaagaaatctaaagagaattagcaaagaataccaatactccattatatagttagaagggatattggcggctaaaccccccaaacttttgggtttgtgacagttaaccaccaaaactcaa

SEQ ID NO: 390273 - DNA, 571 bp, Cannabis indica
atatttattaattatttttttaacatatgtaaaaaaacatttgatttggaagatatgtttttgtgtgtgccccaattaaaatttttgaaagtgattgggattgtacgaacatgcaactaatgacctagcttttttttgcctatgtaaatgagccatctttatgtctgatcaaagttttgtaaattttaatttaattaataattaattaattattataatgataatcacttccctccaagttccaatgcccccttcactacataacatccttatataagaaaacttaactaataataataataataataataataatttagaattagaactactatactatagtatagtttttaaagaattacaaaacaaaatctacacaatatcttgtgattgtattataatattataacttacttacaatacatctgtaaaacacagccttttcataatcaacttgattattataaattataatctaatatttattattgagcttcttcactaaggattattataggaattcgttttcaaccatatccacattttttattactattatttattttttagc

SEQ ID NO: 390274 - DNA, 1479 bp, Cannabis indica
ttgtccgagatatgttcaatgaacgagatgccaatttaattcttagcattccattaagcttatcgacatcatccaatttttagtcttggtccaatgaaagcagatctagtcacttctttgtcaaaagtacataccgcattctccaggcttctatgatccaagaattggaagtaataacttaggcttttggtagaaattatggcaactgaagatccgaaccaaatttagaaacttcctctagcgtgctgcttgtgggatccttccaacctccgtcaatctcaggacaaaacacgttgatgttcccttgctctgtcctgtttgtaatcacatcatcctttccagtagtttttctttctcttgttggaataacatgggtcttccagcttgggtatcacttgatctctcttttgctagctggttaaacagtattttcaattgccttgatgatgatcgtgtatgttctttaactaaggtatgttggtctttgtagaaagcaagaaattctattgtatggaaggacaaagtgcccactattgcaaatgtcgtaacatgagcccgtatagctcttgatcattggctaaaagctcatgataacacatatttatcttacatctactctggtaatggtgatgatggagttgagctttggactaaactggatacaaatacaattaagattaatgttgatgctgctatttttgctagtgacaataagcacggatatggtttgttgccaggaacaattcaagatctctcattgaagctaaagcttactgtaataacagtgtctttgcccctgaagttgcagagatcatgggaattaaagaagctctaaggtaggccaaaaaccaaggatggcaacatgttgaacttgaatcaaacagtttagtctctatcaaagccattcgcagtcactcttccttttgctccatctttgggaacctggttcaggattgtcactcacttctgctatctatgccttttagtcaaaattcattttgtaaaacgatcagcaaaccacctagcacatgttgttgctaggatttcacgatcccttttctggtcgtagcatttctgtgtccaatgcagcagcacctatgcatgatattttgtattctgaatgttaaaaaaaaaaacctatacaattgttcaactaaggcaaatggccttcacatttgggattattcatgtgagggagggctgggttcagtatgtcgtacccacttctattgacccttaactatcacacaaggcccaaaaggagaggaatttgaccctaattaaataaagattatttacaccacatactaaaatttctaacttttatacttttttactgtggggcaaaattttttcaaaaatactgtataagttttatactgtgtactctgttaaattttcactgttgttctacggttgttttttagttgttctactgttgtttttagataaatttttttgtgttccactgttgtttta

SEQ ID NO: 390275 - DNA, 3768 bp, Cannabis indica
ccacacaaaagaccataagaatacgtctccttactctttcactcaaaaatatttttccattacaactcatcaagctgcctaaaatcacccgaacccacaaaccctttttagtcatttacagttcccatgcacctaaataacgtaaaagaaccgcactcatcaatataaacactttccatagttttctttcattatattcaaagctatatagctctcaccccacaaaacagaaaaaaaaaagtcctcactttgaaaaaagcaaaaccaaaaccaaaagtcctttgcccaaaaacccatcaaaaaaatggatcgtctcattaaaattatgctagtaatatcagctgtttcagctcttcatatggtcaatggattggaatcacggaagcttgatgagaccccaactactgttccagcaggggatgaaaagtgcacgccctgcacccaatacccgccgccacctccaccgtcccctcctcctccatcaccaccaccgtcgccaaagaagccgccctctccggcaaccccatactgtcctccaccgccggcttcgttgctgtacataactggtcctccaggagagctttatccaatcgatccggactacaccaatgatgctggtaagagtattagtttaattaaggcaaggttaccagttttgattggtagtggattgttggctgttctagctttatggtaaaaaaaaaaagaaagaaaaaaaaataacaaattgtagatgttaagggatcatgggataataagatcaagattcaaaatagaagaagagaaattttgtacccaattattaaagaaaaaaagttcttatattggggggacttgttttatttgatcatcagttgttcgtgaatgaacttttctttttcaattttatcttgttaatgatcaatctaatcggaattcgtatcgaattttctttcttttttttggataaagatgtggagtggatctaacttttttagtacttttcgttacctttaataattttgttgttattgtaacgaaaagaaaaaagaaaattgttctaattcggattttggggatttcagcttattgcaaaaagataaaatgagtgaaaaattatggtatggaacattaatatgtattgtatacattatattgtattgggttcctatctagttagctatgacatattgatgactaaatgtgttaacattttgtgtccactaacgtcttaattaaaagtctattgttattctattattatatatggacccattccactcttattagtatgtgacgtgaaaaagagacgatcacatttgtacacgtttgttgccactaatcacttctacattcgatggtgcactagctaatataacagggccaatgggccatgataattatatcaagtaatttctatcaactacaagcctaaacaatatctttttcttaatctttaccaattttcattttaaaaaaactaacattatcaatttatattttgatatatatgtacacatatataagatgcgtcaattaatatttgctgtaaagataagtgcttctcattacaaattgtgacactacgacactgtacaactgtacaaagaaagtacaaaaagaagatggttataaagattcaatggggtcccatttatgaattcaatataaaaaatttggctcttcaataatataaaagggagtgacacgttttaataagtgaccccagttacataaaaggtgtagtgtacccacatggctactttgtgatctgagagattgtaccaccaaggccaaaaattgaagatcattcgaaccaaagcacctgatcttgatttcagagctaattccataatgatacggtgtcagatgtcagtgcctaagatgatcatcttcggtttcaccaaacctataaaaaaggtccccactacaactagattacctcttattactttttccttttttcttttttgattttattttttttcaatccatgatcataaaattatataaaatactgtaactagtgggacacgtaggattttaggaaaaaaaaatatatgagaagaagaagatgggtctaggcgactactcatcacaacctaacttgattcttcatttttgttttactttttggatttttttcaaagataatgtatttgatggatgatggattaatcttacacgtctattatacaattataataaagtatttggtgtaagaatattacttgagttttagttgagaggatttgaaattatgacaatctcaaattcaagtattcaaaacgattgagattacctcaaaaataaattaaaaaatgggggtctcacttaatcatagtctataaaatgtatatcgaacctatatttgattttacacacccatttaatttttacgaacccaaacctccatgctgcctaccaaacaccccataattattattagttagagttctggattactgaccacgccaaaaggatggtccactagaagatgtatatgatttgtcaaccgataatttggtgtaattgaaaagataagaaaaagggacagcctataatgtaaatatatactaaattgataaccactttccaaagcgtatttccttataaaagaagaagaatgaaaaagaaaactaagcagattgagatcagcattttaactttgtatatatatatatatatattcatacataaaatataatcaaacgaggactgccatacagtattatttcaactagctcgctaacaaaagtgttcatctataatgttacatcttaatttcatgcattttatggagttattctcccgtgatgtttcaagaagagaaagagaagaaagaatagagtgttctgttattattgattaatcaagttgagttagaaagaggtatatatatacaacgaacaatcaacaataactcaactaactctaacagaaaacaaagtgtaggttagttaacagtgttaactaactaactgttgtaactaacctactcccttgatagcccctttccaactgagtgtggttttagaaacaacacacagtttggttctaagctctgaaaacttggtgctcgagattgacttagttaggcagtcaagaatttgagcagtagctggaacatgtttgacatgaatatgctgctgtagaactttatctcgaacaaagtatagatcaacctctatgtgctttagacgagcatgaagaacatgattagcagcaagaagaactgtgctctggttatcgcaccacacagagggaataacaacttgaggaatgtgcagttcataaagcagagactggacccaagttactttagcaacaccattggcaaggctttgaaattctacttaagaagaggacctgctaatggtggcttgcttctgagatttctaggcactactaatgtaggccttttgcttcccttttttcaacccaatttataaaaagagaagctaaagggtgtgaaaaaatctgcattgacatttagaggaggttttttaataaaaaccgtaggtatagaatatatatatctatgccgtcggttggaattggggaaaatcagggttttttcaataatcctatggcgtcggttattgggtattaaccgacacagtaggtgctgcctttattcgacacgtggcacctatggcatcggttaatacaaaagaaccgacaccatagggttatatattagacccttgggtatcgttttcctcacttcacacaccttgcggaacatgaagaacagccacccatagcagccccaaacccacaaaaaaa

SEQ ID NO: 390276 - DNA, 786 bp, Cannabis indica
tacaaatttacttcttcaactctctgtctttcattttataagtgacttttatatatgctttctctccatattttatataatatatatatatatttatatatatatattaatgaatagcaatagctttctcaaaatttagtgctttccaccaagcaattataaaagaattaaaattcatatagcttttcagtttgccaaacttagtaactctgttttttagcatctatagcattactctgtttttttagataacttttcagtatgcaaattagtcaaataaaaaaagaaaactcaaaaattataaatgaagatgcatgggtggggagtagagagacgcatgatcgagaggattcgaggttgcatcaggaccgttcactaatgatgaagatggtgccccattaattccattgaaaacccaacaacacaaccccaaattgaaacattattatttatatatatataatttataattataagatcaactgaaccattgtaagtctggaatatgaaagactattttctcaaaactttaacaagcaatagcttcgagttttagagaaccaacaaatgttaagtactaattaattgctaaattctaattaaggctatgaagggtccattggacacaacacgttttgtcttaattgtttcattttctcacaagaatctaaagctaaccacaaaatttctttgtcaaccaaaagcagatgcattcatacatacacgtatatatatataaatatctattctatataaagtgtgcctatataactgaaattcttagtt

SEQ ID NO: 390277 - DNA, 845 bp, Cannabis indica
aaaaaaaactcaacatcacagttggcctacattgttatttatatatgagtttatgagtacaaagcaagttgcagaaaaaataacagaatcagtaaactaactaagcaatacattttaactaactaactgatttaactatatgtaacatccccctcaaacgaaatgatgaagaagcaatttgaagtttgctctttagatagttaaatctgtctattgttaatgacttggttaaaacatctgccacctgatcaagtgaaggaacatattgaactgcaagctgatgagctaatatttgatcacgaacgaagtggagatcgatttctatgtgtttgcaacgagcatggaacacaggattagctgctaaagatgttgcagactggttgtcgacccataggacaggagttttaacagtaagaacttgtaattcacttagtagagatgtaagccatcgaatttcagcctcagcatttgctaccgcacgaaattcactcttagtacttgatcttgcaaccacctgttgcttctttgctgaccatgatatgagattgcagcctaggaacatgacatatccacctgtcgatctcctatcatcaatacaactggcctagtcagcatcactatatccttgtaaacagagaaaatctgttggatgcagccacaagccatcatgaatagtgccttttagataccttagttgtctcttgcaagcctcccatgtgtattggtaggagcatgaatgaactgactaagtttgtcgatgatgaaagtgttgggattttatgccctaaataaaactcatttcaatctatttgatttgttattaatagaagattagaagttattta

SEQ ID NO: 390278 - DNA, 1023 bp, Cannabis indica
ttttttttggaaatatatgttgtgtgattcaggatataaatgattgggacacacttaaattatacacacttcttacatataataatgtataattaatctcaatcatataattaaaaagttatatgatctcgcttaaaaatataaatagttaatattattatacatcattgtgtgtaataagtgtgtacaatttaagtgtgtatcttactcatttgactatatatgtactaaaacttttatttaacttttatttaaaaataatatctaaattataattagttatacattttttaaattacgtattaagaaagtatatttcaacataaaaataattatatataaataaaatatatacatatagatttattcatgtaaaattaatttttatcctaaaatgtaatacatttatatatatatatatattaaatttactcatacttatttcattataatatagtattaataattgtttattgttattgttgttatattgatatattttctttgtgttttgatttttagtgtaattcttttttaattataatttcttattagaatataatttacaagtatattcttaaataaaatttctattgtataattgaataatatatgtagttggacatttacaatattctctctcacaaacctaaaatcgaattccccctaatctcaatgtcaccaaagaaaaagagaataaattatttatgttaataatattctagggatgtactagtgaaactacataaaataaaagtcaataatttcatatcaaactacttattagattctcaatctacacattgattttaatttagtacggtatataaattattcaaaattcctagaatagagatattcaactcaacgcatgttgacaagttatagcatgtggtgtggggcacccttcatttgtgaagagagtgtgtatggtttgagtttagtagagccaaataatgatagacccaaatttttgctttgccttgtaattccttgactataaataaaaggattgtgctcatt

SEQ ID NO: 390279 - DNA, 1168 bp, Cannabis indica
gaggatcccctttgtctttactccactttaggtttgtttccataggagtagacactggtttagatcttagatatcccgtgtcagcgaatagctgaagtgtgaagggtctttgggagatggatatcccttgtttctttcggccaatctcaaggccaagaaagaaccgaagtacccgtatctttgagtttgaagtgagtgtctaaatgctgtttgaaatgagtagtagcaatgtcattgttgctagcaacgatgatgtcatcaacatataccaatacagcaataaagatgttgttggtattttttatgaacaaggagttatccgatagggattgttggaaagcatgtgaaataagagtttgactaaatttgtcaaaccattggcgggaagcctatttgaggccataaatgctcttgttgagtttgcaaacggtgtttggaggtgccttataagcaggtgggaattttcatgtagacctcctcatggagatctccatgtaggaaggcattattgatgtccaattggtggacattccagttattcatggcagccaaagcgaggaacacttttaaagtgttgaattttgctacgggtgcataagtttgggaatagtcgatgccttgcctttggttgtagcctttggctactaggcgagctttaaagcgaactacttctccttcttcattgtacttgactttgtaaacccatttgcagccaactgctttgtggcctggggtagtctgttatgatccatgtgttattttgctcaagagctttggtctcactgtccattgctagtaaccaatgtttgaattgagatgcttcagcataattttgtagttccactttagaatacgttgctaaaatggcagctctaaattgaggttgtaatttgatagatgatagaaaaggctcaatgggatgagatgtggaagaagtatgatacacatagtcagtaaggtgttgcggtttggccacaactcgaccagatttggttgcttttgggtggagttggggagcatcaggtgtattggatgcggctgttgatttgttgtttgcaactgctggtatattttggacaacagttggtgtttaagcggctgttttgcgtttctattgattatgacctaatatgattattttcctaatgttaatttctatgcaatagca

SEQ ID NO: 390280 - DNA, 714 bp, Cannabis indica
ttttactctctattttaactaagaattatacttaaagagcatagttagagatgctctaataatttttagagtaatactataagacaccagttgtgtctagcactacttagaggtagagttttgtaattaattaacgatatttcataaaaattaatatattaaattatataagacttaatacttaattatatcaataataatataacgcaaatactaaatattattggtaccatttagcatctcttaattttaagtgccagcccactaagttatatttaatttgattatcaattctttggaaggcttaaacaaatgaataaaattcagtttgattgaaacaaaaggtcatattcgcacaactttttgtgcaataaagagtagtttgaatggtaggataaagaagccattttatacataaatgtagttttctttatttattgtagtcaatcttctatttcattgtctttcttaattattgtcctcataacatgtttagtattttttttaagagtaatttatgatataaatatttaagtttaatttttagttactaataaatatttaagtttaatttttagtgttaataatacttaagttataattttaaaatttttataagtacttagttgttaaatgttaagtaaattgcaatatgataattcttgattggtccaagtcactaaatttttatgttttaaaaaaaattaatttaaa

SEQ ID NO: 390281 - DNA, 872 bp, Cannabis indica
gtaaagatcctaacaattggcaatgaattgaactttgtgataaggttcacaagatgtaactaaatgactatgcacatgatcataagaagaatggaagatacttaaccgtatgcgttggcaatatcagtcgtgtttcgaaagattgaaactacaacaatgcacatgatcatcagaaaccaattgatgacagggatgtaaatttggcccatttgtttccttgaggtgtgaactatcttcaaccttgggaaacacccaagagccatagcttgtttaacacatgaaaaagtagccgatatcattgcttgactggcaatcattgcagctaaggttgctatcacaagaactggccagaaaagactctctgttttgttcacaagattaagaaacaagatgtcaaaatgaggtaccaacatatgacacaaacatctgtatacatatacctatatatgtatgtatgttagcaagtttaacctgggacagaatcataaaatattctctctgtagcatgagggaatttcatcagatatgctgcttggcccatgtaagccaagagaagacaagggaacaccacaaaagtgaaagcaatctgtataagcagaacatgttaattatatgaagacttactaagaaaatctatgcaataaaggcaaaaaagatgtaaattttcaaagcaaacctgtatggatcgtacggaaaaatggcctaaatctgcaaacattgcttcagctcctgtggcaacattttcaggcaagatatgtaattaaacagggtttgtaattagacccacaaaacaaattttgtactttctttttttaaactaggatccgcctaaccctacattatctgggagaccaggaaactatagcaattgc

SEQ ID NO: 390282 - DNA, 949 bp, Cannabis indica
ccaaatcgtgctttctgaactttagtgaacggaattggaccgaagcccttctaatccaacaatctgaataactcgagggaaaaaatcctttttagcctttaaaaaatttgagttgatgccctctaaaaaaaagtgttcttttctttcttcttcattagaaacacacaaaaatacataaagctaagccatgagagaatcaaagagtaaaaatcaccattttttagtaacaaataacaacacagtagaaaattaccaaagaggagcatttgattgattggagctactgacgttcagaacagtgtaagcacaaaatcgatcgtcagagctaaacaccttaaccggttgagtcacagtgccaataaagctggcggaattggaaaactccttccgccatgtgatcgaagaagggcgttgagatttgaggatgtggttgtagagtccgatacagctttcggttgagttggaagaggtagggttagcagaggccgtagatgaagagaaggggatcaatttgaaactctgaaatggtgataatagactccgaaccttggtgggataacgaagacgaagtgcaatcatcataactaagtgaatagacagaagaacagactagttggaaagaaagcttggatggaggtgttggtactgtcatcaatggcggattgggttgttgttctcttctgggtttttggtagcattgattgtatttcaagggttttgggtttttggtttccaacaactatttttacacaaaataatatatttttatataataattttacagcatagttgtggggaaattttttaatatttacaattgttatacgtataatttttttatgctaattagtaatttttttttcctgaacttttgtacatgtactaaatcatgttttttgtaacttttttgtaccgttaaaaatttacccttgaactattgtaattgtta

SEQ ID NO: 390283 - DNA, 1419 bp, Cannabis indica
aaaaaaaaattagaaaattggtaaatgtgtttttcattttatgttagaataatttttttttctttcattttgaaataatcgttctgccatcttactagaaaaatcattctagtattttaaaatgcaaataaatatgagaaataaattgacaatttattcacttctattccatttattacctccaacttagaacaaccttatcctaaaaaaaaacatcagaattttttgtttcaagttgaaaatcatttctaccctttcagtttacaatttactctttttaccgctcataattattgcaaattttctatccgatctcaaatttggatgataatagagcaactataattgctactagcctactggttagtcttttttaatattgtgaagagttagtattttatttttaagaaggatgacaaaacattgtatacgtcggttatgaaagttcaatttaaatagtactccactttgaaattcagattcttttaagagaatctttaatagaattattttttattggtgggtgtctaaatgtttttaacttctaaaattattaaaaaaatatatggtttatgactgtttgggtaaattttaggactttcttatgtgatgagtataaacaaaatagaaaatttcataaattgttatttttagtaaattttttacacttcataatttttttcacatatttacggcagtctataaaaatataaaaaaaaaacaacatcaaaataatataaaaaataatacaaataacaaaaaaatttcaacaaaataataaaaatgcagcataaaaatacatcaaaagactttatttttatatataaaatcttaaaatctgtacaaatatttaaaatttcgtatgatcgtaattttataatttttttgttatttttctgtatttataaaattatccctaaacaaatattacactatatacccacttttcatttcctatttcaattattacttttgttttattagtttttaatttatatccagtttataagtcatattcccattatgtccattatgaattctaattttgataagttaaatgagggtatatttagtactttgattataaaaaaatgtatttatcaattaaaattattttagagttatgtatagttaatgtgtggtaaaaaatggtaattttcaacttatcatatataaatatagaggaaattagactctatatcctttttatattatcctcttttatttttatctttttttctttaaagcttattacttttatctatttttttaaacattgtaccgattttgcccctatcacttcaagatactctccatatgactcccttatgtcaaggtattttggatacaatacatataaaaagaggtatgtttcaattaaaaaaaaaatagttaattaattaataaaagatgtatttt

SEQ ID NO: 390284 - DNA, 847 bp, Cannabis indica
agatgaagaagaagaagtggagggagtgggtacctgaatattttcgaggtgaagatctcagcttccggcttcgttgaagacgtccatcgctgaagacccatccatcgcatgggttgatctctcccccgtagtcgacctagagatccttggaaagcgtcaacgttccctggccatgagcgaactctgagataatcttgaacgtcaatctcgccgatgttcccttggttggcatgtctcttagatgtgtggcctgagaagaactaaaatgagagagatgaaagtgaaaaatataaatctagggttttttccctttcaaataggcatttttttaatggaataaagttaatggctgtctcttagatgtacgagactaattgtcttttttagttcaattgctttttaataattgatcagtaagccatttattaccaattatattttttatttttatttacttattaaaagtatgttaattgtaattgtatttttattttttatttttttaatttagttatgatatagtgacgtgccatgtgtgttgggatacatttatccaatcatgcctggtgtgtcactataatttaatattttttcacattaataaaaattaaaaaattgtgggatttactttttagtgacactctatatttttagtgacctgcattacatgtgactaacactgaatatttagagtctatttgtgcatgtcactaaaaattattcctaactatttagtgacccacactaaaatgtgtgtcactaaatagtgtcactaaaaggccaaattgtagtagtgaggtcccggttattatgtgggtttgggtcccggtctaggttcgggttcgag

SEQ ID NO: 390285 - DNA, 934 bp, Cannabis indica
  modified_base (69)..(69): a, c, t, g, unknown or other
ttttctcttgcaacaacaaaagtaaagacaattatataattgtaaaattataaaagaaatagcaaaaanaaaaaaaaaaaccaagattcatataatcttacagatgagttggtgagactgagagaaagaacaaaaaataaaaattcaatctttttgacccaaaaaatggccaaaagaactaattacatgtctcagatcaaaatcaagtgaaattgatgaaaaatcagcaatacccaattcgaaatcagaagaaaaattcaatcttttttcaaccctaatccccaatttcagacaaggaataaaaaccctaagcagcaggttagtttcccctattcagagatattttcttgggaaccaaacagaagaagacagtaccctaattaagaaaatgtaaagatgaaaactttgaagagagaagagaaaggaagagccattaaatgaaactataatgaaagaaagaagaagaaggaaagtaggttggaaatataataataataataataataataataataataataataataataattggtataatttagtataatggataatttctctactactactaaattactaataataataatacataaatagttgtaataagttgttaataataataattaatccatttgcaaaaataaagaagaaacaagagtgaggaaaataaggttggaaatctaataatatgataatagtaataataataaatataaggaaattctacaatgcacccctttaaaatggatacattgatgcaaccttgtctgttttagcactcgaaataattttttagttaaattttttctcatggtcatgtacgttatagttatttaagacatcttgcaaaattttcaaatatttggaaaagtttaacacgccgaaaactacgttcaaacagtgtgttgcatacgtgactattttattt

SEQ ID NO: 390286 - DNA, 882 bp, Cannabis indica
tttttttttaaaaaaaaggagtgtcacatcaaataatacataatatattaattacaattttaaatgaataaggcattagggtggatggagcaggtgagataaggtttcaaataaaagcaattggtttttctaattcttaattaaggatattaggatactcatcatatcctaataatgcataactttaatcataataatggagcacaactttttcgtatgttatatatttgtgatatctcgccccaaatattattttgaagttccatttatttattttatcaaactaaaataaaatgtatgtatgcctttcaaaataaataatatcactacgagaaggattgacagagccaaaaattatatagagccatatacaaaaatataaagaagtaaaattttgataaatgtcatgcaaatttattgcacaaaatatggcactaaaacaaaaagaaaaaaaaaccttttaaagcatgggataaatactcatagataagaagaaatacataaaaatataaaaactcagtatataaattttatttttatataatcaaaaccaatttcttgatgaggaaataagtttcgtgatgaaaaaattaatttcttgatgaaaaagttagttttttcataaaggatctttggtgagttttgctctgacaaatcgtcaccggataggtaaaaaacttaaaaactcgtatgtaaattttatttctatattgttgtcgctaaaaatagccaacaccagctcatcgaagaaatcaaaaattataaattaaataattatagggtctattctattcacataggtcaatgatccaataaccgcccttcctttttgagtagttaaaaaaaatactatgatgattttgctgctttatatagatattt

SEQ ID NO: 390287 - DNA, 2803 bp, Cannabis indica
atttgttagttgatctaactgtgcttgcacagatggatgaaccagttcagcctgagcctcttgaccgactgtgtcacatcaggatctcttagagctgacactactacaaaaacccttttaatgtcccttttttaagtaccaacaaattattttggacatgaaaattcttgagagtttcagtcatattgtgactagaaaaaaattatctagtccaataaagttagactagaaaactagtagtagacatgataaatacatattttttactaaaaaatatagagtattttgaagtccaacaatactagactagaaaaatattttgggggacttttctagtccaacatagtttgacatgagcctaattaaaaaagtaaataattttgttattttttaattaaaatccttcattaaacatgactaattttcctatttttgtaccatatattcccttatttgatttcttattaaatttcttttataaaaatattcctcattaaattctctctcattaacttaattcacaccaatctctctcactctctcggttcattaaaggagaaaacctagtcgcattccacaataatctatctctctctcggttcaacgctaatgaaaaaaatggaagtttaactccagccacatcacagcaccgaagccttgaagccgccgcacaaccccgaagccctaaagccaccacacagccacgaagcaagtctgttggcttccccaggtccatccttgttttctttttctaattctccttttctgtctcttacacatgttttcctaacccaacttcatcgattggtattttccagacccaaactcctgcgattcgtgttctctttctcagtttccttttctttctttcttttttggcgctcgtgagacgaacgacgatgatgcagagctggtggcgcttgtgaaatgaaagcggaggtttgggttttgcaatgttggccggagttgaacgacagggatggggttgggtttgcacctagtttcggttcccaaattgtttaacatttgagatttgttttagtgccatgagattagtgttttggtattgttctgctttaagatggcaatttgaacactattttactatgtattttctatttttttaacccttgctaaaaaaataaaaggatatgtagagatgaacttgtaaaaataacaaactgtattttcttatttttgttggtacaattcagtaaagagctttgtataattgtagttctttttagtatttattttattttcaataatctatgatattataaattaattattatatatataaataagtttttataatttttaaataatttataatatttgaataatttttattatttatttaaaaaaagaaaaaatgtgtaactataatgtctagctttgctaaactataaatgagttcacattttggctccaaatattatgtccatcaatgctgtccatcaatgctggactaaaatatttttctagtccgacattgtgcgactagaaaaatgtacttttatgtcccaagctactatgtccaacacaaaatagactcaaaaaatttatctagtccaattttgatggacttaattgggggtttttctagtagtgtgggtcctggatgcgaatacctggctgagtggctggttggatgtattgttcgtccagacctcttcttctattcaaatcattcatgatctcatggggtgcacccaatctattgaatgcggaagcaccaggtggcctcagtgtttgactggtttggccggtgggttggccagagctgtcagtttggatgaagttattagctataactccacctaacaaacggtcagataggatctaactgtctaccgcttggcccacaagtgggacctgtgatcggggattggatggatgaccattatgagtctgggtggtatgcccagcaataatttcttttgtcccgcctagtgggatactgacgtaacagctggtggctgattagcaacttgataggctttctgtatcagtacagtagcctgccttattcggtcatcgatggatgcttgctgagccttcaatgtttccatctccttatccttccactcaatgaactggcgccgctgctcatcgaacgcaaggtttattgcagtatagagatcctcctgatcatggtgcatggtcttagtatgaccttgcatgagtccaagggcgtcatgaaggttttgaatgtcaatgtcatccctcatgtcttctaagcattggttgttgatgggattccagtgctacgaatgctttgatcggctgcagaactagtattcccagtctcttgcacacctggtgtgatcccagccagaagggaaatcacaccttggcccacagtaggtggttgtgtgttaggctgctcgggattggttcctagtgggactcttgtattcccaagggtttgcatagcaggatctgtgaccattgggtcactttgatcaaccaagcctctgcgagtttgcaacaccattctatgtgcctgttgaatcataatgttagtgtcattattttgtgacagtttttgttatgttcaatgtctagtcgtatatgggtttttagtctgttatatctgcactaccgttctgttacttatgtttcagttaagtattagttagtgctaggtggacttcttttgtggatatctaaatagtcggtttctgttagtaattgctttatccataaaatcgttcagacagttatttcggttgtctgtggaaacagagtcgtatcttgtttcttgttgttgtgattacaggtcagatcttggagcttg

SEQ ID NO: 390288 - DNA, 1383 bp, Cannabis indica
aaaatgaaaaaaaaaaataataacaatatcacttatattgatcatcaatatatctggacaagggaaggtttggattattggggtacaatcaattaggtaactgaccagaaaaataattaagagtgacaaaataacaatactagaaggaaacagttatatgttagtgaatacatacatgatgttgagactataatagctatcttgcatattgcaccaatgtatatttatgtatcattattttatattgacagagagatttgaacttcagatctctcataatatatcatcatcttttattacatatatctataagtatgtgctctactttctcgccgacacatgcatctttcttcacttggccgacacctatatcatcattatcaatattgtgtagaaagataaaatatcgaaatgacatggtcagtacttggcttgtaccatgtcctttaatttatttaattatacaatctacttttttttttcttgaaagaacaattatacaatctacttgtaaaaataaacaaatatcaagagaaaagaaaacctacccagtcggccagctttgacaaaatatatgatgccatgtcctccactaatttattcacaataaattgacaacacatagaacatttactgcgaaagcttacatgtggaataaaaaaaattatatcttcgtccaatcatccccccatatacacaactgtaaaaactactgatataaatataaatatataaaagaggattatactgtgaggcatttaaaatagaatgtatttgtgcagatttaaaataaattggaatctagtgccttgtatggatattaaaaggtgcacatattgcaaatgatatatggtgttttatagtagatcactagaattggtatgtgtgggtcctatttttctgtgtagcactaaatgcattttatgcataaaatgacattctgttggagagtctcacattgttaatgtgtagaaagataataaaatatatcataaaaaggggctactctcccattgctaattggttttaggatggaacctcattttcattatctaaaattctaacacattcttatatttatttttttattattttatttttactgaataacttcattttttgactaaaattataatgtggtcgatttggtcaatggtccattaacgtttaaaataaaaatcagaaactgataattaatccaaaaaatttcttgttttggtttataaaacactcaagaaatataaatatcacagatctaaagatatttctaaaagtgctttaatatagaaaaccctaaatcataaatctatagaacctttactaaattaaagaagaagataatgataaaagatgagcggaagcactaacctgaagccattgttg

SEQ ID NO: 390289 - DNA, 1186 bp, Cannabis indica
acatttttttaaaaaatattgtttcatcattcaaaatggttcttaaaataatggatctctggactgaggaccaaaaaagttgggtactgtgttcaactttgttctagaaagtagatggaagggtataatgagaaacaatgtcttctatcacaaacactttgttatgcataataaattatatatgggctcgtttgatacgtcacattgtgttgaattgtattgtattggtattatttaatacaatactatgttcggtattgacttgtattaatagattatgtaaagttatactatattttcaatacacacaatcccaacaccaactacgggtcgagtcttgggtccgggcctgggtccaggtccggcgtccgggtttggggtttgaggtccaggcttgcgtctcgagtgtgggttcgggtttggtcttgagttagggtctgggtccagatcttgggtcccagtccgagtttgggtcccgttctaagtctggggtcgggtcttgggttcgggtccgagtgaagatccgattctcgagtctcgggtctaggtcttggatcaaagtccgggtctggtgtccaggtcttgagtttaggtctgggtccgaggtctaggtccatgtccgtgtccggatttaggtttagggttcgggatcggggtccgagtcaggggtcctgggctcaactcgagtccgcgtctaggtttgggtcccgagtccgggtccgggtcggggttcgggtcaaagatccaggttagggactgggtctgtgttcgagtttgggtcccagattcgagtttgggttcttggtccccagtttgggtcccgggtcccgaatctcgagcccgaccgaccataggctcctcagcttggccaacctcaacttgttcagcctgctcaacctatcgaagtctccctcttaccatgagttcaacaatatgagggtcagttaggggagcctggcgatatgtttgcttagtcctagtcaaggttggatgttgctcagagtactgggcgacagtcacagcagcctctactgcaggaagatctctaaacatagaagatgcttgtccaacaagtaatgtgttgggcacaccctgcaagacaatgtaaatttaagacatgggaaggaactgttgggaatattttaccaggatttagatttactaacaagtatgtttcattaacatc

SEQ ID NO: 390290 - DNA, 524 bp, Cannabis indica
ttcttttacaactagttataaaatcgctattacattataacaaaagtaagttacattttcaatcatataaaaaagatggatcctacttctcggaagccaagacatcacgacagatatgtacactgctgcagagacctaaaactcatggctgcccaattttgcctttcaatttacctgtaccatttagcacccgtgagtcacatagactcagcaaagaaaagaaattaaatccaattaatcttgacaaaataaaagtaaacgtaacacatcacacattaacatgctcatacaatttcatacttgtaaacacaccatctcggtaattcattaagcacccttactacttgttaaccacgagctgtgtatgtcactatcgttgcccaataaagcaaccgataagtaagaaacctatctacagtttcaagagtaattaaccgtaacggtaatgaccgtttccaacccttaccactcgttaaccacgagctgcatatgtcactatcgttgcccgataaagcaaacgataa

SEQ ID NO: 390291 - DNA, 697 bp, Cannabis indica
tagaatccttagaaatagaatatccttagaaattagccctcccatataaaccaagaattctcaaacctcaatcaaaaacttgagataaacgatgcaaaaattaacgaccatttaataaaatccaaccaggacaaagttgctagtcttataggcatttcctataagaaataactgagggtaaacgtcgttacttacgagatgcagcctggcctgaacttttgtcattatcttctattcctttggctaaacccttatttttacccagagtcacaattgcttttccacgaggtgacttggattttgaaattatgtcttccaagcctcgtaagtcaaagactccccaatatcctaatgtcacttttgaggctaagctcattgagtcaagaataagagctatagggcattatgttggtggtgttttaaggacttgtggcatcaaccaaaagtgagggtgacgtgttagatccgttgcacctggtaaattcagttgttatccaccggaacgacttatctacgaagaatgtagggaggctagtgatgaggccagtactagctagtagctcgattgggataggcacttggagcctcaagcatatcagggctagagcaattctccactgagagattattataaagaattcctcaatcatcttggaattgctcctttccaattagttccaatttcctacagaatcct

SEQ ID NO: 390292 - DNA, 520 bp, Cannabis indica
gaaaagaaaggaaaagaaaaaccaatcaataaaccctttattagttccttccattccatatggccaaggcctggcatgctaaattaataattaaagaagatccaagcagcactgactcattacatcatatgccacaaccacacccattactggtcaacctatatatattatataaatatatatattgccaatcaaaatttcatataattattgtattttctattacccttctctctctctctctctatccatgaaaaattgtagttcgcaaaacagtgttgttgtttttactttctattgaattatttcattattatacctttagaaattaaaactatgttttgtctctttaatgaaatgacatcttaaagttaaatttgaacaaagactcccattttttaacatcaaaacaatttgagaaattttcataaaaaaataaaaagagagagagagtccaagatcatagtgagtgtgtgtggagggatgtaatgggagtatcactcttgaagtgatttccctc

SEQ ID NO: 390293 - DNA, 576 bp, Cannabis indica
aaaatatatatatataacacaattaaaacaactttaattatattttctattttagagaaataattagtattttttttcattagcggttgtttgttttcgttataaaaattatcatttataaaaaaaaaacattagtattattattcttataattattttattatatattaataaactaggaagaaaaagtgattgcccatttattaataaagtaataattatactgttgaatattaatatgatttaaattttgtgatgaattgaatgatattttgtttttcattccagattgttgctgggctatatgcgcagctgatgtagttgcttcgacctttaatgccctaggaagagaggcaaatttaaatctctctccacaacaccttgtggactttattaactggaaatgtaagcgtatgggaaaagggtttccagtttggcgtgcgcttgattacatcagagatcagggaatcacaactgaagaattatatccattccaaggtagaagaacaaatctagatgataataagaaagcacctgaggtatttttttttactaattaataatattcttttactc

SEQ ID NO: 390294 - DNA, 743 bp, Cannabis indica
ccattcttgatttgttttaacttttaacaatgtatgattttcagttccctgttggtcgtatccaccgtctcttgaaattgaggaccacagccaatgggagagttggagctactgcggcggtttactctgctgcaatcctggagtatctgactgctgaggttttggagttggctggcaatgcaagcaaggatctgaaggtgaagcgtatcactccaaggcatcttcagcttgccattcgtggagacgaagaacttgatactctgatcaagggaaccattgccggtggaggagtgatcccccacatccacaagtcgctcattaataagtcatccaaggactgagctgaccataggttttttggcgcgactttttcttccaactactgaaaaacacaagttattctgtcttctatgggcaggataatgactgtgcttaatttgctgttagggatattttattgtggataatgaatgttatatgagattatttagttaaccttactttccatttaccaatcagcttatcttgtgatggtttcctttttctttttcatgtttccggttagaaaaattacaggagttcacgttccgagtctcctttgttattgatttaatcacgatatgtattagattttgtagaaattgcacgcaatgacttaatcctttattaaaaatttttatcagataaattaatcaacgtggaactggaagtccgaattcaatagtcttcaattggtttccatg

SEQ ID NO: 390295 - DNA, 1213 bp, Cannabis indica
ctcacataataaatttaattgtgcgtgttatagagaaaaggtcatactctgctttccgaaagcaggtttttgctgctgcttgtgctgcccttttgtatcaaatatggaggaataggaatgctcggctatggcagcaaacgcaagaagatccgaagacaattgtacagttgattaaacatacatgtaagattagaatacaaagtatatggcctaaaaaagtgtccataggtgatacaacttggtatagtgagttgtaatagttgtaagttttgtaatcaggttggggtaattactatcagtccttgttttataaaaggagctgatcaagatgtattatttggagtaatgaaaaacactgctgatttcccaaaaaaaaaaaaaaagtgaattgtcttataaaaaaaactagagataaaatgactaagtctagcttcactttacaatttctataaataaaaaagtgaagagcgagaatctctgaccttgtagagtgaatggatggtgcgtataataagttagggaagatctccttttatagaaaatgagctccaattaaattacaataaaataataaaaaaaaattacaccaaatttgttaggaaatcttgcacgagctcgcgagtcaattttgaggcccaaaatatcaaaatcgtggcaagggtgtgagacacacttaaatccgtcttgaaaagagctttcatattctacttgaattgcatcatgttatccataatatttatataagagacacgaggctcaaccaaaaaataatcaccatttcaaagtacgcctaagtcagatccaaaatgggcccaagcccaacaaaggctcaagacttcgcctctagaacatgtcactctcgcgagatttgaaagcctccttagccttccgaaacagggataaattgaaggtatctcgataaagatatgggcctacttggggacagtacatctagaagcctaccatagattgggatccggatgtctactgcaggatgagagtcggatgtctaccttagaacgacgtgtctattgggttgtctgccctaaataaaattcatttcaatataatcatatttactaattaataaaagatcagaaatcgtttttatgttgcatggtttatatgatttatttcattattatgtttattataaaaattctattaagtctagaacatatacatatatggtggaacacttcttaatgggtaa

SEQ ID NO: 390296 - DNA, 718 bp, Cannabis indica
ttctagacagagctgacagtttaatcaagctcgaagaaaccgtcaagaaggtcaggggagttgctcaaccagaagcaatagattacattgctaattattttttaagtctcgaatagacattgactacgaaggtgaaaaagaataaacaactaatgcctctactaaaatagactcctcttctgtttctcaagatgaacttgagcaaggagatagtgacgatgaatcccctgctttttctcaagaagatctcaagcatgaaagcagtgatgaagaatctcgccctacttcccaagacaacttagaagtgggggcagtgacaaagattgtccctctaattcaaacaattatcaagaacagggttgcaacagtgaagatgtgtcttatgagtgtttatagtataaatattaactatgtattcatgttatttctcttgtagaaggagaaagctagaaggaatttttgtagaggttctgaaagtatgaaattattcatcctttacacatgaaaagtaagggtatttataggcacacatgtgggtaagggaataccccttacctacctagggtttcttacgcaacacgccacaagggctaatactacaacatgatgatctgatcgttgtttggtagctagttttcccattgtgtggcgtatgactgttgtaaggaattgcatgggaatgtggacacatgtcactcaaaggtttcacctttaaaag

SEQ ID NO: 390297 - DNA, 873 bp, Cannabis indica
aataattaaaccctacagaataaaactcctagactaaattcgtaatcgtcattgcacataaacatataatctctctggcatgtatcgtcgctcatcaggataactttgggctaagttagattagacttgcacttagaaccatctagtcgataggctcctaaaaaataattattatgtgaaaatgtacatattaatttttgatcattttcaaaattattatatatatttttttttaaataagaacccaattttatatatattaattctcttaggttaggaataatttcatctttcaattttttctccaacatgagaagaggaaattgaatttggaacttgctcgaataaaaaatgtaaaactattaaatagataaatactaaatagcattcatagtaattagtacaataaatattataaaaaatcactaactaattataaggtcgatcgttgtgctaaacacataaatactaagtagaaacactaaataatgtgtacgacgttttttcaacttattattcctatatatactttgaaaaaaaaaacattattattcctacaattggactttttgaaattcttagaaatttgtatggtgtattgtttctttcttcttataaatgcagtagcagtaccattcattttggttttcagtgtttggatacacaaaatggtagcatatgtatttctttttgcttcacatggggagactgtacaaggccaagtaggcatgcaggacccacctaattaagtattgaatattgttcccaaccataattattttccattttaaaaacataaatcattcatttttatttggttttatttagggtaaatattattttggattcagtgttttgcaaaagctactaatt

SEQ ID NO: 390298 - DNA, 1133 bp, Cannabis indica
tagttaagctcttacctctcctttgttgatatcaagacttttagcattcttgtcaatccttgcaaattaagccatgagtaaggccttgatctcggcaacagagtatgcatcttttttggaggtagcagatgtgacaaacacatcatattcaggaggaaggccattgaaaatggcttcgatgtgatcttaagctgtctgtttgtgaccaaaagtagcaaggaggtccacaatacctttgatcttcagtagattgtcatttaaagagcctagcatcttggtatttcttagtttagacttgtacaggctgacattagcagcattaaaagtagtataatactcatgaagagctttccatatttgatctgtggtgtcattatcaatcatctgattgttagttttctcaaaaatggaagaaagaagccaagaaactaagaggatgtcttattgtacccaatcctcaaaggcgggattgagaacattattttgttcatctgctagtgtgagaaatttaagaggaatttgagtagaatcaataaatttatgaaggcgactacctttgattgaagctaaaacttgatggcgcgaagagaggaaagtgtgttcatcaagcttgatcgacaaagaatgtgtaaaacaaattggatgaatttagtaagggaacctactagttgaggagttgagcagtgttcaatcttgttcctgctccattgaacaattcaacatactattgatggatgattgaagctctaataccatgtgaggttttagtgaaaaaagagtgttttgagagataaagagtattctgtattattcaatgaaaaaattattagagaggtatatatatgtttgtagttataaaacaacctctaacacttaacactttttaactaattatgtacctaacaaaagctaatagtacaaacactactacaatgttagcctttagaggctgttttttcacccctatttataaaaagggaagctaaagggtgtgaaaatacccgcttttgtcgaaattgacatttagaggcggttttttgataaaaaccgtaggtataaaattgtattataccatttagagtcagttgggaaataaaatactttggttatatgaaaaataaccctatggcgtc

SEQ ID NO: 390299 - DNA, 748 bp, Cannabis indica
attacaaattgatgaggtataattactaaaatttatagtgtattttatagttttagttacttttacatattttatcaacaatagttacacaatcatataaaaaaataataattattattagaatttgaatattaatattcattttaattgataaataaatatttatcatttgttattattatcaaaatatttggtcttttttaatgtatcgtgcttttgagataatctattctaactctcgggcttgttgtgccctgctttagcccatattttttcatattgtgtcgtgcctaaaaatatatattttttgtgtcaggtcgtgctcgtgcctctcgaactcctaccagttttgtgacatatcaaaacacctagcccatatttacaacactagatggcattacacctgcacatctattgaaaagtgttccatgaacttcattgtaaaatcaccacagtcaataatacccttttgtcaagacacaattggtatacaatgagaaattttccgaatttaaaatcttgacctaaccccatcccaatatctctctctagtaactcatccaggtattaacataatataaacagtaatcattagaatatatatggattcatttttttatagtcttaccatttcaattgttattcctactctattatccattgataatactgagcgagtaggtggaaggttgtcccatatgaaaaaccgtattttttgcaaatgtcaattatatataagaaaatataa

SEQ ID NO: 390300 - DNA, 827 bp, Cannabis indica
acattcaatctaccaaaaatcatgtcgaaaaccatgaaagcatgagaggcaagtaaagaatgacataatttttatttcaaatattttcccatacctaaagtatgataaaaaaaatgttttcatgcacttaaatcatttagatgacaagaattgaaactttttggtaaatttttcaaagatttaagcaaaaacaacatatgtaccaaaatagagttttatgcatcctttttgaaaaattctttttcaaaaatttaagcaaaaacaacatatgtacaaacctttaggcatgctaaatacactcatttggatatgttcaaatatataaacacatatactagccaaatatgcaaaaatttacgtaatcactagttcaaaagtatgttcaaaatttacaaaaaatttgtgtaataacctataatttgaatttgtcagcatgtatagctcaaatatatcatgaatcaactaattaaaatatttatacatagaaatagtgtgtgacatactaattaagcatgtatacataagagaatgaacaagaagaatcaaaagtaattcaattagaaaaaccacttcatattccactttttttccatctaggcatattagtctcatcaaactaagtagaatgaatcagaatgatattattagtgatcaaatttattcttttggattgtatccaagaattgacacattctttttctatgatttttgagatttgttggtaatgtaggaacttaacattcttctttaagcatcatcacccaagagccaactttggttcctctttattgatacctacaaaataaacttagatctttctttttggt

SEQ ID NO: 390301 - DNA, 1672 bp, Cannabis indica
tttatgactcatttcaactcaggattggcgctaactagacctgattaggtcaacccgcaaataattttttaaaaaatggttccgggggttgggtcccaaccgggtatactccattagacgaatttttgcgggttaattaggttttaatgttcaccggatttcgggttggacccaaacccacccgccaacccactaaataatatatataattctattttttttattacatttatttacatattaattaaaatatatataaaaaaaatcctacctaattattactaacctaaaccaataatacctattacctcagcttaaggttaattttagctcaatggaaacacactcactcaagaaagtttgagccactactggctccctctgaaacttttgatagtggcaagcgttggacgaaacctgctgctcacaagctgaagattaatgtcgatggtgttgtattagaggctgcaaatgcatacaattctagtgttgttatcagagatgatagtagttctttgatcaaagctttctcggtgtataattctgggggtgttcaactcgagcttgctaaaataattggcatcaaggaagccttaagttgaatcaagagaaaggttgttattgtatagattgtttactagctcttcaagctttggatagctctgttcgtatgtattctttatttggttaattagtttatgagtgtcaattacttttatcttcttttcataatgttaagatttgttttgttaaataatctgctaattgagttgcacactgtcttgctcgaaactcttgttattggtcagtttgtatttttgtggaaggatcagctcctgctgttcttcaaacattgattagtgctgatttggctgtttaaaaaatttgaaaccattttcaaaaaaaaaaaaataattatacctattacctaccagttacaaccagcacctatactttaaataataaaaccctatcactcaccactaccatccgcacgcaccagacaggcagggaccatgcacctattattcaattttttggtttgttaaaaaaatgtgaatttgtaaaaaaaaaaataatatattttttatatataattttttattaaaaaatttatatatattatataataataatatatttacattctgtaatatatatttaaacataattttatacattatataactatttattttgtataatgtatatatacaattacacaactttttttaattttatataactatttgaccaaataaaatttaattttttcaaacagttgatcgggtcaactcggttaacccgtgacctgccaacccgaccttattttgggccaaggtttatttttttggatccaaaacccgcaaactcaaaatctgtgaacccaaaacccgaccaacctgcctgatgttcataacttaacaaccctctcaaactaagtgaagttctaagaaataatacttagtttttcacgcaacataggaaatttagagctcgagataggaccatagatcaccgtcctcaaaggcacacggctcaggtgttgggttttatgccctaaataaatctttacaatctgattagttatcaatatgagaaatttgaagtgattgatgtttgcatgaattttacatgctaatggtttaaatatgtttattacattcacaca

SEQ ID NO: 390302 - DNA, 871 bp, Cannabis indica
tctaaatattatgctttagtcactaaatatttttttatgtgatttaaaagttatatttaagtcaaaaaaaattttatattattactaaaaagttataattaaaaagtattatcttttttttagagttaagctacttcgaaatataatatttatttgatcatgctcttccaattatattaatttccaatttcttacattttgttttatttattattcaattttttttttatgtaagctagaaattttattgcgagccttttctaaaatctaatgaccaattcatattctattagtaagactcattttctcatgtaaattatgagaaaatctataactataataagcacacttttcaatttcttacgttttaaatttctatgaactattctataaaaaaaaaatagataaataaaataaaataaaataaaattctatatatgaactatatgtaattatgtattatagttaactaccaaatcttgtcgctcttgtccaaaattcggtagcacggtaatagtttgggggcacaactcgacaatttaatataattatataattatgtagtaatgatatttggagagtgtgaaataattacatgtaaaattctcaacacatcagggtgttcataaaatagctaattcaattcaatccgcaccatccaatctaatctaatttgtaaagtgcagatatccacttatgcagattggattagattgaaaaatttaaaatccgcacttgtgcaaattgaatgttgattgacatgtaaaagtgaacaatccaattcagtccacacatttttataagaaaatttaaaaaattatatatataaataatattttaatgtaaaaaaaatagtaatttaaaaatttaa

SEQ ID NO: 390303 - DNA, 953 bp, Cannabis indica
actttgcttttgtttttttttttttgtttgaatctatatcagtgataattagtgacaagttaacaggtaatatcagaaggttctatttgaacagttagctatattttatatttgtctccccccctaaaaattgggagcccgcaaattctatcgtattgctaactcataaagaatccaattgcaaatcttataggagctaaccatggtttaagggacactaagccaactttgaatgaagtaggaaagatatttaagaacacttttatagttcttttgcaacttttacatgtgggaagaaaaagttagaaattctatgaatttcctagtaaagatagtcctgattaaaaattgcttttcatcttatgtttgctaattaagtagtttatcttgaaacctttatataacattgttccatattctcttaaatgtgacttgaaagcagctgacaactattaacattatgtgtatgtgttgaattgtatcttcagggtaagtttgagctggacaatgggtcaactgtgtacgggtttgcttttgtagattgtgctgctttaaaattttgggttggctccatcaaagatgatgcatcctttgctggtttgggggctttattgatgcaggtatgttctgttaacattctgcatgctgactacattgtttgtttcaatcaaattcaaagcttcaaaattgagttaactatatcttttggatttgactgtaggtgtcacctaaagaagttttgtatgaaagtagaggtgaattattttctcaaaccacccatcatctgtcccttaactatttcttccttattttggtcgttattagtccattttttgaagttccaactagaactttgaatgtatagttgagaatatcgaatatgtattctgcagggttatccgaaagaagttcagaaagcaactcagaagtatctgtaacaggtcattagtcac

SEQ ID NO: 390304 - DNA, 985 bp, Cannabis indica
ttagttttcttagattcttttttataaagttattgcattcatatgtgtaatatgtgagtgattacatatcattattattattattattattattatcattattattattattattattattattttaaaatgatatcctattcacttcattatcccatgatcttggcttggggccggcatcacatcacatgcacacactcatcaacaaatcacatgtgtgcagtaagacttaggctcttgtttttgggtagatttgtattgtgttgatgaaatttattccattttggggttctaaatttcctttcttctttttcttgttatttgtatgggaaaattcttaataataatgtaatctaagtttataacattttaatattatgctgttaattgaaataaaaaattaaacaataattaaaaattaatttgtattactttttattttcttattaaataataatataattaaaaatgtttatttattattgtagaaatttaaaacaaaatattcttattaagtattagtagtgcttagtgcttactgcttaggaccactaccggatagcatactaaattatactaataataataattataattaaattttacttgcgtccatcagtttattaataatttaaattaaattatcatttattgagattttattgtactttttgcttaaaaagaatatgtaaaaatcatttggttgctttgagagtgatatttatgttatggtatgcgtcgaatcccaatattatatttccataaaactgttctataaaactgcttttactattcaatattttaattaagaatcatgttaggctaaaattagtctaagtttcgggacgtattttcggttagttttcactctttgtttctagttttaggactattttacgcttgattcttttgtttcaggtccccgggtgtttaaagaaagtatttacaagaattgaggacaagtggtgaaagaattgagaagaaa

SEQ ID NO: 390305 - DNA, 763 bp, Cannabis indica
ttttttttataagttttcacttatttagagaaaaatattattgagaaaattacattctatactcattttttgtttcatattttaaattttatcttcattttactactctttaatttatacccacttttataagttatattcccattatgtacattaaaaagtctaattttgataagttttgtgatgttatatttggtattttgattataaaagagggtatttatcaattaaaattatttaagagttatatttgattaatgtgtaataaaaatgggtaattttcaacttatcccaatattattttccaaataacattattctaaaataacagaaaaacaatactttgtattattgaaaaaaaaaattatgttatttcccataacatcaacatcaatacaatattgtttctaaagcaacaaaaaacaacactccatatttttctaaaaaaaatccataaaaatataaaaaaaataaaaaaatctataaaaatgtaatttttttgtcatttttgcatatttataaaataattccaaataagtttcagaattattttttttttcttttccagcttttataagtttcaagcctatataaaatgttttttttatatataaaaaactaaaataatttcacggaaaagtaaatactaaatatgattctttcaaaatttcctccatgtttaataaccaatgtattatttgattttcagcaataaaattagttattatattaaaaaaaatatatatgattctttcaaaataaa

SEQ ID NO: 390306 - DNA, 987 bp, Cannabis indica
cgagaccgaacactccaggtctcaccgtcctggcatgtacaatcatccctgagctcggaattcattcttgttcagctttcgcctttcctttacatacacacgaaaataatatctgtgagtcaacagactcagtaagaaaagcacataatatacaatatattaccaacttgtatctaggcgcccatacacctatccataaagcttataagatacgtaagaacgttttatactaagatacgagtgtacaacatgcacacgtaccgctactgtacgagtgttggtagggtttgctccttacctcgagtaccctaagtgttgtaccactaccctaagtgttgtaccacttacacttcatacctatctatactagtgttggtaacaccgaattgtactatttaaacatcatacacaggaacaatgcactcagtactgttagtggttgcagtatacgaatcacatataacatgcatatatcacacatacacataatcacatatattatatgttctacgctagtcttatcttgttttcaaattcaagtgtgatagacgacctaaacgaaatagattaataacatgctaaaatccgaatcgggtacctaaactcacaactacaagttcgctatcgacaattaacatgaccatatcccaattatcaaggaaacaacaaactaaggctctgaaaaataacacaaattgagaaaaggattttttggggatcttgcctctgatctggttaaccggttctacaggtgctgtagaaccggttaactagtttacaccagaaaaccctaaaagttcagaacttgcacaattcgtacccaaactttaccaaaccttctagaatacctgcactaacttctaattaggggtgagcaacggtcggtttggcgggttttttacacaaaaaaaaatccaaaattcggttttcaatttttatggttctaatccgaaaaaccgactgaccattataaaaaatataaaaaaa

SEQ ID NO: 390307 - DNA, 1312 bp, Cannabis indica
tcatccaaaatgagaaaataagtacttttgagggagaaacgaatcgacttagaggccaaaacagggacccaacgcctaggttgacactttgtcaacctaagtcacttctgtcagcagtttagatgaagtcttccgagaacattctccatttttgtcaaagattaagatttgagtgcttttgagaaacaaacggagcctcctagggccaaaactggtacccagtgcctaggttaacactgttaagatttatgccatagaaagcctgtaaaaatatttctgattacaaataagagttgaacattttaatatatatatatatgaatcttaaattattaatatttaatattgaataatttatatataaatatcgtagattttcttattcatacatgaggttgtgacttatattgtacggagaattaagataacttagccatgaataaaattgtcaccaacatactaaagtttaggaatctttaatcaacgtttgctagtgcggttcactgatgcctgttatttcttaattagggctttcgaagcgagcttctttccagtatttaggggactcgcatatctaattttctttctttcattctttgatgtggggactaattgcttaaaatttctcttttttacccagatgtgtgacgcgcttcagtaagtccatgcacacaaatcttatgctttcgacaaagtgatctttatcattttactttgaagaacaggggatgggatgccttggtagcaagaagagtacccaaaaggcgaatgaggttctaaaacctcccatagtctcattggtggaagtgattggttgtcttatgcccattcaaaactatgtccataaagccaccaactgggaagcaaacgaactatattagtccttgaagtgtttgtacatcatctttctaagatcgcaaagagtagtagcataattcttcgcgggggaggaagggtccttcatcgtctagatagggacgaggagacccccaatcacatttatggaaattttagggcctgaagctagacccacctaatgcctggagccactctgcccctctagaactattttgtcaattttttagtttttgtggggcttgcccctttcttagttgattcttcaggcctaccatttgatggtcagactatttattttttactcactcaagggatgggatattccaacccatgcagaaattttatacttttatgaactcgtttcactttccaaaaacggggatgaagcttgagatggattttactctcttcaagctcattcaaaaaataagggtctagttgttggaaattattt

SEQ ID NO: 390308 - DNA, 1228 bp, Cannabis indica
aataaatataattttttgaaattatattctattcattaattattaataatatacttatacgtacatacatttgtacttatataaattttaaactaattaataattaaaagctattactttgttcggcaggagaaagaagtagagagttatgactttgcatttgtcgatgctaacaaagatgggtacataaaatatcacgaacaacttgtgaagctgattaaaattggaggagtaattgcatacgataataccctatggtttggatgtgtggccctttctgatgaagaagaaataattataaaggatgattttttaaaggcaaatagaaaaatcataaaagaagtcaatacctttctagccaatgataatcgatttgagatatctcttgtttctattggagatggactcaccatctgtagacgtctctattgatcattaatatttaaattaagagattgatcacacataataatttatattaaagacgttctcgagagaaatgctttcatatagcatcttgttaacaataaatgtatgtgaaaatttaagtcttctttttattttaataaatgggctagctgcttaattgctactcttgtattttttttgttaaataatgagattgctactctaatctaatttgattgatcttttaattaccacttattataacgtatgattatgttgacctcatttttttgattatttcaatttaaacattacatgacaaatgtgttgaaataattactcatcaaattgaattatgaatataaaaaccctttaaacgaaaaagaaaatatatgaaatgtattgaaacgttaacactcaaaacaataatctataactattgataagagtgagtgagttatagtagtaaagttattttgtcatgtaacatggtagagtaaattatcatgcagtatagtattttattttgcttcgtatcattcttttaaaaaaaaaattcttgtttttattttttttacattaccttaaatagttctcaaatttctctctaatcaaatatgtatatatatgttaaatcaattagtttttttttttttatctattcatgtaaaatatttttttttaacttaaaaaaaataaaaacaaaaagtaaaaccaatctaacatatactattgactaggcataattatattaatttattttttttcttttattattttttttttaaaatcttttcttttattatttctttatatatat

SEQ ID NO: 390309 - DNA, 638 bp, Cannabis indica
aaatacaagtgtataaccttaatctaactagaagaagacaagagtagccactactattatctagttttaaagggaccaactctcgtttggaactaactattggcctcctataatttttgagaaaagtaatcagtcagttgttaatagttactctatatatatagtcagttgattttgtgctcagaaatgcaaaacacagaatgtattctgttgtacgacaggtgggtcacagggtacgtaattatgtgtgtgaatttatttatgggtctcagagtacgtaataatgggtcccagggtaagttatcattttttaaccctaattatcccttaatcaatcccacccctcagatcaaataactaacccatctaacgaatgacgtacatcaaggaatacataccctaaagtacactaatgggacaaaatcgtttccctatgtatacccaattgtaattactaattattttatggatatatgtattttaacatatactttcctaatcaatgaaatttgaactagacctaatgtattgaagtttgaacctatatcatttgactctgattttctaacatcttatcatttgaaactacattatcaattaaaaatcaaataatgtattagggaaacactaccttttaa

SEQ ID NO: 390310 - DNA, 703 bp, Cannabis indica
actgaacatgataagtcttttatgtttttttagactagacataatagtgagtgacatgaaatgagtatttctgtgcataaaaaattaatcatgtctagttttattggacataaaaagtcatcccacaattgaaacccctttcatgtccaacaaagctagctataagcccttttttttttctttttttttaattaaatggcatttgcatctagcaaatctggaagtgaagcacattttctttcaaaagaaaaaattaattatacattatattatatacaattatttattcatttaaatattatatacaattatttattcattatattattgttagtataagatatgtacatatacatttattacttaatttagttttgtatattcgtagaagtgaatatataatttactaatattatattaaattttgtgtgtgatcttatataatttaacatagttagattcctcaaagtgatgaagaatcatgaaatgattatttgaaaagctttttaaagaaatcttaaatacaattgctacttgaagtagttaattaaatatctttgtatacctcggtgtatagtttttatcaagtcatgaaagtgagaagtcataataattagactgctaaatagtctattaataaattagacgacttgttagaaagatacgaggaaaattaaatgatatattatgattatatctattt

SEQ ID NO: 390311 - DNA, 805 bp, Cannabis indica
tataaagatagagtggccaccataggtttggtgagagtgagaggcaattggcaatagatatcatgttacatagagaatgagaaatgatgatgatgatgatgagtgtttggaatgaaaaatttcattattccaataagaaatggataaataaaaattgctggttttggttacaaggggtcttattttgtctgccttgaaatagacattggtagtaaatgttcacttaatattttgttgaaatgagaaacttttgtggattcatgataaggttttgcctagatgtttttgctggtgtaaacagcaacaaaattatggtaccaacgcgtttcaccaccaaagaaaaaataaaaaaattaaaattgaaaaagaaagaaagaaaaaaggtgggcatgcattggcatgcttgctttccaagcacattgtcccaagatagaagaggagtttttatcttctcctactgaaaaataatgcaaattcaatatataccttactgcctactcaaagttttcattttgaagatggtgtaggtcatctaattcaatatatatatacggttgagtattagatgcttataataaaaatgtaatataagtaaattttttatttttaaacttaaattaattatatacttaaataatttaattttttaattaaaatatttgataaaacttttttagaaattatatttatatatatattattttaaagaaataaatcaaatcaggttatatatatagggaaatttcactttttggccttaataatacaagccatatcaaaatttataccctcccttaatttgtac

SEQ ID NO: 390312 - DNA, 1325 bp, Cannabis indica
ggaatgcctgcgactaacaggtcacgtatcgggcattaatgtatgaacctctcgaggttcgataacgatcgtgaacctctcggggttcttaattcatggaatgcttgcgactaaatgggtcgcgtattgggcattcatgtattgacaatattgaactcgtgagttctggttgatttgtcgcgcacatttatcattcggacctaacgcttgtaaagatgcagtatttacataggcacgggggagaaacagcgggtcattgcatatactcgatatatgttgcgactgtgctaacttctctctacattctgcttttattctttttactatgtgatgcatagtgtgcgactagaccctgtctcggtcgcaccttctcgcaagttttgatcatgcgagaaaatattttgggaatcgttcccttatcatgcccctagttcttgtgatgacatgtcgctgtctaatcgttgaactttactcgagggacatttgatctatcacattgcaggtgatctttggtttcaccttatcgaggtttttaaaattactatcgatcatcatttatattttcaagatgccctttcagcaaaactctttgggttctgtactgcccgttaggacggagatgcattttgattatgaatcgtccaaataaggcatagatttggccatatatacgatgtggaagtgttgaaagtaccgagaaccatcaggggtgtgcaataaacttgttattttatcatgcaaaaatgagtctttggactttcctatttatgattattaaaataattattgcaatagactttcaaaatagttatgccagaatgagcacacattgggctcgccaatacatgaataaatgtataaagagcatatttggcttctaaatatgcatacaaaaatgagcacaaacagtgctcgttaatttgtgattagataagcataatcgtgggttttgttaatcatgcaaaaatgagcactattttcagcttcccaattatttgtgagcatatgcgaaaatgagccttatagttagctctaagtatcatgcaaaaatgagcacacattgggctcgccaatttgcgattatgaaaacatgggtattgtaatacgctcataaataattatgcaagaaataaatgtcatgtttcactctattttgcaaataaaatgagaacatgtaaaaatatagctttatcatgcattcagatgcatttctattcccctcagaagttaacggataataatgtatcaaatataaaatgattatttgaccaaagtgttggacttgattaaaataaaagaaaaagtgcacctggtaatctgtaggc

SEQ ID NO: 390313 - DNA, 1203 bp, Cannabis indica
gaacatgcaggagaagacatcaacaatgaaaagaaccagaataactaaaaaataacagtagaacaacggaggaaaatggaacatgtattggagcataagatactaaaaaaaagaacctacatacaaattttattatttttctattactattaaaaattaatgttaataatgtgtttacatactttatatgacttttagactaattagatactacattgaattcaaatattaattattggattaatagagatttgttttttattaaataatacatacatttctttaagatacagcagaactagaatatttgaaaaacataaaaaaaaaaaaatgtaagagaacaactttaaagcaattataaaataataaaaaacataaaaaagtaacaaaaatatatatactcaatcctaaataatgaaacacataaaaaaaaaaataagacactaaatattgaacaatagaaaaacatagatatctacaaataaaaataaaggaaataggaaccctgaaaaaacacaaaaacaaccaaattaccttatgaactttgggcatctctaaatattcattctcacggtcatagtctgagtcagaatctttcactagaggtcgaggacgtttggatttcctcttcttcgttgattcaccaactgatttccatttagtagaaaaaagtgagctagggctaggagggttgtctttgaaatttctctttcccatggctgattgaggtaatattttttaagattttttgtgggttttttttgacagctcgggaagaagaatttgaacgggtatcagccaaggtgaaggaacaagaaatgaatttataggacaaaaacaacaacaaatgggggggagggggggaatgaaaagggtaaatagagtttgaaaaaaaattgaacaaaactggagaataaacaactaggaaaccctccctaatcaaaaacaaacactataaacatgtgtgaattgttaaacgcaaaaatataagaaaataaagaagaaaaaatgaagacgaagatgaacgggggagagagaatgagaattagaatgaaaaataaagaaagaaatctaatacaacaatacataaataaaagtagagtttttggtgactaaaccctgtcaactatcgtttcacttgcacttaattctccaagctcaaattttgacggaaaaaccttccaaactactgaactgttaaca

SEQ ID NO: 390314 - DNA, 729 bp, Cannabis indica
ggagatcgagattaaagcacacaatgccatacttctgagcttaggagatgaagtgctcagagaagttttagatgaaggaacaacaatagggttataggagaaacttgcttcaatttataataaactctacttgaagaaaaagttgtataccttgaagatggatgatacaaagaacctcaaaaaccatcttgatgaattcaacagaatcattcttgacctcagcaacataggtaataagattgaggatgagggtcaaaatacaattttttcaaaatatttagtataattctatgaatttttatatacctttattataattaaaaaaattggatggagccaaggctctccgattcgattgcacttgatttcatccatatttatctatatattatttatataataaaaatcacaatcaaatgaggtaactttgtacaattatttttactatttatttattttattagaattttagtgagtttgtcttttcttttataattttgtatatatattgaataatatgtattcgtagtaaacttttttttttaaattttttttttttgtggtaaaagtgtcgtagtatttatagattatgtgagtttataaatatacaatttctttattaacttcagtttgtccaaatattagtattctttttctttcattttgtataggtgatttgaataccttaatatttttaaattagttattattttttaattaattaaattt

SEQ ID NO: 390315 - DNA, 1263 bp, Cannabis indica
tcttggtgtgtatttcctgtatagaaaattcatcagcaagaaatcttaaatcacagtcattgtcatgtgtcaaacaactaaccgaaatgatgttatattgaaaagaagggacataaagtacatcctgcaaaaccagatttttgcttagccgaacattgccacttttatgaaccattacatgattattgttagggagaatcaatctagtagcattgacagaatgaacactttgaaaaaatttcaaatcagaacaaaggtgtctagtggcacctgaatccactatccaagatttttctttaggcaagaaatcataattggttaacacgatacctgaactacctgttgagggattagaatcggcagcaggcagagatgtgttttgagatgctaggagattgagaagttgttgatattggtttggtgtcaattggggcaacaaagtattactgtcgttagcatccgaaccagtttctttagaagcttgaaattgatttgctgctgcgttttttgacctttctggtttgttgtacccaggcgggtaaccgtgtatcttgtagcacttctcaatggtgtgtccgtgcatgttgcaatgtgtgcaaagggcctgcacgttttgagattgattcttggaaggttcggatttcccaggatttctttccccttgaaaggcaaatgccatggaggagttgggatcggcagggacattttgtccccctctttgattctcatcctgtgaaactaaatggaaaactctattaatttcgggtaaaggatccatgacaagaatattacctctcacttgtgaatagaaatctgataatcccatgagaaaagacatgatgtattccatgttgtgatgttcttgcaacttcttgactcctccacatgtacagccattacatgtacaattaggtctgaagttagacaattgttcccacactgttttgagcttagtgaaatacatactcacagattgagtttcttgtttgaggttcatcaatatctttctaagattgtagatatgagccccattcctttgctgaaacctaaccttgagatcattccatattgcagctgcagactcatcatagagtatgctggaagagatctctttagaaaccaaattgatgatccaagaaatcacaatattgttgttgcgaatccaagcattgtagagggtctgatcagacattggaggtttaggtatggaaccattcaagaaccccaatttgttcttgactgaaatggccaattccattgctc

SEQ ID NO: 390316 - DNA, 1107 bp, Cannabis indica
tatgtaaggagtagagtatataatggatggtttgggatctcacatgatatccaaacggggcctacatgaaaccctaatttatgtagatgatcgaattttacctaccctatctatattttatcattttatcatgaacgtgtgaaagagtaatgtgggcaacttgttcaaataattttatatataaatcttatgtatggagctaggaggagggtgtcacatttactttactaataagatgtctctctttcactaatcaatatttaaagaaattataacctattctttttatacgattattttatagtagacatcttactaatttttaaaaaattatgaacaatttacgataaaaaaattgtaagctttatttatttactgaaatttttagaaactaataaaatagaacttaaaaaaaataaaaataaataaacaaataagcagataatttttattatagttcaggcgttaataatctttagtccatgagtcagttatattgaccttacaagcgagtgttgaataatacaagcttttacagtataaaacctacttctcactccttttgtttttcttgaagaagaaaaaagttagtaagaattttagtagagatttagctagtataaaattactcgctctttgtacataaaaatgagagtatttatatgcacatgtgttgagtttttgtgtcctaattaaaactctatttcaatgtaatcttgaatattcatttatcaataaaggaacataattattttattacttgtttaatacattgcttggttcacgtgtttatttcatgatcatttgtttgatttctaaattcatttaaatcttatcacattgttattcatgattactgtgttgtctacatagtggaaagtaatcgagattatgtgattaaatgtagtcccacgatttatcagtacacaggatttccactgatatgataatcaacaatgtagtttacttacacttgaatagtgttatgtctttaccaaggcattggtaaagtatgcttggattggatgtattgttatacatcggactggatcgatattgaacttggataagatatcataaacttatcgttatatatttctaagtcaa

SEQ ID NO: 390317 - DNA, 718 bp, Cannabis indica
atttaagctaagcgatctttacaggaatcgttttgtctatacacatatagaagtctattgttgttttctattcaacttgtattggtacattggttcagtttgttgttttgtatccaatgtattaagttctcatcccaatctaaggaaatacaatgctattgacgattagatggagtaaaaaatttgcaatcagtagtaatatactatatacaacttatgttaatgtaaatataagtatattttacgtcaaaaagaaaataataataaaatataagtattttccatttataaatatgtttttacttttgataattaacggtggagtttagcaaccttcaaatattgttatagttcctccctcctctccttttttttttttttgtagaaaaatagattataggtttaaatctttgaaagtttcatacacacttgtaaaaaactcaaagctcttacaataacctttacaagttcatgtgcagtccaactaatatatatatatatagattatatttctttgattaccaatatactctcttcaggttgagaaacaattccataaaagataatgcaccaactatagaatttccctacctatttatatcttcctggtagacagtatctttttgtattaaatatatcgtagaacttctatttaacaatactttattcaagaataacctctaatttattataaaaaaaatcaagtcccaatttgggc

SEQ ID NO: 390318 - DNA, 661 bp, Cannabis indica
taattccttaatttttttttctataaatatttaattttttaaaataaataaataaatgaaaatggagctataatcgaacaatcctaataaacgaggtataacaactataaaggtaaattataatttaaaaatttttaaaatgacacttctactagatgagctaaatacctcaatattttaactaatgtacatctctacatttatagctaaaatttatctcttagctaatcatttattattattactattattattattgttattttgttttctttctgtttcttttgttttatatttattaataaatatttaatgaaatgaataaattatattcaaaaatataagattaaaattatgtagagaaaataatagagtagatgatatatgatgttatgcaaaagtttgatgtaaaataaaaaaattaaaattttattaagatattttaaaactagaataaaaaatttgacaagagtgctatgtgtgagagcactgagcacttctaaaagcttttctattttatcatttaaatatattattaaattttaatttctctattttatataacacaattttacactagatatacatcaatttttttaaaattacatcactaatccttattgtttaaaattttaatatattatattcatgtctaaatata

SEQ ID NO: 390319 - DNA, 500 bp, Cannabis indica
atataaattaaatattattaaatgtaaatatcagtataagtagttaaagaatggagattggggatgagaagataaactgctaaccagaaaggcacgagttttatgaatactgctttaattagttttaattattattttacttatttttaaattatttttattaggttttaaatttaaaatagtttttaaagaaattatgagttgattcaataagattgtgacacctattatcctagtcatcaactaacaaacctcaacaattgagactagtggaattatattttaaaaattaataaaaaaaattattaaatttatggcaactcaaaacattgaatatttatgatgttatttattctattattaaaccacacttaataatatgcaattgatatttaacactattagagcttgtttagtaagtcataatgtattggtttaatacaataatataattaatattgagttgtattaatagattgtgtaatgttataatatatttt

SEQ ID NO: 390320 - DNA, 1721 bp, Cannabis indica
atatttatgttatgagcattgttgagtagttagcgggttttctatcttatctaatattatattaatagtgatataacaagttagtagatgttggacattttaaggtaactctagcattttccattatgttaataatgatatattgttgatatcaacatgtttatctatatctttgatttttcaaagttcaaaacgttgtttgacacaaagcattttcgttttgtctaaacattctttatccaattatatatcgattgttaatgtgattcattcaacagccaatctcataaaatttataatttttaagattcttgtttttagtcaaaattatgacaattattgatatgtgagtaatttgaaataagttgaaagttcaatatttttcatcttaaattatcataacttattttgttgatatatattttataaaatgtaatcttatcaaagtaattattagagttagcatcaattacttctaaacaaatgattgagaggttcgatgatgaaagccaacccattggtagggtgtattattttttataagaatgttaatctttacattctatttgcttaattcgaaaattttattgttgtggaaacatgtccttccgtagtaataatcttcaattaatttagattttgtgttcaaccaaataatgtcattatgctaatagtaatataagtaaatgcctaatgcactacaaacacaataagttttaattaaattagggtcaattttcgataatttttttttaaaaatataatcaatttgaagttaatttttagcacgaacagatgtaaaaaatataatcagttttgtcataacacctctatattgggttgttattaagctacattttgacccaaaaaaagagttaaagatagtaacgctttggaaaataagggactaatttgttattttacaatatatatgatccaattagtatcttttgcataatacaaaatttaaaatagcatttacacttaaagtgtaataatcttctcatattgaatgagtatcatgtaatatattaaaataccttaggccatgagtcattgtctaatttatattagggttatgttctagatataacaatggagatttcaaaggttttaagcaacatttttgacttagaattgaaaattgatcatcaacaggattagtggggtccagaatatattaataacattttaatctctgtaatgagttattatataaatgaattactttttttttattatttagcgcatcgagttgatttaatttaaaaatatagatagattgatttattttatctcatttatgatgtgagcagtcagatgcttggaaaaaatgtgttatgagtagtgagtgtgtaaattccaatatttattttgcttttatgaaaaatttgctttgttgcttgtacgaaaaggggcactataatgttttagcatttttatcgaataccatatgagtcatattgtccacgagaaatgtgagagttggaatggcccaagagaattgatcgttgaggattggatgacatttgagattagaggctcgcattaagcctacttcaagattggagttggtttttctttcactctctgctagcaaattaggattagagaccgacagatacgattgacaaatatgcttccacattaaaaatccaaataagcttattgaggcggctatttctcagtcttgggatgctttcttaaataagatgagtctt

SEQ ID NO: 390321 - DNA, 1610 bp, Cannabis indica
catttaaattctaaacctaatccaagtatcaccttataaatagataagtatagctcttatttttagaagattctagtttcctttgtcaaacagaaaataattatagaagagagccactatccaattcgaatttctcttcttcttcttttgaatattttgaagatatagagaattgagagtatgcccactcatgtcatagcaatccctagcatagtaaggaagactgtgtctaatcatattaaagaagagaaaattcaaattcagatcttgataatgctctgctacagataggaataaagggctagagatctaaatagaatgagacattattaccatcaatataagaatttattaatctcttatgtgtttattttattgttttaggaaatttatatttaggatgttaagttataaaattataacaaacatacatgttagtaaatctagattttagctgacgtcaaatcaaagcttgactaataggtctacaagcggttgagaaagccctttctatctatgttattagtaaagcctagtaaatgctctacaagaaaacgacatgcgctaacacttcgcgcaagttgcttgataaaataagctccaactactggtctcagagccatggtaatgttttattttcataaaatatggatttaaaacgatgtttgtttgatttggatgtgttcatgttggtttatgtacttaattagtaattgtttgctagttacaaatttttcacaaaaaatatttttttcgtactggaagtatttttttctagaaagtagataaaaaatttattaatttagacttttacagaactcaatttgaatttaaattgaattagttataattttttgaagcttgaaaatatctaggctagggttttctatcatacgcgcgcggatgaggggacacgacccatgtcgtcagggccgaccctgaaaatatatgggctcaagatgaattaaattttggggccctcaaaaatatcaaaagaaaagtgttatgggatttgaacccataaccttggacattatgtcatccacctcaaccaactaagctatgaatatttgttgcttataatataattaaattttagttaaataaaagcctaataatttttttattttttttattttgggccacaaaaagtgtgggccctacgcatgggcgcctatgcctagggccggccctgcatgtcgtctgtgcctcactcggacaaaattccttcagataagggcatgtccaaattaccccccacctgaccgagttttcacgccaatggaggctgcgtgcagcctaaattctcagccaaacaccctaaacacgcgcgtggggagtatgcattgcatactaccatactcccctgattttactattttgaccatttttcaacttttaaaaatcatttttcaattaagtaaaatttatattttagtagaaatttatgtataatcttatttttcaaataaaaatctaattatcagattaaaaataatttttattatttttttaattatttttgaattaattttaggatattagtaggctttaaatttagaaaaattaatttctcacaaacttgccattatggttatttttggaaattt

SEQ ID NO: 390322 - DNA, 533 bp, Cannabis indica
ttttaaaaaaaaatagtgttagattagataacctaaattatacttagttaggagttagatgtgtccatgaataatatttttgtcattatactgttgtaacatgcaaggcattactcaacatatgtgaacagagaaccattttgactatttatcattacaaatatattggttttaaaatacatgcatacaatttattaaatttaaaaaattaaaatttctcatttctaaatttatagttatatgagattgtcttttattttttgccaagcccgccggccttacctagctataggtgccatttgatcgagattgtattttgttattgcaattaaatttttgctactacgatttgtcttatctctgtaacataaatttgattgttttagtcgatcttgtcactaggggtgtgcataaatcgatccaatccaatgagaatcgactgatccaattacaaccgactaaatatttgatatccaattgtgactggatcggatttaatgttatttttaaatatccaattgaatcggatcaga

SEQ ID NO: 390323 - DNA, 1654 bp, Cannabis indica
gccaatttcatgacttcaaaacccccgccacgtgtcgtgtcgtatctctcttccctgactctatcgccttcatttcccctatccactgaccctcacggaccaaaaactctaaacccactaccaaacccaacttgtgggcctttacaacgtcgggcccctccactcaaacacatgacactgtgacatggactcaaggagatgtccaacccaataacaccaatctaccccaaactgataccaacccaccctcatttacggctctcctaaatgcaaccatgagcaacactagtgttcaaaaagctccacaagcttcaacatctagtttttcaagtacctcacaaaattctagtagctccaaatctactagttccaagtattgccatgtccctttgcccgtcaacatccctctccttgacactagcaaacggttggaggctatgaacctaacctatcaaccaggagttgccactccctctagctcaaaaggcacaaaaaggaaaagcaaaccagctcgaaagatagcttcaaaaggcaaactgagatggtcaatggggaactttgtcaacagatcaagcgctcccgctcggacaatcatcaggacactgaaatctctcttggaaacgcaggcctggccgctgagaaggcctacccgccaccatgaagcttgtgagctggaatgcacgaggtattgggagtgatcgtgcattccgtcatctctcccgtttggtctccttatgtaaacccgatattttgtttattatggaatcaagacttgctaaaaatgttgttgattttcttagagttaagctccattttgactccggtttggaggttcctaggataggtagaggcgggggcctcatgttattttggactaatgatgtaactttaactttgctttctcaatctattagtcattttgattgttatgtgtcgctctctttgaataatgttttttttccatctcacttgttttcatggctcacctattgagtcacattgaccccacacttggaagattttgaataggatagggaatgataaccccagagatccttggcttatcattggggacttcagtgctttcctaacctcgggtgacaagcagggggtaaccctgacaggggtccttcctctgagtttaggcacttgttgggttcctttaatctaacctcactagacctgaaaggccctctgcttacttggaataacaacgtggctttgccaagaaatatccaggagcgtattgattggggtattgttaactcttcttggatcgatctcttccctgatgctcttctcgctcatctcgtttgttttcgcatggaccaccgagatcttgagcttgttaccaccagcacagccattcccccttctgatcgtcctaataaacgttttctctttgaaaatgtttggctctcggaaccgaattggaaggcgaacttggaatcgtcttgggctaatcctcttagcccatatggagacattccgcgtctccttgcaactcaagccagctgcgctaatcagctaaatgcttggaaccacaataaagatttccagttcaaaaatcgcatcaataggcttgaaaaagaccttgagcatgctagaaatagcaccacttgggatgatcgtacgattggaaatatcaaggata

SEQ ID NO: 390324 - DNA, 1608 bp, Cannabis indica
gagagagagagagagagatgattagttagttagttagttaaccttggactgtttctgggttcatccaagaaatcaagaagaagtttttgattggtggttttggtgggaaaggagagttctttcccagcgtcattcaatccatagtcatggtcatcccaagtaccaataatggttagattaggatgtcgacgaagacgagaataaccagggttggacttggcctgaaggtacctggagctcatctcttgaggggaggaaggaacaaagcgagccacattcttccatggcccaatggtcctctccttcccaaaaactctaaaggggcgctttatgtctccatatatgttgtcacccatccaaatgaagagctggggattgaatgaaatgatggcattccagatcgcttcctgttcctgagaagcgctttggttggcacatgatccaaaagcaattcttgagagtgggatcaacccttctccggctccgcccaccaccgttaattccaccacggttgccgttaaaccccaccacaaccaccaatatcccatccgactaccaggggattattatatatttcttatttcagtagcttcactcttgatcttcaaacacacaaaaaaaggctccctttttctagcaaaggggaaaaaaaagcaaaggattctatttctaggacatcctacaaaatagaagaaaaaagtaatatttttctatataataataataataaaaaaataatctttagtaattttagatacaatttatgggacacgattttatcccgtgatgtactttcacgaaatatattatgtggtacattataaatgggtctcacggtacgtaataataggtctcaaggtacgttactattttttaacccatctaacggctgtcgtacatcacggaatacattccgtgaaagtacatcacaagacaaaatcgtgtctctacaatttatatagaacaaatcgctatgattatctctatgtttatactaatttagtgtagaatctacattaaattggtgtaaaaaaaatttatttttggtattgcaatttcaataatttacactaaatatatcattaaataaatatattttacttaaaaactcttacattttatatcatttacattaataacatataatagttaatttatagctactagtatgaatttaaaattttaaaataatttagtaaataaaatattttataaattaattaaacatacattttttaaaaaaaaataaataaattaaaatcttatagttgagcctattatacgcgaccatttatttctgtagattttgtaaaacaataagttaatatggtggctcataacttcgctagagctgcaatattatatcctgattgtcatttcagattggagtctgttccaactgatttgctaccttgtttggtagttgaaattaatggttaataaagatgaattttccattcaaaaatagtggaattgagagtgatataattttatgaaatcgtttattttatttaagttatatacagtagaacctttatttaagaatactctattcaagaataacctctaatttgttaataaaaaaaaaatcaagtcccgatttgggcc

SEQ ID NO: 390325 - DNA, 983 bp, Cannabis indica
ctttttaaaaaaaaataaaaaatatgaaagaaataatataaggtaactggttacccttttatagtaattaattaccccctatggttatgtagttacccttagataatataaaaactctttgtaatatcctcaattattgaaatgaggtcatgaaaatctctatttataaagatcttttattctattccttatagatatcttaatatgtgtatttatatatgcttaaaaaaaaataatacataaactacttttttttggcaaattatatatacatttacatttattttttaaaatttttgttagtgttctataaaaataataagaaagctacgtaaacaagaaaataacattcaaacaatatcaaaatacaacaaaaaataatatgtataaataacaaaaaaattaactacaaattaataagagtacatcataaaaatatatcaaagatcgtaagtatttttgtaattttgtttttgttatttttgtattttttaaaaaaaattatcccctttaaaaaaagtgtatttatatatggtgttaaatatgtgtttatgaaatttggtttggtttgaatagttaatgaaatgaggcctatagggatagaagaggcccaatgaatgcttaggcccacaaggctccagcccaaggttattctctatacctacagaatgcagctcatatcattttgtagggtagaaccacttacgtgtagtcacttaacccatcctatggggtagttacttaacataccccatggccggccatgatggtgtgcaaggtggactactgcaagggcccagtatatatttttttaatgtccaatattttttttaatgaagttttgagaggaaattacactcttataccctttttatattgtactctttcatttttacctttttttaaaaaatctatcatttttacctcttttttaaatattgtaccaattttgcccttatcacttcaagatactctccatgtga

SEQ ID NO: 390326 - DNA, 996 bp, Cannabis indica
aaaaaaaaaaagaaaagacttttaaacattccaacataacaaccatgacagtcacaggtctcactcactccaaatattcaaggaattaccagtagtctaccactaccagactcaaaatgatattaagtcatcctttgctgcttgtttcttaccatcttgcccaccttctgaggtaccgccactacctttcttcccgaatatcatttcgtcaaggtcatccatcatgtcgtcgttgcttcctccctgggatccaatccgagagccagctggctttcgaaccaatgcctcctcctcccttgtatgccggggtgactcatcaggctcgacggcaacaggtatcatagctggttctggctcagctgaaacacctaatggcttcttcagctcatcatacttggacattactttctggatctcatcgttcacattcaatgcctcgaatagcagggcctcgttatctcctgcagtttcaatcattctctgtatggtagcctgggaccgacgacattgctgtacaagtgtggttgttaagtcatcctgccaaaggaaagaaatttatgttaacacatgatcaagcgtaaacactatcatctcgtctcgacattgtcttaacatttttctatcctgtttgaactgatacgtccttgtgtacccaacacataataccgaactggctttctttgcaacacaataacaagtgttagcttataaaatcattgaatttgtgcatctataccaaacagctaaattaattttgttttagctgatggccgaaagcttgtataatgatgagttatttgtgatctcaatgtcaactcactaacatggagaagagagtgatagatacccatattcaagcttaagagagtagtgagaaaataacaacttcgtgcctctctcatttcaatttaacaggataatagattataatcagcatgtataccctgatcatggaagataaaaattgtgtgatagacaaaaaaagtgaacaagagt

SEQ ID NO: 390327 - DNA, 1159 bp, Cannabis indica
caatcctttttattaagtggttcttttcttttttctctcgttctcagttgtcctgcttcacgaccaaaccaaatgatattgcacatcgtttgtaaatcaattgataataacaacaaaacgttattttgccttgtctattttcttaaaattcttttccacatactttgttttttttttcattcacctgatgtaatttttgggttcactcgtttttaaatgacatatctagcatgattattatatcgtttatatataatacttgtattcatttttttgttaatattaaaatttcttactaaatagaactaaaacaccatgttcatggtagagtgtctggagacaagaggctccagcccctcaatcaatgttatttctcggtgatcgtttcactatgtaattttgtcccgcttgttttaattttataattgttattagatattaaacaattttttatttcatttttaaagtaaaaattaacaactacatgacttgaaccaattttgaactaacatactgatttggcactacttaaagtattgaaaataatattgagtgtagaattacctctaatgagaggtcattgtcactatattttattaattcaggttatctgcgtaataattttaaattataaagagtttcattacaaatttttcaataactaagtgcaattttttttttttgctaaaagatccttaattagtaacaaattacaaaaaattcattaataattattagtaatttaactttaaatattattaattttaattaagattttataaaaaaaaaattatgaagctactatcagattacaaattaattattatttatttatttttaatttttaaattaatcacaatcatttaatagtaattcaataactaaaaataaatataaatatagtgattacatatttgatgtaactattgaaacctcctcttattctatatataaaattgggaccaaattggtatattttttagaataaaattttccagtgtattcatttaaaataaaatagatgtaccgattcattttaatctattttggtatttgaaataattttttagttgatttttttatggtcatgtacgatagaattatttaagatatcttgcaaaattttaaaaatttaaaaaattttaatatgctaaaaata

SEQ ID NO: 390328 - DNA, 1076 bp, Cannabis indica
aagagttgttgttgtcctcattttttgaagggagtaattatttgtgttgatggttttaaagacaagttcgggtatttatttttagggtgtaagtggatttttaagtttctataattgtcatcctttttttttattttcttgtgattaacacttgattttttcttatgactttgaatgtaaagacttctatgatttttttgctataagatttatactggttagaattttggagtatgctttctttgtaagtttatacgaggtagtttattttacatactaactgtgaaggaattatggagctatttttttattaggtagtttattgttttatcttttatctttattttaatatatttatcttattaggatatgttttaccatttttaatacaatttcttttatatgaacttattctttgctttatattatattgtaggaaatttttaagttgtctaagcagaaatattagtatttgtaagaaccattattttctgtagtgacaaattatgtccagttgcattccagttgcgtctgggactcgtagtgttttgtctggagttcgtactgttagtgttagtccacgtcagcaaagatattttaggttttaattgttcagatggtaacagctgtctatttcgggtttcttggtttagctgggtataaatacgatttctgggtattttgttgacgaactttttgatcggagattagggattacgtttctttcttcttgtttcttctttatgttccatggcaggtgatctttgagcttggaggtattactccatagttgcagatcaaagcttgaagatgttgagttcagactgaagggatttcagtatcatcttcatcaccagatctgaagggagttcagattgaagaagtgttgaagagagctcatcattcacacaaggggatcttgtgtctccaatcaagggtcttggttggtatgggtatagattcactgtattttgtaaaagagtgtattgtttacaatattgttggtttttgtaagatacatctttgaatatagtgaaaggtattaccctggttcggggaacccaagcactagccgc

SEQ ID NO: 390329 - DNA, 619 bp, Cannabis indica
ctactccatcaattttggcctccaaaaaactgcctttataactcctactgtttacggactaagtgctttcgcgcagccagttgtacagattagtttttccaaatttagagcggtacaaactagatttagagtggtacaaaccgaattcagtgccgctcccagacaaacgaactaaaaaatggaagctctagagtccaagttaagccacttccggagcaagaggaattctaagggtccaggtcggaacaattcagcgaagaaaggaaagactcaagagtccagacacttcgagtatacaagccttgtagatacttaagagaatgataaaataatttaacctagtgtatacacaaaagacgatatatatatctgtatatatatgtgtgtatgtaaatatagtgctataaataaatctaaggtgatggtggtattattgtgtgggtagcaaaattaataatagtaactgattctcatgttagacttgtttgtagaagtagtacgataactatgggctacgtgtagtggtgtgttttggtgaatttaatttctaaggttatcataataatataatttatttgttaaaatataaaatatatatttttatatattttgtgaatgt

SEQ ID NO: 390330 - DNA, 833 bp, Cannabis indica
ttttttagaaaaaaaatttattcaggttctcaaatatttgtaacaactttgaaatatttttttcatctttttatcttcaatttaggctattaattaagaagaatcagttcagccgagctctcatgtggaaatagtggtaattgattgtctctcgtatctcaaattttttactaaggtagttatctaccactgctcgtgtggagagatgaaaactccccatagagtggcaaaggaaagattacaggaggatcattcctaaattaaatttttggaacactaatctttcttttggtgttctgttacttatattttattttttgttgttatgcgtatgcgtcgttaaaattttcagagatcatttatttgatcttctattttattggcctgaagctttttccttttaatcttttaatgaaagttattatttttttcaaaaatatataagtaaatgctttattatctatctgtctctatatatcattctatcatgcattctttaactttttttactagaaaatatattttgtttgagttataatttttttccaattaataactaggcttggtgattttattatttatttatttatatttacattttgaaaaaaaaaaaagagtttttacaaatgccaataataaataggaaaatataaagttgtatacgtttactgaagcagaatgtaattctgtttctgcagaaatcagttttgcagcaacaaaacagaacagacagaatataaaaataattgtagaaaattaaaacacttgacacaagagatttgtacgtggtatcagtgttctttcgaacactcctagtccacggggccacgccc

SEQ ID NO: 390331 - DNA, 822 bp, Cannabis indica
aaaaaatagactaaaaatttttatctagtctaattttgatggacttaaaagaagtttttttagtagtgagaacaagtaataataaaatttaaatattattttattaacataaataaataaaattagtttttgctgtatattatatgtaagtactagatcaaatcagtttttataaattggattttgaaagtatcatccagcaaatgattcaacccaattaaaactattaacattcaatcaaattcaattgtaatttgatatccaagtactttttgtaatttaattagattggattgattctgtgtaatgaaattgtggttcagatgttgtccacccctacctaagtgcatgcatacgacgaacattattaaagatgtctcaaattttttagtatgatgcggtgtggacagtttttgcgatatcgatctcctaccactgtcacaacattgatttttctaactgcaattttattttgctagctaaaagtgtgttccttgagacatttcaaaacttattgtggctatttgatgaaatttaatttattatcattaaattatgcctatcatcacaatacaaaaaagaaagaaaacttttttgtttaatttacttaatattatttactttcattcaaatagtacaaacttattagttcatgcatgttatatatatacatatatatatatatataatgcatgccatattttttttatttaaacaccaaagtgtagtaacacactaacacttgagatcaacgtatacatataattatataatctgtactataaatatatatatatcatgcttattctcaggtaccttcgt

SEQ ID NO: 390332 - DNA, 542 bp, Cannabis indica
atatataaagatatatttatagacaagttgactaacattaacatgcgaccaactcccaccacagcccacgagtggaggtggtgatgatcatctcaaataccctaattaaaagacaaatgaatataattcatgtattaattaaattaattatgaataaattaaacatatattatgactaagctaattgcaatactccactcataatttacagaattatatattgggtttataatatacgagttcttttcaattatatgtcgttaatgaaaggataatatgaaaaggatgatgatgtatatgttagactatatatatagtgtatgtaatatagcatatataaatgatatgaaatgcggaaaataaactgtaatcatatctataatatatgcaatgaaaggatcgatgtacctccagccattgatctttgagcttcaatccctgcgatagcttcagtattggagttcgggcttcctcgctctctcaactctctttagatggaatttgctgaatgaattcagaatgagtgaggagctcggggaccg

SEQ ID NO: 390333 - DNA, 1387 bp, Cannabis indica
aattctgggtccgccactgtatggtgggatgttgtaaattgtttggtggatataatataatcttattcataaaaaaaacttagtcgatgacgtggtcatgtttgcttattagcaataatcttatggctaacattaagcattttattgagtccatctctttttgttacgcagattatgactcctgtttatttgcctcttccgaggatgttacaacccttgttggtcaagattgcaatgttaaagttgaaagggacactgtgtgcattgtggctattgccagggaccacaacgaatctgttttgtgggtggttacaaacaagctcaatttctctgattctctcattggagaagctgcggcttgtctgttagctatgaaaacggttgtctctttacagcatcctattgttttggtggagagcgattctaaaatagttatcaagattctgaggggcactcgttccaactgggagactgacaactatgtgcattattgtaaacacctctctactaaattattatgttgtaatttttcttttattcatagatattgtaatttcgcgacccataacgtggttacgtgggcttttgcaaacaatgtaacttgtatggtaaagctatcatctatactagacaatatcttttgtaacgatgatgaggtttaattttagttttaatttataaatgcctttaaaaaaaaaacttaattagattgtcatgctcatgcatgtgcgtacgttcaaacttattataaaagtgatgttgatttattaatatataatagaacaacattttattaactttttcatgactctaggtgatgatcttattaatctcttcgtacacatatagaacaaattaatatttaagctctgttcagtttgacttagaaaataacataatatatataatactacttgaattctcatatgtaattaggtatgatttgacaaagtttatatatatacaatcttgattaattgtgttaggaatgtaataccaaacctctttaacatattgatgatttgagcgcctgtcccaatcagactgttattatgttattgtttctcattgttcatttcgactgaacatgagtacaaaatcttcatttttgttgtataataaatttagactgaagtcgttttataaccatatatacacacaacaaacattataaggatccataaatttaattatatatatatactgttaatatataatattaatggtcgttgattttgtcccatatataatataccgaaacttacaaaaatattgcatttttaccaaatgttttcaaaaatattgggacacggcaaactttatatttttactgtccaagcccatttttatttcttttatactgcccaggcccaatatatttactttt

SEQ ID NO: 390334 - DNA, 441 bp, Cannabis indica
gaaagagaaagaaaaggaaagaagctctttattaattgattcaagaatacagagtgaatatctatacaagtgtaggacaatctcttagagacaatgagctagacaatcgtaactaacagatcttaacagtatttgataactaacataacagactctgtacaactaagtttcattttctttaacattctccctcaaactaagtgaacttgaacacatgacacttagtttgtcgccaagtttagcaaattgattgttagagattaatttagtgagacaatcaacaacttgatgtataacaggaacatgagagatttgtatttctttgttgatcaccttgtcacgaacaaaatacaaatcaactttaatatgctttgtatgagtatgtaaaactggattagcagccaacattacagaatttaaatgacgtttggttggaggtaa

SEQ ID NO: 390335 - DNA, 675 bp, Cannabis indica
gtcagtgaaggccacgtaggaaggagtcgtacggttgccttgatcgttggcgattatttcaactcgatcgttgagccatactccaacgcagctgtatgtagtgccaagatcaattcctatggctttatcagactttgtcgccattgttacagagtaataagatatataaaaaagctcaaaataacagattttttatgaagatgatagttaagagattttcttttatatatatatatatagtttgaagtgagaaattcgagaaagtaatagagtatagtggatagttctgatcttgagcgtttgatttttggttctgaacgcgggtaaatatgggtaagtactaaaatgggtctgagttgtgtggaaattacttcaataacattggttttggttatgaaataaatagaggtggtgagggtattttggggagaatggatagttttgtcggaggtttcaaacttatctgaggagaggagtgaaggtttaggtggtattgacgtggtagggttttatgggttttaggtacacgtgttgacttataaggtcaaagatttttctacgtacccaaatgccaccgctaatattaatcaagaacgatctactgttaaaaagtgttatctcatacttatacatcaattaattttttatttataaaaaaattaaacttctaataaa

SEQ ID NO: 390336 - DNA, 1468 bp, Cannabis indica
tccttttttttgaacttttcaaattgttaaaaaattttcaataattacagatatttgatgtggacaaaagtttaaaagcatgtcaaaattaagaaaaaaaatcttaattagttatcccaacattaaattgtataattatttatattgtggtagttatataaaatatgatttcaattacatgagaactccttttcaaaaaaaaaaaattacatgagaacttgatttatttatatatcacgtgtacaaataatatttttaaatttattttcaatatcctaaattattaattaaaaataatagaatgattttatataattggagatctatataaaaaattaggattaaaactttaaatataaaagaaaaaaaaatagtacattttttattgacctcttgggtatgttaaatgttgttattagtcaacataattttaaaaatatacttaatctattttgttcatgaattagtatagatactctttggtatgaattcatctcattttttttttatggatgtatcatattattttcaaaattttatgaattcaatattttcaatgaagcttctttatttttaagcaagagtattttcaataaagttataaagtaaaggtgcttctattgtgaactccgtaaaaaaattaagtgtattagtgaaaaattcattgtacgtaattttgatatttgaatagttatagttttaattttttatatatagtagtgtatattatagttatttataatataaaaaagaaaaatagagatcaaacaatctatttctcacaaaattatatttaataaattatttaaattttattttacacatataaattattttgaataaatatcttaaataagtgtacattgtcgtattcatgtgaagaaaaaaaaattatgtaatttttcaaaatagaattggattataaaattttgtaaataataataagagtaaatactattttggactttgcgttttgcaaaaattattaattggactctctcttttgttaatgacaaaattgaccttgtattttttaaaattgtacaaatagaattcttaactgattttttgtcaaaataaaactgaataacaatctgatctgtagatgttatgaaaaaatttgttatattttttgtatctattcgtattagaaatttggttaaagttagttatattaaaaaataaaattcttgaaaattgagcttaaggttttatttttactattttaaaaaatataagatttattttatcatttaacagaagagaaaacaattaataacttttgcaaaacaaagtttaaaaattatatctaccttactaataatattaatgggtgattctacaatgcactcctttaaaagagatgtacaaatacacttttgacttgtttcggcatccagaaaaattttttagtctaatttttttcatattcatgtacgctatagctatttaagataatttacaaaat

SEQ ID NO: 390337 - DNA, 837 bp, Cannabis indica
tttttttcttaaaaaatatatatctacatctttcttttttcattgttaagaaaacatgatttctctttttcacatcaattttaattagttaattccttaaaaaaaaaaaattgttattgccaaaatttgattcaaagtacccgataaaagttattggtaatagatttacgaaagtataaggtaccaaatgaatataattctttatcttaaaattaaaataattatacataaattaatttatgtattatcattacagatgattctaatttgggtttgtaattggtttatttttagttaagttatgaattattattacagtaaaacctaatattcaacaataatctttaatttattataaaaaatttgtttcaatttgggccaactataaataagaataatttttaaattatagggggtatttatataaatataaaaaaaataaagctagtttgcataaatatgataataatatttaatagaaaaaaaaatatggtatttcaaataaaaacttaacatatatggcatatgccactttgaattaccataaaaaattaaaattctctttatattttttttttaaaaaaataaaacaaatgaaactacagtgatcgtcgaagttgtcactgatgctagaaaaagcgtcgcagtagttgccggtgccaaaaaaatcgctagagttcttgttggcgccgaaaaagtcgtcgaaaaaaaaaataccaagaaattagtttttttatgtttataccatttaagtacttaaattatttataaatacttaagtttatatcaataatctttatattaagagtaatttacagcataaatatttaagtttaa

SEQ ID NO: 390338 - DNA, 1602 bp, Cannabis indica
aaaatagtatttaccctttaaagttttttcatttttgtataacttacttttctttttgcaaaattgcaatttgtatgataacacacacttataaaacacaccatttaaattcaggaaattcaatgtatgtcttttacatatatttaaataaatagtataaaagtgaaaattcaaaaaagaatttgcctcctaaaataaaaatgtatactacttgttaagaattttcctggattttttacagttacagaaatttagttcttctgttaggttttattctattattcctctaaactttcaacaatactgattctgccctctaaaatatacgactggttaagaatcacttatgaactttaaaagttaaggaaatttagttcttctattaggttccgtcccattattctgtttaaatattgacatgtctttgtaaattagcaactttgctctcttatgttggattaaaatcttcaatatggactcatatgtatattagtatattgctatttgaaatttttgactcaaaacaaagtgataattttagtaattgtgagtcattggatattaagtatcatgaactaaatgtgtaaataccctaagcgatatttctaatttattgaggggctaaattaaaaatacttaaaattaataacctagttgtgaggttataattgacgtaaagtaattaagatttttttgtagtgttaaattattattatattttgtatgtattgtattgtgtagtttttggtaagtttaaacaaaaattaattatttattctcatatttattttgactttattttgttactaaaaatgtttaatttttttttgagattttctttgacgattgagtatctctctaaacaaatctcaatcagtcaagaatcaagatcagaaaacttcccaaagaaaatcaaagtaagaatgagacttgatcaagtctagattcgcttattgctcccacaattgtgatttaaaaattaatatattatttatgtttttaatttaattaaaatcataaaggaaatatatttcaacttatctttcgtaagatggactatatatttagttcttattattttaagtcaaagattattattaattatgtgaacaagtttaaacaagaaagagtcggattgatcctcattaaagccgaagattggatattgtcgtgctgcctatttttttgactattttgtagctatagaatttggaaattagaagaaaatgaagaattattttggaacgttttcttgtgggcttaggttggttttagattgtgttttcttgttcaatataagtatttttatctataaaaactcatattgtatgctagagtaaggttatttcttttgaattagaaaggattttattaatcaaacgaaacatattgttgcctctgaattcgcctaaaatatgtggaccagtcgaatagggacacgtggatcagataacttgtaaatatttgataagtctttgtacgccccaaggaagcaccctgggcataggtcccggaggaggcacccggagtacaaggtactcccggaagctcgcatagcatgaagcccctccgggatgtgtcaggcctctcctgagcaatcaa

SEQ ID NO: 390339 - DNA, 604 bp, Cannabis indica
tttttttttttataattttttactttaaatctgtatatatgcgtgtatccaatatgtatagtttgtatttgtatgtacatatatgtatgtattatgtatataaatatgtgtatgtgtgaatttgtgaatcgtgtatattaatatatatatgtaattgtatatataataatgtatatgtatgtatatatatatatatatgtgtggagtgacgacagacctaacattaaagggggcgttaattttttttgtaagacatgggacaaaagaacataaaaagagaaccttaacttctatcttatatacaatctagtttaactattacaccaaaatcaaaactactattatgtttgtaaatattattttttattacaatatatgttataattaattaaaatatatatattttttttcttgacttttttagagaggacgactcatttatgtaggtccgcctctatgtgtgtttgtatctattctatataaagtgtgcctatataaccgaattcttggtttatgagaaatttgtgggagactttttatttatattaaaaataaaatgatttattattaaaaataaaatagtttaggagaaattcatgggtca

SEQ ID NO: 390340 - DNA, 719 bp, Cannabis indica
aaattttgcagatggctcctgaattgaagctgctaatttccgagcatttcacaggtctcttacctattagggcacaaataggtttgtccatattaaagctaagtttgatgaaatgaatttgactaaaagggttttagccagccctttcggaccattctgggaagcaagaaaatttgactttcttgggcgcattggtccacagtctactcttgcggaagatgaaagttgattcggagaaagaagatgagatatggtttaatgttcgtaaaacggacatgagatttggtcagttagagtttggattgataaccgacttacttatgggtagtggccctacagaggaagagatagaagccaagtccagtgaccgtttagtgaggacgtattttgaagggaagagtggtgtgcagttggatacattattgcttcaattagggagatgcgatgtagcagatgatgtgtacaagcttggacttattgcatttattgagggagtattggttgcaaaagaacgtaatgtccaagtttggccaaagatgttgaaatttgttgcggacctcagattcttcttcaaatatctgtggggcaagcttgcttttcaaaagttaatgtggtctatgagtaaggacatgactgttgggttttgtgccctaaataaaacccatttcaatataataagatttacttattaataaagatcagaaataacatttaatgtt

SEQ ID NO: 390341 - DNA, 1294 bp, Cannabis indica
aaaaaaaaaagaaaaaatctgataacaagtgtcaaattcaaaaaatatatatatatatataaaaaattgttgcaatcttgttgaaaaaatagacaaaaaattctctcatgtgattagaaaagggaaattaggattgtctgtgaaaaatttcttttgggtaacatgattggagaagcttatggtataggaaagcctaaatgaccgtttcaactacccttacctaagcctaacattacaagcctagaaagatcttctgattcttggttttgcattaatttatattagtggagaatagtgagtattgcaagcatatgaattttgagttagtggattgatggttgtaattgacatgcataaagtgattcaattgttagttaattgtgttctatggtttcatgagctggatgaaattaaattgaagtttgtcaagggcgcaatgaaaatgaaattctagattgcataagtgataatatttcataacactataagaaaacatgcttttgtcggtgcatttttgcgctgacaaaagtacaagaaaatgtcagtgaatcttggttggtaaaggactttttaccgacgcgttagtgaaatgcgccggtaaaactacttttaccggcgacaaattgcgccggcaaaagtgaatcgccggtgtaaaaggatacccttatttgctctgaacctccttttataattttttgtcggcgcaataatgcatcggtaaaaaggtttccgttgtttctcagattggcgcgagcagtattcccacctaccaacatttttcacgcgagaatttttccccccaatttcttgtaggcggtcaagattctcaccaaaaatttctacacttttaccagcgcataactcgcgccatttggcagctcattttgaatctttcaccggcacatatgtaataatacgccggtattgacttcctttgtgccgaaaaaattaaatgctgaatcaaagtggaaattcaacattttatttattctaataacttttaccggggcaattgaccaattgcgccagtaaaagtaagttttcttgtagtgtaatcatgttattgagtctactttaaaattactcatgttctggaaattaacttgtttaacttttatttttcatttagtattttactcgaggacgagtaaatgtttagtttggtggaatttgttaggttatttttagtattatttttaagttaatttttagtgagtttttaatttagttctactcttattttgagcaattttatgctttttatctattatttttgcagatttaaaatagaaga

SEQ ID NO: 390342 - DNA, 720 bp, Cannabis indica
aaatacctgtgaactttttaggtgattaatatattttgttgaactattaagattgttcgattcaaaaatttctattaaattctatttaatttaagtttactaacgtaacgattgtctatgtactaaatcatgttctccaaactttaatatgtactaaatcatacatatgaactttgacaagtataattaaattatgtcctttaaacttcatcgacattaaatatatatctgctatcaagtaaaattgaacaaagttttttaatctaatattctcaatgaaggaaaatttttaactttataaaaaactctgaaaaaaagattaagtacatattaaagtttggaagaaatatatttttgtttttagggaggaaaaaatctcttaattagggaaaaatattaaaagcttctggcgtgcattacatgcaaagttactgtatataaaattttacgacccgcgtgatgaattaaatatatattctcttttattaggtaatatatgcttcttcttttgagtaaaaggtaactttgaaacataagtattaccaataattaaaaaaagggatttttttaataatatacttaaaatacaaattaattacaaaaatactataacaaatctaatttacaataataccttgccacgtcttcaaaaaataccttaattcaaaattaatatgcctgaaacaaaattaatctaaaattctactttttatttttaat

SEQ ID NO: 390343 - DNA, 631 bp, Cannabis indica
attaaaaaaaaaatataaaaagacttatcacaaactttgttttgtttagtgacttccattgatgaaattaaaaagtgttctctttcattagatgattaacgattggagtttggaagaaacaaaattttataataattctccttgtcagatacaagtttcagtgagaagatagggtcggccctgagttaaaaacttaaaatgggctataggcaaaaaaaataaaaaaaaatgggcccttactataaagataaataatatttttaaaaattattaaaaatatatatgtatattttttaaaaggcaatttttttattgggcccctaaaatgagtgggccctaggcgcgggcctagcccgcctatgcccagggccggccttgagagaagataaactatcttggtgcaaattgtaaggtatatctattaatgtaattgtgtattgtaatttatctttatttttttatttattattgaaaaatttatttagagttttttttatttggattttgtgacatggttctttttttttttcttcaattgttagatttgcaaggttattgtggtaggaatcataatttatggtacatattttgctaagtgtgaaatatgaaagatttgtgcataattttttta
